United States Patent Application Publication US 2024/0254512 A1 - sequence listing, part 2

SEQ ID NO: 2085 - protein, 111 aa, Betatorquevirus sp.
LAERARNLIYFILQMSKLYKPLNISLNHKNLQWMNAQVALHDMHCQCDEPLRHIILQIIEKEPTIKFNKEESIKIQKCLTTGEEDDGDVLGAGDLDTLFAEDVFGEEDNDG

SEQ ID NO: 2086 - DNA, 2964 bp, Betatorquevirus sp.
cgggtgccgaaggtgagtgaaaccaccgtagtcaaggggcaattcgggctagctcagtctggcggaacgggcaagaaacttaaaataacatttattttacagatatgagctctatctggaagaaacctacattttcagtgagacaacaagaaaaccattggctcggaattgttttcagcactcatgacagcttttgccactgtgaggatccttggttacatattatgattcttctaaacaaacaaggaaaagctccaaaacctgaatccgaagttcgtaatataaaatgcctccttactggaatagatacaactactaccgaagaagaccatacaaaagaagacgttattaccggtttcgacgatggagagctggaaaaactattcgcagaaaatggcacagacgaaaatggagacgaaggaacaaggtaaaaagacgctttagaaagaaaaaacttaaaaaaattgttctaaagcaatttcaacctcataaaataactaaatgtaaaataattggcaaaaaatgtttatttcaaggtagtcctttaagatctagtaataactacatacagtactgttattcatatgtacctgaattatatcctggtggtggagggtggtctttacttgtacatagcttaggaagtatgtatgaagactatcaacatttaaataatgtatggacaacaagtaatgcaggaatgcctcttgtaagatacatgggagtagaatttaaattctatcaagacttgtatacagactatgttgttatctgggataattgctggccattggttgacaccccatacacacatgctaacagttgtcctagccaaatgcttcaaagaaaaaacaaaataatagtgcccagcaaactaacacaaaatagaaaaaaaccatacaaaagatgctttgtaacacctccaacacaaatgcttaaccgttggtatttccaaaaagacatttgtgacacacctttagcaatgataaccgcaacagcagttagtcttacaaaaccattttgtgacccaaaagcaaaaagtaacaacataactattaactgtctaaacccacacagatttagaaatcctaactttcaaaacccaccaataaaaacaggatacagtccatttacagcagacaatctagaaaaccatccaaaaatgtacttatatggttcacacacaataatacaaaaaaagaaagatttactaacattaacacctttatgtaataccaaagacaacagagctggagcaaccttatcacatttactaacacaagataacgcaaataaatttgaaaactggggaaatccttttaactccatttacttttcctcagacgaaacacatatttaccaatcacaatacagcccaatatcagaacaagtaacaagcacatggaaaagctatgcaaataacgatggaaatctaggtagtgaagttacattaatggtaggtcacaacctctatgcctgtagatacaatccagaaaaagacacaggagaaggaaacatgtgttacttactaaacaattcctcagcagctagcctagaacctccatcaaacaaaaacctaatttttgaaggttttccattatacatactactatggggatggacagactttataaaaaaactaaagcaaacaattgacattgacaaaaactacttcttagtaataaaaaccccattttttgaagaaaaactaccatactatatacctatagatgatgactttagagatggatttgaaccctacactccacacgacactaacaatgcacaggcctacatttctccatacaacatgaaccactggtatccaaaactattatttcaatatcaaagtattgaaaaaatttgtagatctggtccagcatgcgctagaccaacaaacgacaactacttacaagcattctacaaatacaaattttactttaaatggggtggatgtcctaaacaactagcaaaagcatatgatccttgtttacagtcaaaatggcccactcccgataacatcactccaggacttgaaatctcgaatcctaatgaaccaccacaaacccacatctatgagtgggactgggaagaagactacattaaagaaaaagctttacaaagaattagaacatacacagagtctcctaaacaaatactcttccttacagactcaaaacagaatcccaaaccactgcaaatcaaagaagcgaaagaggagacagaaaacgaagaggaaacgcaactactcctccagctccaccgaatccgacaccagcgaaagcagctcgaactccttctccagtcaaaatacggacaaataactacacaataaaacaatgtaaaattaaagttaaactatttcctagcccaaaaaagaacagaagaatgacaccaaaggaaagagaactagaaaaagaaatagcaactatttttaaaagaccacaaagacagtttatatttgatacacctatatacccttacataccaccaacaccccttgctaactttgacctaaatttcaaagaataaatgccaacatacttcacttaatggtgtctgtttatttaagtttaacctaaataagctgtctccgcctcccaactatgttggcgccataaagggggctccgcccccttacacccccaagggggctccgcccccttacacccccggggctccgcccccttacacccccaagggggctccgcccccttacaccccctaataaatattcaacaggaaaaccacctcatttaaattgccgaccacaaaccgtcttatacttcccctttttaaaaacacttcccttttttctaattattattcattaaattaattagtaaactgcgtaaatccggggagtggcatctaaactatataactaacaacacttccgaatggctgagtttatgccgccagtcgtagactgcaccacttcagtgactgcaggctgagcttggg

SEQ ID NO: 2087 - protein, 682 aa, Betatorquevirus sp.
MPPYWNRYNYYRRRPYKRRRYYRFRRWRAGKTIRRKWHRRKWRRRNKVKRRFRKKKLKKIVLKQFQPHKITKCKIIGKKCLFQGSPLRSSNNYIQYCYSYVPELYPGGGGWSLLVHSLGSMYEDYQHLNNVWTTSNAGMPLVRYMGVEFKFYQDLYTDYVVIWDNCWPLVDTPYTHANSCPSQMLQRKNKIIVPSKLTQNRKKPYKRCFVTPPTQMLNRWYFQKDICDTPLAMITATAVSLTKPFCDPKAKSNNITINCLNPHRFRNPNFQNPPIKTGYSPFTADNLENHPKMYLYGSHTIIQKKKDLLTLTPLCNTKDNRAGATLSHLLTQDNANKFENWGNPFNSIYFSSDETHIYQSQYSPISEQVTSTWKSYANNDGNLGSEVTLMVGHNLYACRYNPEKDTGEGNMCYLLNNSSAASLEPPSNKNLIFEGFPLYILLWGWTDFIKKLKQTIDIDKNYFLVIKTPFFEEKLPYYIPIDDDFRDGFEPYTPHDTNNAQAYISPYNMNHWYPKLLFQYQSIEKICRSGPACARPTNDNYLQAFYKYKFYFKWGGCPKQLAKAYDPCLQSKWPTPDNITPGLEISNPNEPPQTHIYEWDWEEDYIKEKALQRIRTYTESPKQILFLTDSKQNPKPLQIKEAKEETENEEETQLLLQLHRIRHQRKQLELLLQSKYGQITTQ

SEQ ID NO: 2088 - protein, 108 aa, Betatorquevirus sp.; identical to SEQ ID NO: 2058

SEQ ID NO: 2089 - DNA, 2964 bp, Betatorquevirus sp.
cgggagccgaaggtgagtgaaaccaccgaagtctaggggcaagggcaattcgggctagatcagtctggcggaacgggcaagaaacttaaaataatatttattttacagatatgagctctatttggaagaaacccacatcatcaccgagacaacaagaactagcttggagaaacttaatctatcaaagccacgaccaattctgccactgtgaagatgtggatttacacttcatacttttaatgaataaattcggaaactcaccaaaaccagaatctgaaattaaaaacataaaatggcttataacaggaaaaccacataccgaagaagaagatggcgaaccaaaagacgaccctggttttctagatggagaactagaaattcttttcaaagaaaacaatggagaagaaaaaaatatagaagacgcaactacaaggtaaaaaaatataaactacctaaaaaaaagaaagcaataattgttaaacaatttcaaccatatactgtaaagagatgtaaaattaaaggatataaatgtttatttcaaggaggaccagacagaactaataataactatattcaatatgtatatagctttatacctgaaaaacaacctggagggggaggatggagtttacttgtattctcattagactctttatttgaagactataaacatttagaaaatgtatggacagttagtaatgcaggcttaccactaataagatacagaggatgtcaatttaaattttaccaaagcaaagaaacagactacgttgttacttatgataactgctggcctatggttgacacaccacataaacacgcagacagcgcaccatttagaatgttaatgaaacatcacaaaataataataccaagtagagatacacaaaggagaaaaaaaccatacaaaaaagtttttattaaaccaccagcacaaatgatgacaaaatggtactttcaaaaagacatatgcagaacaccactagtaatgcttacaactacatcttgttcccttacatacccttttacagctccagaagcagaaagcaacaatattagtttctacattttaaatccatacctattcaaaaatagtaatttccaacacctagatacatcaggatacttttgcaaatatgctgatgcaaacaacacagaaccactatacctatatgcttcaacttcttctaatgttacatatgaaaaaattaaacgcggtgactcaaacataacagaattaatagcactagccaacacaaaagaccatacagcaggacataccttaattcaacaagaagaaagcaaactacaatcactactaggaaatccttttcatgaagactacacaaatggagacatgtatatttacatctcaaaaatgacacccttagaaatgctaaagttagcatcaaacacgcacgaacaaccagcagcacaaaaacaaagcattaccaacacaggcagcatactatactccgtaagatataacccacaaaaagatgacggatccacaaacaaagcttatatagtaaacaacgagcttggaggactaatacaacccccatcaaacacaaactttattatagaaggatttccactacacacaatgttatggggatggacagactttattagaaaactaggagaagcaatacaatttgacacaaactactttgtatgtcttgaaacaaaagtaactaacaatgataaactaccatacttaataccagtagacgacacatttgtacatggattaaacccatatagtcctatacacgttgaccacgaacaccaaatagcaatagatgactataataaaaaaaactggtaccctagacatgaataccaaaaagttacaattaataaaatttgtatgactggacccgcgtgtccaagacaaccttggaaacattatatgcaagcacactgtagctataaattctactttactcttggaggatgtccaaaaactctggaaaaaatttataatccttgttcacagcctaaatggcccactcccgataacctccttggaagatttgaagtgcaggatcctaacaaacaccccgcaacagaactctacaactgggactggcaaaaagactatgttacagaatcagctatacaacgaattagaaaatacacagaaattgatccaaaaattttctcaatttcagaaagcaaaaaccaaccgatcatcctccaaaaaccacaagaaaaagacccatcgaaggaagaggagaaggagctccagctccagctccagcacatcagataccaacgactcctcctgcaactccaactccgacaattaaaataactaaatcaaaatttaaagttcttctttttgatgaaccaccaaaaaatagaagaatgacaccttgggaaaaagaacaagaaaaaatagatgcagctatttggaaaagacctcaaagagactttatttttgatgtacctttttaccctggtatacctcctacaccattagttaactttgacttaaaatacaaatatgaataaacaaggccaacagtaattcacttagtggtgtccatttatttaagtaaaaacttatataaacatccaccgcctccctaaaattcgggcgcaaaaattcaaagggggctccgcccccttcaacccccaagggggctccgcccccttacacccccaagggggctctgcccccttacacccccaagggggctccgcccccttacaccccctaattaatattcaacaggaaaaccacctaattagaattgccgaccacaaaccgtcgcatacttccctttttctaacaacttcccttttaccttataaatatttattacattaattaataaacaccgtaattcctgggaggagcttaacaactatataactaactacacttccgaatggctgagtttatgccgccagacggagacgggatcacttcagtgactccaggctgatcttggg

SEQ ID NO: 2090 - protein, 675 aa, Betatorquevirus sp.
MAYNRKTTYRRRRWRTKRRPWFSRWRTRNSFQRKQWRRKKYRRRNYKVKKYKLPKKKKAIIVKQFQPYTVKRCKIKGYKCLFQGGPDRTNNNYIQYVYSFIPEKQPGGGGWSLLVFSLDSLFEDYKHLENVWTVSNAGLPLIRYRGCQFKFYQSKETDYVVTYDNCWPMVDTPHKHADSAPFRMLMKHHKIIIPSRDTQRRKKPYKKVFIKPPAQMMTKWYFQKDICRTPLVMLTTTSCSLTYPFTAPEAESNNISFYILNPYLFKNSNFQHLDTSGYFCKYADANNTEPLYLYASTSSNVTYEKIKRGDSNITELIALANTKDHTAGHTLIQQEESKLQSLLGNPFHEDYTNGDMYIYISKMTPLEMLKLASNTHEQPAAQKQSITNTGSILYSVRYNPQKDDGSTNKAYIVNNELGGLIQPPSNTNFIIEGFPLHTMLWGWTDFIRKLGEAIQFDTNYFVCLETKVTNNDKLPYLIPVDDTFVHGLNPYSPIHVDHEHQIAIDDYNKKNWYPRHEYQKVTINKICMTGPACPRQPWKHYMQAHCSYKFYFTLGGCPKTLEKIYNPCSQPKWPTPDNLLGRFEVQDPNKHPATELYNWDWQKDYVTESAIQRIRKYTEIDPKIFSISESKNQPIILQKPQEKDPSKEEEKELQLQLQHIRYQRLLLQLQLRQLK

SEQ ID NO: 2091 - DNA, 2964 bp, Alphatorquevirus sp.
ccgaatcgctcgcgcgattcggacaccgcagtctaggggcaattcgggcacgggtctggccgggctatgggcaagattcttaaaaaattcccccgctccattgtccgccaggacatcaaaacatgccgtggagaccgccggcgcacgatatcccgggccgagaaagccagttctttgcagcaacttttcacatgcatgcttctttttgcggctgtggcgactttcttggtcatctcactagcatctctgctcgctttcctgctgccggacccccccctccgccaggccttagaccacccagacccccagcacctgccggtcccgggggtcccccgggccactttccagccctaccggctccgccagcggagcctgacaacccggcaccacgccgtggtggtggggaagatggcgccgccgctggcgcccaagacgcaggcgatggacaaccagacgcctacgccgccgaggacctagaagaacttttccgcgccgccgccgaagacgatatgtaagtaggcgatggcgccgacggtacaggcgcagacggaccagggggcgacgcagacgcagacacagacgaaaacataagcccactctcgtactaagacagtggcaaccagacgttgttaagacctgcttcattacagggtggatgccactcattatctgtggctccggacagacgcagtttaattttatcactcacatggacgacatcaccccccgaggagcaagctacgggggcaattttaccaatgttacatggagcctagagggcctctgggaacagttccagtaccacagaaacaggtggtccgccagcaaccacgacctagacctagccagatacctattcaccaccctaaaactatacagacacgaaaatgtagactacatatttagctacactagaacaggccccttcgagatcagtcacctcagccatctcagcacacaccctctactcatgctcctcagcaaacaccacatagtagtgcccagcctgaagacaaaacccagaggcaaaaggtacaaaaaagttagaattaagcccccaaaactcatgctaaacaaatggtactttacaaaggacatctgtgacatgggcctttttcagttctgggccacagcctgtaacctagaaaatccctggctcagatcaggcacagtaagcccctgcataggcattaatgtcctctcaaactctatatactcagatctcagcaatttaccaagtcacaaagaacaaagagcagctatacaaaataacatgcacccatcaactctcaaagacaacaaaggacagtggcagtacacatacacaagactaatgtcaaaatactactacaaaggcaatacaaacagcacatatgactggcaaaattacagcaacgatacaaactattcaaaaacatatgaccaatggtcaagtgaaaaacaagcaaggctagaaaaaattaaaaaagagttccaagctgtgtatccacagctacctacacaggcaccatcagactccacactattacaagactttggtatatatagccccttctaccttactcccaccagaataagcctagactggaaaacaccctacatacacgccaggtacaaccccctaacagacaaaggcataggcaacagaatatacctacagtggtgctcagaggccagctgtgaatacagccccacaaaaagcaaatgcacactggtagacatgccactgtttataatgttctatggctacatagactggtgcataaaatgcacaggggtctccagcctagtaaaagacgccagagtaatggtcaggtgtccctacacagagccacagctagtaggtgcaaacgaaaacgtaggctactgcctaatcagcaacaccttcatgaacggagacatgcccgttcttgctccatacatccccatttcctggttcgttaagtggtaccccatgcttgcacaccaaaaggaagccatagaggatattgtgggctgcggaccgtttatggtcagagaccaggaagccaagagttgggacataaccatgggttacagatcctgctttaaatggggcgggtcgcctctgcctctacaggccatcgacgacccctgccagaagcccacccacgcagttcccgatcccgatagacaccctcgcttactacaagtctcagacccgacaaaactcggaccgaaaacactgttccacaagtgggacatgcgacgaggacagtttagcaaaagaagtattgaaagaatgtcagaatactcagaacatgatgaattttttgaaacaggcattataccaaaaaagaaaaaattcgacactcccgcgggaggactccaaggcgaggaaagaagaggctacactttactccaagccctccaggacagccaagaagaaacatcagaagaagaacaagcaccccaaagcaaagaggagacgcaggagaaactcctccagcagctccagctccagaaacaccaccagcgactcctctcaaagggagtcagactcctcctcggagacgttctccgactccggaggggagtccacttcgaccccctccttacatagagccgcctccaataataacagacctgctttttcccaatactggtaaaaaaaaaaaattctccaagttcgactgggaaacggaggcggagctagggcagatattcaagcggcccatgcgcttctatccctcagaccaccctttctacccgtgggtaccccccaagcgagatatccccaaagtatgtaaagtaaactttcaaataaagcttgcagagtgagtaactcgaggccctcctctgttcacttagcggtgtctacctcttaaggtcaccaagcactccgagcgccagcgaggagtgcgaccctctaccctggggcaacttcctcggggtccggcgctacgcgcttcgcgctgcgccggacgcctcggaccccccctcgac

SEQ ID NO: 2092 - protein, 641 aa, Alphatorquevirus sp.
MPLIICGSGQTQFNFITHMDDITPRGASYGGNFTNVTWSLEGLWEQFQYHRNRWSASNHDLDLARYLFTTLKLYRHENVDYIFSYTRTGPFEISHLSHLSTHPLLMLLSKHHIVVPSLKTKPRGKRYKKVRIKPPKLMLNKWYFTKDICDMGLFQFWATACNLENPWLRSGTVSPCIGINVLSNSIYSDLSNLPSHKEQRAAIQNNMHPSTLKDNKGQWQYTYTRLMSKYYYKGNTNSTYDWQNYSNDTNYSKTYDQWSSEKQARLEKIKKEFQAVYPQLPTQAPSDSTLLQDFGIYSPFYLTPTRISLDWKTPYIHARYNPLTDKGIGNRIYLQWCSEASCEYSPTKSKCTLVDMPLFIMFYGYIDWCIKCTGVSSLVKDARVMVRCPYTEPQLVGANENVGYCLISNTFMNGDMPVLAPYIPISWFVKWYPMLAHQKEAIEDIVGCGPFMVRDQEAKSWDITMGYRSCFKWGGSPLPLQAIDDPCQKPTHAVPDPDRHPRLLQVSDPTKLGPKTLFHKWDMRRGQFSKRSIERMSEYSEHDEFFETGIIPKKKKFDTPAGGLQGEERRGYTLLQALQDSQEETSEEEQAPQSKEETQEKLLQQLQLQKHHQRLLSKGVRLLLGDVLRLRRGVHFDPLLT

SEQ ID NO: 2093 - DNA, 2963 bp, Betatorquevirus sp.
cgggtgccggaggtgagtgaaaccaccgtagtcaaggggcaattcgggctagctcagtctggcggaacgggcaagaaatttaaaataacatttattttacagatatgagctctatctggaagaaacctacattctcagtgagacaacaagaaaaccattggcttggaattgttttcagcactcatgacagcttctgccactgtgaagacccctggttacatttgatgattcttctaaacaaacaaggaaaagctccaaaacctgaatccgacgttcgcaatataaaatgcctccttactggaatagatacaactactaccaaagaagaccatacagaagaagacgtcgttaccggtttcgacgatggagagctggaaaaactattcgcagaaaatggcacagacgaaaatggagacgaaggaacaaggtaaaaagacgctttagaaagaaaaaactaaaaaaaattgttctaaagcaatttcaaccacataaaataactaaatgtaaaatagtaggcaaaaaatgtttatttcaaggtagtcctttaagatctagtaataactacatacagtactgttattcatatgtacctgaattatatcctggtggtggagggtggtctttacttgtacatagcttaggaagtatgtatgaagactatcaacatttaaacaatatatggacaacaagtaatgcaggaatgcctcttgtaagatacatgggagtggaatttaagttttatcaagatttgtatacagactatgttgtaatctgggataattgctggccattggttgacaccccatacacacatgctaacagttgtcctagccaaatgcttcaaagaaaaaacaaaataatagtgcccagcaaactaacacaaaatagaaaaaaaccatacaaaagatgctttgtaacacctccaacacaaatgcttaaccgttggtatttccaaagagacatttgtgacacaccattagcaatgataaccgcaacagcagttagtcttacaaaaccattttgtgacccaaaagcaaaaagtaacaatataactattaactgcctgaacccacacagatttagaaaccctaactttcaaaacccgccaataacaacaggatacagtccatttacagcagacaatttaagagaccatccacaaatgtacttatacggttcacacacagtaatacaatacaaaaaagacttactaacattaacacctttatgtaataccaaagacaacagagctggagcagtattatcatctttactaaacaaaaaagaaacaaataaattcgaaaactggggaaatcctttcaattccatttacttttcctcagaagaaacacatatttaccaatcacaatacggcccaacatctgagcaagtaacagaaacctggaaatcatatgaaagggacgacagcactataggcagtgaagttacattaatggtaggtcacaacctgtatgcttgtagatacaatccagaaaaagacacaggagaaggaaacatgtgttacttactaaacaattcctcagcagctagcctagaacctccagcaaacaaaaacctagtttttgaaggtttcccactatacatactactatggggatggacagactttataaagaaactaaagcaaacaattgacattgacaaaaactactttttagtaataaaaaccccattttttgaagaaaaactaccatactatatacctatagatgatgactttagagatggatttgaaccctacactccacacgacactaacaatgcacaggcctacatttctccatacaacatgaaccactggtatccaaaactactatttcaatatcaaagtattgaaaaaatttgtagatctgggccagcatgccctagaccaacaaacgacaactacttacaagcattttacaaatacaaatttcactttaaatggggtggatgtcctaaacaactagcaaaagcatatgatccttgtttacagtcaaaatggcccactcccgataacatcactccaggacttgaaatctcgaatcctaatgaaccaccacaaacccacatctatgactgggactgggaagaagactacattaaagaaaaagctttgcaaagaattagaatacacacagagtctcctaaacaaatactcttccttacagactcaaaacagaaccccaaaccactgcaaatcaaagaagcgaaagaggagacagaaaacgaagaggaaacgcaactactcctccagctccaccgaatccgacaccagcaaaagcagctcgaactccttctccagtcaaaatacggacaaataactacaccataaaacaatgtagaattaaagttaaactatttcctagcccaaaaaagaatagaagaatgacaccaaaggaaagagaactagaaaaagaaatagcaactatttttaaaagaccacaaagagactttatatttgatacacctatatacccttacataccaccagcaccccttgctaactttgacctaaattttaaagaataaaggccaacatacttcacttaatggtgtctgtttatttaagtttaacctaaataagctgtctccgcctcccaagtatgttggcgccataaagggggctccgcccccttacacccccaagggggctccgcccccttacacaagggggctccgcccccttacacccccaagggggctccgcccccttacaccccctaataaatattcaacaggaaaaccacctcatttaaattgccgaccacaaaccgtcttatacttcccctttttacaaacacttcccttttttctcattattattcattacattaattagtaaactgcgtaaatccggggagtggcaactaaactatataactaacaacacttccgaatggctgagtttatgccgccagtcgtagactgcaccacttcagtgactgcaggctgagcttggg

SEQ ID NO: 2094 - protein, 682 aa, Betatorquevirus sp.; identical to SEQ ID NO: 2054

SEQ ID NO: 2095 - protein, 108 aa, Betatorquevirus sp.; identical to SEQ ID NO: 3

SEQ ID NO: 2096 - DNA, 2962 bp, Alphatorquevirus sp.
gtgcgacccttcctcaaggggcaactccctcgaagtgggcaattcgggctcgggactggccgggccccgggcaaggctcttaaaaaatgcactttcgcagaatctcagagaaaaggaaactgctactgctacctttgcactctgcatcgcagacacctgccatgagcttcagggcgcccactctaaatgccggtcaacgagagcagctatggttcaagtccatcgtccgatcccatgatagttactgcgggtgtggtaacactgtcgctcattttaataatattgctactcgctttaactacctgcctcttacctcttcgcccctggacccttcctcgggaccgccgcgaggccgcccggcgctccgcgcactcccggctctgccagcggcaccctccacccccactactagccaaccatggcgtggtggggcagatggagaaggtggccgcggcgccggtggaggagatggcggcgccgccgtagaaggagactaccagcaagaagaactcgacgagctgttcgcggccttggaagacgaccaagaaagacggtaaggagacgccggcgccgtcccagacgcacctaccgacgggggtggcgacgcagacggtacataagacgcaggaggggacgcaaaaagaaactgactctcactatgtggaaccctaacatagttaggagatgtaacataaagggagggctgcctctactgatgtgtggagagaacagagccgcatttaactatgcctaccactcagaagactacacagagcagccattcccctatggtggaggaatgagcaccaccacattctcactcagagccctgtacgaccagtacacaaagcacatgaacagatggacgttctcaaacgaccagctagacctggccagatacaggggctgcaaattcaggttctacagacaccccacctgtgactttatagtacactacaacctggttcctcctctaaagatgaaccagttcacaagtcccaacacgcacccaggactactgatgctcactaaacacaagataataatacccagcttcttaacaagaccagggggtcgcagattcataaagataagactgcccccccctaaactctttgaagacaagtggtacactcagcaggacttgtgcaaacaaccgttagtaactctaaccgcaaccgcagcttccttgcggtatccattctgctcaccacaaacgaacaaccccaactgtaccttccaggtactacgcaagaattaccacaaagtcataggcacttcctcaaaaaactctgaggatgttacaccctttgaagactggctctataatactgcctcacactatcaaacctttgccactgaggcacaagtgggcagaataccttcctttaatccagatggctccaaaaacgaaaaagcagaatcatggcaaaaccaatggtctaaaaaatcagaagcatggacaggaggaaccacatatccccacacgtcaacacatcaaatgtacaaaatcccttatgacagtaactatggctttccaacttacaaaccaatgaaagactacatgttagaaagaagagcatggagcttcaaatatcaaacagacaatccagtcagtaaaaagatatggccacaacctaccacaacaaaaccaacagtagattactatgaataccacgcaggctggttcagtaacatattcataggccccaacagatacaatttacaatttcagacagcatatgtagacaccacatacaatccactaaatgacaaaggaaaaggtaacaaaatatggttccagtaccacagcaaagtaaacacagacctcagagacagaggcatctactgcctactagaagacatgcccctatgggccatgacctttggatacagtgactatgtcagcacacagctaggcccaaacgtggaccacgagactcaaggcctggtgtgcataatatgcccatacactgagccccccatgtatgacaagactaacccaaacagtggctacataacatatgacacaaactttggaaatggaaaaatgccctcaggaaggggccaggttccagtatactggcaatgcagatggaggcccatgctgtggttccagcagcaagtacttaatgacatctcaaagagcggaccgtacgcatacagagacgaactgaaaaacgcttgcctgacgacatactataacttcatttttaactgggggggcgacatgtattacccgcaggtcattaaaaacccctgcgcagacagcggactcgttcccggtaccagtagattctctcgagaagtacaagtcgttagcccgttgtccatggggcctcagtacatcctccacctcttcgaccaaagacgcgggttctttagttcgaacgctcttaaaagaatgcaacaacaacaagaatttgatgagtcttttacagtcaaacctaagcgacccaaactttctacagccgccctcgtcgagcaacaagaaggaggctcgacttcagcagaaagaaaatcgccgaccccacaagaagaagcccaggaagaagtccaccagacgccggagatccagctccagctccagcgaaacatcacagaacagctggtcatcaagcagcagctccaattcctgctcctccaaatattcaaaacacaagcaaatattcacatgaacccacgttttataagcccataataacctacaacatgtttggagaacccaatcctcaccctccaactagccaagactggcaaatggagtacgaggcctgcaaaatttgggacaggcccgctagacaaaacctaaaagacacccctttctatccctggatgcctaagcctcccccccaatactctgtaacatttaagcttgggttcaaataaacaaggccgtgcactgttcacttgtcggtgtctacctcttaaggtcaccaagcactccgagcgtcagcgagga

SEQ ID NO: 2097 - protein, 760 aa, Alphatorquevirus sp.; identical to SEQ ID NO: 522

SEQ ID NO: 2098 - protein, 156 aa, Alphatorquevirus sp.; identical to SEQ ID NO: 523

SEQ ID NO: 2099 - protein, 58 aa, Alphatorquevirus sp.; identical to SEQ ID NO: 524

SEQ ID NO: 2100 - DNA, 2962 bp, Betatorquevirus sp.
cgggtgccgaaggtgagtgaaaccaccgtagtcaaggggcaattcgggccgaaggtgagtgaaaccaccgtagtcaaggggcaattcgggctaggtcagtctggcggaacgggcaagattcttaaaacgatattatttttcagaatgtctacaagactaataccaacaaaaccatctttaagacaaaaaaacttaagatggatgaatatgctggtacatgtgcatgacttattctgcgactgcaacgctcctcttcaacacaccagtatacttattcaccaacaagaaccacaacttgattacctaccaattgaaaaggatattataaaaagatgccttactggagaaactactactggaggcgccgccgcagaccccgaaggcgatggattagacgcaggtacactagaagaccttttcagagaagactttggagacgaagacgccaaagggtaagaaaaagaaaactaaaaagactaattgttaaagaatggcagccacattatataaaaagactaaaaatagtgggactgcatcctataataatgactacttcagcaagaattgctaacaacttaacttgttatattgaaagtacagcaccggctttatatccatcagggggaggattttcaattaataactttactttagaaggactgtataaacagcacttgatactaaagaactggtggactgtaggaaatgataatatgcctttaataagatacttaggatgtgatatatacctatatagaagtacaaatttagactacttattccaatacagaaatgcctatcccatgacagcaacacttctcacttataccagcacacaaccacaagcaatgctactgcataaacatacaataaaaatggcatgcaaacaacacaacagaaacaaaaaaccatacaaaaaacttcacattccacctccatcacaaatgctaaataaatggtatttccaaaaagacatagcagaaataccgttattacaaacaattgccactgcaacatcatttgaccgcatgtttcaaaatagtaaaagcgttaataccaccgttggctttacaagtttagacatactaggctttagaaaccacgattactcaaaactctcaaccaccggatacgtggcactcccaaatcaactactttttggtataactacaggaacatataacttaaaagcaataaaaatgacagaaatgatatacctaggaaaccctgaagatgacacagaaggaacccgattagggcaaataccccagacagaatatagcagatataccgatgttactacaataatagccaaacaattaaaagcaatgagattaaacaataaacactggggaaaccccttcacagttacatttcacagaacaggtagactcataacaacaaacaaaacatgggatgaacttataaaccaatataacaacccatctaccggtgacaaattagtagacacatggtttacatttaaagaacacacatttttagactgcagatacaatccatatgcagaccaaggtattggaaacaaactgtacctaatagacataaaagacaaaacacatgacacagactgggatatcccagcaacaggaacattatacaaagacttaccaatatggttaatggtgtggggatacttagactttcacagaaaatgcggagaatactcacaaatagatacaaactacttagctgtaatatatacaacttacatatttccaaaagacacacattactttgtaccactagaccaagactttcttaacggaagaagtccataccaaccagaagaacacataacaccatccgattcacaaaactggcatccaaaagttagatttcaagtacaaacaataaatgacattgcagcctcaggaccagccacagtaaaactaccacctgaaacatcagtagaaagccacataagatattcctttcgtttcaagattggaggagaaccaccaccgatgtcaacacttacagaccctgataaacaacctaaatacaacattcccaataacctcctacaaacaccttcgttacagaatccaacaacaccctttgagtacctcctctggagatttgatgaaagacgagggcaacttactaaaaaagctacagaaagaatcacgaaatacaaagaaactgaaacacctattttcacaattacagagccagcttttgcctgtccaacaacatcgacccaccaagaaacacagacaccagaaacatcggactcggaaaacgaagaaacgacgatccaggagcagctcctcaagcagcgaaagcagcaaaaactcctccgacggggaatacagcagctcctcaaccgattagcaacattagaatagaaaaatgtaaatttaaagtacaattgtttccaactcctactccaaacaggagaatgacacagtgggaatgggaacaagaattagaggactctcgaatatggtttagagttcctagacaatttattaaagataaacctacctacccatgggtgccccaacaaagtaaatatatggtaaactttgatctaaatccccctcaataaatacaaggccaacaaattttacttgtcggtgtccatttattatagcttaacttatataaacatccaccactctcccaaatacgcaggcgcagtagggggctccgccccctacaacccccaggggggggcaaagccccccctacaacccccctaataaatattcaacaggaaaaccacataattagaatggctcaccacaaacggctacttacttccccttttttacactacttcctctttaacttataaatattcattacattaattaatactcaccgtaattccggggcggggacacttaactatataacaaagtacacattcgaatggctgagtttacgccgccagacggagacgggatcacttcagtgactccaggctgaccttggg

SEQ ID NO: 2101 - protein, 678 aa, Betatorquevirus sp.
MPYWRNYYWRRRRRPRRRWIRRRYTRRPFQRRLWRRRRQRVRKRKLKRLIVKEWQPHYIKRLKIVGLHPIIMTTSARIANNLTCYIESTAPALYPSGGGFSINNFTLEGLYKQHLILKNWWTVGNDNMPLIRYLGCDIYLYRSTNLDYLFQYRNAYPMTATLLTYTSTQPQAMLLHKHTIKMACKQHNRNKKPYKKLHIPPPSQMLNKWYFQKDIAEIPLLQTIATATSFDRMFQNSKSVNTTVGFTSLDILGFRNHDYSKLSTTGYVALPNQLLFGITTGTYNLKAIKMTEMIYLGNPEDDTEGTRLGQIPQTEYSRYTDVTTIIAKQLKAMRLNNKHWGNPFTVTFHRTGRLITTNKTWDELINQYNNPSTGDKLVDTWFTFKEHTFLDCRYNPYADQGIGNKLYLIDIKDKTHDTDWDIPATGTLYKDLPIWLMVWGYLDFHRKCGEYSQIDTNYLAVIYTTYIFPKDTHYFVPLDQDFLNGRSPYQPEEHITPSDSQNWHPKVRFQVQTINDIAASGPATVKLPPETSVESHIRYSFRFKIGGEPPPMSTLTDPDKQPKYNIPNNLLQTPSLQNPTTPFEYLLWRFDERRGQLTKKATERITKYKETETPIFTITEPAFACPTTSTHQETQTPETSDSENEETTIQEQLLKQRKQQKLLRRGIQQLLNRLATLE

SEQ ID NO: 2102 - protein, 103 aa, Betatorquevirus sp.; identical to SEQ ID NO: 2031

SEQ ID NO: 2103 - protein, 122 aa, Betatorquevirus sp.; identical to SEQ ID NO: 2032

SEQ ID NO: 2104 - DNA, 2962 bp, Betatorquevirus sp.
cgggagccgaaggtgagtgaaaccaccgaagtctaggggcaattcgggctagatcagtctggtggaacgggcaagaaacttaatacactttattttatagatatgacatctacattgaagaatcctactctatcaccgagacaactagaaaactcctggattaacatagtatttcaatctcacgaccaaatttgtggctgtgacgacccttggctacacctcttggatgtactaaataagaacggcaacgcacgcaaaccactaaaagatattgaaaacataaaatggctccttattggcaaaccaaatattggagaaggcccttcaaataccgaagaagacgaccctggttttaccgctggagatctagaaaaactattcgaagaagaccctatacaagaagaagacgaaccagacgttacaaggtaaaaagacttaaacttagaaaaagaaaatttctaaaagttaaacaatggcaacctaaaactattgtaaaatgtaaaattttaggacttaaatgtttatttcaaggaagtggctatagagcacaacataattatatagaatatatgtattctaatgtacctataaaccaaccagggggaggaggttggggactactagttttttcactaggaagcttatatgaagactatgatcacctacataacatatggacaaaaagtaatgccggactaccattagtaagatatacaggcagcacattttacttctatcaaacatatgacacagactacatagttacatatgacacatgctggcctatggtagacacaccacacacacacgcagacagctcaccttatagaatgatacaaaaaagaaataaaatagttattccaagtaaacttactaaaaatagaagaagaccttacaaaagagtaaaaataaaaccaccaactcagatgacaaacagatggtactttcaaaaagacatttgcgacacacctcttgtaatgataaccgcaacagccgttaacctaaccacaccatttgctaattccaacagtttatctaactcaatagtattttacagcttaaacacatttatttttcaaaacccaaattttgaacatccaccagaaacaacaggatactcacataaaattttaaacggctatagcatgtacttatacgcaacaacacaaacaaaacctaatgacgcagacaaaaacgaagagtcctttataaactggctaaaaacattaatttttctaggcaacccaagaaaaaactatcaaggacaaccattcggagacacaccaacatatactaaagaacagtggggaaacccattttatcacagatacttagaaataggagatgaagacgatgtatcatacttaatatacacatcgtcagtaacccatattaacataaaacaaaaaattgcaacaaaaacaacagacattaaagcaacacaatttcaaaccataacaggacccataatttataaactaacatacaacccagacaaagacacaggactaaacaaaatatatttactaaaaacatggggaccatctacactagatgaaccagatgaccaagacttaatttttgaaggctttccactaccacaacttacatggggatggacagactttattaaaaaattaaaaaagattaatgacctagacagacactcaatattactaattaaaactcaaaactttagcgacaacacattaaaagtatttctaccattagacctagactttatagaaggacatgacccctaccaacacgacaaacaaaacaactaccaaacagactactacaattctgaaaactggtttcctaaaatacaatttcaagatcaaacaattaatttaatagcaacatctcaaagaaatagtccaaaaacaaattcttacttacaagctggctgtaaatataaattttattttaaatggggaggctgtcctaaaacattacaaaaagcatatgatccttgcttacagtcaaaatggcccacacccgataacatcacaggaagacttacaatccagaatcctaacacacctccacaaacagaactattctcctgggactgggaaagtgactttgttaaaaaacaagctatcgaaagaatacaacaatatactccaattgatgaaactttcgtctcgtctacagactcaaaattccaagcaaaagcactccaaaagcagcaaaaagacacagcaccacaagaggaaaagaacctattcctccagctccacaaactccgaaaagagcgactccacctcgagctccagtgcagaatgaagctaatggaattaaaatcaaaaagtgtaaagtgactgtaaaattatttccagacgaaaagccaaaaaacagacgtttaactccaaaagaactagaggatgaaaaaattgtagctagaatttttaaaagacctttaagaacctttataaatgatatacctacctatccatactgtgtacctgaacccaaagttaactttgatttaaattaccaccattaaaatttcaaggccaacatacttcactgagtggtgtccatttattaaagtttaacttaaataaacagactccgcctcccaatcaataaggcctagaaccaagggggctccgcccccttaaacccccaagggggctccgcccccttacacccccttacacccccaagggggctccgcccccttacacccccaagggggctccgcccccctaccccttataaatattcaacaggaaaaccacctaatttaaattgccgaccacaaaccgtctcatacttcccctttttaaccaacttccttttttactaattattattcattacattaattaataatcaccgtaattccggggaggagactattacctatataactaacaacacttccgaatggctgagtttatgccgccagacggagacaggatcactttagtgactccgggctgatcttggg

SEQ ID NO: 2105 - protein, 680 aa, Betatorquevirus sp.
MAPYWQTKYWRRPFKYRRRRPWFYRWRSRKTIRRRPYTRRRRTRRYKVKRLKLRKRKFLKVKQWQPKTIVKCKILGLKCLFQGSGYRAQHNYIEYMYSNVPINQPGGGGWGLLVFSLGSLYEDYDHLHNIWTKSNAGLPLVRYTGSTFYFYQTYDTDYIVTYDTCWPMVDTPHTHADSSPYRMIQKRNKIVIPSKLTKNRRRPYKRVKIKPPTQMTNRWYFQKDICDTPLVMITATAVNLTTPFANSNSLSNSIVFYSLNTFIFQNPNFEHPPETTGYSHKILNGYSMYLYATTQTKPNDADKNEESFINWLKTLIFLGNPRKNYQGQPFGDTPTYTKEQWGNPFYHRYLEIGDEDDVSYLIYTSSVTHINIKQKIATKTTDIKATQFQTITGPIIYKLTYNPDKDTGLNKIYLLKTWGPSTLDEPDDQDLIFEGFPLPQLTWGWTDFIKKLKKINDLDRHSILLIKTQNFSDNTLKVFLPLDLDFIEGHDPYQHDKQNNYQTDYYNSENWFPKIQFQDQTINLIATSQRNSPKTNSYLQAGCKYKFYFKWGGCPKTLQKAYDPCLQSKWPTPDNITGRLTIQNPNTPPQTELFSWDWESDFVKKQAIERIQQYTPIDETFVSSTDSKFQAKALQKQQKDTAPQEEKNLFLQLHKLRKERLHLELQCRMKLMELKSKSVK

SEQ ID NO: 2106 - protein, 108 aa, Betatorquevirus sp.
MTSTLKNPTLSPRQLENSWINIVFQSHDQICGCDDPWLHLLDVLNKNGNARKPLKDIENIKWLLIGKPNIGEGPSNTEEDDPGFTAGDLEKLFEEDPIQEEDEPDVTR

SEQ ID NO: 2107 - DNA, 2962 bp, Betatorquevirus sp.
cgggagccgaaggtgagtgaaaccaccgaagtctaggggcaattcgggctagatcagtctggcagaacgggcaagaaactaaaaatatttatatttttaggtatgtcatctatttggaagaaaccaaatgtgacaccgagatatcaagaacttacatggatgaatttaattcaccaaagccatgaccaattttgccactgtgaagacgcagacctacattttatgattttaatcaacaaatttggaggagcaaaaaaaccagaagaagacattagaaacataaaatgcctccttaccggagatacttcaaaagctactggtaccgaaatcgcagaagaagatataggaatagattccggagacctagaaaaacttttcgaacaagatatagaagaaccaactaccgcagaagacgtccaaaggtaaagagatttaaaaaaagaaaacttaaaaaacttatactaaaagtatttcaacctaaatctataaagaaatgtaaaattaaaggcatgaaatgtttatttcaaggaagcatagaaagagcaaataataactatattcaatacatttatgatactgtaaatgacagaagaccagggggaggaggatggagtttacaaatatttagtttagaatctctatatgaagaatatgaacatttactaaacatatggactactagtaacgcgggcttaccacttgtaagatatagaggatgtaaatttagattttatcaaagtaatgacacagactacgttgtaaaatatgataactgctggcccatggttgacacaaaactaacacacgcagatagcgcaccacaaagaatgctaagagcacaacacaaaatagtagtacctagcagaaaatctcaaaccagaaaaagaccatacaaatccatctttgtaagaccaccatctcaaatgacaaataactggtatttccaaagagacatttgcaaaacacctttgctaatgctaaccacaacagccgttgacttaagaaatccttttgcaccaccagaagcaaaaagcaacaacataactgtatattcattaaacacttttcaatttaaaaatacaaattttcaacaaccagatccaaataaaggataccactataaaacagaaggtacattaaagtattacctatatgctgcccacacaggttcaaaaacctgggcagaactttttccactaacaaacacaaaagacaatactcaaggaaaacaattaaaagatatcataaaagtacagggcaataatccagacaacaaactatcaaactggggaaacccatttcaccacttatttacacctgatgattttaaattttattttatgacaaaatctccagcagacataggtaaaaatgaactaaacaacccgataaacacaactggcctaactgaatttacaagctatttatattaccaactaagatacaacccagaaaaagacaccggagacacaaacaaagtatacttagtttcaaatctacatgaaacaaactgggctgaaccacaaaatccaaacttaattttagaaggattcccattacctatattactatggggatggacagactggcaaaaaaaactaaaacaagtttctaacataaacaaccaatacatggtagtaatacaaactaaaatgttttcagaaaacttaaactactatgtattattagacaaagacttcatagacggatttgaaccctattctccacatgacacaaatgacataattcctataacaccacaaaaccaacaacattggtatccaaaatactcatttcaagaacaatccataaacacaatatgcttatcaggttcaggatgcccaagaccaccatggagccactatttacaagccctttgtacatacactttttacttttcattcgggggctgtccaaaacaattagaaaaagcctatgatccttgtttacagtcaaaatggcccacagccgataacatcccttcaacaattgaaatcaagaatcctaacaccgctcccgaaacagagctattttcatgggattgggaaggcgactttgttaaaacaacagctatccaacgaattaaagagtacacaccgtcttatgaaacaatattctcatctacaggaacaaaatcagatccaataccaatcaaacaagcacaagaaacacaaacacaagcccaagaagaggaaaaggagttattcgtccaactccagcagctcagacacaagcggaaactcctgcagtaccaactaaacgaattattattaagaagtgcaccacaacagtagaattgtttccaaaaccaaagaaaaacagagtatttacaccacaagaaagagaaacagaaagacaagttgcaatagcttttaaaagacctcaaagacaatacttttatgacactcctatatacccttacctaccaccagcacctttagtacccaaaataaactttgatttaaactatatgtattaaataaaaatttcaaggccaacacatttcacttgtcgagtccatttatttaagtttaaactttaataaacatccaccactctcccaaaattgttggcgccaaagggggctccgcccccttacacccccaagggggcaccgcccccttacacccccaagggggctccgcccccttacacccccaagggggctcaagggggctccgcccccttacacccccaagggggctccgcccccttacacccccttataaatatgcaacaggaaaaccacctaattttaattgccgaccacaaaccgtctctaacttccctttttaaacataacttccctttttactcattattattcataacattaattattaaacaccgtaattcctgggaggaaccaaataactataaaactaactacacttccgaatggctgagtttatgctgccagacggagactgcatcacttcagtgactgcaggctgatcttggg

SEQ ID NO: 2108 - protein, 669 aa, Betatorquevirus sp.
MPPYRRYFKSYWYRNRRRRYRNRFRRPRKTFRTRYRRTNYRRRRPKVKRFKKRKLKKLILKVFQPKSIKKCKIKGMKCLFQGSIERANNNYIQYIYDTVNDRRPGGGGWSLQIFSLESLYEEYEHLLNIWTTSNAGLPLVRYRGCKFRFYQSNDTDYVVKYDNCWPMVDTKLTHADSAPQRMLRAQHKIVVPSRKSQTRKRPYKSIFVRPPSQMTNNWYFQRDICKTPLLMLTTTAVDLRNPFAPPEAKSNNITVYSLNTFQFKNTNFQQPDPNKGYHYKTEGTLKYYLYAAHTGSKTWAELFPLTNTKDNTQGKQLKDIIKVQGNNPDNKLSNWGNPFHHLFTPDDFKFYFMTKSPADIGKNELNNPINTTGLTEFTSYLYYQLRYNPEKDTGDTNKVYLVSNLHETNWAEPQNPNLILEGFPLPILLWGWTDWQKKLKQVSNINNQYMVVIQTKMFSENLNYYVLLDKDFIDGFEPYSPHDTNDIIPITPQNQQHWYPKYSFQEQSINTICLSGSGCPRPPWSHYLQALCTYTFYFSFGGCPKQLEKAYDPCLQSKWPTADNIPSTIEIKNPNTAPETELFSWDWEGDFVKTTAIQRIKEYTPSYETIFSSTGTKSDPIPIKQAQETQTQAQEEEKELFVQLQQLRHKRKLLQYQLNELLLRSAPQQ

SEQ ID NO: 2109 - protein, 107 aa, Betatorquevirus sp.
MSSIWKKPNVTPRYQELTWMNLIHQSHDQFCHCEDADLHFMILINKFGGAKKPEEDIRNIKCLLTGDTSKATGTEIAEEDIGIDSGDLEKLFEQDIEEPTTAEDVQR

SEQ ID NO: 2110 - protein, 60 aa, Betatorquevirus sp.
LFPKPKKNRVFTPQERETERQVAIAFKRPQRQYFYDTPIYPYLPPAPLVPKINFDLNYMY

SEQ ID NO: 2111 - DNA, 2961 bp, Alphatorquevirus sp.
acctcttaaggtcactaagcactccgagcgtacaaggggcaattcgggctcgggactggccgggctatgggcaaggctcttagggttatcgctctaaaaaatgttttttggcaggccttacagaaaaaagaaaaggccgctgctactgtctgagctgccagatcgaaagaaaaaaccacctggtgatatgacctggcgccccccggtacacaatgctgccggcattgataggcagttctttgaagcctgctttcgatgccacaatagttgctgcggctgcggcagctttattaatcatcttaatgtactggctgctcgctatggctttactggggggccggcgccgccaggtggtcctcggccggcgccccaagtgaggcccgcgcttcccgcgccggagcccgacccgcaggccgacaaccgtgaaccatggcgtggagctggtggtggcaacgatggaggcgccgcggctggaaacccaggcgccgccgctggagacgcctacgatggagaagacctcgacgccctgttcgccgccgtcgccgaagacgcagagtaaggagacggaggtgggggaagagacgggggcgacgcagacggtacacccgtagacgaaagagacgcattaagcacagaaactttaaaaaaaaactagtactgactcagtggcacccctctgtagtaagacgctgctttatcaggggcatagttcccatcctcatatgcgggcacacaaaatggaacagtaactacgccctgcatagcgaggactacacagaagagggccgctaccctcacggagggtccctctcgaccactacgtggtcactaaaggtgctgtacgacgagtacctgaagcaccgcaacttctggggctacccaaacacccagctagaccttgccagatacaggggctgcactttctacttttacagacacaaaaagactgactttatagtgtggtggaacagaaaacctccctttaaactaaacaagctcagctgcccgtccttccacccgggcatgctcatgcaacagaaacacaaggtgctaatccctagctttgacactaaacccgggggcaaaactaaaattagagtcagaataaagccccctactctgttagaggacaagtggtacactcagcaagacttgtgtccggtaaacctggcgcaacttgtggttactgcggctgactttcaacatccgttctgctcaccacaaacgaacacttcaaccacaaccttccaggtattgaaagaaatgtattatgacaccataggcatagttaacacagaagaaacttacaattcagttaataataaaagtacaactaaatcatacgcagaatttattaaaattttacaagacaagttatactcaacaggttcctactggaactcctttcacacagcagaatacttaaaccctaatgtcacagacacgttcaacaacaaaatatttagtacgaactcatcactagcaacttggctaagcaccaaaggcaacaacggctttcaaactggtaacagcacccaatttggctacaactcctacaaaccagacaaaagcaacatacagttagcaaaccaagcatactggaacgcactaacaaaaccaaacgaccaggcaacacaaataggacaagcccgtgccaaagaatttgaataccacactggcatctacagccccatattcctcagcagacacagaagcacactaaactttgccagggcctaccaggacgtcacatacaacccaaactgtgacagaggagttaaaaacagggtgtgggtgcagtcccttaccaaggccaccacagaatttgacgagaaacgcagcaagtgcgttattactgacctgcctctgtgggccgctctgtactgttaccacaactttgtagaggaagagctaggcatctcctctgaaatctacaacgcctgtatagtctgtgtacagtgcccttacacctttccccccatgtatgacaagaaaaacccaaataaggggtacgtgttctatgactccctgtttggaaacggaaagaccccagacggacgcggacaggtggacgtgttctggcagcagcggtggtacccccgcatggcctgccaggtacaagttatgcacgacatcaccaagacgggacccttctcctaccacgacgaactagtgagtacacaactgaccgctaaatacaaatttgacttcatgtggggtggaaacatgatctcctcacagatcatcaagaacccctgcaaagatacagacatggacaccacctatcccagtagacagcgtcgcgacttacaaattgttgacccacactccatggggccctccttcgcgttccacacgtgggactacagacgaggactgtttggtaaagatgctatcgaaagagtgtcaaaagaacaagactatgctccagagtatcctaacccatacaaaaagcctagatattttcccccaacagacagggcagagctccaagggcaagaagaagactggagtttccaggtcgaaagcgaggggtcgtcgtcagaagagagcgatcaagaagcccaagaagaggaggtactccagttccagccaggacagcagctgcagcaactccacctgcagctcgcgcagcagcagcacatcgggcagcagctccaattcctgttccagcaaatgctcaaaacccaggccaatctgcacttaaacccatatacatacacccagctataaacagggtgttcatgtttgaaccccagggccccaggcccataactaccagagaggggtgggaggacgagtacagcactgccggcatatggggccggcccgttcgctccttctacacagacacccctttctaccccgaggttccaaaaatacctcctcagtttcatgtatcttttaaactcggctggaaataaaaatgcaaggcctttcactgttcacttgtcggtgtct

SEQ ID NO: 2112 - protein, 767 aa, Alphatorquevirus sp.; identical to SEQ ID NO: 2060

SEQ ID NO: 2113 - protein, 152 aa, Alphatorquevirus sp.; identical to SEQ ID NO: 2061

SEQ ID NO: 2114 - protein, 138 aa, Alphatorquevirus sp.
LEFPGRKRGVVVRRERSRSPRRGGTPVPARTAAAATPPAARAAAAHRAAAPIPVPANAQNPGQSALKPIYIHPAINRVFMFEPQGPRPITTREGWEDEYSTAGIWGRPVRSFYTDTPFYPEVPKIPPQFHVSFKLGWK

SEQ ID NO: 2115 - DNA, 2961 bp, Alphatorquevirus sp.
gtgcgacccttccccctggtgcaaaccgcagtcaaggggcaattcgggctcgggactggccgggctatgggcaaggctattagggttatcgctctttaaaatgccctttctcggcagggtctggagaaagaaaaggaaggtgcttctgtcagatttgcgaactccatcgccgctccggcctgacatgagccagtggctaccgcctctccaaaatgtcccccaaagggaaagatgttggtttaactgtatctggcagtcacacagatgtttttgtggttgtgctgatcctatccgtcaccttggccatctggctgctcagtataatatgcaaccaggtccgtcgccgggtggtgatcctaggccgccacgacctccgtcagtaagaagataccccgctcttccgggacccgacacccccgctaacccgcccccgcgaccatgccgtggtggggatggcgccggagatggcgctggccccgcaggagatggaggacccgccgccgacgacgagtaccgaccagaagacctagaagacctgtacgccgctatcgaaggagacgagtaaggaggcgccgcggtcgggggcggtacagggggcgacggtacacccgcagacgttacatacgtagatacaggagacgaaaaagaaagaccctcatatggagacagtggcagcctcaaaatatcagaaaatgtagaataaggggcataatccccatcttaatatgtgggcacctgagagcaaaccgaaactatgctcttcacagcgatgacatagttgaacagaacactcccttcgggggctctctcagtaccactagctggtctctaaaagtactgtacgaccagcaccaaaggggtctcaacaggtggtccgccagcaacgagaccctagacctcgccagatacaatggctgcgagtttaccttctatagagacaaaaagactgactttatagtaaactatgacatctcagctccctacaaactagacaaatacagctcgcccagctaccatcccggtagcatgatgctgcagactaaacacaaagtacttatccccagcttcgagaccaaacccaagggtcgcagcacagtaaaagttagaatcaagccccccaaactcttcttagacaagtggtatactcagcaagacctgtgcgacgttaatcttgtgacatttgcggttaccgcagcttcctttacacatccgttctgcccaccacaaactgacaacccctgttgcacattccaagtgttgaaagagttctactaccctgtaataggctactcttccgctgtcagaaaagtagagtctgtattctctgaaatactatacaaacagtgcacttactatcagagctttttaactccccaatttattggacaaatagttaaactacccgacggcactcttgtaaaagacttatcaaacttacctggagcatttccagagggaaccacaattaccaaaacccaaatagacatctacaacaaatggcaaaaaaatgagttcctaacaaatgccagtcagcattacaattactgtaattataaacctaacaatacaaacctagtatggctcagaaaatactactttgaatgggaaacacaaaagaatgcctcagtaaaaccagaccacctcacaccctctgttgactggtacgaataccacataggcctattcagtcccatctttctgagccccttcagatccagcagcctagaatttcctagagcatatcaagatgtgtcatataatcctttagtagacaaaggagtaggcaatgtcatctggttccagtacaacacaaaaccagatacacaactcactatcccttcttgtaaatgtgtaatagaaaacaaaccgctgtgggcagccttctatggctactcagactttgtacaacaagaaataggcccatatacagacgcagagtcagtaggtcttatatgctgcatctgtccctacaccaaaccccccatgaaaaacccagataatcccatgatgggatatgtgttttatgactccaatttcggagctggcaagtggatagacggcagtggcttcattcccctatactggcaaaccagatggagaccagaaactctgtttcaagaagcagtaatgagagacattaccatgagcggccccttcagctacaaagacgacctaaaaaacacagtactgactgcaaggtacaaatttaactttcgctgggggggtaatcttatccacgaacagaccattagaaacccatgcccgacggacggacatcccccttccggtagacagcctcgcgatgtacaagtcgttgacccgatctccgtgggccccagattcgtattccactcctgggactggcgtagagggtaccttagcgaagcagctctcaagcgaattagagaacaaccactcgattatgaagcttattcgttcatcccaaagagacctagaatctttcctccaactacaggagacgccgtggcccaaaggcaaggaaaagactcctcttcagaggaagaaagcagcctcatctcgttcgaagaggggcaggaaccaaaagcgcaacaagtacacaagcacctcctcagacacctccgaaagcagcgagagctcggcctccgactccgaaccctgttcgagagcctccaaaagacgcaagcgggtctccacgtaaacccattattgttcaaccagctataaaccaggttctcctgttccccgagagggctcccaagcctgctcccagcacaggtgactgggagacagaataccttacatgcaagcactgggacagaccacccagatccaacctttccgacccccctttctatccctggatgcctcccgctttcaatgtaagctttaagctcaacttcaaataaacaaggccgtgggagtttcacttgtcggtgtctacctctttaagtcactaagcactccgagcgtcagcgagga

SEQ ID NO: 2116 - protein, 755 aa, Alphatorquevirus sp.
MPWWGWRRRWRWPRRRWRTRRRRRVPTRRPRRPVRRYRRRRVRRRRGRGRYRGRRYTRRRYIRRYRRRKRKTLIWRQWQPQNIRKCRIRGIIPILICGHLRANRNYALHSDDIVEQNTPFGGSLSTTSWSLKVLYDQHQRGLNRWSASNETLDLARYNGCEFTFYRDKKTDFIVNYDISAPYKLDKYSSPSYHPGSMMLQTKHKVLIPSFETKPKGRSTVKVRIKPPKLFLDKWYTQQDLCDVNLVTFAVTAASFTHPFCPPQTDNPCCTFQVLKEFYYPVIGYSSAVRKVESVFSEILYKQCTYYQSFLTPQFIGQIVKLPDGTLVKDLSNLPGAFPEGTTITKTQIDIYNKWQKNEFLTNASQHYNYCNYKPNNTNLVWLRKYYFEWETQKNASVKPDHLTPSVDWYEYHIGLFSPIFLSPFRSSSLEFPRAYQDVSYNPLVDKGVGNVIWFQYNTKPDTQLTIPSCKCVIENKPLWAAFYGYSDFVQQEIGPYTDAESVGLICCICPYTKPPMKNPDNPMMGYVFYDSNFGAGKWIDGSGFIPLYWQTRWRPETLFQEAVMRDITMSGPFSYKDDLKNTVLTARYKFNFRWGGNLIHEQTIRNPCPTDGHPPSGRQPRDVQVVDPISVGPRFVFHSWDWRRGYLSEAALKRIREQPLDYEAYSFIPKRPRIFPPTTGDAVAQRQGKDSSSEEESSLISFEEGQEPKAQQVHKHLLRHLRKQRELGLRLRTLFESLQKTQAGLHVNPLLFNQL

SEQ ID NO: 2117 - protein, 169 aa, Alphatorquevirus sp.
LAGLWARLLGLSLFKMPFLGRVWRKKRKVLLSDLRTPSPLRPDMSQWLPPLQNVPQRERCWFNCIWQSHRCFCGCADPIRHLGHLAAQYNMQPGPSPGGDPRPPRPPSVRRYPALPGPDTPANPPPRPCRGGDGAGDGAGPAGDGGPAADDEYRPEDLEDLYAAIEGDE

SEQ ID NO: 2118 - protein, 56 aa, Alphatorquevirus sp.; identical to SEQ ID NO: 629

SEQ ID NO: 2119 - DNA, 2961 bp, Alphatorquevirus sp.
gtgcgacccttccccctggtgcaaaccgcagtcaaggggcaattcgggctcgggactggccgggctatgggcaaggctattagggttatcgctctttaaaatgccctttctcggcagggtctggagaaagaaaaggaaggtgcttctgtcagatttgcgaactccatcgccgctccggcctgacatgagccagtggctaccgcctctccaaaatgtcccccaaagggaaagatgttggtttaactgtatctggcagtcacacagatgtttttgtggttgtgctgatcctatccgtcaccttggccatctggctgctcagtataatatgcaaccaggtccgtcgccgggtggtgatcctaggccgccgcgacctccgtcagtaagaagataccccgctcttccgggacccgacacccccgctaacccgcccccgcgaccatgccgtggtggggatggcgccggagatggcgctggccccgcaggagatggaggacccgccgccgacgacgagtaccgaccagaagacctagaagacctgtacgccgctatcgaaggagacgagtaaggaggcgccgcggtcgggggcggtacagggggcgacggtacacccgcagacgttacatacgtagatacaggagacgaaaaagaaagaccctcatatggagacagtggcagcctcaaaatatcagaaaatgtagaataaggggcataatccccatcttaatatgtgggcacctgagagcaaaccgaaactatgctcttcacagcgatgacatagttgaacagaacactcccttcgggggctctctcagtaccactagctggtctctaaaagtactgtacgaccagcaccaaaggggtctcaacaggtggtccgccagcaacgagaccctagacctcgccagatacaatggctgcgagtttaccttctatagagacaaaaagactgactttatagtaaactatgacatctcagctccctacaaactagacaaatacagctcgcccagctaccatcccggtagcatgatgctgcagactaaacacaaagtacttatccccagcttcgagaccaaacccaagggtcgcagcacagtaaaagttagaatcaagccccccaaactcttcttagacaagtggtatactcagcaagacctgtgcgacgttaatcttgtgacatttgcggttaccgcagcttcctttacacatccgttctgcccaccacaaactgacaacccctgttgcacattccaagtgttgaaagagttctactaccctgtaataggctactcttccgctgtcacaaaagtagagtctgtattctctgaaatactatacaaacagtgcacttactatcagagctttttaactccccaatttattggacaaatagttaaactacccgacggcactcttgtaaaagacttatcaaacttacctggagcatttccagagggaaccacaattaccaaaacccaaatagacaactacaacaaatggcaaaaaaatgagttcctaacaaatgccagtcagcattacaattactgtaattataaacctaacaatacaaagctagtatggctcagaaaatactactttgaatgggaaacacaaaagaatgcctcagtaaaaccagaccacctcacaccctctgttgactggtacgaataccacataggcctattcagtcccatctttctgagccccttcagatccagcagcctagaatttcctagagcatatcaagatgtgtcatataatcctttagtagacaaaggagtaggcaatgtcatctggttccagtacaacacaaaaccagatacacaactcactatcccttcttgtaaatgtgtaatagaaaacaaaccgctgtgggcagccttctatggctactcagactttgtacaacaagaaataggcccatatacagacgcagagtcagtaggtcttatatgctgcatctgtccctacaccaaaccccccatgaaaaacccagataatcccatgatgggatatgtgttttatgactccaatttcggagctggcaagtggatagacggcagtggcttcattcccctatactggcaaaccagatggagaccagaaactctgtttcaagaagcagtaatgagagacattaccatgagcggccccttcagctacaaagacgacctaaaaaacacagtactgactgcaaggtacaaatttaactttcgctgggggggtaatcttatccacgaacagaccattagaaacccatgcccgacggacggacatcccccttccggtagacagcctcgcgatgtacaagtcgttgacccgatctccgtgggccccagattcgtattccactcctgggactggcgtagagggtaccttagcgaagcagctctcaagcgaattagagaacaaccactcgattatgaagcttattcgttcatcccaaagagacctagaatctttcctccaactacaggagacgccgtggcccaaaggcaaggaaaagactcctcttcagaggaagaaagcagcctcatctcgttcgaagaggggcaggaaccaaaagcgcaacaagtacacaagcacctcctcagacacctccgaaagcagcgagagctcggcctccgactccgaaccctgttcgagagcctccaaaagacgcaagcgggtctccacgtaaacccattattgttcaaccagctataaaccaggttctcctgttccccgagagggctcccaagcctgctcccagcacaggtgactgggagacagaataccttacatgcaagcactgggacagaccacccagatccaacctttccgacccccctttctatccctggatgcctcccgctttcaatgtaagctttaagctcaacttcaaataaacaaggccgtgggagtttcacttgtcggtgtctacctctttaagtcactaagcactccgagcgtcagcgagga

SEQ ID NO: 2120 - protein, 755 aa, Alphatorquevirus sp.
MPWWGWRRRWRWPRRRWRTRRRRRVPTRRPRRPVRRYRRRRVRRRRGRGRYRGRRYTRRRYIRRYRRRKRKTLIWRQWQPQNIRKCRIRGIIPILICGHLRANRNYALHSDDIVEQNTPFGGSLSTTSWSLKVLYDQHQRGLNRWSASNETLDLARYNGCEFTFYRDKKTDFIVNYDISAPYKLDKYSSPSYHPGSMMLQTKHKVLIPSFETKPKGRSTVKVRIKPPKLFLDKWYTQQDLCDVNLVTFAVTAASFTHPFCPPQTDNPCCTFQVLKEFYYPVIGYSSAVTKVESVFSEILYKQCTYYQSFLTPQFIGQIVKLPDGTLVKDLSNLPGAFPEGTTITKTQIDNYNKWQKNEFLTNASQHYNYCNYKPNNTKLVWLRKYYFEWETQKNASVKPDHLTPSVDWYEYHIGLFSPIFLSPFRSSSLEFPRAYQDVSYNPLVDKGVGNVIWFQYNTKPDTQLTIPSCKCVIENKPLWAAFYGYSDFVQQEIGPYTDAESVGLICCICPYTKPPMKNPDNPMMGYVFYDSNFGAGKWIDGSGFIPLYWQTRWRPETLFQEAVMRDITMSGPFSYKDDLKNTVLTARYKFNFRWGGNLIHEQTIRNPCPTDGHPPSGRQPRDVQVVDPISVGPRFVFHSWDWRRGYLSEAALKRIREQPLDYEAYSFIPKRPRIFPPTTGDAVAQRQGKDSSSEEESSLISFEEGQEPKAQQVHKHLLRHLRKQRELGLRLRTLFESLQKTQAGLHVNPLLFNQL

SEQ ID NO: 2121 - protein, 169 aa, Alphatorquevirus sp.; identical to SEQ ID NO: 2117

SEQ ID NO: 2122 - protein, 56 aa, Alphatorquevirus sp.; identical to SEQ ID NO: 629

SEQ ID NO: 2123 - DNA, 2960 bp, Betatorquevirus sp.
cgggagccgaaggtgagtgaaaccaccgaagtctaggggcaattgggcaattcgggctagatcagtctggcggaacgggcaagaaacttaaaaaatatttttattacagatatgtcatctatctggaagaaaccaactacaactccgagacaacaagaactcctatggctgaacttattccatcaatctcacgaccaattttgccaatgtgaagaccctgaccttcactacttaatggtaatcaacaaattctccaactacaaaaaaccagaatcagaaattattaacataaaatgcctccttaccggaaaaactactggaccaactactactacagacgcagaagacgacctccatatcgacgcaggagatttagacaaactcttcgaaaaagatttcgaagaagaacctaccggagaaaacaccgaaaggtaaagaaatataaatttaaaaaacttaaaaagctaaccttaaaagtttttcaacctaaaactattaaacaactaaaaattaaaggatttaaatgcttatttcaaggaagcattaaaagagcaaacaataactatatacaatatatatatgatactgtaaatgataaacgccctggaggcggagcatggagcttacaaatatttagcctagcaagcttatatgaagaatgggaacatttgctaaatatatggacaaatagcaacgcaggactgccacttataagattcttaggagtatcatttaaattttatcaaagccccgaaactgactatgttgtaaaatatgacaactgctggccaatggtagacacaccatacacacacgcagacagcgcaccttcaagaatgataagaagtcaccataaaattacaataccaagcagaaaaacaaaattaagaagaaaaccatataaaaaagtatttgttagaccaccatcacaaatgacaaataactggtactttcaaagggacatttgcaaaacacctttagtaatgctaaccacaacagccgttgacctcagatttccttttgcaccaccagaagctttaagcaataacgttactttatacacacttaatacttttcaatttaaaaatactaacttccaacaaccagaagccacaggatactattataaatcagaaggcacacaaaaatattacttatatgcagcacctagagaccactcaaacacttgggctgacctaataccacttacaaacacaaaagacaaccaaccaggaaaacaattaaaaatacttataaaagataacaatacaaacgaaaataaaatgagtaactggggaaatcctttttatcacgtatacgactatgaaaactttaaattttacttcttaacaaaaccaccaacagcaatacaatattcagaactaaaaaataacttaacagaaaaaattacagaatttacaagctacatatactatcaactaagatataatcccgaaaaagatacaggtcaagacaataaagtttatttaatatcaaatttacatgatacaaactgggaagagccaaacaacagtaacctaatatttgatggctttcctttaactattttattatggggatggactgactggcaaaagaaactaaaacaagtatccaacatagacaaccaatacatagtcgttatacaaacaaaatttttctcagaaaagttaaaatactatgtactaatagacagggactttatagacggatttgaaccatactcaccacacacacaagaagaacaattacctataacacctgcaaatcaacaacactggtacccaaaacatttatttcaacaacaatcaataaatacactatgcttaagtgggcaagcatgtcctagaccaccatggaatcactatttacaagccttttgcacatacactttttattttaaaataggaggctgtcctaaacaattacaaaaagcttatgatccttgcttacagtctaaatggcccacagccgataacatgcctgcaagatatcaaattacgaatcctgaaaccccaccagaaacagaactgttctcctgggattgggatgaagactatgttaaaagaacagctatacaacgaattgcagaatacacaccaacttatgaaacaatattcttctctacaggaagcaaatcagatcccataccactcaaaaaagtccaagaaaaccagacacaagaagaagaggaggagaaagaattattcctccagctccagcagctcagacaccgacgaaaactcctccaactccaactaagagaattatcattaaaaagtgcaccaagatagtagaactttttccaaaaccaaacaaaaaaaacagaagatttacaccagacgaaagagaaacagaaagacaagtagcaatagcttttcagagaccacaaagaactttcttttacgaccctcccatatatccttggttacctcctgaacctaaagttcccaaagtaaactttcaattaaactacccattgtaaccaataaaaatttcaacgccaacaaatttcacttgtcggagtccatttatttaattttaacttatataaacatccaccgcctcccaatattgttggccaacaaagggggctctgcccccttaaacccccaagggggctccgcccccttacacccccaagggggctccgcccccttacacccccaagggggctccgcccccttaaacccccaagggggctgtgcccccttacaccccctaataaatattcaacaggaaaaccacataattagaatggccgaccacaaaccgtctactacttccccatttatcattacttccttttttattcattattattcatgaaattaattattaaacaccgtaattccggggtggagcaaacaacctatataactaactacacttccgaatggctgagtttatgccgccagacggaggctgtatcacaacagtgactacagactgatcttggg

SEQ ID NO: 2124 - protein, 666 aa, Betatorquevirus sp.
MPPYRKNYWTNYYYRRRRRPPYRRRRFRQTLRKRFRRRTYRRKHRKVKKYKFKKLKKLTLKVFQPKTIKQLKIKGFKCLFQGSIKRANNNYIQYIYDTVNDKRPGGGAWSLQIFSLASLYEEWEHLLNIWTNSNAGLPLIRFLGVSFKFYQSPETDYVVKYDNCWPMVDTPYTHADSAPSRMIRSHHKITIPSRKTKLRRKPYKKVFVRPPSQMTNNWYFQRDICKTPLVMLTTTAVDLRFPFAPPEALSNNVTLYTLNTFQFKNTNFQQPEATGYYYKSEGTQKYYLYAAPRDHSNTWADLIPLTNTKDNQPGKQLKILIKDNNTNENKMSNWGNPFYHVYDYENFKFYFLTKPPTAIQYSELKNNLTEKITEFTSYIYYQLRYNPEKDTGQDNKVYLISNLHDTNWEEPNNSNLIFDGFPLTILLWGWTDWQKKLKQVSNIDNQYIVVIQTKFFSEKLKYYVLIDRDFIDGFEPYSPHTQEEQLPITPANQQHWYPKHLFQQQSINTLCLSGQACPRPPWNHYLQAFCTYTFYFKIGGCPKQLQKAYDPCLQSKWPTADNMPARYQITNPETPPETELFSWDWDEDYVKRTAIQRIAEYTPTYETIFFSTGSKSDPIPLKKVQENQTQEEEEEKELFLQLQQLRHRRKLLQLQLRELSLKSAPR

SEQ ID NO: 2125 - protein, 122 aa, Betatorquevirus sp.
LAERARNLKNIFITDMSSIWKKPTTTPRQQELLWLNLFHQSHDQFCQCEDPDLHYLMVINKFSNYKKPESEIINIKCLLTGKTTGPTTTTDAEDDLHIDAGDLDKLFEKDFEEEPTGENTER

SEQ ID NO: 2126 - DNA, 2960 bp, Gammatorquevirus sp.
gccccccccacaccccccgcggggggggaggtctaggggcaattcgggctagggcagtctagcggaacgggcaagaaacttaaattatacccttgtttttagatgagccatctatgtccagctgacttttaccacagaactacatttaaccttgatactcaaaaccaaatatggatgtctcagctagcagacgggcatgacaatttctgtgactgcaaaactccttttggccatttgcttgcttctatttttcctcctggtcataaagatcgtgatctcacaattaatcaaattttgctgcgagactaccaagaacaatgccattctggtggaaaagaagaaggcggccatggtatggcaccttcaggagacgctggagacgcagacaatataaaacaagaaaaagaagaagaagatatcccagaagaagaactagaaaaacttatggccgccgtagaagaagaagaaaacacaaggtaagaagaaaaattcaaaaactaactcttaaagtatggcaaccagactctgttagaaaatgtaaaattaaactactcgggactctagtaaatggagcccaaggaagacaaatgtactgctatacaaatgaaataggtaattacttacctcctaaatcacctgggggagggggatttggctgtgaaataattaccctagaatacttatatgaacaatacttacaaagaaactgcatatggactagaagtaatcaatacagtgacctttgtagatatacaggtggaaaaataacattgtacagacatccaacaatagactttgttttctcatacaatatacaaccaccatttactatagaaaaagacacttatttaaacctacaaccacaactacaattactgagcagaagacacagagtaatactcagcaaagctactaatccaaaaggcagaataaaacacacaataaaatttaaaccacccaaagaaatgtccactaaatggttttttcaaaatgatttttcacatacacccctaatacaattaaatgctagtgcagcagacttccaatatgtaactatgggctgctgcaatgtaagccaaatgtctacattttatgcacttaactcagcacacttctttaaacaatccacatggggagagttcactagcaatccttacaacccatacccaacaataaaattacctttaacatttgtatacactgaaaaaggaggtagggaaggcagatatgttattgaagaaactacatttggaaaaggaacaggctcatacacaaaaagtgttagcagactaatgggatggtttaataacagagtactactagcaaaagcagtttaccaaggaaaatatacacaaggagacctaccagaagcatcaaaacttggtaccttacccatagttacagctagatataacccaatagaagacactggtcaaggcaatgaagtatggctaacatccatatttcatggagcctatgacaaaccaacagttactcctgactacttaatacaaggatacccactatacattgcattctttggctactataactttttacttcaaaaatctaatgataaaggtatcatgtacagccatatgtttgtagttaaaagcaaagcacttagacctttacaatcatctacaggccaaacatattaccctatagtagactgggactttttaaatggcaaactaccctatgatgaatacattggagacaatgacagcagaaaatggtttcccacagtagaatctcaactaatatccattaataactttgtacaatcaggaccatacatacctagactagacaatgttaaaaacagtacctgggaacttagatacaaacttaccatgtactttaaatgggggggtcctcaggtcacagacccaccaattgatgacccacaacacaaacaagactaccccactccaggtactttccaagaaacattacaaattgctgacccgaaaaaacaaaaacctgaaaccatgtttcatgaatgggactacagaagggggattattacaacagcagctattaaaagaatgtcagaaaacctcgaaactgattcatctatccaatctgatgcttcagaaccaccaaaaaagaaaaaaagaacaaccaaagaactcccctgcctccaaaagaaggaagaaagaatcaagaaatgtctccaggaactctgcgaagaaaatatcttccaagaatcacaagacctccagctcctcatccaacagcagcaccagcaacagcaacagctcaagtcaaacatcctggagctcctcaaagacctcaaacagcagcagagatacctaagtttgcaaacaggaaacctacattaacaagatttaaaccaggctttgaatgggacacagaaatacaagtagcaaaagcatttaacagaccccctagattatttaaagaagataaacccttttacccatggcttcctaaaccagaacccattgtgaactttcaccttaattttaaattctaggcctacaatgttcacttagtggagtatgtttatataagttacacccccaataaactgtacataaaaaaaaaaaaaaaaataaaaaattgcaaaaattcggcgctcgcgcgcgctgcgcgcgcgcgagcgccgtcacgcgccggcgctcgcgcgccgcgcgtatgtgctaacacaccacgcacctagatttgggtgcgcgcgctagcgcgcgcacccaaatgcgccccgccctcgttccgacccgcttgcgcgggtcggaccacttcgggctcgggggggcgcgcctgcggcgcttatttactaaacagactccgagtcgccatttggcccccctaagctccgcccccctcatgaatattcataaaggaaaccacaaaattagaattgccgaccacaaactgccatatgctaattagttccccttttacacagtaaaaaggggaagtgggggggcaga

SEQ ID NO: 2127 - protein, 676 aa, Gammatorquevirus sp.
MPFWWKRRRRPWYGTFRRRWRRRQYKTRKRRRRYPRRRTRKTYGRRRRRRKHKVRRKIQKLTLKVWQPDSVRKCKIKLLGTLVNGAQGRQMYCYTNEIGNYLPPKSPGGGGFGCEIITLEYLYEQYLQRNCIWTRSNQYSDLCRYTGGKITLYRHPTIDFVFSYNIQPPFTIEKDTYLNLQPQLQLLSRRHRVILSKATNPKGRIKHTIKFKPPKEMSTKWFFQNDFSHTPLIQLNASAADFQYVTMGCCNVSQMSTFYALNSAHFFKQSTWGEFTSNPYNPYPTIKLPLTFVYTEKGGREGRYVIEETTFGKGTGSYTKSVSRLMGWFNNRVLLAKAVYQGKYTQGDLPEASKLGTLPIVTARYNPIEDTGQGNEVWLTSIFHGAYDKPTVTPDYLIQGYPLYIAFFGYYNFLLQKSNDKGIMYSHMFVVKSKALRPLQSSTGQTYYPIVDWDFLNGKLPYDEYIGDNDSRKWFPTVESQLISINNFVQSGPYIPRLDNVKNSTWELRYKLTMYFKWGGPQVTDPPIDDPQHKQDYPTPGTFQETLQIADPKKQKPETMFHEWDYRRGIITTAAIKRMSENLETDSSIQSDASEPPKKKKRTTKELPCLQKKEERIKKCLQELCEENIFQESQDLQLLIQQQHQQQQQLKSNILELLKDLKQQQRYLSLQTGNLH

SEQ ID NO: 2128 - protein, 125 aa, Gammatorquevirus sp.
MSHLCPADFYHRTTFNLDTQNQIWMSQLADGHDNFCDCKTPFGHLLASIFPPGHKDRDLTINQILLRDYQEQCHSGGKEEGGHGMAPSGDAGDADNIKQEKEEEDIPEEELEKLMAAVEEEENTR

SEQ ID NO: 2129 - protein, 120 aa, Gammatorquevirus sp.
LPPKEGRKNQEMSPGTLRRKYLPRITRPPAPHPTAAPATATAQVKHPGAPQRPQTAAEIPKFANRKPTLTRFKPGFEWDTEIQVAKAFNRPPRLFKEDKPFYPWLPKPEPIVNFHLNFKF

SEQ ID NO: 2130 - DNA, 2960 bp, Betatorquevirus sp.
cgggagccgaaggtgagtgaaaccaccgaagtctaggggcaattcgggctagatcagtctggcggaccgggcaagaaacttaaaaatatatctattttacagatgtcctccaagaaaccaacaagaaaagaattaaaccaactaatcaacgtttgctgtggcgcccacgacctcatctgcgactgcgacgaacccaccaaacacatcatccttcacctattctcccaccaggaaccctaccaagtaacaaaacaacaaaaggataatatacaaaaatgccttattactacagaagaccatggagaaccaaccgctatcgttggagacgatggtataaacgaaggagacctagaggctattttcgcagaagacaaagatggagaagacgccgaagggtaagaagaaagcttcctaaacttaatattaaagaatggcagccacagactattagaaaatgctgcataaaaggaatgcactgtttatttttatgtacagaagagactattagtagaaactatagaatgtatgaacatagcataataccagaaagatggccaggaggaggaggattttctgtaacaaaatacagcatagatggactatatgaacaacaccaactagatagaaactggtggacaaacagtaacacaaacttaccattatgcagatacacaggatgtaaaattaaattttaccaaagctgggaagtagactatgtagtaaatactagcctaaactatccaatgttagctactgaactactataccacagttgtcaacccagctttatgatgatgaacaaacactgtatatttgtaccatcaaaaataactaaaaaaattccaaaaggctatataactaaaaaatttagaccacctaaccaaatgagtaaccgttggttctttgcaaaagatctttcaaaagtaggtttgctaatgctaaccgcagcagcagcttcctttgaccattactacatagcaacagacaaaacctcaaataactgttcttttaccacacttaacccatacttatggaaaaaacataactttatacaaccaggcattaatggatattcactgtccacaactgggactgtagaaaaaagaatgtttacaaccacacaacacatctccaacgacactgaaataccaaaactaaaaccaaacacaattacatacttaggttggacaaaacaagaccaaccaggacaaactgtatcagaaaataacaaagctaactacttaacagaccacaaatactggggaaaccctttttcacatgaaattctaacaggctcacaacctgtattagtaacaactaacaattgggctactatcaaacaaaaattaatacaaaattttaaccaagaaatatccacaggatttttaacaacacccacagaaccattactacatgaatgcagatactctccagacagagacacaggagcaggaacaaaagtatatttaaaatctgtactaagagacgaatcaggttgggaaccaccaacaaacgaagaacttataacagagggctttccactatggttagcattatttggctttgtagactggcacaaaaaactagcggtagcaacaaacttatatacaagctacgtaattgtaattgaatccaactttataacaccacaactaccatactacatattattagaccaacactttattgaaggaaaatccagatacatgacagaacatgacacagaccaacaaactcaagcagacaaagattcctggtacccctgtgttaaataccaactagaaagcatagaaaacattgtaaaaacaggcccaggaattcctaaactaggtggaagaaaatcagtagaagctaaaatattctacaaattttattttaagtttggaggatgtccaccaaagatggacacaattaacgaccctactaaacaagagacataccccgttcccggttttcagtctacaacatattcgttacagaatccaacactccctcaagaaacctacttataccaatttgacgtccaccaagacatccttacaaagaaagctgcaaaaagaattacaagagactgggaaactcaaaaaactttattttcaactacaggacgaatggaaccagcaccatactcggaaaaagaaggagaaatctcgccgacaccctcagactcggaagaggacccggcactcctacaaatcaagctccgaaagctcaagcgacagcgactctacttggagcagcaaatccagcaactaatggaacaaccataaactttatgtgcataaaaaaagctctgcttttcgaaccagagcataaaaaactgagaaaaatgaacaaatatgaactagaaactgaaagactgtgtgctacagcctttaaaagaccacctgtatctatgtggggggaaatcccttactggccatggttacaccctgaacccttagtaaatcaacttccaaaagttaactttgacttaaattttaaaccctaataaaatttcaaggcctacaaaattcacttagtggtgtctgtttatataagtttaaacttaaataaaccaactccgcctcccaaaattgttggcgccataagggggctccgcccccttaaacccccaagggggctccgcccccttaaacccccaagggggctccgcccccttacacccccggggctccgcccccttacacccccaagggggctccgcccccttacaccccctaataaatattcaacaggaaaaccacataattagaattgccgaccacaaaccgtcagttacttccccttttagcacttacttcccttttgcttcattattattcattacattaattaataatcaccgtaattccggggaggagcataaacactatataactaactacactgacgaatggctgagtttaccacgccagacggagacggcatcacttcagtgactgcaggctgatcttggg

SEQ ID NO: 2131 - protein, 664 aa, Betatorquevirus sp.
MPYYYRRPWRTNRYRWRRWYKRRRPRGYFRRRQRWRRRRRVRRKLPKLNIKEWQPQTIRKCCIKGMHCLFLCTEETISRNYRMYEHSIIPERWPGGGGFSVTKYSIDGLYEQHQLDRNWWTNSNTNLPLCRYTGCKIKFYQSWEVDYVVNTSLNYPMLATELLYHSCQPSFMMMNKHCIFVPSKITKKIPKGYITKKFRPPNQMSNRWFFAKDLSKVGLLMLTAAAASFDHYYIATDKTSNNCSFTTLNPYLWKKHNFIQPGINGYSLSTTGTVEKRMFTTTQHISNDTEIPKLKPNTITYLGWTKQDQPGQTVSENNKANYLTDHKYWGNPFSHEILTGSQPVLVTTNNWATIKQKLIQNFNQEISTGFLTTPTEPLLHECRYSPDRDTGAGTKVYLKSVLRDESGWEPPTNEELITEGFPLWLALFGFVDWHKKLAVATNLYTSYVIVIESNFITPQLPYYILLDQHFIEGKSRYMTEHDTDQQTQADKDSWYPCVKYQLESIENIVKTGPGIPKLGGRKSVEAKIFYKFYFKFGGCPPKMDTINDPTKQETYPVPGFQSTTYSLQNPTLPQETYLYQFDVHQDILTKKAAKRITRDWETQKTLFSTTGRMEPAPYSEKEGEISPTPSDSEEDPALLQIKLRKLKRQRLYLEQQIQQLMEQP

SEQ ID NO: 2132 - protein, 98 aa, Betatorquevirus sp.
MSSKKPTRKELNQLINVCCGAHDLICDCDEPTKHIILHLFSHQEPYQVTKQQKDNIQKCLITTEDHGEPTAIVGDDGINEGDLEAIFAEDKDGEDAEG

SEQ ID NO: 2133 - protein, 139 aa, Betatorquevirus sp.
LGNSKNFIFNYRTNGTSTILGKRRRNLADTLRLGRGPGTPTNQAPKAQATATLLGAANPATNGTTINFMCIKKALLFEPEHKKLRKMNKYELETERLCATAFKRPPVSMWGEIPYWPWLHPEPLVNQLPKVNFDLNFKP

SEQ ID NO: 2134 - DNA, 2960 bp, Alphatorquevirus sp.
acgccttcggctgcgcgcggcacctcagaccccaaggggcaattcgggctcgggactggccgggctatgggcaaggctcttaaaaaagcatgtttctcggtaaaatttacagacagaaaaggaaagtgccactgtgcggcctgccagctccaaagaaaaaactacctactggtatgagccactggagcagacccgtccaccatgcaacgggggtcgaacacctctggtaccagtctgttattaacagccattctgctagctgcggttgtggcgatcctgtacgccactttacttatcttgctgaaaggtatggctttgccccaactccccgagccccgccagtagcccggacgcccaccatccgtagagccaggcccgcgcctgccgctccggagccccgtgccctgccatggcatggggatggtggagaagaaggcgcaagtggtggtggagacgccggttcgcccgaggcagacttcgcagacgacggattagacgccctcgtcgccgcactcgacgaagaacagtaaggaggcgcagacaatggaggagggggcgacccagacgcagactgtttaagcgaaagagacgctttaagagacgcagacgaaaagctaagataaaaataacacagtggcaacctagctcagtaaagagatgttttgttataggatactttccattagtgatatgtggaccaggaaggtggtcagaaaactttactagtcacatagaagacaagataagcaaaggaccctttgggggagggcacagcaccagcagatggtccctaaaagtactatacgaagagttccaaaagcaccacaacttttggactagaagcaacaaagagctagaattagttagattctttggaagcagctggagattttacagacacgaggacactgactatatagtgtattactctagaaaggctcctctgggaggtaacatactgacagcacccagcctacacccgggggcagccatgctcagcaaacacaagatagtagtacccagctttaaaaccagacccggtggaaaacccaccgttaaaattaatatcaagccccctacaacactaatagacaaatggtacttccaaaaagacatttgtgacacaacctttcttaacttgaacgttgtactctgcaacctgcggtttccgttctgctcaccacaaactgacaacatttgtgtaacctttcagatattgcatgaggtttaccacaagttcattagcataaccgcacagccgttacttacagcctcaggctgggaaacctactttaaacagtttttagatgcagccttcccaaatgacagatctgtaaacagattaaacacctttagcacagaaggagcctacagccacccacaaattaaaaaatttcaacaaaatataacaggttcaatagacaaatactttagagataaagatggactgtggggagatgctattcacctaatagatggtcaagagcttccaaaagttaaagaaataataactcaaaatgcaaagaactaccttaaaaaagtacaacaagaatacaaaggacaagaaaatttaaaaaacctaatacatccagttttctgtcagtacgtaggcatatttggcagcccactactaaacttccacagaataagtccagaaatccctggactgtacaaagacataatatataatccactaacagacaaaggcataggaaacagaatatggatagactacctcagcaaaaacgacacaaagtacagccccacacaaagtaaatgctatatagcagaccttcccatgtggatggcctgcttcggcctagtagactggtgcaaaaaagagacaggcaactggggaataccagcctgggcgagagtagtaatgatatgtccatacacctttccaaaactatataacacaccagacccagagagcggattcatacccatagggtacaactttagtcaaggtttaatgccagacggcagcaaatacacaccgatacaaatgagacacaggtggtatccaaacttactaaaccagcaagcagttttagaagacataagccagtcagggcccttctcatacagagagaagacaaacacagcaaacataaacacaaaatacaaatttagatttcactttgggggcaaccctgtgtccgaacagattgttgcagacccatgcaaacaacccacctttgaaatgcccggaaccagtacaatcccttctagactacaaatcacggacccgaagctcctcggcccgcactacacattccacagctgggacaaaagacgtgactactataacagacgaactattaagagaatgtcagaacaacaagaaacttctgagtttttattctcaggcccgaaaaaacccagagtcgatctggacgcagcacagcctgtcgaaaaagactctttgccccaacaaagagaacagagaccctgggagacgagcgagagcgagaaagagacagaagccctctcggaagaagaagagacgtgctccgtccacgagcagctcaggcagcagctcaaggagcaaaagcagctcagacagggaatcgagtgcctcttccagcagctgataaaaacacagcagggagtccacctagatccttccctcttgtaggccccagacagtggctatttcccgagagaaagccagcccctgcccctacctcgggagactgggccacagaatacatggcagctagagtgtttgacagacccccaagaagcaaccttaaagatacaccctactacccatacgttaaaaaccaatacaatgtgtactttgacctaacctttgaataaagtgcagcttcaaacttgcaaggccgtgggagtttcactggtcggtgtctacctctaaaggtcactaagcactccgagcgtcagcgaggagtgcgacccttccccctgactcaacttcttcggagccgcgcgct

SEQ ID NO: 2135 - protein, 743 aa, Alphatorquevirus sp.
MAWGWWRRRRKWWWRRRFARGRLRRRRIRRPRRRTRRRTVRRRRQWRRGRPRRRLFKRKRRFKRRRRKAKIKITQWQPSSVKRCFVIGYFPLVICGPGRWSENFTSHIEDKISKGPFGGGHSTSRWSLKVLYEEFQKHHNFWTRSNKELELVRFFGSSWRFYRHEDTDYIVYYSRKAPLGGNILTAPSLHPGAAMLSKHKIVVPSFKTRPGGKPTVKINIKPPTTLIDKWYFQKDICDTTFLNLNVVLCNLRFPFCSPQTDNICVTFQILHEVYHKFISITAQPLLTASGWETYFKQFLDAAFPNDRSVNRLNTFSTEGAYSHPQIKKFQQNITGSIDKYFRDKDGLWGDAIHLIDGQELPKVKEIITQNAKNYLKKVQQEYKGQENLKNLIHPVFCQYVGIFGSPLLNFHRISPEIPGLYKDIIYNPLTDKGIGNRIWIDYLSKNDTKYSPTQSKCYIADLPMWMACFGLVDWCKKETGNWGIPAWARVVMICPYTFPKLYNTPDPESGFIPIGYNFSQGLMPDGSKYTPIQMRHRWYPNLLNQQAVLEDISQSGPFSYREKTNTANINTKYKFRFHFGGNPVSEQIVADPCKQPTFEMPGTSTIPSRLQITDPKLLGPHYTFHSWDKRRDYYNRRTIKRMSEQQETSEFLFSGPKKPRVDLDAAQPVEKDSLPQQREQRPWETSESEKETEALSEEEETCSVHEQLRQQLKEQKQLRQGIECLFQQLIKTQQGVHLDPSLL

SEQ ID NO: 2136 - protein, 146 aa, Alphatorquevirus sp.
MFLGKIYRQKRKVPLCGLPAPKKKLPTGMSHWSRPVHHATGVEHLWYQSVINSHSASCGCGDPVRHFTYLAERYGFAPTPRAPPVARTPTIRRARPAPAAPEPRALPWHGDGGEEGASGGGDAGSPEADFADDGLDALVAALDEEQ

SEQ ID NO: 2137 - protein, 123 aa, Alphatorquevirus sp.
LGDERERERDRSPLGRRRDVLRPRAAQAAAQGAKAAQTGNRVPLPAADKNTAGSPPRSFPLVGPRQWLFPERKPAPAPTSGDWATEYMAARVFDRPPRSNLKDTPYYPYVKNQYNVYFDLTFE

SEQ ID NO: 2138 - DNA, 2960 bp, Alphatorquevirus sp.; identical to SEQ ID NO: 2134

SEQ ID NO: 2139 - protein, 743 aa, Alphatorquevirus sp.; identical to SEQ ID NO: 2135

SEQ ID NO: 2140 - protein, 146 aa, Alphatorquevirus sp.; identical to SEQ ID NO: 2136

SEQ ID NO: 2141 - protein, 123 aa, Alphatorquevirus sp.; identical to SEQ ID NO: 2137

SEQ ID NO: 2142 - DNA, 2960 bp, Alphatorquevirus sp.
tgccctggtgcaacgccctcggcggccgcgcgctaggggcaattcgggctcgggactggccgggctatgggcaaggctcttaaaaaagctacccccttaactatgtttctcggcagagtttaccgccaccagaaaaggaaagtgcttctgtccctggtgcacactccacagaaaacaccttcctccatgaaccgctggtcacccccggcacacgatgcccgcggaattgagaggcagtggtatgaatgtgtttggcgcagtcacgctgcttgctgtggctgtggtgattttattagtcatattaatgatctggcgcatcgttttggacgtcctccgggttccagaccacctgctactccccagccgccggctgtgagagccctcccggcgctgccggcccctgagccatggtctggcgcagggggcgacgctggcgccggtggagatggcgccgcaagccgcggtggaggagatggagacgctggagacgtcgcagacgaagacctgctagacgccgtcgacctcgcagagtaaggagacgcaggggagggtggcggcgctcctacagacggtggaaaagacgcagggggcgacgcagacataaaaagaaacttatactgactcaatggcaacccgcggttgtcaaaaaatgcagaatagtgggctacgaccccataataatatgtggactgaacagaaccagccacaactccacaactcacgcagaggactacactacaggcaaccaggcctttggggggggactgtgcaccaccaaatacactctaagaatactgtttcaagagtacatggcccaccacaactactggacggccagcaacagagacctggagctggccaggtacttgggggcttctatcatattttttaaacaccccacagtagactttgtagccagagtaagaaccatgcctcccttcaacgacactgacatgacagccgcatccctgcacccaggaatgctcatgctagctaaaaagaaaataattattcccagtctgaaaaccagacccagcagaaaacactatgtaaagataaaaataggggcccccaaactatttgaagataagtggtactctcagagagacctctgtgacacaactcttgtggttatagaggcaacggttgcagacttgcaatatccgttcggctcaccactaacgaacagcatctgttgcaacttccagattcttaacagcaactatgacaacgccctgagcacccttataggaactcagggagacaaagacagagaccaatgctacaactttttattaaatacaattacttactacaacaccagtcaaactctagcacaacttaacaaattcttacctacaaccaacacaacccaattaagtgagtctaatgcagcacactccataaacccatccaacaaaacagaaaacacatatcaatcaacaaataaagaaatacacaacaacacactatatggaggagcagcatactacaaacaaaacggaaccagtaccaccacttcaccaccacataaaatgaaagaagcaaataaggcatacacagcagcagcccgaaaaatactgggcaactggaacttcactagcatgaacacaagctcatgctctgacttacaaggcctaaactactttgactactacacaggcatgtttagcagcatatttttagccagcggcaggtcaaactgggaggtaaaaggcagctacacagacattacatacaaccccctagtagacaaaggagagggcaacatgatctggatagactggatcaccaaaggtgataccatctactctgaaactaaaagcaaatgcctcctcagagacctccccatgtgggccctgtgctatggctacgcagactatgtactaaaatgcacaggcatctccagcataaaaaacgaggccagaatagttatgagatgtccctacacatacccccagctagtaaaacacagcaacgacaacttcgggtttgtagtgtacagtgacaactttggacgcggacgcatgccagggggcgaccctgtaccaagcaccagaaacagggtgcactggtacatcaccataacccaccagactgaagtgctagagtgcatctcccagaccggaccgtttgcctaccacagcgacgaacgcaaagcagtactgactataaaatacaacttcagatggaaatggggaggcaaccctgtgttccaacagattcttagagacccctgctcgggatcctccggctccggtccccgtagagtgcctcgctcaatacaagttgatgacccgaagtaccagacaccagagtacatctggcacgcgtgggacttcagacgtggactctttagccagaaaggtattaagagagtgtcagaacaaccaacagatgttgaccttcctacaggcaggggcaagagacccaagagagacacagacggcccgcaagagcaaggccaagaagaaggctcgtcttccatcagacgagtcctccagcagtggctccactccagtcaggagcagagccaagaaagcgaagaagaagcagccccgacgacgctctcgcaagagctacaaaaacaactcaagcagcagcagctcatgggaaagcagctccgagagctcagtctccaactcgcccaagtccaagcggggggacaccttcacccccttttacaatgccatgcataaataaagtgtacatgtttccccctttgacctctactccctccagcagagactggaaagaggagtacgaggcctgcagagtctgggacagacctcccagaaacgacctaagaaagccccctttctatccctggatgcctcctacgcaccatgtaagctttaagctctccttcaaataaatgttggccgtgggagtttcacttgtcggtgtctacctctataagtcactaagcactccgagcgtaagcgaggagtgcgaccctc

SEQ ID NO: 2143 - protein, 763 aa, Alphatorquevirus sp.
MVWRRGRRWRRWRWRRKPRWRRWRRWRRRRRRPARRRRPRRVRRRRGGWRRSYRRWKRRRGRRRHKKKLILTQWQPAVVKKCRIVGYDPIIICGLNRTSHNSTTHAEDYTTGNQAFGGGLCTTKYTLRILFQEYMAHHNYWTASNRDLELARYLGASIIFFKHPTVDFVARVRTMPPFNDTDMTAASLHPGMLMLAKKKIIIPSLKTRPSRKHYVKIKIGAPKLFEDKWYSQRDLCDTTLVVIEATVADLQYPFGSPLTNSICCNFQILNSNYDNALSTLIGTQGDKDRDQCYNFLLNTITYYNTSQTLAQLNKFLPTTNTTQLSESNAAHSINPSNKTENTYQSTNKEIHNNTLYGGAAYYKQNGTSTTTSPPHKMKEANKAYTAAARKILGNWNFTSMNTSSCSDLQGLNYFDYYTGMFSSIFLASGRSNWEVKGSYTDITYNPLVDKGEGNMIWIDWITKGDTIYSETKSKCLLRDLPMWALCYGYADYVLKCTGISSIKNEARIVMRCPYTYPQLVKHSNDNFGFVVYSDNFGRGRMPGGDPVPSTRNRVHWYITITHQTEVLECISQTGPFAYHSDERKAVLTIKYNFRWKWGGNPVFQQILRDPCSGSSGSGPRRVPRSIQVDDPKYQTPEYIWHAWDFRRGLFSQKGIKRVSEQPTDVDLPTGRGKRPKRDTDGPQEQGQEEGSSSIRRVLQQWLHSSQEQSQESEEEAAPTTLSQELQKQLKQQQLMGKQLRELSLQLAQVQAGGHLHPLLQCHA

SEQ ID NO: 2144 - protein, 155 aa, Alphatorquevirus sp.
MGKALKKATPLTMFLGRVYRHQKRKVLLSLVHTPQKTPSSMNRWSPPAHDARGIERQWYECVWRSHAACCGCGDFISHINDLAHRFGRPPGSRPPATPQPPAVRALPALPAPEPWSGAGGDAGAGGDGAASRGGGDGDAGDVADEDLLDAVDLAE

SEQ ID NO: 2145 - protein, 62 aa, Alphatorquevirus sp.; identical to SEQ ID NO: 1710

SEQ ID NO: 2146 - DNA, 2958 bp, Betatorquevirus sp.
cgggtgccgaaggtgagtgaaaccaccgaagtcaaggggcaattcgggcaaggtcagtctggcagaccgggcaagaaacttaatattatttatattttacagatatgtactcatcatggaagaatcccacatcatcaaagagacaacaagaactacaatggattggaataattaactcctgccacgatcaattttgccactgcgacgaccccacaaaccacctgctttactgcttaaacaagttttcaggtttccaaaaacctgaaccagatattcgcaacatacaatgcctccttactggaattactcctactaccgtagaagaagaaaccaaagaaaaagacgaccctggatttctagaaggggagttagaaaaccttttcgcagaagaaaatacagaaacaaaagaaaacgccgatacttccggaaggtaaaaaactttcgtttttctaaaagaaaaaaaaaatcaattatactaagacaatttcaacccagtactattaacaaatgcaaatgtattggatataaatgtttatttcaaggaagtcctcttagaacaatgaataactttgtacaatatatatattcttatataccagaaaagcaaccaggagggggaggatggagcatacaagttttaagtttagactctatatacgaggactaccaacatttacaatgcatctggactaaaggaaatgctggactaccattagttcgttacttaggatgtcaatttactttgtatcaatctcaagaaacagactatgtatttgtatatgataactgctggcccatggtagacactatacacactcacgcagactcagctccttttagaatgcttcaaaaaaaacataaagttgtaataccaagccgaaactctagtaaaagaaaaaaaccatataaaaaaatctttgttaaaccaccacaacaaatgcaaaacagatggtacttttccaaagaaatatgtaaaactccactagtaatgtttaccgctacagctatttctctatttaacccatttacagatcctagagctaaaagcaacaatgtaacagtacactgcataaatccatacatttttcaaaacccagactttcaacactggggtacaacaggatattcacctaaatctacagactcaaacataccactatacctatatgcctcaaacagccacaacttaaactatgattcattaaaaactaaacagcacgcaattatagctttaacaaacacaaaagaccacacaccaggacacgacttaagaaataacaatcaaaatatatcccaattagcaggaaacccatttcatgaagactacacttcaggaaacatgtacacatacatatcaatgataactcctagtgaaatgaaacagttagttacaacaggaagtgaaccacctacaaataaacaaagtataactaacacaggagaatttatatacacatttagatataatccagacaatgatgacggcagtactaacaaacaatacattgtaagtactgcctcaggacacacaatacaaccacctacagaagaaaactttattttatcaggatttccattcccatacatgttatggggatggacagactggattaaaaaactaggacaaacaccacaatttgacacaaacaaactagttgtactagaatctaaagcattcgatgacaaaactatacctaaatttattattgtagacccacaatttatacacggatttgatccctacgaagacttaaatgcagaaaatcatactatttcagcatacaacgcaaaaaactggtttcccagatatgaatttcaaaaactaaccattaacaacatatgcttatcaggtccacattgtcctagaccaccatgggatcattacttacaagctaattgtaaatacaaaatgtactttaaatggggaggctgtcctaaaaaccttcaaaaagcatataatccttgttcacagtccatttggcccacgcccgataacaagtacggaagatctgaagtgcagaatcctaacatcttcccacaaactgaactctatgaatgggactgggaagaagactacattacaaaatctgctattcaaagaatccaaagatttacagaaattgatccaaaaatgttctcaattacaggaagcaaaagcaaccccccagcactccaaaaaaagacgaaccaagaccaagaaaaagaggaggaggagaagctcaagctccagctccacaagctccgattcaacaaagtcctcctccagctccaactccgacaacaattaaaatcactaaaagcaaagtaaaagtacacctttttccaccagaaaaacaaacaaacagaagactaacaccatgggaacaagaacaagaaaacgaaatagcaaaaatattttgcagacctcaaagatactttcttttagatcctcccacatacccttttttccctccaacacctaaagttcctaaagtcaattttgatttaaactatacttttaaataaacaaggccaacaaatttcacttagtggtgtccatttatttaagtttaaaccttaataaacatccaccgcctccctaaaattagggcgccaaaatttaaaagggggctccgcccccttacacccccaagggggctccgcccccttacacccccaacacccccaagggggctccgcccccttacacccccaagggggctccgcccccttacaccccctaattaatattcaacaggaaaaccacctaatttaaattgccgaccacaaaccgtctttaacttccccattttacattacttcctctttcacttattattattcatgacattaattattaaacaccgtaaatccggggaggatcctcaaaactatataaccaactacacttccgaatggctgagtttatgctgccagacggaggcgaagttagtacactaacttcaggctgacctaggg

SEQ ID NO: 2147 - protein, 673 aa, Betatorquevirus sp.
MPPYWNYSYYRRRRNQRKRRPWISRRGVRKPFRRRKYRNKRKRRYFRKVKNFRFSKRKKKSIILRQFQPSTINKCKCIGYKCLFQGSPLRTMNNFVQYIYSYIPEKQPGGGGWSIQVLSLDSIYEDYQHLQCIWTKGNAGLPLVRYLGCQFTLYQSQETDYVFVYDNCWPMVDTIHTHADSAPFRMLQKKHKVVIPSRNSSKRKKPYKKIFVKPPQQMQNRWYFSKEICKTPLVMFTATAISLFNPFTDPRAKSNNVTVHCINPYIFQNPDFQHWGTTGYSPKSTDSNIPLYLYASNSHNLNYDSLKTKQHAIIALTNTKDHTPGHDLRNNNQNISQLAGNPFHEDYTSGNMYTYISMITPSEMKQLVTTGSEPPTNKQSITNTGEFIYTFRYNPDNDDGSTNKQYIVSTASGHTIQPPTEENFILSGFPFPYMLWGWTDWIKKLGQTPQFDTNKLVVLESKAFDDKTIPKFIIVDPQFIHGFDPYEDLNAENHTISAYNAKNWFPRYEFQKLTINNICLSGPHCPRPPWDHYLQANCKYKMYFKWGGCPKNLQKAYNPCSQSIWPTPDNKYGRSEVQNPNIFPQTELYEWDWEEDYITKSAIQRIQRFTEIDPKMFSITGSKSNPPALQKKTNQDQEKEEEEKLKLQLHKLRFNKVLLQLQLRQQLKSLKAK

SEQ ID NO: 2148 - protein, 109 aa, Betatorquevirus sp.
MYSSWKNPTSSKRQQELQWIGIINSCHDQFCHCDDPTNHLLYCLNKFSGFQKPEPDIRNIQCLLTGITPTTVEEETKEKDDPGFLEGELENLFAEENTETKENADTSGR

SEQ ID NO: 2149 - DNA, 2958 bp, Gammatorquevirus sp.
gccccccccgcaccccccctacgtcacaaggtctaggggcaattcgggctagggcagtctagcggaacgggcaagaaacttaatatattttttattttagatgtctgtattcttcaacaaaacttcatacaacaaagaaaccttaaaccagctatggatgagtatcattgctgattctcatgatatttgctgtaaatgtgaacaaccctttgctcacctacttgacagcatttttccagacggccacaaagacagacagctaactattgaacaaattattaaaagagattttgcagcatgccattctggtggtacagaagaagaaaaccttggtttggtagatggtctagaaagaagagaaatacctggcggcgcagaaaaccaagaagaagaatatataaaagacgcagaactagaacaactcgtcgccgccgcagaagacgccactacaaggtaagaagaaaacaaaaaaaaataactgttaaacaatggcaaccagaaagtattaaaaaatgcaaaattaaaggactaggacccttagtactaggagctgaaggatgccaatacagatgcttcactgtatacaaatatgaatggacaaatcctaaaactccagggggtggtgggtttggctgtgaactgtttactctacaatacttatataatgaatatttagcaaagcataatatatggactgcatctaatctctacaaagactttggtagatatacaggctgtcaatttacattctatagacatgaacacacagactttattataaaatatgacattcacccaccctttactgttaacaaatatacatacatgatgctacacccctttaacatgctacaaagcaggcataaaaaaatactactaagcaaagacacaaaacccaatgggagactaacaaaaaaactaaaaataaaaccacctaaacttatgtcaaccaaatggttttttcaagaagaactaagtaaatatggactagttacccttgcagcttctgcatgtaactttagatttccatggatgggatgctgcaatgaaaacctaattataaccctagactacctacagccaggattttataaacattctgaatgggctcaagctactactcatgcctataaccctggaggccatacacaccctgtatcaacaaccatgtattactattattatgatgacaggggtgtagaacaaacctggcaaatgaaagactttactggtacaaatccatacactcactccctcgcctatgacgatggatggttcaacaccaaagtactaagagcacacttagtttccacaaacccaagcaaaaaaagccctatatctttaacaccatgtggaacactaagatacaatcccatactagacactggtgaaaaaaacaaagtttgggtggtatctacattagtatatgactggcaagttccaaaagatgaagacctaataatacaaggctatcctctttggatggtattctatggctttacttcttatttaaaacaagtaaagtcaaaaaccactccatttaaaggtagcatgatatgtgttcaatctccagctctatacagagttagaggtgaagacccaacagctttctatccacttatagacagatcttttattaaaggcaaaggcactggtaacacagacccaattaaattttctggaaatgaatggtttccaagcatattcagccaaagagatagtatatcacaaatagtaaattgtggaccctatatacctaaatacaatgaaacaagagaaagtacatggcaactaaattatttttacaaattttattttaagtggggaggcagctttccaccagaccaagcagctgagaatccacaaacaaaaggtacctatgacatacccgataaaaacaaagaaacacttgaaattgctaacccaattagccaacaataccactcagtatttaagccctgggactacaggagaggagaaattacaaaaaaagcttttaaaagaatgctccaacacatcgaagttactgactctatatcaacagattcaagcgactgctcctctcccaagaaaaagagaaggccaccactcctccaagacccaaaaaaagaaaatcagaaaatccaagcatgtctcctctcactctgcgaagagcctacatgcccagaccaaaaagaagagaatctccacctcctcatccagcagcagcacgagcagcagcagcaaatcaagttcaacctcttgcacctcatctcagacctgaaatccaaacaaagaacactgctacacaacacagggctactaaactaacaagatttaaacaaggctttgaatgggaaacagaactacagctttcaagagcctttcaaagacccccaagattgtttaaagaagacacacccttttacccttggttaccaaaattcacaccccttgtaaactttcacttaaattttaaaggctaggcctacactgttcacttagtggtgtatgtttaataaagtttcacccccaaaaaaattataaaataaaaaaaaaaaaaaaaaaataaaaaattgcaaaaattcggcgctcgcgcgcgctgcgcgcgcgcgagcgccgtcacgcgccggcgctcgcgcgccgcgcgtatgtgctaacacaccacgcacctagatttgggtgcgcgcgctagcgcgcgcacccaaatgcgccccgccctcgttccgacccgcttgcgcgggtcggaccacttcgggctcgggggggcgcgcctgcggcgcttatttactaaacagactccgagtcgccatttggcccccctaagctccgcccccctcatgaatattcataaaggaaaccacaaaattagaattgccgaccacaaactgccatatgctaattagttccccttttacacagtaaaaaggggaagtgggggggcagagcccccccacaccccccgcgggggggggcaga

SEQ ID NO: 2150 - protein, 670 aa, Gammatorquevirus sp.; identical to SEQ ID NO: 1349

SEQ ID NO: 2151 - protein, 118 aa, Gammatorquevirus sp.; identical to SEQ ID NO: 1350

SEQ ID NO: 2152 - protein, 136 aa, Gammatorquevirus sp.; identical to SEQ ID NO: 1351

SEQ ID NO: 2153 - DNA, 2958 bp, Betatorquevirus sp.
cgggtgccgaaggtgagtgaaaccaccgtagtcaaggggcaattcgggctagctcagtctggcggaacgggcaagattcttaaatatattttattttacagaatgtctacaagatataagccagcaaaatgctctttaagacaacaaaaattaaaatggatgaatagtcttgttcacacacacgatattatgtgtgactgccctcatccactggaacataccgcgactttaattttcgaacaagaaccaaaattaaaatttacaccaccagaacaagatctaattaaaaaatgccttactacaaatactggggatatcgtcgcagacgaccacgacaacgacgcttttggagaaggagatttagaggaccttttcaaagaagattttggagaagacgacaaagacaccgctgggtaagaaaaagaaaattaaaaactttaaaacttaaagaatggcaaccacaatatataaaaaagacagttgtaaaaggttactaccctttgtttatgagtacttcggaaagactctcaaataatttaaactgttacttagagagcattgcacctgaattttggcctggaggggggggattttctatttgtaacttttctctaaatactttgtatcaagaacaccttgtactacataactggtggactaaatctaatgaaaacatgcctttaataagatttacaggatgtaaaattactttatatagacaagaaacacaagattacttattttgctataatagaacctatccaatgcaagcaaatgccttaacttatactagcactcatcctcaagctatgctattaaacaaacaaactgttgtagtaacttgtaagcaaagatctagaaatagaaaaaactacaaaattgtaagaattaaacctcctgttcaaatgcaaaacaaatggtattttcaaaaagatttagcatttttaccactattacaaactatgacaacagcctgctcgttagaccgcatgtttctaaatagctcagccgttagttccacaattggctttacatcactagatacagttggctttagaaaccacaattttacaaaattttcaaccacaggttactacccaatacatgaagaaaaactatttggatgctataatggacaagagataaacaaattaaaattatcacaattatgctacctaggaaacccacaagacaatacagaaggaacaccaataggagaaataccactaagtgcagtaggtacagcaccaaaattatcacagcaaatagacaaagccagaacagaatggggataccaaggaaacccatttaatgctcactatttttatggagaaaagagagtactagtaaccacactcacttgggaccaaattaaaacgaaatatggaaaaatcgatgaaccatacttacaaacaactgattttaaattaaaaactcaaaaatgggtgcactgcagatacaatccatttaaagacaaaggcaaaggtaacaaaatatatttactaaaaacagacagcacacaacacccagacgaatggacaccaccaccagaagaagacatagttatatcagacataccactttggctagcaacctggggttatctagactatcaaagaaagtgtggattacaatcccaaatagacacaaccacagtttttgttatatactcaacatatatagatcctccttcacttaaattttatgttccactagacaaaccatttttaaacggtcacagtccatacacagaagaactataccctagtgaccaatttaattggcatccaaaagttagataccaagtacaatcaataaacaacatagcaatatgcggtccaacagtagctaaattaccagaacaaatatcatgcgaaggtcatatgaaatatcaattttactttaaggttggaggacagccaccacctatgtcaactcttatcgacccagacaaacaaccaaaatataatatacccagtaacctcctcaaaacaacttcgttgcagagtccaacaactccctttgaatatctcctctacaactttgacgaaagaaggggacaacttactaaaaaagctgcaaaaagaatcaaaacagaccaggaaactgaaacaaattttctctcaattacagaaacaaacaacagctgtccagtactgccctactcaaaaatacagacaccggaatcatcggaggaggaagaaacacaggagacatcgatcgaggagcaactcctcctccagcgaagagagcaaaaactcctcagacggagaatcaaccagctcctcaacaaattaacaattttagaataaaaactggacctataaaagtacaattatttcccacagaaacaaaaaacagacgtatgacactgtgggaatatgaacaagagatagaagactctattatatggcacagagtgccaagatcttttattaaagataaaccaacctacccatgggtcccccaagactccccatttactgtcaactttgatttaaatgcgccgaaataaaattcaacgccagcaacaattcactctcggtgtccatttattaaacttaaacttatataaacatccaccacactcccaaatacgcaggcgcacaagggggctccgcccccttaaacccccagggggggcaaagccccccctaaaaccccccccataaatattcataaaggaaaccacaaaattagaattgccgaccacaaacagccatatgctaattaacttctgctattttacttaacttctccaaaaattaattaataatcaccatcacacctacgtaaaacaggcgtggctacttatctatataactaactacacttccgaatggctgagtttatgccgccagacggcttatctatataactaactacacttccgaatggctgagtttatgccgccagacggtggacggaacacaacagtgactccggactgagcttggg

SEQ ID NO: 2154 - protein, 673 aa, Betatorquevirus sp.
MPYYKYWGYRRRRPRQRRFWRRRFRGPFQRRFWRRRQRHRWVRKRKLKTLKLKEWQPQYIKKTVVKGYYPLFMSTSERLSNNLNCYLESIAPEFWPGGGGFSICNFSLNTLYQEHLVLHNWWTKSNENMPLIRFTGCKITLYRQETQDYLFCYNRTYPMQANALTYTSTHPQAMLLNKQTVVVTCKQRSRNRKNYKIVRIKPPVQMQNKWYFQKDLAFLPLLQTMTTACSLDRMFLNSSAVSSTIGFTSLDTVGFRNHNFTKFSTTGYYPIHEEKLFGCYNGQEINKLKLSQLCYLGNPQDNTEGTPIGEIPLSAVGTAPKLSQQIDKARTEWGYQGNPFNAHYFYGEKRVLVTTLTWDQIKTKYGKIDEPYLQTTDFKLKTQKWVHCRYNPFKDKGKGNKIYLLKTDSTQHPDEWTPPPEEDIVISDIPLWLATWGYLDYQRKCGLQSQIDTTTVFVIYSTYIDPPSLKFYVPLDKPFLNGHSPYTEELYPSDQFNWHPKVRYQVQSINNIAICGPTVAKLPEQISCEGHMKYQFYFKVGGQPPPMSTLIDPDKQPKYNIPSNLLKTTSLQSPTTPFEYLLYNFDERRGQLTKKAAKRIKTDQETETNFLSITETNNSCPVLPYSKIQTPESSEEEETQETSIEEQLLLQRREQKLLRRRINQLLNKLTILE

SEQ ID NO: 2155 - protein, 104 aa, Betatorquevirus sp.
MSTRYKPAKCSLRQQKLKWMNSLVHTHDIMCDCPHPLEHTATLIFEQEPKLKFTPPEQDLIKKCLTTNTGDIVADDHDNDAFGEGDLEDLFKEDFGEDDKDTAG

SEQ ID NO: 2156 - protein, 122 aa, Betatorquevirus sp.
LSSTALLKNTDTGIIGGGRNTGDIDRGATPPPAKRAKTPQTENQPAPQQINNFRIKTGPIKVQLFPTETKNRRMTLWEYEQEIEDSIIWHRVPRSFIKDKPTYPWVPQDSPFTVNFDLNAPK

SEQ ID NO: 2157 - DNA, 2958 bp, Betatorquevirus sp.
cgggagccgaaggtgagtgaaaccaccgaagtctaggggcaattcgggctagttcagtctggcggaatgggcaagaaacttaaaatattttattttacagatgagcaaattctacaaacctgtaaatatttctacaaaacacaagaatttacaatggattaattgcatggttggagttcatgatttgaattgccactgcaacgagccgctaaaacatataatatttggaatactggaacaagaacccaacatcaaatttgacaaagaagaatctaaattaattcaaaaatgccttactggagaagaccataccgacgctatcgacgctattggagacggagacctagaaaaacttttcgaagaagacgtttttggaccagaagacgatactgggtaagaccccgcaaaagaaagcttaaaaaaattattttaaaacaatggcaacccagtactatcaaaaaactaaaagtaagaggtcaataccctctttttcaaggaactagtgaaagaataggaaacgataacactgcctatatagatgaaatagctcctcaaaattatccagcaggaggactatattcaataactgtatttaccttacaaggactgtatgaactgcaccaaaaagccagaaattggtggactgttagtaactgtgacttacctttaattagatacttaggatgtactttaaaattgtattatagtaatactgttgactctgtaaatgttattgttaactgtggtgaacttaaagcaaatgaacaaatgtttcaatcatgtcaacctgctgtactaatgctaaacaaaaaaaagaaagttttactatgcagaaactataaaaaagctagaaaaccatacaaaaaatggtttataccaccaccagcactaatgctaaacaaatggtattttcaaaaagaaatagcaaattacccactattcatgatactatcatcagctgcaagcttagacagatattttcaaccagcagactcagtatctagcacaataggctttaaatcactaaatacagatttttttgccctacataactggaaaacaacatttgccacaccatatcacccatctgaggaatggtacatactaggaataggaaacagaaaaacatttgacaatgcaaaaagagacgacattataatgctaggaaacacaatggatgtaggacaaggaaccacaattggatccgtaagtacttccccaacctggcaacaaaaagtagaggcctactctaaaaagaaaaacttatggggaaatccatttgacccattttggtttgaccacgacccagaatcaggcatactatgcttactaaaagtagaaaaaacacaaacagtttgggaaactattaaaaacttaaatgaaagtcttaaaaacaacactggaaagataatacaaccaacaaaaccattttacatagactgccgttacaatccacaagcagacatgggccacaatgccacatttgtaacacgaataacaggagataactcagtttggcatgaaccagaagacacacatttagaaacaaaaggcctacctttatggttattaaactttggatggcacgactacttaaaaaagagtaatacaccacaaagactagaaacagattacatacaagtgctaatttcagactacatatcacctaaaatgaactattatgtaccattagactggtttttcattaatggcagaagcccatacatggaagaacaccacataaagccatatgatcagcaaaattggcaccctaaactaaactttcaaaatcaatcaatatcccatattataaattcaggcccagctacagctaaactaccatctctaataagcgtagaaggacattttacttatacttttcactttaaggttggaggatgcccaccagacatggacaaagtttgtgaaccaagtaaacaaccacaatacccccagcccggtaacatcctatcatcaattttattgcagaacccatcaactcccatacaatactatctcagctcctttgatcaaagacgagactacatcacaaaaaaagctagcaaacgcctcaaagaagacgcggaatttaaagaaactgtttttaaacctacaggaaaaactctgctcgacctccaactcccatccccaacaacaacatcggaggaggactcatcgtcggaggaagaaagcgaagaagcggtacagcagcacctccaccgacaccagcgaaaacagcgaaaactccagcacggaatcctcaaactgctaaccctactagaatcaaaataataagcagcaaaataaaagttcaattatttccaacagacaccccaaaaaaccgtagatttagtccacaagaatttgaaactgaacttgaactttgtaaatggctgaaaagaccacctagaacttttttttatgataaacctttttacccatggtgtgtacctgaacctattgtaaactttgacttaaactataaattctaggcctgcaaactttcacttgttggtgtccatttatttaagtttaaacctatataagcatccaccgcctccctaatacgcaggcgcacaaggggctccgcccctttaaccccaagggggctccgcccccttaaacccccaggggggacacccccctaaaaccccccgacaaccacaaaatttgcattgccgaccacaaacgaacaggaaaccacaaaatttgcattgccgaccacaaactgacatatgctaattaacttccctaaaataccaactacttccccaaaaattaattagtaatcaccgtcacacagggcgtgtcctgtctgctatatattgaatgtaaggtccgaatggctgagtttatgccgccagacggagacgggatcacttcagtgactccaggctgaacttgggcgggagccgaaggtgagtgaaaccaccgaagtctaggggcaattcgggcggg

SEQ ID NO: 2158 - protein, 667 aa, Betatorquevirus sp.
MPYWRRPYRRYRRYWRRRPRKTFRRRRFWTRRRYWVRPRKRKLKKIILKQWQPSTIKKLKVRGQYPLFQGTSERIGNDNTAYIDEIAPQNYPAGGLYSITVFTLQGLYELHQKARNWWTVSNCDLPLIRYLGCTLKLYYSNTVDSVNVIVNCGELKANEQMFQSCQPAVLMLNKKKKVLLCRNYKKARKPYKKWFIPPPALMLNKWYFQKEIANYPLFMILSSAASLDRYFQPADSVSSTIGFKSLNTDFFALHNWKTTFATPYHPSEEWYILGIGNRKTFDNAKRDDIIMLGNTMDVGQGTTIGSVSTSPTWQQKVEAYSKKKNLWGNPFDPFWFDHDPESGILCLLKVEKTQTVWETIKNLNESLKNNTGKIIQPTKPFYIDCRYNPQADMGHNATFVTRITGDNSVWHEPEDTHLETKGLPLWLLNFGWHDYLKKSNTPQRLETDYIQVLISDYISPKMNYYVPLDWFFINGRSPYMEEHHIKPYDQQNWHPKLNFQNQSISHIINSGPATAKLPSLISVEGHFTYTFHFKVGGCPPDMDKVCEPSKQPQYPQPGNILSSILLQNPSTPIQYYLSSFDQRRDYITKKASKRLKEDAEFKETVFKPTGKTLLDLQLPSPTTTSEEDSSSEEESEEAVQQHLHRHQRKQRKLQHGILKLLTLLESK

SEQ ID NO: 2159 - protein, 112 aa, Betatorquevirus sp.
LAEWARNLKYFILQMSKFYKPVNISTKHKNLQWINCMVGVHDLNCHCNEPLKHIIFGILEQEPNIKFDKEESKLIQKCLTGEDHTDAIDAIGDGDLEKLFEEDVFGPEDDTG

SEQ ID NO: 2160 - DNA, 2957 bp, Alphatorquevirus sp.
ctgactcaacttcttcggagccgcggggggggcaaggggcaattcgggctcgggactggccgggctatgggcaaggctcttaaaaagctatgtttctcggtaggtactggagaaagaaaaggaaagtgcttctgcaagctctgtcaactccagcgaaaaaacctgatatgagtgcgtgggtccctcctatagataatgttaccgagcgtgagaggagctggctcaacggcatttttcagtctcacagagctttttgtgggtgcaatgatcctatctatcatcttagcactctggctgctcgctttaatatgcagtcagggccgtcgccgggtggtgatcctaggccgccgcgaccgccactgagacgcctgccagcgctccctgctcctcagaactcccctaacaacagcaaccggaggtcatggcctggtggggatggtggcgccgccggtggccccgaaggagatggaggcgctggaggacccgccgtcgcagacgactaccagccagaagacctagacgacctgttcgccgctatcgaaggagaagagtaaggaggcgccgcggctgggggcggtatgggcgacgcaggcgcagactgtacaaacgcagatacagggtcagacgcaagagaaaaaagctaataattaaacaatggcagccagctaacataagacgctgccgcatcaggggtcttttacccatagttatctgtggacacggacgcagtgccagaaactatgccctgcactctgatgacactgtacctcagagacagaacttcggaggggctctaagcaccacctccttcagcctcaaagtactgtatgatcagcacctgaggttcctaaacaggtggtcttctagcaacgacgtactagaccttgccagatacctaggctgtagatttaccttttacagagacaaaaagactgactacattgtacagtatgatatcagtgctccctacaaactagacaaagacagcagtcccagctaccatccaggcatgctcatgcagaccagacacaaaatactagtacccagctttgacaccagacccaaggggcgtgctaaaatctccattagactacccccacctaaaatgttcatagacaagtggtattcacaagaggacctctgtaccgttaatcttgtgtcacttgtggtcagcccagcttcctttctacatccgttctgcccaccactaactgacaatccttgcatcaccttccaagtgttgaaagaattctattaccccattataggctactctagcagccccgaaaaagtaaaagatgtctttgagaacacattatacaaacatccatactactaccagcaaatactcacagactcttttatcagagaaatacaatataacccagatggcaccgaaataaaaaactccataactttaggcaccacaacagtacctgacatgaccgcatataatacctgggtcaagacaaaatttaaacaaaaaaatgtaaatgtacactttaactactgcacatacaaaccagacaaagagaaactagaaactctaagaaaatactacttctactgggagacagtaactacaaacaaatgtgtaactgtaaatatgatagccccctcacaaaactggtgggaatacaaaataggcctcttcagtcctatatttttaagcccctttagaaccagcagtttagacttcccaactgcctacagagacgtgtcatacaatcccctcaatgacaagggggtgggcaacatgatgtggtaccagtacaacaccaaggcagacacccaatttgtagcctcttcctgtaaagttgtactacaagacaaacccctctggtgcatggcctatggttactcagactttgttgagagcaccataggagaataccaagacacacaactaaatggctttgtctgtgtcatctgtccctacacagtaccccccatgtacaacaaagacaacccccagatggggtacgtattctatgacagttcatttggtaatggcaaatggatagacggaaccgggtttgtcccactagaaatgcagagcagatggcgaccagaactcctgttccaacagcaagtacttactgacattagcatgagtggaccgttcagctacaaagacgatgtaaagaacactaccattaccatgaagtacagatttgactttaaatggggtggcaatatgctctatcagcagacaatcagaaacccgtgccggggcgacggacagccttccgactcccatagagacactagatcagtacaaatcgttgacccgcttaccatgggtccccgatacgccttccatcagtgggactggagacgcgggtggcttagtgacaaagctctcaaaagaatgttacagaaaccgcttgattttgaagcgtatacaaaacctgcaaagagacctagactattcccccctacagacgagcaacatacagacggaaggccaagagacgcctccacttcggaggaagaaagcatccttacctttcaagaagagagcccgccgaaccaagagatacaagtccacctccgaaagcagctcctcgagcagcgagcactccgacagcagctcaagctcatgttccagcaactcctcaaaacccaggcgggcatccaactcaacccattattattcaaccaagcataaatcaggtgctaatgtttccagaaagaggtccaaaacccgctcctagcacaggagactgggagacagagtacatggcctgtaaattctgggacaggcctcctagaaagtacctcacagatacccccttctacccctggatgccccctgcacctcctaagttctctgtaagcttcaaacttggctttaaaccctaaataaacaaggccatacactgttcacttgtcggtgtctacctcttaaggtcactaagcactccgagcgtaagcgaggagtgcgacccttcccc

SEQ ID NO: 2161 - protein, 749 aa, Alphatorquevirus sp.; identical to SEQ ID NO: 1986

SEQ ID NO: 2162 - protein, 154 aa, Alphatorquevirus sp.; identical to SEQ ID NO: 1987

SEQ ID NO: 2163 - protein, 60 aa, Alphatorquevirus sp.; identical to SEQ ID NO: 1988

SEQ ID NO: 2164 - DNA, 2957 bp, Betatorquevirus sp.
cgggtgccgaaggtgagtgaaaccaccgaagtcaaggggcttatcgggctgaatcagtcttggcggaacgggcaactaacttaaatgatttaccctacagatatggcctttccatggagaccaacagcattcggacctagaggaagagaattaaaatggcttaattctgtctttgaatcccactcctgcttctgtggatgcgactctgcttacctacacttcattaccggctgcaaccactctgaatacggatttctaacagacaaagaaatactaactgcagaatgcctctccgctggtggtggaaaagacgccgtcccttcaacttctacagacaaaaatactggagacgccgtagacggcctaatacctggagaactagaagggctattccaagaaccctttacagaagaacaaggagaagacgaagggtaagaaaatacttttataaacataaaaaacagaaaaaaaaaaagattcctatatttcaatggcaaccaaagagcatagtaaaatgcaaaattaaaggaatctttgacttattatactgctcaaaaggcagagaacaatttaactttgctcaatatcaagaaagctttgtgccacacttagaacccggaggagggtcatggggactatatgtatttagcctaagtgccttatttcaagaatgggaaaaactgcataacttttggactaaaagtaacttaaaatatgacttgtgtagatataatggtgtaaaatttagattttatagacaagaccatgtagactatgttgtaaaatattcaacatgttatcccatggtagacacaatctacacacacgcagcatgccatccaaacagactattatcctcaaaccaaaaaatactagttagaagcttccacaacacaaaaagcaaaaaaccttatgttaaaaaatatataagaccaccacaattaatgaaatctaaatggttctttcaaaaagaactatctaacacaccactattactactatcagtagcctcaacaactttaaactctacatttattaatccaaaccaacaaagtacaaatataacatttaatgtactaaaccccaaagtatttcaaaaggccaactggcagtcaggcacaggaaacaattacagacctaacgcaacatattactactggggtggtgaccaacatacaccaccagaccaaaaaccacaacccaaagaagtggtgcaactaactgccactgaaaacagacaaggaacaccatcctcaaaattaactggaaatatatttttccatagatatttacattcagaatggggagtatgggtaacatcaaaagaagcccctacaacacaacaagatttttcaccactaagtcaaccattattaatacaatgtagatacaacccacaaagagacacaggactcctaaatgaggcatatatactaccaaaccacaattcagataactttaatccaccaacaggaacaaatgaacacatagacggcttcccactatggttaatgttctggggcttaactgactggtggagaaaatctaaaccaggctcacaaattgatttaaactatacattctgttttaaatcccaatttgtcacacccaaactagattactacgtaccaataaacgaaagcttcataaaaggtttgggaccatataacaatgaagaaattacaactacaaatttaaaacactggtacccaagaatattataccaaaatgaagtactaaatgacttttgtacctgtggacctaatgctccacgcccattacaaaaatcatgggaagctaaatgtgaatatgaatttctttttaagtggggaggatgccctccaaaatctcaagatgttgacgaccctacaaaaaagccacaatatcccatccccgataaaatcagcctcggaccacaaatcgaagatcctgaaacagacccaaaacttaaactctttgcatgggactttagaagggatatcattaccgcaaaagctcttaaaagaatacgagaaaaccaagacattaaagacattatgcttgaaattacagaacgatctccaaaacgaggacgaatggaccccgtcgcctaccaaaaagaacaagagccaacattataccaagcactccaacaaacaccgccgccgcaagaaatacaaacacaaccggagagactactccagtacttcagaaaccaacagcagctcctcagacagcagctaacattactggaccaaattcaacaaaacaaatacaaaaaacaactataaaatgtgtacattatactcaattgtttaaaagtactgttataaaaaacaggagactaaatgcttatgatttagaagatgaaaaatatctctgtaaaatatttcacagaccccctagacactttctgttagatcacccttattacccctggttacctaaacatcataacaaaaaaatgtacaatgataatttcaatgttaactttgacttaaactttcaagatgaataaacaaggccaacaatattcactctcggagtccgtttatataagttaaactttaataaacatccaccacactccctaaattgttggcctaaaaataaaggcctaaaaacaaaatggctgccaaaacacaaaatggcgcctaattaccataaaaattaatattataattagccgggggggcaaagccccccggacccccctggggggcaaagccccccagacccccttggggggccccccctataccccccctttaaaccacaaaatttgcattgccgaccacaaacagacatatgctaattaacttctcctttctcacctaacttcctcaaaaattaattagtaatcatcgtcacacagggcgtgccttctatgctatatattcaacgacacttccgaatggctgagtttatgccgccagacgaagacggcaactgttcacagtctgcaggctgattcaggg

SEQ ID NO: 2165 - protein, 661 aa, Betatorquevirus sp.; identical to SEQ ID NO: 1648

SEQ ID NO: 2166 - protein, 116 aa, Betatorquevirus sp.; identical to SEQ ID NO: 1649

SEQ ID NO: 2167 - protein, 68 aa, Betatorquevirus sp.; identical to SEQ ID NO: 1650

SEQ ID NO: 2168 - DNA, 2956 bp, Betatorquevirus sp.
cgggtgctgaaggtgagtgaaaccaccgaaatcaaggggcaatatgggctcagtcagtctagcggaatgggcaactaactaaattatattttacagaatgtcagactactacaaaccaataacatggagcagaaaacactgcaaccttaattggattaacagcattgttactgtacatgaccttcaatgcgcctgcaacaatccactaaaacacacaataattggaataattaaccaagaaccatctatcaaatttaacaaagaagaatctacaaaaatacaaaaatgccttactactggagaccaagaagaaggcgatattttagaaaatattggagaaggagacctagaggcctttttcgccgcagactttggagaagaagacgcagaaacacggtaagaaaaagaaaactaaaaaaagtaatagtaagacaatggcaaccaagtactatacgaaaactaaaaataagaggaatgtacccattatatgaaggaaacagagagagaatttctaataactttaaccaatgggccgcatcaatagccccccatggatttcctggaggcggactatggtcaattataagattttctctatactctctgtatgaactacaccttaaaggcagaaactggtggacaatgtcaaactgctctttaccactaataaaataccaaggatgcagcattaaattttacaaatctactaatacagactatataacagtattcacaacttgtggagatatgacagcaaacttagaaacctatcactcctcacaaccatcaattttaaacttaaacaaaagaaaaataataatgacatgtaaagaaaataatcaatataaaaaaccctacaaaaaaaaatttataaaaccacctccactatttgaaaacaaatggtactttcaaagagatatagccaaaataccattattaatgctaataacatcatcatgcagtttagacagatggtacataagctcaaaatcagaatccaacacattaggatttatatcattaaacactgacttctttgtttaccataactttaaaaagccaccaataacaacaggctatataccaaacgcaacattctcattatacacatcaggaacaaatgttaaattaaatgaattaaaatggtcaaacttaatttacttaggaaacacaaaagatatgcaaccaggaaaaacaataggtagtatgcaaggaaccacagatacagaaaaattaaacaactatttttctgatataaaaaactggggaaaccccttttttccagcctactttcacgaagaataccctaactattttacaacaatgaacaaaattgataaaattaaagacctagcaaaaagtagccttaataacaaagtaagtgaatttacaaacctatcacaagacttattttgggaatgcagatacaatcccgaaaatgactctagcagaaatgcttactttattacagatatagaaacattaagaccatgggaaaacccatcaaaagataatttaacagaacaaggtttaccactatggctattactacatggcactatagattatcaccaaaaactaggagacatacaacacctaatgacagatcacatactatgcataacatcagactacatttcaccaacaaaagactactacgtaccactagacagagactttttagctggacatagtccctacacagacatagtaagagacaatgacaaactatactggttccctaaacttaattttcaacaaagaacaattaatgacatagtttcagtaggacctggaacaccaaaacttccaccagacataagctcagaggctcacattgaatataaatttcattttaagcttggaggatgtccaccacaaatggacgacgtttgcgaccctaactcaagatcaaaatggcccactcccagtaacctcatatcatcaactttattgcagagtccagaaacaccaatcgaatactaccttagcagctttgaccaaagacgaggactactcacaaacaaagctgcaaaaagaattaaaaaagactttgggcctaaagaaactttgcttcaatttacaggacaaactacaacagaagtaccgatacaaagcccagagacatcatcatcagaggaaacaaccgaggaaaaagagaaagaagagatacagctccagttcagacaccacagaagaaagcaaaggaaactccagcagcgaatcctccagctcctagacctactccaggaataataataaaaaagagtaacataagggtacaactgtttgaaactcctaaacctaacagaccacttacaccccaagaaaaacaaactgatctagaaatagctaaatggctaaagcgcccagtacgctacttttttaatgatcctccattttatccctggttggtacctgaacctaaagttaactttaaacttaactatgtagaataaaggcctgcattaattcacttgaggtgtccatttgtattatttaaaacttaaataaacagtcaccgcctcccaaaaaccgccggcgcacagggggctacgccccctgtaacccccagggggggacaccccccctaaacccccccgaaaaaccacaaaatttaaattgccgaccacaaacgaacaggaaaccacaaaatttgcattgccgaccacaaacgaacaggaaaaccacataatttgcattgccgaccacaaacttgccgaccacaaacgaacaggaaaaccacataatttgcattgccgaccacaaacggtaactaacttcctcaaacagcacttacttcctcatttacttatgaatattcattacattaattattaaacacacgtcaaataggaggagttaacaacactataaaactaactacaatgacgaatggctgagtttatgccgctagacggagacgaagacaacactgacttcggctgactgaggg

SEQ ID NO: 2169 - protein, 656 aa, Betatorquevirus sp.
MPYYWRPRRRRYFRKYWRRRPRGLFRRRLWRRRRRNTVRKRKLKKVIVRQWQPSTIRKLKIRGMYPLYEGNRERISNNFNQWAASIAPHGFPGGGLWSIIRFSLYSLYELHLKGRNWWTMSNCSLPLIKYQGCSIKFYKSTNTDYITVFTTCGDMTANLETYHSSQPSILNLNKRKIIMTCKENNQYKKPYKKKFIKPPPLFENKWYFQRDIAKIPLLMLITSSCSLDRWYISSKSESNTLGFISLNTDFFVYHNFKKPPITTGYIPNATFSLYTSGTNVKLNELKWSNLIYLGNTKDMQPGKTIGSMQGTTDTEKLNNYFSDIKNWGNPFFPAYFHEEYPNYFTTMNKIDKIKDLAKSSLNNKVSEFTNLSQDLFWECRYNPENDSSRNAYFITDIETLRPWENPSKDNLTEQGLPLWLLLHGTIDYHQKLGDIQHLMTDHILCITSDYISPTKDYYVPLDRDFLAGHSPYTDIVRDNDKLYWFPKLNFQQRTINDIVSVGPGTPKLPPDISSEAHIEYKFHFKLGGCPPQMDDVCDPNSRSKWPTPSNLISSTLLQSPETPIEYYLSSFDQRRGLLTNKAAKRIKKDFGPKETLLQFTGQTTTEVPIQSPETSSSEETTEEKEKEEIQLQFRHHRRKQRKLQQRILQLLDLLQE

SEQ ID NO: 2170 - protein, 100 aa, Betatorquevirus sp.; identical to SEQ ID NO: 1131

SEQ ID NO: 2171 - protein, 57 aa, Betatorquevirus sp.; identical to SEQ ID NO: 1132

SEQ ID NO: 2172 - DNA, 2956 bp, Betatorquevirus sp.
cgggtgctaaaggtgagtgaaaccaccgaaatcaaggggcaatatgggctcagtcagtctagcggaacgggcaactaactaaattatattttacagaatgtcaaactactacaaaccaataacatggagcagaaagcactgcgacctaaactggattaacagcattgttactgtacatgaccttcaatgcgcctgcaatgatccactaaaacacacaatactagcaataattaaccaagaaccatcccttcgatttaacaaagaagaatctaaaaaaatacaacaatgccttacttctggagaccaagaagacggagatattttaggaaacattggagacggagacctagaggcctttttcgccgcagactttggagaagaagacgcagaaccacggtaagaaaaagaaaacttaaaaaaataatagtaaaagaatggcaaccaagtactataagaaaactaaaaataagagggatgtacccactatatgaagaaactcgagaaagactaagtaataactttaaccaatgggccgcatcaatagctcctcatggatttcccggaagaggactatggtcaatgataagattttctctaacttctctatatgaactacaccttaaaggcagaaactggtggacaatgtctaactgctctttaccactaataaaataccaaggatgctccatcaaattttacagatctactaacacagactatatagcagtgtacacaacatgtggagacatgacagcaaacttagaaacgtatcactcctcacaaccagcaatattaaacttaaacaaaaaaaaagtaataatgacatgtaaagaaaacaaccactacaaaaaaccatacaaaaaaaaatttataagaccacctccactattcgaaaacaaatggtattttcaaagagacatagccaaaatacctttattaatgctaataacatcttcatgcagtttagacagatggtacataaactcaaaagccgaatcaaacacattaggatttatatcattaaacacagacttctttgtttaccataacttcaaaaaaccaccaataaccacaggatatataccaaatgcaacattttcattatacacatcaggaacaaacgttaccttagcagaattaaaatggtcaaacttaatttacttaggtaacacaaaagacatacaaccaggtaaaacaataggaagtatgactggaacttcaaaagaaaaattaaacaaatatttttctgacataaaaaactggggaaatcccttctttccagcctactttcacccagaataccctaactactatacaacaatgaataaatttgataaaattaaagaactagccgaaacaaatcttgaagcaaaagtaagtgaatttacaaacctatcacaagacttattttgggaatgcagatacaatcccgaaaatgactctagcagaaacgcttactttattacagatatagaaacattaagaccatgggaaaacccatcaaaagataatctaacagaacaaggtttaccactatggctactattacatggtaccatagattatcatcaaaaactaggagacattcaacacctaatgacagatcacatactatgcataacatccgactacattacaccaacaaaagattactatgtaccactagacagagactttttacaaggacacagtccctatacagacatagtaagagaaaatgacaaatttttttggtttcctaaactaaattttcaacaaagaacaattaatgacattgtttcagtaggaccagcaacaccaaaacttccaccagacataagctctgaggctaaaattgaatataaatttcattttaagctgggaggatgtccaccacaaatggacgacgtatgcgaccctaactcaagatcaaaatggcccactcccagtaacctcatatcatcaactttattgcagagtccagaaacaccaatcgaatactaccttagcagctttgaccaaagacgaggactactcacaaacaaagctgcaaaacgaattaaaaaagactttgggcctaaagaaactttgcttgaatttacaggacaaactacaacagaagtgccaatacaaagcccagcaacatcgtcggaagaggaaacaaccgaggaaaaagagaaagaagagatacagctccagttcagaaaccacagaagaaagcaaagaaaactccagcagcgaatcctccagctcctagaactactccaggaataataataaaagacagtaaaataagagtacaactctttccaactcctaaacctaacagaccacttacaccgcaagaaaaacaaactgatctagaaatagctaaatggctacatcgcccagtacgctactattttaatgatcctccattttatccctggttagtacctgaacctaaagttaactttaagcttaactatgtagaataaaggcctgcattaattcacttgaggtgtccatttgtattatttaaaacttaaataaacagtcaccgcctcccaaaaaccgccggcgtacagggggctacgccccctgaaacccccaggggggggacaccccccctaaaccccccccgaaaaaccacaaaatttacattgccgaccacaaacgaacaggaaaaccacaaaatttgcattgccgaccacaaacgaacaggaaaaccacaaaatttgcattgccaaccacaaactgtcacttacttcctaaaactttactaacttcctttttttcttataaatattcatctaattaattattaaacccacgtcacaaaggcggagttaacaatactataaaactaactgcactgacgaatggctgagtttatgccgctagacggagacgaaggcaacactgacttcggctgactgagggcgggtgctaccgctagacggagacgaaggcaacactgacttcggctgactgaggg

SEQ ID NO: 2173 - protein, 655 aa, Betatorquevirus sp.
MPYFWRPRRRRYFRKHWRRRPRGLFRRRLWRRRRRTTVRKRKLKKIIVKEWQPSTIRKLKIRGMYPLYEETRERLSNNFNQWAASIAPHGFPGRGLWSMIRFSLTSLYELHLKGRNWWTMSNCSLPLIKYQGCSIKFYRSTNTDYIAVYTTCGDMTANLETYHSSQPAILNLNKKKVIMTCKENNHYKKPYKKKFIRPPPLFENKWYFQRDIAKIPLLMLITSSCSLDRWYINSKAESNTLGFISLNTDFFVYHNFKKPPITTGYIPNATFSLYTSGTNVTLAELKWSNLIYLGNTKDIQPGKTIGSMTGTSKEKLNKYFSDIKNWGNPFFPAYFHPEYPNYYTTMNKFDKIKELAETNLEAKVSEFTNLSQDLFWECRYNPENDSSRNAYFITDIETLRPWENPSKDNLTEQGLPLWLLLHGTIDYHQKLGDIQHLMTDHILCITSDYITPTKDYYVPLDRDFLQGHSPYTDIVRENDKFFWFPKLNFQQRTINDIVSVGPATPKLPPDISSEAKIEYKFHFKLGGCPPQMDDVCDPNSRSKWPTPSNLISSTLLQSPETPIEYYLSSFDQRRGLLTNKAAKRIKKDFGPKETLLEFTGQTTTEVPIQSPATSSEEETTEEKEKEEIQLQFRNHRRKQRKLQQRILQLLELLQE

SEQ ID NO: 2174 - protein, 100 aa, Betatorquevirus sp.
MSNYYKPITWSRKHCDLNWINSIVTVHDLQCACNDPLKHTILAIINQEPSLRFNKEESKKIQQCLTSGDQEDGDILGNIGDGDLEAFFAADFGEEDAEPR

SEQ ID NO: 2175 - DNA, 2955 bp, Betatorquevirus sp.
caggtgccgaaggtgagtgaaaccaccgtagtcaaggggcaatatgggctaggtcagtcttggcggactgggcaagaaacttaaaaatataacattttttacagatatgtcatctatctggaagaaaccaacaactactccgagacaactagaactaggatggctgaacttattccaccaagcacacgaccaattctgccaatgtgaggaccctgaccttcactatttaatggtaatcaacaaattttccgacttcaaaaaacctgaatctgaaattattaatataaaatgcctccttaccggaaaacctactggaacaactactactaccgaagaagaaaaagatatccatatcgacgaaggagatttagaaagcctcttcgaaaaagatttcgaagaagaacctactggagaaaacagcgaaaggtaaagaaatttaaacttaaaaaacttaaaaaactaactcttaaagtttttcaaccaaagactataaaactcttaaaaattaaaggatttaaatgcttatttcaaggcagcataaaaagagctaacaataactacatacaatatatatatgatactgtaaatgataaaagaccaggcggaggggcatggagtttacaagtatttagccttgcaagcttatttgaagaatggcaacacttacttaatatttggactgttagtaatgctggactgccactaatacgctttttaggagttaaatttaaattttatcaaagtgcagaaaatgactatgttgttaaatatgataattgttggcctatggtagatacaccatatacccatgcagacagtgcaccatcaagaatgataagagcacaacataaaataactgtaccaagtagaaaaacaaaacttagaagaagaccatacaaaaaagtatttgttagaccaccatcacaaatgacaaacaactggtactttcaaagagatatatgcaaaacaccactaacaatgcttacaaccacagctgttgatcttagattcccatttgctcccccagaagctctaagtaacaacgtaactctatatacacttaatacatttcaatttaaaaacacaaactttcagcaaccggaagctaccggttactactacaaaatggaaggaacacaaaaatactacttatatgcagcagcaagagaccacagtaactcctggggatcactaattcctttaacaaacacaaaagacaatcaaccaggaaaacaactaaatcaattaataactttaaatagctcaagtaacaataaaatgagcaactggggaaacccattttaccacttatatgactatgaaaacttcaaattttactttttaacaaaatcaccaacagaaataacttactcagacctaagtaatcaattaaaccaaaacataactgaatttacaagttacatatactaccaaattagatacaatccagaaaaagacacaggacaagataacaaagtatatttaatatctaatctacatgacacaaaatgggaagaaccttcaaacgaaaatttaattttcgatggttttccactaactatattactatggggatggacagactggcaaaaaaaactaaaacaagtatctaacatagataatcaatacatagtagttatacaaaccaaatttttttcagaaaacctaaagtactacgtacttattgatagagattttatagatggatttgaacctttttcaccacatgacgaacaagaaaaattacctattacaccagctaatcaacaacattggtatccaaaacacttatttcaacaacaatctataaacacactatgtctatcaggccaagcatgtccaagacctccttggaaccattatctacaagcattctgtacatacacattttactttaaattaggaggctgtccaaaacaactagaaaaagcttatgatccttgtttacagtcaaaatggcccacaaccgataacatccctgcaagatatcaaattacgaatcctgaaaccccaccagaaacagaactatactcctgggactgggatgaagactttgttaaaaagacagctttacaacgaattacagaatacacaccaacttatgaaacaatattcctttctacaggaagcaaatcagatcccatcgcactcaaaaaagtccaagaaaaccaagcccaagaagaagaggaggagaaagaactattcctccagctccagcagctcagacaccgacgaaagctcctacaacaccaactaaaagaattatcattaaaaagtgtacaaagatagtagaactattcccaaaacctataaaacaaaacagaagatttaccaaagatgaaagagagacagaaagacaggttgctatagcattttgtagaccacaaagatcatttttctatgatacacctatttacccttggctaccacctgaaccaaaagttccaaaagttaactttaaactaaattacaattgtaacgaataaaaattacaaggccaactattttcacttgtcggtgtccatttatttaagtttaacttatataaacatccaccactctcccaacagtgttggcgccaaaagggggctccgcccccttacacccccaagggggctccgcccccttacaccccaaaagggggctccgcccccttacacccccaagggggctccgcccccttacacccccaagggggctccgcccccttacacccccttataaatattcaacaggaaaaccacctaatttgaattgccgaccacaaaccgtcactaacttcttctttttactatacttcctttttttctcattattattcattacattaattattaaaccgcgtaattccggggaggagactacaaactatataactaactacacttccgaatggctgagtttatgccgccagacggagactgtgttacacagtaacaacaggctgacctaggg

SEQ ID NO: 2176 - protein, 666 aa, Betatorquevirus sp.
MPPYRKTYWNNYYYRRRKRYPYRRRRFRKPLRKRFRRRTYWRKQRKVKKFKLKKLKKLTLKVFQPKTIKLLKIKGFKCLFQGSIKRANNNYIQYIYDTVNDKRPGGGAWSLQVFSLASLFEEWQHLLNIWTVSNAGLPLIRFLGVKFKFYQSAENDYVVKYDNCWPMVDTPYTHADSAPSRMIRAQHKITVPSRKTKLRRRPYKKVFVRPPSQMTNNWYFQRDICKTPLTMLTTTAVDLRFPFAPPEALSNNVTLYTLNTFQFKNTNFQQPEATGYYYKMEGTQKYYLYAAARDHSNSWGSLIPLTNTKDNQPGKQLNQLITLNSSSNNKMSNWGNPFYHLYDYENFKFYFLTKSPTEITYSDLSNQLNQNITEFTSYIYYQIRYNPEKDTGQDNKVYLISNLHDTKWEEPSNENLIFDGFPLTILLWGWTDWQKKLKQVSNIDNQYIVVIQTKFFSENLKYYVLIDRDFIDGFEPFSPHDEQEKLPITPANQQHWYPKHLFQQQSINTLCLSGQACPRPPWNHYLQAFCTYTFYFKLGGCPKQLEKAYDPCLQSKWPTTDNIPARYQITNPETPPETELYSWDWDEDFVKKTALQRITEYTPTYETIFLSTGSKSDPIALKKVQENQAQEEEEEKELFLQLQQLRHRRKLLQHQLKELSLKSVQR

SEQ ID NO: 2177 - protein, 120 aa, Betatorquevirus sp.
LGKKLKNITFFTDMSSIWKKPTTTPRQLELGWLNLFHQAHDQFCQCEDPDLHYLMVINKFSDFKKPESEIINIKCLLTGKPTGTTTTTEEEKDIHIDEGDLESLFEKDFEEEPTGENSER

SEQ ID NO: 2178 - DNA, 2955 bp, Betatorquevirus sp.
cgggagccgaaggtgagtgaaaccaccgaagtctaggggcaattcgggctagatcagtctggtggaacgggcaagaaacttaatacactttattttatagatatgacatctacattgaagaatcctactctatcaccgagacaactagaaaactcctggattaacatagtatttcaatctcacgaccaaatttgtggctgtgacgacccttggctacacctcttggatgtactaaataagaacggcaacgcacgcaaaccactaaaagatattgaaaacataaaatggctccttattggcaaaccaaatattggagaaggcccttcaaataccgaagaagacgaccctggttttaccgctggagatctagaaaaactattcgaagaagaccctatacaagaagaagacgaaccagacgttacaaggtaaaaagacttaaacttagaaaaagaaaatttctaaaagttaaacaatggcaacctaaaactattgtaaaatgtaaaattttaggacttaaatgtttatttcaaggaagtggctatagagcacaacataattatatagaatatatgtattctaatgtacctataaaccaaccagggggaggaggttggggactactagttttttcactaggaagcttatatgaagactatgatcacctacataacatatggacaaaaagtaatgccggactaccattagtaagatatacaggcagcacattttacttctatcaaacatatgacacagactacatagttacatatgacacatgctggcctatggtagacacaccacacacacacgcagacagctcaccttatagaatgatacaaaaaagaaataaaatagttattccaagtaaacttactaaaaatagaagaagaccttacaaaagagtaaaaataaaaccaccaactcagatgacaaacagatggtactttcaaaaagacatttgcgacacacctcttgtaatgataaccgcaacagccgttaacctaaccacaccatttgctaattccaacagtttatctaactcaatagtattttacagcttaaacacatttatttttcaaaacccaaattttgaacatccaccagaaacaacaggatactcacataaaattttaaacggctatagcatgtacttatacgcaacaacacaaacaaaacctaatgacgcagacaaaaacgaagagtcctttataaactggctaaaaacattaatttttctaggcaacccaagaaaaaactatcaaggacaaccattcggagacacaccaacatatactaaagaacagtggggaaacccattttatcacagatacttagaaataggagatgaagacgatgtatcatacttaatatacacatcgtcagtaacccatattaacataaaacaaaaaattgcaacaaaaacaacagacattaaagcaacacaatttcaaaccataacaggacccataatttataaactaacatacaacccagacaaagacacaggactaaacaaaatatatttactaaaaacatggggaccatctacactagatgaaccagatgaccaagacttaatttttgaaggctttccactaccacaacttacatggggatggacagactttattaaaaaattaaaaaagattaatgacctagacagacactcaatattactaattaaaactcaaaactttagcgacaacacattaaaagtatttctaccattagacctagactttatagaaggacatgacccctaccaacacgacaaacaaaacaactaccaaacagactactacaattctgaaaactggtttcctaaaatacaatttcaagatcaaacaattaatttaatagcaacatctcaaagaaatagtccaaaaacaaattcttacttacaagctggctgtaaatataaattttattttaaatggggaggctgtcctaaaacattacaaaaagcatatgatccttgcttacagtcaaaatggcccacacccgataacatcacaggaagacttacaatccagaatcctaacacacctccacaaacagaactattctcctgggactgggaaagtgactttgttaaaaaacaagctatcgaaagaatacaacaatatactccaattgatgaaactttcgtctcgtctacagactcaaaattccaagcaaaagcactccaaaagcagcaaaaagacacagcaccacaagaggaaaagaacctattcctccagctccacaaactccgaaaagagcgactccacctcgagctccagtgcagaatgaagctaatggaattaaaatcaaaaagtgtaaagtgactgtaaaattatttccagacgaaaagccaaaaaacagacgtttaactccaaaagaactagaggatgaaaaaattgtagctagaatttttaaaagacctttaagaacctttataaatgatatacctacctatccatactgtgtacctgaacccaaagttaactttgatttaaattaccaccattaaaatttcaaggccaacatacttcactgagtggtgtccatttattaaagtttaacttaaataaacagactccgcctcccaatcaataaggcctagaaccaagggggctccgcccccttaaacccccaagggggctccgcccccttacacccccaagggggctccgcccccttacacccccaagggggctccgcccccttacaccccctaattaatattcaacaggaaaaccacctaatttaaattgccgaccacaaaccgtctcatacttcccctttttaaccaacttccttttttactaattattattcattacattaattaataatcaccgtaattccggggaggagactattacctatataactaacaacacttccgaatggctgagtttatgccgccagacggagacaggatcactttagtgactccgggctgatcttggg

SEQ ID NO: 2179 - protein, 680 aa, Betatorquevirus sp.; identical to SEQ ID NO: 2105

SEQ ID NO: 2180 - protein, 108 aa, Betatorquevirus sp.; identical to SEQ ID NO: 2106

SEQ ID NO: 2181 - DNA, 2955 bp, Betatorquevirus sp.
cgggagccgaaggtgagtgaaaccaccgtagtctaggggcaattcgggctgaatcagtctagcggaacgggcaagtaacttaatatttttaattacagttatgactagatacatacctaccaaagcaacaaaacgccaaaatgacataaaatggcttaatttacttcaccacgtccacggatgcttttgtgactgcgacaacggtatcacccacacagctgccttcatatttgaacaagaaaaggaactaaaatttacaccgcctgaaaaagatttaattaaaacatgcctttttggagacgctactaccgaaaccgctggagaccaaggtatagacggatttactggagaagaactagaaacccttttcaacgaagacgcagacgacgctacagaacctatagggtaagaagaaaaaaattaaaaactataagactaaaacaatggcaacctccttatattaaaagacttaaagtacacggatactatccagttataatgggaacaagagaaagagttgccaataacttaaactgttatttagaaagtactgctccacattatgtacccgggggaggatgtttttcaattaataattttagctttatgtctttgtatttagaacattttaatttaagaaactggtggactactggtaatgaaaacatgcctttattaagatacttaggatgtactataaattgttacagagaagaaaacatagattacctattctattacaatagacaatggccaatgacagcaaaactaattacatatcaaagcacacaaccaatggctatgctacttaacaaacacacagtaaaaattgcctgtaaaaaaaatacaagaaacaaaaaaccatacaaaaaaatacatattaaaccaccaccacaaatgcaaaacaaatggtactttcaatatgatttagcaaacataccgttattacaaactatgaccacagcttgctcatttgaccgcacatttctaaactcaaggtcacttagttccacaataggtttctacactcttgacacaaataccttccttaaccaccaatttcaacgaacaacttcaccatacaaccccaaaccaaacacaattttatttaaagttaaaaatggagaatacgatataacaaaaatacaagcaggcaatctaataatattaggagaagtagaagacttacaagatggaactcaaatacaacatatacctaattcatcattacttacacccccaaatattagctcacctacaaattttcaaaaacaattttatacagcacgcatacaacataaatggtggggaaatgtatttaaatcatctaccttttatggagatgaaagaatgatagaaacaaacaaaccttgggataccataattacagaattaaaagactccacaacacccttaacaacaggatacacatggaaaactaccaaatgggcagaagttagatacaatcctttttcggacaaaggaaaaggaaacattgcttacctactaaaaataaattcaggtttacatagcacagaatggggaccaccaacagacaaagatgttataacacaagacttaccattacatacattattatggggatttttagactaccaaagaaaatgcgcagaatacagagatatagacacaacctgcattttagtaatacaatgtccatacattatacccaaaacatttaaatttctagtaccactagacaaagacttcttagaaggtacaagcccatacagacctgaaggagaaataacaccttcagatcaacaaaactggcacccaaaagtttcatttcaagtacaaactgtaaataatatttgcttatgcggtccagcaactgttaaattacctgaacaaacatcatgtgaggctcacataagttacaatttttactttaaggtgggaggacagccagcaccaatgtcaaacctcactaaaccagatgaacaacctaaatatcccatacccaataatctcctcaacacaccttcgttacagagtccaacaataccatttactcaactactctggaactttgacgaaagacgatcaaaactcacacaaaaagctacaaaaagaattacagaataccaaatgcctgaaacatctcttatctcacctacagaaacaagcttatcactccctacagaaaccttcaaaacacaagaaacaccggagacaagctcctcggaagaagaagaaacatcgatccaggagcagctcaacaagcagcgaagaagacaaaaactcctcagaaacagaatcaacctcctcctcaagcaattagcaaatatgtaattaaacaaactactgtaaaagttaaattgtttcctgatgaaaaacctgtaaatagacgtatgactcctaaagaatttcaagaagagttagaggatgctaaattttggtgtagaaaccctagaacttttatacatgacaaaccaatgtacccctgggttcctgaagtccctaaatatactgtaaactttgatttaaatgcgccgtattaaaaaacaaggcctgcaacaattcacttgtcggtgtctacttataaaagttaaacttatataaacatccaccaaactccctaatacgcaggcgcacaagggggctccgcccccttaaacccccaagggggctccctaatacgcaggcgcacaagggggctccgcccccttaaacccccaagggggggcaaagcccccccttaaacccccctaataaatattcataaaggaaaccacaaaattagaattgccgaccacaaactgccttatgctaattacttccccaaaatacactttacttccctaaaaattaattaataaacaccgtcacaaggggagtggtttacaacctataaaactaaacacacttccgaatggctgagtttatgccgctagacggagcgcagaacacagtctcggcgctgattcaggg

SEQ ID NO: 2182 - protein, 676 aa, Betatorquevirus sp.
MPFWRRYYRNRWRPRYRRIYWRRTRNPFQRRRRRRYRTYRVRRKKLKTIRLKQWQPPYIKRLKVHGYYPVIMGTRERVANNLNCYLESTAPHYVPGGGCFSINNFSFMSLYLEHFNLRNWWTTGNENMPLLRYLGCTINCYREENIDYLFYYNRQWPMTAKLITYQSTQPMAMLLNKHTVKIACKKNTRNKKPYKKIHIKPPPQMQNKWYFQYDLANIPLLQTMTTACSFDRTFLNSRSLSSTIGFYTLDTNTFLNHQFQRTTSPYNPKPNTILFKVKNGEYDITKIQAGNLIILGEVEDLQDGTQIQHIPNSSLLTPPNISSPTNFQKQFYTARIQHKWWGNVFKSSTFYGDERMIETNKPWDTIITELKDSTTPLTTGYTWKTTKWAEVRYNPFSDKGKGNIAYLLKINSGLHSTEWGPPTDKDVITQDLPLHTLLWGFLDYQRKCAEYRDIDTTCILVIQCPYIIPKTFKFLVPLDKDFLEGTSPYRPEGEITPSDQQNWHPKVSFQVQTVNNICLCGPATVKLPEQTSCEAHISYNFYFKVGGQPAPMSNLTKPDEQPKYPIPNNLLNTPSLQSPTIPFTQLLWNFDERRSKLTQKATKRITEYQMPETSLISPTETSLSLPTETFKTQETPETSSSEEEETSIQEQLNKQRRRQKLLRNRINLLLKQLANM

SEQ ID NO: 2183 - protein, 102 aa, Betatorquevirus sp.
MTRYIPTKATKRQNDIKWLNLLHHVHGCFCDCDNGITHTAAFIFEQEKELKFTPPEKDLIKTCLFGDATTETAGDQGIDGFTGEELETLFNEDADDATEPIG

SEQ ID NO: 2184 - protein, 60 aa, Betatorquevirus sp.
LFPDEKPVNRRMTPKEFQEELEDAKFWCRNPRTFIHDKPMYPWVPEVPKYTVNFDLNAPY

SEQ ID NO: 2185 - DNA, 2955 bp, Betatorquevirus sp.
cgggagccgaaggtgagtgaaaccaccgtagtctaggggcaattcgggctgaatcagtctagcggaacgggcaagtaacttaatatttttaattacagttatgactagatacatacctaccaaagcaacaaaacgccaaaatgacataaaatggcttaatttacttcaccacgtccacggatgcttttgtgactgcgacaacggtatcacccacacagctgccttcatatttgaacaagaaaaggaactaaaatttacaccgcctgaaaaagatttaattaaaacatgcctttttggagacgctactaccgcaaccgctggagaccaaggtatagacggatttactggagaagaactagaaacccttttcaacgaagacgcagacgacgctacagaacctatagggtaagaagaaaaaaattaaaaactataagactaaaacaatggcaacctccttatattaaaagacttaaagtacacggatactatccagttataatgggaacaagagaaagagttgccaataacttaaactgttatttagaaagtactgctccacattatgtacccgggggaggatgtttttcaattaataattttagctttatgtctttgtatttagaacattttaatttaagaaactggtggactactggtaatgaaaacatgcctttattaagatacttaggatgtactataaattgttacagagaagaaaacatagattacctattctattacaatagacaatggccaatgacagcaaaactaattacatatcaaagcacacaaccaatggctatgctacttaacaaacacacagtaaaaattgcctgtaaaaaaaatacaagaaacaaaaaaccatacaaaaaaatacatattaaaccaccaccacaaatgcaaaacaaatggtactttcaatatgatttagcaaacataccgttattacaaactatgaccacagcttgctcatttgaccgcacatttctaaactcaaggtcacttagttccacaataggtttctacactcttgacacaaataccttccttaaccaccaatttcaacgaacaacttcaccatacaaccccaaaccaaacacaattttatttaaagttaaaaatggagaatacgacataaccaaaatacaagcaggcaatctaataatattaggagaagtagaagacttacaagatggaactgaaatacaacatctacctatatcatcattacttacacccccgaaaattcccaacgctacaaattttcaaaaacaactttatacagcacgcatgcaacataaatggtggggaaatgtatttaaatcatctaccttttatggagatgaaagaatgatagaaacaaacaaatcttgggatatcataattgcagaattcacagaatccacaaaaaccttaacaacaggattcacatggaaaactaccaaatgggcagaagttagatacaatcctttttcggacaaaggaaaaggaaacattgcttacctactaaaaataaattcaggtttacatagcacagaatggggaccaccaacagacaaagatgttataacacaagacttaccattacatacattattatggggatttttagactaccaaagaaaatgcgcagaatacagagatatagacacaacctgcattttagtaatacaatgtccatacattatacccaaaacatttaaatttctagtaccactagacaaagacttcttagaaggtacaagcccatacagacctgaaggagaaataacaccttcagatcaacaaaactggcacccaaaagtttcatttcaagtacaaactgtaaataatatttgcttatgcggtccagcaactgttaaattacctgaacaaacatcatgtgaggctcacataagttacaatttttactttaaggtgggaggacagccagcaccaatgtcaaacctcactaaaccagatgaacaacctaaatatcccatacccaataatctcctcaacacaccttcgttacagagtccaacaataccatttactcaactactctggaactttgacgaaagacgatcagaactcacacaaaaagctacaaaaagaattacagaataccaaatgcctgaaacatctcttatctcacctacagaaacaagcttatcactccctacagaaaccttcaaaacacaagaaacaccggagacaagctcctcggaagaagaagaaacatcgatccaggagcagctcaacaagcagcgaagaagacaaaaactcctcagaaacagaatcaacctcctcctcaagcaattagcaaatatgtaattaaacaaactactgtaaaagttaaattgtttcctgatgaaaaacctgtaaatagacgtatgactgctaaagaatttcaagaagagttagaggatgctaaaatttggtgtagaaaccctagaacttttatacatgacaaaccaatgtacccctgggttcctgaagtccctaaatatactgtaaactttgatttaaatgcgccgtattaaaaaacaaggcctgcaacaattcacttgtcggtgtctacttataaaagttaaacttatataaacatccaccaaactccctaatacgcaggcgcacaagggggctccgcccccttaaacccccaagggggggcaaagcccccccggcgcacaagggggctccgcccccttaaacccccaagggggggcaaagcccccccttaaacccccctaataaatattcataaaggaaaccacaaaattagaattgccgaccacaaactgccttatgctaattacttccccaaaatacactttacttccctaaaaattaattaataaacaccgtcacaaggggagtggtttacaacctataaaactaaacacacttccgaatggctgagtttatgccgctagacggagcgcagaacacagtctcggcgctgattcaggg

SEQ ID NO: 2186 - protein, 676 aa, Betatorquevirus sp.
MPFWRRYYRNRWRPRYRRIYWRRTRNPFQRRRRRRYRTYRVRRKKLKTIRLKQWQPPYIKRLKVHGYYPVIMGTRERVANNLNCYLESTAPHYVPGGGCFSINNFSFMSLYLEHFNLRNWWTTGNENMPLLRYLGCTINCYREENIDYLFYYNRQWPMTAKLITYQSTQPMAMLLNKHTVKIACKKNTRNKKPYKKIHIKPPPQMQNKWYFQYDLANIPLLQTMTTACSFDRTFLNSRSLSSTIGFYTLDTNTFLNHQFQRTTSPYNPKPNTILFKVKNGEYDITKIQAGNLIILGEVEDLQDGTEIQHLPISSLLTPPKIPNATNFQKQLYTARMQHKWWGNVFKSSTFYGDERMIETNKSWDIIIAEFTESTKTLTTGFTWKTTKWAEVRYNPFSDKGKGNIAYLLKINSGLHSTEWGPPTDKDVITQDLPLHTLLWGFLDYQRKCAEYRDIDTTCILVIQCPYIIPKTFKFLVPLDKDFLEGTSPYRPEGEITPSDQQNWHPKVSFQVQTVNNICLCGPATVKLPEQTSCEAHISYNFYFKVGGQPAPMSNLTKPDEQPKYPIPNNLLNTPSLQSPTIPFTQLLWNFDERRSELTQKATKRITEYQMPETSLISPTETSLSLPTETFKTQETPETSSSEEEETSIQEQLNKQRRRQKLLRNRINLLLKQLANM

SEQ ID NO: 2187 - protein, 102 aa, Betatorquevirus sp.
MTRYIPTKATKRQNDIKWLNLLHHVHGCFCDCDNGITHTAAFIFEQEKELKFTPPEKDLIKTCLFGDATTATAGDQGIDGFTGEELETLFNEDADDATEPIG

SEQ ID NO: 2188 - protein, 60 aa, Betatorquevirus sp.
LFPDEKPVNRRMTAKEFQEELEDAKIWCRNPRTFIHDKPMYPWVPEVPKYTVNFDLNAPY

SEQ ID NO: 2189 - DNA, 2955 bp, Betatorquevirus sp.
cgggagccgaaggtgagtgaaaccaccgtagtctaggggcaattcgggctgaatcagtctagcggaacgggcaagtaacttaatatttttaattacagttatgactagatacatacctaccaaagcaacaaaacgccaaaatgacataaaatggcttaatttacttcaccacgtccacggatgcttttgtgactgcgacaacggtatcacccacacagctgccttcatatttgaacaagaaaaggaactaaaatttacaccgcctgaaaaagatttaattaaaacatgcctttttggagacgctactaccgcaaccgctggagaccaaggtatagacggatttactggagaagaactagaaacccttttcaacgaagacgcagacgacgctacagaacctatagggtaagaagaaaaaaattaaaaactataagactaaaacaatggcaacctccttatattaaaagacttaaagtacacggatactatccagttataatgggaacaagagaaagagttgccaataacttaaactgttatttagaaagtactgctccacattatgtacccgggggaggatgtttttcaattaataattttagctttatgtctttgtatttagaacattttaatttaagaaactggtggactactggtaatgaaaacatgcctttattaagatacttaggatgtactataaattgttacagagaagaaaacatagattacctattctattacaatagacaatggccaatgacagcaaaactaattacatatcaaagcacacaaccaatggctatgctacttaacaaacacacagtaaaaattgcctgtaaaaaaaatacaagaaacaaaaaaccatacaaaaaaatacatattaaaccaccaccacaaatgcaaaacaaatggtactttcaatatgatttagcaaacataccgttattacaaactatgaccacagcttgctcatttgaccgcacatttctaaactcaaggtcacttagttccacaataggtttctacactcttgacacaaataccttccttaaccaccaatttcaacgaacaacttcaccatacaaccccaaaccaaacacaattttatttaaagttaaaaatggagaatacgacataaccaaaatacaagcaggcaatctaataatattaggagaagtagaagacttacaagatggaactgaaatacaacatctacctatatcatcattacttacacccccgaaaattcccaacgctacaaattttcaaaaacaactttatacagcacgcatgcaacataaatggtggggaaatgtatttaaatcatctaccttttatggagatgaaagaatgatagaaacaaacaaatcttgggatatcataattgcagaattcacagaatccacaaaaaccttaacaacaggattcacatggaaaactaccaaatgggcagaagttagatacaatcctttttcggacaaaggaaaaggaaacattgcttacctactaaaaataaattcaggtttacatagcacagaatggggaccaccaacagacaaagatgttataacacaagacttaccattacatacattattatggggatttttagactaccaaagaaaatgcgcagaatacagagatatagacacaacctgcattttagtaatacaatgtccatacattatacccaaaacatttaaatttctagtaccactagacaaagacttcttagaaggtacaagcccatacagacctgaaggagaaataacaccttcagatcaacaaaactggcacccaaaagtttcatttcaagtacaaactgtaaataatatttgcttatgcggtccagcaactgttaaattacctgaacaaacatcatgtgaggctcacataagttacaatttttactttaaggtgggaggacagccagcaccaatgtcaaacctcactaaaccagatgaacaacctaaatatcccatacccaataatctcctcaacacaccttcgttacagagtccaacaataccatttactcaactactctggaactttgacgaaagacgatcagaactcacacaaaaagctacaaaaagaattacagaataccaaatgcctgaaacatctcttatctcacctacagaaacaagcttatcactccctacagaaaccttcaaaacacaagaaacaccggagacaagctcctcggaagaagaagaaacatcgatccaggagcagctcaacaagcagcgaagaagacaaaaactcctcagaaacagaatcaacctcctcctcaagcaattagcaaatatgtaattaaacaaactactgtaaaagttaaattgtttcctgatgaaaaacctgtaaatagacgtatgactgctaaagaatttcaagaagagttagaggatgctaaaatttggtgtagaaaccctagaacttttatacatgacaaaccaatgtacccctgggttcctgaagtccctaaatatactgtaaactttgatttaaatgcgccgtattaaaaaacaaggcctgcaacaattcacttgtcggtgtctacttataaaagttaaacttatataaacatccaccaaactccctaatacgcaggcgcacaagggggctccgcccccttaaacccccaagggggggccctaatacgcaggcgcacaagggggctccgcccccttaaacccccaagggggggcaaagcccccccttatacccccctaataaatattcataaaggaaaccacaaaattagaattgccgaccacaaactgccttatgctaattacttccccaaaatacactttacttccctaaaaattaattaataaacaccgtcacaaggggagtggtttacaacctataaaactaaacacacttccgaatggctgagtttatgccgctagacggagcgcagaacacagtctcggcgctgattcaggg

SEQ ID NO: 2190 - protein, 676 aa, Betatorquevirus sp.; identical to SEQ ID NO: 2186

SEQ ID NO: 2191 - protein, 102 aa, Betatorquevirus sp.; identical to SEQ ID NO: 2187

SEQ ID NO: 2192 - protein, 60 aa, Betatorquevirus sp.; identical to SEQ ID NO: 2188

SEQ ID NO: 2193 - DNA, 2955 bp, Betatorquevirus sp.
cgggagccgaaggtgagtgaaaccaccgaagtctaggggcaattcgggctagatcagtctggcggaccgggcaagaaacttaaaatatatttttttttacagaatgtcaacaagacttaaaccatgcaaaacttcattgaaacaaaacaacttaaaatggatgaattctatggttcatacccatgatttcttctgcgactgccctaatcctctacaacatattataattttaatttttcaacaagaaccacacatcgattttacaccaattgaaaaggatataattagaaaatgccttggagatacaactacagaaactaccgctaccgtcccaaaagacgactttggcgtcgaagaaggcgttttggaagaacttttcaaagacgactttggagaagaaaaagatacagggtaagaaaaagaaaactaaaacgcataaaaataacacaatggcaaccaaaatacataaaaaaactgaaaataattggtataatgccattgtttttaactacttctgaaagaacaactaataactttacttgttatatagactctaccgcgcctcacctatttccttcaggaggaggatttagtataaataactttactttaagagcactatatcaaaaccataatgtacttcaaaattggtggactgctagtaatgataatatgcctttaatacgctttaatggtgtaactatttacttgtatagaagttatatgtcagactatttgtttctatataatagctcttatccaatgcaagcctcattattaacatacactagcactcatcccatggcaatgctactacacaaaaatacaaaaaaaatagtatgcaaacaaggaaacaaaaacaaaaagccatataaaaaaattcatataagaccaccttcacaaatgtataacaaatggtactttcaacatgacatagcagatgtaccgttattacaaacattttgcacagccacatccttagaccgcatgtttcttaactctaaagcaataagctcaacagttggatttacatcattagatattacaggattcacaaaccacgattacagcaaactctcaaccacaggttacacacctcaaccgaacacactattatttggcactagaagaagagacttaaacataactcaaataaaatttggagatctcatatttttaggaaacccagaagatttaaaagatggaaccactataaacaatgctaaacctgtaacaatatcacaaaaaacagaatttcaaaacaaaattatagcagtcagacaaaaatgggaatattggggaaacccttttgacccaacatttgtaaccacaggtagactaattactactaaccaaacatgggaccaactaattgcagaccacgcacaagataaaaaccttgattctacaaaatttacatacaaaacacactatttaatggatataagatacaatccctttgcagacaaaggcataggaaacaaagtttattttgtagacattaaagacagaacacatgcaactgattgggatattccagtaaaagacacattatatgaaaacttaccaatatggctaacgctatggggatatttagactttcatagaaaatgtggtgaacattcacaaatagatgtaaactacttacttgtaataaaatgtaaatacatgactcctaaagacattaactacattgtacctttagatcaagatttcttagacggtagaagcccatatcaagaaaatgaagttatttttaacaatgacttacaatattggcaccctaaagttagataccaatgcagaacaataaacatgttagggtccacaggcccaggtgttattaaactaccacctgaaacttcagctgaagctcactgtagatatcgctttcattttaagatcggaggacaaccaccaccaatggctacactcacagaccctttgcaacaacctaaatacattactcccgataacatcctacaaacaccttcgttacagaatccagcaacacccattgaacacatgctctggagctttgatgaaagacgaggaatacttacaaaaacagctgcagaaagaatctcaacatacaaagaaactgaaccaactcttttcccaattacagaaacaacttttgcctgcccaacaacatccaaaaaagaaatacagacatcagactcgacggactcggaagaaaaagaaatgtcgaccgaggagcaactactccaccagcgaagagagcaaaaactcctccgaaagcgaatcaagcagctcctatacagactaacacctatacaataaaaaaatgcaatgtttttgtaaaattatttgatgatgatgtaaaacctaaccgtagaatgacagaaaaagaatatgcagacgaggtagaaaatgctaaaatatggtttagagtaccacgctcttatatatttgatcgccctacctatccttggtgtccacaagacacaaaatacactgtaaattttgacttaaatgcgccgaaataaaattcaaggcctgcaataattcactctcggtgtccatttatataagtaaaactttaataaacatccaccacactcccaaatacgcagtccatttatataagtaaaactttaataaacatccaccacactcccaaatacgcaggcgcagaagggggctccgccccctttaacccccagggggggcaaggccccccctataacccccctaataaatattcaacaggaaaaccacctaatttaaattgccgaccacaaactgccaaatacttcccctttttacaacaacttccacttttaataataaatattcattacattaattagtaatcaccgtcaacatatcatgtgacactcacactataaaactaagtacactgacgaatggctgagtttaccacgccagacggagacaggatcacttcagtgactcctggctgatcttggg

SEQ ID NO: 2194 - protein, 670 aa, Betatorquevirus sp.
MPWRYNYRNYRYRPKRRLWRRRRRFGRTFQRRLWRRKRYRVRKRKLKRIKITQWQPKYIKKLKIIGIMPLFLTTSERTTNNFTCYIDSTAPHLFPSGGGFSINNFTLRALYQNHNVLQNWWTASNDNMPLIRFNGVTIYLYRSYMSDYLFLYNSSYPMQASLLTYTSTHPMAMLLHKNTKKIVCKQGNKNKKPYKKIHIRPPSQMYNKWYFQHDIADVPLLQTFCTATSLDRMFLNSKAISSTVGFTSLDITGFTNHDYSKLSTTGYTPQPNTLLFGTRRRDLNITQIKFGDLIFLGNPEDLKDGTTINNAKPVTISQKTEFQNKIIAVRQKWEYWGNPFDPTFVTTGRLITTNQTWDQLIADHAQDKNLDSTKFTYKTHYLMDIRYNPFADKGIGNKVYFVDIKDRTHATDWDIPVKDTLYENLPIWLTLWGYLDFHRKCGEHSQIDVNYLLVIKCKYMTPKDINYIVPLDQDFLDGRSPYQENEVIFNNDLQYWHPKVRYQCRTINMLGSTGPGVIKLPPETSAEAHCRYRFHFKIGGQPPPMATLTDPLQQPKYITPDNILQTPSLQNPATPIEHMLWSFDERRGILTKTAAERISTYKETEPTLFPITETTFACPTTSKKEIQTSDSTDSEEKEMSTEEQLLHQRREQKLLRKRIKQLLYRLTPIQ

SEQ ID NO: 2195 - protein, 118 aa, Betatorquevirus sp.
LADRARNLKYIFFYRMSTRLKPCKTSLKQNNLKWMNSMVHTHDFFCDCPNPLQHIIILIFQQEPHIDFTPIEKDIIRKCLGDTTTETTATVPKDDFGVEEGVLEELFKDDFGEEKDTG

SEQ ID NO: 2196 - protein, 122 aa, Betatorquevirus sp.
LPNNIQKRNTDIRLDGLGRKRNVDRGATTPPAKRAKTPPKANQAAPIQTNTYTIKKCNVFVKLFDDDVKPNRRMTEKEYADEVENAKIWFRVPRSYIFDRPTYPWCPQDTKYTVNFDLNAPK

SEQ ID NO: 2197 - DNA, 2954 bp, Betatorquevirus sp.
cgggtgctgaaggtgagtgaaaccaccgaaatcaaggggcaattcgggctatggcagtctagcggaacgggcaagtaacttaaaaatcaaggggcaattcgggctatggcagtctagcggaacgggcaagtaacttaaaatattttacaggtatgtcattaaaacctccaagatatggaccccgcggactggaactacaatttttgaactcaatataccaaaaccacgacttaatgtgtggctgcgaggatcaacttttacatatcctttcaataattagcagaaacaacaaaacaaacctttccgatactaaacttcaagaaataaaatgcctccttactggagaaactactggagaaacagaagaacccgctggcgccgcagacgtcctagacgctatcgacgatggagatttagacgcccttttcgaactttcagacgatatggacgccaacaatgggtaagaagaaaatttaaactatcttctataaaacttaaaatgtaccaacctagaacaataagaaactgtgtaataaaaggaatgaaatgtttatttgaaggaagtgccatgagaaaatctaacaactactggcaatatcctcacactataataccagaaaaatttccaggaggaggaggatggggactacaagtaattagcttaagttctttatgggaagattatcaacatttaagtaattacttcagcacaagcaatgctggactaccactggtacgttttagaggcatgaaactaatattttaccaaaatcaaacaacagactatgttgtagaaattgaaaactgctggccaatggttgatacacctctaaaacatgccaactcacaaccacaaagaatgttaatgagcaaaaagaaaattattgtacctagtatatatactaagagactaagaaaaggaaaaaagaaaacttatgtaaaaccaccagcacaaatgattaatcaatggtattttcaaaaagacgtgtgtaatacaaaactagcaatgataacagcaacagcctgtagccttacagattattacttaccatataaagcagaatcaaacaatatatcactaaatgcattaaatacaaacatctttaaaaatgcagactttcaacaacctgctacaacaacaggatacagccctcgcaataattattatttttattcaacatggaatggcactcttggcattccaaaaaaagcagaacaactaatatacttaggagacagtaaaaactttgtacaaggaaaactaacacataaagaaacaataaaaacagatggattcccaaaagaaaactggggtaaccctttatgggaacactatttaacaggtagtattccattatacacctcttctaaaggaccaacagatgaagtatggaaaaaaaatgccactgatccaactcaaacaaatgacatagataaatggcttacaccattacactatccaccaacaactagagttagatataacccagacaaagacacaggcgagggaaacatagtttactttgtagacaactataacagagcaggagacaatagttttgatcccccagaagacgaaaacaaaaaaataacaggttttcctttatggatatgcctatggggatgggcagactggataaaaaaactaggcctactacctagagtagacaaagaccacattctagtaatacaaagttcattttttgatgtaaaatttccatactatgtgtttttagatgacagttttacaaacagtttcggtccttatgacacacctaaaactacagaagatgaatttcactggtatcctaaattttggtaccaacaaaaatccattgaaaccatttgtgcttgtggtccaggagtaagcagagcaaaagacgatgaatcattacaagctaaaatggaatataaagtatatgttaaatggggaggttgtccttcaacactagaaaaagtttatgatccctgttcacagccaaaatggcccacaaccagtggtgtccaacaaacaatttcgatcacgaatccagaattcgaaccagcaaactacttctacagctgggatactagaagggactatcttacagacacagctctcaaaagacttaaaaaaaaccaagagactgatgaaactatttcaattaaaacaggctcaaaaagcagcccaagcgcagacctacaagtcctccaaacactccaagaaagctccgacgaagcatcgacaccggaaaaaaagaaagagacactgcagcacaagctcctccgactccgccgaaaccacaagcaactgcagcagcagctcatcagatacctaaaatcaccataatacataaacctgttaaaataaacttatttaacgatcctaaacctgtaaaaaacagaccattcacagaatctgaatggcaagatgaaaaatttatagcttcctggttaaaaagacctcaaagacatttcttttacgatcctcctatttacccactctttcctcctgcaccccttgctaactttgaccttaattacaaagaataaaggcctacaattttcacttagtggtgtctgtttatttaagtttaaccttaataagcatccaccgcctcccaacctcgtaggcgccaaaatttaaaaaggggctccgccccttaaaccccagggggctccgccccctaacccccagggggctccgccccctctaacccccaagggggctccgccccctaccaccccctaataaatattcatacaggaaaccacaaaattagaattgccgaccacaaacgaatatgcaaatttacttctgcaaaacacaaccacacttccctaaaaattaattaataaacaccgtcacacagggaggagcctactcactatataactaactacactgacgaatggctgagtttacgccgctagacggagaacgcatcagttactgactgcggactgccatcggg

SEQ ID NO: 2198 - protein, 666 aa, Betatorquevirus sp.
MPPYWRNYWRNRRTRWRRRRPRRYRRWRFRRPFRTFRRYGRQQWVRRKFKLSSIKLKMYQPRTIRNCVIKGMKCLFEGSAMRKSNNYWQYPHTIIPEKFPGGGGWGLQVISLSSLWEDYQHLSNYFSTSNAGLPLVRFRGMKLIFYQNQTTDYVVEIENCWPMVDTPLKHANSQPQRMLMSKKKIIVPSIYTKRLRKGKKKTYVKPPAQMINQWYFQKDVCNTKLAMITATACSLTDYYLPYKAESNNISLNALNTNIFKNADFQQPATTTGYSPRNNYYFYSTWNGTLGIPKKAEQLIYLGDSKNFVQGKLTHKETIKTDGFPKENWGNPLWEHYLTGSIPLYTSSKGPTDEVWKKNATDPTQTNDIDKWLTPLHYPPTTRVRYNPDKDTGEGNIVYFVDNYNRAGDNSFDPPEDENKKITGFPLWICLWGWADWIKKLGLLPRVDKDHILVIQSSFFDVKFPYYVFLDDSFTNSFGPYDTPKTTEDEFHWYPKFWYQQKSIETICACGPGVSRAKDDESLQAKMEYKVYVKWGGCPSTLEKVYDPCSQPKWPTTSGVQQTISITNPEFEPANYFYSWDTRRDYLTDTALKRLKKNQETDETISIKTGSKSSPSADLQVLQTLQESSDEASTPEKKKETLQHKLLRLRRNHKQLQQQLIRYLKSP

SEQ ID NO: 2199 - protein, 103 aa, Betatorquevirus sp.
MSLKPPRYGPRGLELQFLNSIYQNHDLMCGCEDQLLHILSIISRNNKTNLSDTKLQEIKCLLTGETTGETEEPAGAADVLDAIDDGDLDALFELSDDMDANNG

SEQ ID NO: 2200 - DNA, 2954 bp, Alphatorquevirus sp.
agacccccgctcgtgctgacacgcttgcgcgtgtcagaccacttcgggctcgcgggggtcgggagctttattaaacagactccaggttgctcttggacactgtagctgtgaattagtaacgaaagtgagtggggccagacttcgccataaggcctttatcttcttgccaccaccagtggtatgaagcctgctaccgtggccatgctgcttattgtggctgtggcgattttattagtcaccttgttgctctgggtaatcagtttggtttcaggccaggtccccgggctcctggcgcaccgggactagggggactccccgtcccgccccgtagagccctgccggcacccccggctgaggctccggagcaccagcagggcaacaacaacaacaaccagcagctgcagagatggcctggggatggtggaaacgcagacggcgcagatggtggagaggcctctggaggagacgccgctttgccagaagacgacctagacggcctgctcgccgccctagacgacgaagagtaaggaggcgcagacggtggaggagggggcgactaaggaagcgcgtgtacaacaggagacgcagaatcagacgaaagagacgcagacagaaactgacaataagacagtggcagcctgacaaacgcaggatatgtagaattaaaggctaccttcctgccattatatatggagacgggacgttttccaaaaactatacaagtcacttagaggacagaatctccaaaggaccgtttgggggagggcacgggactgctagaatgtctcttaaagtactgtatgacgaccacctaaaaggacttaacatatggacgtatagtaacaaggacttggaactggttagatacatgcacaccacaattacattttacagacacccagacacagactttatagcagtatataacagaaaaacaccactaggtggcaacagatacactgcaccctcactgcaccctggtaacatgatgctgcagagaactaaaatactaattcctagctttaaaaccaaacccagaggtagtggcaaaattagagtagtaataagaccccccactttactagtagataagtggtactttcaaaaggacatatgcgacgttacactgtttaacctcaatattacagcagccagcctgcggtttccgttctgctcaccacaaacgaacaacccttgtgtaacatttcaagttctgcattctgtatatgacaaggcactaggcattaacacattcggtaccaaggaaacagcagatataacacaacaagagaatattaaaaactggataacaaaagcatttcagcaggcaggatgcactatactaaacacatttagatcagaaggcatctactctcatccacaaatacaaaaacctggtgcagacaacaaacccgatgcagagcactactttgcaccaaaagacagcctgtggggagacgccatatatgaaaatactaataatcaaactgcaacaacattaccaacactgctagcaaaaaacgcatatacatattatcaaaaagctaaacaaccaggaattgacaaacacagaggagccatggcacattgccacttaacaggaatatttagccctgcactgctaacacaaggcagattatcacctgaattttttggcctatacaaagaggtaatttacaacccatatgatgataaaggcaaaggtaacaaaatctggatagaccctttaacaaaacctgataacatatttgatgctagaagtaaagtagaactagaagacatgcccctctggatggcatgctttggatacaatgactggtgtaaaaaagagctaaataactggggcctagaagttgaatacagagtactactaagatgcccttacacatatccaaaactgtacaatgaagctaacccaaactacggctatgtacctatatcctacaattttagtgcaggaaaaactgtagaaggagatctttatgttccaataatgtggagaactaaatggtatcctacaatgtataaccaatttccagtattagaagatttatccatgtcagggccctttgcaccaagagataaaatacctagcagcacactcacagtaaaatacaaagctaaatttatattcgggggcaaccctatatctgaacagattgtcaaggacccctgcacccagcccacctacgaaattcccggaggcggtacgctccctcgcagagtacaagtcattaacccggaatacatcgggccacactactcattcaaaagcttcgacatcagacgtgggtactttagcgcgtcgagtgttaaaagagtgtcagaacaatcagacattgctgagtttatattctcaggtccaaaaaagccaaggatcgaccaagacaggtaccaagaagcagaagagcactcagattctcgactccgagaagaaaaaccgtggcagagctcgcaagaaacagagagcgaagcccaagaagaagagatacaagagacaaacatccagctccagctgcagcaccagctcaaagagcaactgcagctcagacggggaatccagtgcctcttcgagcaactaagcaaaacacaacagggagtccacataaacccttcccttgtgtaggcccaaaagcatacatgttcccagagagggcccctaaggctccccccacttcgggggactgggaaacagaatactttgcctgtaaaatgatgaatagaccagccagaaaattccttactgactttccctactatcctcactgcaaaaataattacaatgtaacctttcagcttaactacaaataaacaaggccgtgggagttttacttgtcggtgtctacctcttaaggtcactaagcactccgagcgccagcgaggagtgcgacccttccccctgactcaacttcttcggagccgcgcgctacgccttcggctgcgcgcggcacctc

SEQ ID NO: 2201 - protein, 739 aa, Alphatorquevirus sp.
MAWGWWKRRRRRWWRGLWRRRRFARRRPRRPARRPRRRRVRRRRRWRRGRLRKRVYNRRRRIRRKRRRQKLTIRQWQPDKRRICRIKGYLPAIIYGDGTFSKNYTSHLEDRISKGPFGGGHGTARMSLKVLYDDHLKGLNIWTYSNKDLELVRYMHTTITFYRHPDTDFIAVYNRKTPLGGNRYTAPSLHPGNMMLQRTKILIPSFKTKPRGSGKIRVVIRPPTLLVDKWYFQKDICDVTLFNLNITAASLRFPFCSPQTNNPCVTFQVLHSVYDKALGINTFGTKETADITQQENIKNWITKAFQQAGCTILNTFRSEGIYSHPQIQKPGADNKPDAEHYFAPKDSLWGDAIYENTNNQTATTLPTLLAKNAYTYYQKAKQPGIDKHRGAMAHCHLTGIFSPALLTQGRLSPEFFGLYKEVIYNPYDDKGKGNKIWIDPLTKPDNIFDARSKVELEDMPLWMACFGYNDWCKKELNNWGLEVEYRVLLRCPYTYPKLYNEANPNYGYVPISYNFSAGKTVEGDLYVPIMWRTKWYPTMYNQFPVLEDLSMSGPFAPRDKIPSSTLTVKYKAKFIFGGNPISEQIVKDPCTQPTYEIPGGGTLPRRVQVINPEYIGPHYSFKSFDIRRGYFSASSVKRVSEQSDIAEFIFSGPKKPRIDQDRYQEAEEHSDSRLREEKPWQSSQETESEAQEEEIQETNIQLQLQHQLKEQLQLRRGIQCLFEQLSKTQQGVHINPSLV

SEQ ID NO: 2202 - DNA, 2954 bp, Betatorquevirus sp.
cgggagccgaaggtgagtgaaaccaccgaagtctaggggcaattcgggctagatcagtctggcggaacgggcaagaaacttaaaatattttttattcacagatatgttctcatcatggaagacacccacatcatcaaagagacaacaagaactacagtggattggaataattaactcaactcacgaccaaatttgccactgcgacgacccaactcttcatttgctttactgcctcaacaaattctccggatttcaaaaaccagaaattgatattaataacataaaatgcctccttatcggcaatcctactacttcaaaagaaacttctacaacaatagaagacgccggtttagaagaaggggagttagaaaaccttttcgcagaagatactggagaatacaaagaaaacgaaaacccagatacaaggtaaacaaatttaaattttataaaagaaaagcaaaaaaaataacacttaaacaatttcaaccaagaactattaacaaatgtaaatgtattggatataaatgcttatttcaaggtagtcccttaagagctatgaacaactttgtacaatatgtttattcaattatacctgaaaaacaaccaggaggagggggatggagcattcaagtactcagcttagactcaatatttgaggactatgaacatttacaatgcatatggactaaaggaaacgcaggactgcctcttgttagatacatgggttgcaaatttacattataccaatctgcagaaacagactatgtattttcttatgataactgctggccaatggttgatactatacacacccacgcagactccgcaccatttagaatgctacaaaaaagaaacaaaattgttgttccctcaatgaatacaaaaaaaagacgcaaaccatacaaaaaagtttttgtaaaaccaccaccacaaatgacaaacaaatggtactttcagaaagacatatgtaaaacacctctagtaatgtttactgccactgcagtatctctcggacacccatttgcagaccctagagctaaaagcaacaatgtaactgtacactgtataaacccatacctttttcaaaacccagactttcaacattggggaacacaaggatactcacctaaaatggcagataatacaacaccattatacctatatgcatcacaaatagacaacttaacctaccagaacttaatacagcataaaaataccattatagcactaacaaatacaaaagaccatacacctggaataccacttataaatagtcaaacaacagacatatcaaaagtagcaggaaacccctttcacgaagactacacatcaggagatatgtatgtttacatttcaaaaatgacaccaaaacagatgcaagattacttaaaaaacaacacagaaccaccaagtacaaaccgaagtataactcttgctggtgatattatttatacatttagatacaacccagacaacgacgatggttccactaataaacaatatatagtaagcacagcatcaggaaacaaaataaaaccaccagaaaacgaaaactttatattatcaggctttccattcccatacatgttatggggatggacagactggataaaaaaactaggagaaacaccacaatttgacacaaacaaactacttatactggaaacaaaagcatttgatgataaaactataccactgtttatacctattgacttaacatttattcatggatatgacccatatgaacccatagaagacaaaacacacaacataagtgcatacaatgcaaaaaactggtttccaagatatgaatatcaaaaaaaaaccataaatgacatatgcttagcaggacctgcgtgtccaagaccaccatgggatcactatttacaagctatatgtaaatataccatgtattttaaatgggggggttgtcctaaatctttacaaaaagcttataatccctgtttacagtctaaatggcccactcccgataacctctatggaagacctgcggtgcagaatcctaacatcttcccacaaacagaactgtactcctgggactgggaaaatgattatgttacaaaagcagctattgacagaatccgaagatttacagaaattgatccaaaaatgttctcaattacagaaatcaaaaacaacccaccggcgatccaaaaaaagaaaacaacagaagacgaagaagaggagaagaagctcaagctccagctccacaagctccgattcaacaaagtcctcctgcagctccaactccaacagcaattaaaatcactaaaagcaaaataaaagttaatatgtttgaagacccaaaacccaaaaatcgtagaatgactccctgggaaaaagaacaagaaaagcaagacgctgccatttggaaaagaccacaaagagactttattttagatatacctttttaccctggcattcccccaactccgcttgtaaactttgacttaaaatacaaatatgaataaacaaggccaacaataattcacttagtggtgtccatttatttaagtttaacttatataaacatccaccgcctccctataatttgggcgccaaaattcaaaagggggctccgcccccttacacccccaagggggctccgcccccttacacccccaagggggctccgcccccttacagggctccgcccccttacacccccaagggggctccgcccccttacaccccctcattaatatttaacaggaaaaccacctaattagaatggctcaccacaaacggttttcaacttcccctttcacacaaacttccccttttactatttattattcattacattaattagtaaacagtgtaattccggggaggagactatcatctataaaatcaaccacactttcgaatggctgagtttatgccgccagacggaggctgtatcacttcagtgactacagactgatcttggg

SEQ ID NO: 2203 - protein, 672 aa, Betatorquevirus sp.
MPPYRQSYYFKRNFYNNRRRRFRRRGVRKPFRRRYWRIQRKRKPRYKVNKFKFYKRKAKKITLKQFQPRTINKCKCIGYKCLFQGSPLRAMNNFVQYVYSIIPEKQPGGGGWSIQVLSLDSIFEDYEHLQCIWTKGNAGLPLVRYMGCKFTLYQSAETDYVFSYDNCWPMVDTIHTHADSAPFRMLQKRNKIVVPSMNTKKRRKPYKKVFVKPPPQMTNKWYFQKDICKTPLVMFTATAVSLGHPFADPRAKSNNVTVHCINPYLFQNPDFQHWGTQGYSPKMADNTTPLYLYASQIDNLTYQNLIQHKNTIIALTNTKDHTPGIPLINSQTTDISKVAGNPFHEDYTSGDMYVYISKMTPKQMQDYLKNNTEPPSTNRSITLAGDIIYTFRYNPDNDDGSTNKQYIVSTASGNKIKPPENENFILSGFPFPYMLWGWTDWIKKLGETPQFDTNKLLILETKAFDDKTIPLFIPIDLTFIHGYDPYEPIEDKTHNISAYNAKNWFPRYEYQKKTINDICLAGPACPRPPWDHYLQAICKYTMYFKWGGCPKSLQKAYNPCLQSKWPTPDNLYGRPAVQNPNIFPQTELYSWDWENDYVTKAAIDRIRRFTEIDPKMFSITEIKNNPPAIQKKKTTEDEEEEKKLKLQLHKLRFNKVLLQLQLQQQLKSLKAK

SEQ ID NO: 2204 - protein, 123 aa, Betatorquevirus sp.; identical to SEQ ID NO: 2017

SEQ ID NO: 2205 - protein, 59 aa, Betatorquevirus sp.; identical to SEQ ID NO: 2018

SEQ ID NO: 2206 - DNA, 2954 bp, Betatorquevirus sp.
cgggtgctgaaggtgagtgaaaccaccgaaatcaaggggcaattcgggctatggcagtctagcggaacgggcaagtaacttaaaatattttacaggtatgtcattaaaacctccaagatatggaccccgcggactggaactacaatttttgaactcaatataccaaaaccacgacttaatctgtggctgcgacgatcaacttttacatatcctttcaataattagcagaaacaacaaaacaaacctttccgatactaaacttaaagaaataaaatgcctgcttactggagaaactactggagaaacagaagaacccgctggcgccgcagacgtcctagacgctatcgacgatggagatttagacgcccttttcgaactttcagacgatatggacgccaacaatgggtaagaagaaaatttaaactatcttctataaaacttaaaatgtaccaacctagaacaataagaaactgtgtaataaaaggaatgaaatgtttatttgaaggaagtgccatgagaaaatctaacaactactggcaatatcctcacactataataccagaaaaatttccaggaggaggaggatggggactacaagtaattagcttaagttctttatgggaagattatcaacatttaagtaattacttcagcacaagcaatgctggactaccactggtacgttttagaggcatgaaactaatattttaccaaaatcaaacaacagactatgttgtagaaattgaaaactgctggccaatggttgatacacctctaaaacatgccaactcacaaccacaaagaatgttaatgagcaaaaagaaaattattgtacctagtatatatactaagagactaagaaaaggaaaaaagaaaacttatgtaaaaccaccagcacaaatgattaatcaatggtattttcaaaaagacgtgtgtaatacaaaactagcaatgataacagcaacagcctgtagccttacagattattacttaccatataaagcagaatcaaacaatatatcactaaatgcattaaatacaaacatctttaaaaatgcagactttcaacaacctgctgcaacaacaggatacagccctcgcaataattattatttttattcaacatggaatggcactcttggcattccaaaaaaagcacaacaactaatatacttaggagacagtaaaaactttgtacaaggaaaacaaacacctatagaaaaattaaaaacagatggattcccaaaagaaaactggggtaaccctttatgggaacactatttaacaggtagtattccattatacacctcttctaaaggaccaacagatgaagtatggaaaaaaaatgccactaatccaattacagcaaatgacatagataaatggcttacaccattacactatccaccaacaactagagttagatataacccagacaaagacacaggcgagggaaacatagtttactttgtagacaactataacagagcaggagacaatagttttgatcccccagaagacgaaaacaaaaaaataacaggttttcctttatggatatgcctatggggatgggcagactggataaaaaaactaggcctactacctagagtagacaaagaccacattctagtaatacaaagttcattttttgatgtaaaatttccatactatgtgtttttagatgacagttttacaaacagtttcggtccttatgacacacctaaaactacagaagatgaatttaactggtatcctaaattttggtaccaacaaaaatccattgaaaccatttgtgcttgtggtccaggagtaagcagagcaaaagacgatgaatcattacaagctaaaatggaatataaagtatatgttaaatggggaggttgtccttcaacactagaaaaagtttatgatccctgttcacagccaaaatggcccacaaccagtggtgtccaacaaacaatttcgatcacgaatccagaattcgaaccagcaaactacttctacagctgggatactagaagggactatcttacagacacagctctcaaaagacttaaaaaaaaccaagagactgatgaaactatttcaattaaaacaggctcaaaaagcagcccaagcgcagacctacaagtcctccaaacactccaagaaagctccgacgaagcatcgacaccggaaaaaaagaaagagacactgcagcacaagctcctccgactccgccgaaaccacaagcaactgcagcagcagctcatcagatacctaaaatcaccataatacataaacctgttaaaataaacttatttaacgatcctaaacctgtaaaaaacagaccattcacagaatctgaatggcaagatgaaaaatttatagcttcctggttaaaaagacctcaaagacatttcttttacgatcctcctatttacccactctttcctcctgcaccccttgctaactttgaccttaattacaaagaataaaggcctacaattttcacttagtggtgtctgtttatttaagtttaaccttaataagcatccaccgcctcccaacctcgtaggcgccaaaatttaaaaaggggctccgccccttaaaccccagggggctccgccccctaacccccagggggctccgccccctctaacccccaagggggctccgccccctaccaccccctaataaatattcatacaggaaaccacaaaattagaattgccgaccacaaacgaatatgcaaatttacttctgcaaaacacaaccacacttccctaaaaattaattaataaacaccgtcacacagggaggagcctactcactatataactaactacactgacgaatggctgagtttacgccgctagacggagaacgcatcagttactgactgcggactgccatcgggcgggtgctgaaggtgagtgaaaccaccgaaatcaaggggcaagactgccatcggg

SEQ ID NO: 2207 - protein, 666 aa, Betatorquevirus sp.
MPAYWRNYWRNRRTRWRRRRPRRYRRWRFRRPFRTFRRYGRQQWVRRKFKLSSIKLKMYQPRTIRNCVIKGMKCLFEGSAMRKSNNYWQYPHTIIPEKFPGGGGWGLQVISLSSLWEDYQHLSNYFSTSNAGLPLVRFRGMKLIFYQNQTTDYVVEIENCWPMVDTPLKHANSQPQRMLMSKKKIIVPSIYTKRLRKGKKKTYVKPPAQMINQWYFQKDVCNTKLAMITATACSLTDYYLPYKAESNNISLNALNTNIFKNADFQQPAATTGYSPRNNYYFYSTWNGTLGIPKKAQQLIYLGDSKNFVQGKQTPIEKLKTDGFPKENWGNPLWEHYLTGSIPLYTSSKGPTDEVWKKNATNPITANDIDKWLTPLHYPPTTRVRYNPDKDTGEGNIVYFVDNYNRAGDNSFDPPEDENKKITGFPLWICLWGWADWIKKLGLLPRVDKDHILVIQSSFFDVKFPYYVFLDDSFTNSFGPYDTPKTTEDEFNWYPKFWYQQKSIETICACGPGVSRAKDDESLQAKMEYKVYVKWGGCPSTLEKVYDPCSQPKWPTTSGVQQTISITNPEFEPANYFYSWDTRRDYLTDTALKRLKKNQETDETISIKTGSKSSPSADLQVLQTLQESSDEASTPEKKKETLQHKLLRLRRNHKQLQQQLIRYLKSP

SEQ ID NO: 2208 - protein, 103 aa, Betatorquevirus sp.
MSLKPPRYGPRGLELQFLNSIYQNHDLICGCDDQLLHILSIISRNNKTNLSDTKLKEIKCLLTGETTGETEEPAGAADVLDAIDDGDLDALFELSDDMDANNG

SEQ ID NO: 2209 - DNA, 2954 bp, Betatorquevirus sp.
cgggtgctgaaggtgagtgaaaccaccgaaatcaaggggcaattcgggctagttcagtctggaggaacgggcaagaaacttaaaaaatatacttttttacagaatgactaccagcaagcatgatcaacttaaatttacaaatgtagttattcactttcatgactacatttgcacctgcaacgaaccactaattcactcaacaaaacttctactaaaacaactatcaaaagatttaactcctaaacaacaagaagacctacaaaaatgccttacttctacccgagaagacgtcgccgctatcgccgaagatggtttggatattggagaagacctagaacgtttgttcgccgcagatacagaagaagattctaccgggtaagaaaaagacaaaaacttaaaaaaatacttataaaagactggcaaccagcttgcattcgtaaatgcaccataagaggaaaaatgcctttatttgaaacagacaatacaagagtaacaaataactttgaaatgtatgaactcagtattgtacctgaatttttatctgggggagggggctggagcataaaactatttactttaaacgctctattttctgaacatgaatactgcagaaatgcctggtcatacacaaacaaatacttacctttagctagatatacaggatgcacaattaaactatatcaatcttcaacagcagattatatattttcttacagcacacaaatgccaatgacatctacattagaattataccaaagtatgcaacctagcatacatggtatgttaccaagacacttaataataccaagccgacaaacatatcctaaaaaaaaaccatattacaaattaaaaataaaaccaccaaaaccatttctagataaatggtactttcaagcagatatcacacaaacaccactcttactaacaaaatgcacagccacatctttacaagactactacattaacccagacagtcccagcacaaacctctcaattccaattttaaatttaggactgtttaaaaacagaaactttaaaacaccagctctaccaggatatagtcctacaacagtaggcactttaaaagtatggctatattcaacatcagaaatacccacagcatcacaaaactatgataacgcagactcatggttaaaatggaaacatgttatacctctttttgacactcaaaattatgtagaaggaaagagctttgaagaagcaaaactaatagactcatctataacttcagcagaaacatataaaactaaatggacaaattacagaggaaacccttttaatgctagatatctaaccaatgagagcgccatttggcaaagcacacaagattattctactatactatcacaaaacaaactagaagacaatgtatcacaattcacaagagtttacttaacacaaaaagtaagatacaatccatacaatgaccatggcagaggtaatatgtgctactttcttagtattgctaaaaatgaaacaggttgggaaccaccagaaaaaccagagctagtaagcgtaggatacccattatggctactgctatggggttttgcagactggcaaaaaaaattaaaaaaactaatacacttgccaacagactatgtaattcttgtaaaatccacaatgacatatccagtatcccaaccactattaatgctaaaccccacttttttagaaggccaaagcccacaagaaacaaaagttaatcctgaagatgcacatatttggcacccacagtttcaatttcaagaactaatttacaatgaaatatgcagtgcaggaccaggtgtagttagactcagagagggacacacagtagaagcaataatggattataaattttattttaagtggggaggtaatccaccaccaatggacaccattaaagacccaggagaacaaccaacctttcccgtaccccgtaatgaactcaacacaaattcgttacagaatccaaacacagatccagccacattcctatggcaatttgacgaaagacggggacaaattacggaaaaagctgcaaaacgcttgcaaagagacttcccaattaaagaaacttcttttacagatggaagacaccacttctcaccaccaattcaagaagccccacaagaaacatcggagacaagctccgaggaagaagaagaagagacatcactcctcctcaagctccagcagcagtaccacaaacaacagcagctcaagcgacgaatactaaaaacaatgaacaagcttcaaaaattagaataaaaacaacaaaagtcacagtaagcttatttccagaaaaacaaaaaaacagattaatgacaccatgggaagaacaagaagaaagaattgttgcagatatatttaaaagacccagatgtaaatacatactagatagaccatattatccctactttcctcctacaccaataatacccaaaataaactttgaccttggttacaaacaataaagaaataaagggctaggccccattaattcatatctcggtgtctgtttctttaagtgtcaacttatttaaactgactccgcctccctaaattcgggcgccaaaagggggctccgcccccttaaacccccagggggctgcgccccctacaacccccaagggggctacgcccccttacaccccctcataaatattcaacaggaaaaccacctaatttaaattgccgaccacaaaccccctcataaatattcaacaggaaaaccacctaatttaaattgccgaccacaaaccgtcttttacttccccatttttgtgaacttcctctttaccttattattattcattacattaattaataaacaccgtaattccggggcggagacataaacctatataactaagtacactgacgaatggctgagtttacgccgccagacggagacaggatcacttcagtgactccgggctgaacttggg

SEQ ID NO: 2210 - protein, 669 aa, Betatorquevirus sp.
MPYFYPRRRRRYRRRWFGYWRRPRTFVRRRYRRRFYRVRKRQKLKKILIKDWQPACIRKCTIRGKMPLFETDNTRVTNNFEMYELSIVPEFLSGGGGWSIKLFTLNALFSEHEYCRNAWSYTNKYLPLARYTGCTIKLYQSSTADYIFSYSTQMPMTSTLELYQSMQPSIHGMLPRHLIIPSRQTYPKKKPYYKLKIKPPKPFLDKWYFQADITQTPLLLTKCTATSLQDYYINPDSPSTNLSIPILNLGLFKNRNFKTPALPGYSPTTVGTLKVWLYSTSEIPTASQNYDNADSWLKWKHVIPLFDTQNYVEGKSFEEAKLIDSSITSAETYKTKWTNYRGNPFNARYLTNESAIWQSTQDYSTILSQNKLEDNVSQFTRVYLTQKVRYNPYNDHGRGNMCYFLSIAKNETGWEPPEKPELVSVGYPLWLLLWGFADWQKKLKKLIHLPTDYVILVKSTMTYPVSQPLLMLNPTFLEGQSPQETKVNPEDAHIWHPQFQFQELIYNEICSAGPGVVRLREGHTVEAIMDYKFYFKWGGNPPPMDTIKDPGEQPTFPVPRNELNTNSLQNPNTDPATFLWQFDERRGQITEKAAKRLQRDFPIKETSFTDGRHHFSPPIQEAPQETSETSSEEEEEETSLLLKLQQQYHKQQQLKRRILKTMNKLQKLE

SEQ ID NO: 2211 - protein, 106 aa, Betatorquevirus sp.
LEERARNLKNILFYRMTTSKHDQLKFTNVVIHFHDYICTCNEPLIHSTKLLLKQLSKDLTPKQQEDLQKCLTSTREDVAAIAEDGLDIGEDLERLFAADTEEDSTG

SEQ ID NO: 2212 - DNA, 2953 bp, Alphatorquevirus sp.
atcgctctttaaaacatgtttctcggcagggtctggagaaagaaaaggcaagtgccactgccaacactgcgagtggtgccgctaccacaaccttcacctatgagcagccagtggagacccccggttcacaatgtgcaagggctggagcgcaattggtgggagtgcttcttccgtggtcatgcttgcttttgtggctgtggtgacgctattactcatattaatcatctggcgtctcgttttggacgtcctcctgctacctcaactccccgaggaccgcaggcacctccagtaaccccgtatccagccctgccggccccggagcctagcccagagccatggcgtggcgccggtggcgatggcggccgtggtggagacgccggaggcgccgccggtggagaaggagacgccggagacccagacgacgccgcccttatcgacgccgtaaacctcgcagagtaaggaggcgcagggggcggtggaggcgcgcttacagacgttgggggcgacgcagacgcagacgcagacacaaaaagagacttgtactgactcagtggcagccccctatagttaaaaagtgcctaataatagggtacgacccccttataatctgtggcataaacagaacagcttttaactacactacacactcagaagatttcactttcaacaacgacagctttggagggggactatgcacagcacagtacacactaagaatactattccaagagaagctggcccaacacaacttctggacgaccagcaacgaggacctggacttagccaggtacctgggtggcgcactaatatttttcagacacccaacagtagattttttagtaagagtgcgcaccagtcctccattcaatgacacagacatgactgctctcactctacacccgggcataatgatgctcagtaaaaaggtcattaaggtacccagccttaaaacgaggcccagcagaaaacactatgtaaaaataagatttggagcccctaaactgtttgaagacaagtggtacccccagaacgagctatgtgatgtaactctggtcagcatacacgcaaccgcagctaatttccaatatccgttcggctcaccactaacgaactcagtctgttgcaacttccaggttcttaacagcaactatgacaatgcacttagtatacttaacactactcaagtaacagaagaactacatactaaaagacaaagctgttataattttcttttaaagcaatacagctactacaacacaaaacaaacactagctcaacttaaatttgacttttttccaaagcagaaccccaaaatgccaaaaataagcaatgcacacacatccaaatccccagagagtctcactaaaaatgaagttacatctgaatacccacactgggactctctatatggtggcctagcatatggctttacacctaccagtaattctgaaaacacaaaccaagcaaaagacttacaaactcaaatgatagaagccaacaaattttatacagctgcaggcaaaaaactaataaaaggctttacacctatacaacataacaaccagaacgacacaaacatctttgactactacacaggcatgtactgtagcatatttctatcctccggaaggtccaacccagaagttaaaggcagctacacagacatatcttacaacccactcacagataaaggtgtaggcaacatgatatggatagactggctaagcaaaccagacagcatatacaacccctctaagagcaaatgcctactaaaagactttcccttgtggtgcatggtatacgggtacgcagactactgcagaaaagtcacaggagactcagccatactgctagactgcagagtagtaataagatgcccgtacacataccctcagcttataaaacacaacaatgacaactggggattcgtcccctatagcgaaaactttggactgggtagaatgcccgggggcaatccaaacccctcgaccagaatgagactgaactggtacccaatgctgctacaccagatggaagtattagagtgcttggcacagaccggaccgtttgcctaccacggagacgagagaaagactgtactgactgccaaatacaagttcagatggaagtggggaggaaaccctgtctttcaacaggttcttagagacccctgcaccggaggtgccgtggcgccccacaccagtcgacaccctcgcgcagtacaagtctttgacccgaagcaccaagccccggagtatctgttccacaagtgggacttcaggaggggactctttagcactaaaggtattaaaagagtgtcagaacaaccaacatatgatgagtttcttacaggccgcagcaagagacccaagaaagatacaggggccccgctccaagaagaggagcaaaaagaagactcgcgtttcagagtcccacagctcagaccttggctcccctccagccaggaaacgcagagccaaagcgaagaagagcagcagacacgcagtacaacggtacaagaacaattacagcaacagctccagcaacagcgactcatgggactccaactccgaaacgtctgtctccagctcgcaagagtccaagcggggcacagtctccaccccgttttccaatgccatgtataaacaaggtgtttatatttcctgagagagagcccaagcagccccctaacagcaaagactggcaggaggaattcgaggcctgtaagcactgggacaggcctgcgagatctaacttagatagaccccctttctacccctggatgcccagggaacccccaacttgtcgtgtaaccttcaagcttggctggcaataaaattacaaggccgtgggagtttcacttgtcggtgtctgcttattaaggtcactaagcactccgagcgccagcgaggagtgcgaccccctgccctgggcccacttcttcggagccgcg

SEQ ID NO: 2213 - protein, 769 aa, Alphatorquevirus sp.
MAWRRWRWRPWWRRRRRRRWRRRRRRPRRRRPYRRRKPRRVRRRRGRWRRAYRRWGRRRRRRRHKKRLVLTQWQPPIVKKCLIIGYDPLIICGINRTAFNYTTHSEDFTFNNDSFGGGLCTAQYTLRILFQEKLAQHNFWTTSNEDLDLARYLGGALIFFRHPTVDFLVRVRTSPPFNDTDMTALTLHPGIMMLSKKVIKVPSLKTRPSRKHYVKIRFGAPKLFEDKWYPQNELCDVTLVSIHATAANFQYPFGSPLTNSVCCNFQVLNSNYDNALSILNTTQVTEELHTKRQSCYNFLLKQYSYYNTKQTLAQLKFDFFPKQNPKMPKISNAHTSKSPESLTKNEVTSEYPHWDSLYGGLAYGFTPTSNSENTNQAKDLQTQMIEANKFYTAAGKKLIKGFTPIQHNNQNDTNIFDYYTGMYCSIFLSSGRSNPEVKGSYTDISYNPLTDKGVGNMIWIDWLSKPDSIYNPSKSKCLLKDFPLWCMVYGYADYCRKVTGDSAILLDCRVVIRCPYTYPQLIKHNNDNWGFVPYSENFGLGRMPGGNPNPSTRMRLNWYPMLLHQMEVLECLAQTGPFAYHGDERKTVLTAKYKFRWKWGGNPVFQQVLRDPCTGGAVAPHTSRHPRAVQVFDPKHQAPEYLFHKWDFRRGLFSTKGIKRVSEQPTYDEFLTGRSKRPKKDTGAPLQEEEQKEDSRFRVPQLRPWLPSSQETQSQSEEEQQTRSTTVQEQLQQQLQQQRLMGLQLRNVCLQLARVQAGHSLHPVFQCHV

SEQ ID NO: 2214 - protein, 147 aa, Alphatorquevirus sp.; identical to SEQ ID NO: 535

SEQ ID NO: 2215 - protein, 129 aa, Alphatorquevirus sp.; identical to SEQ ID NO: 536

SEQ ID NO: 2216 - DNA, 2952 bp, Betatorquevirus sp.
caggtgccgaaggtgagtgaaaccaccgaagtcaaggggcttaatgggctgaatcagtcttggcggaacgggcaactaactaaaaaatttgttttatagaatgtcctttagattacaaccaccaaaaccaactaaaagacaagctgctctaaaatggatgaacatgctacaccacgtacatgacatattctgcgactgcccaaactccattacacatacagcagcatttatctttgaacaagaaaacaagcacaactttttggcaccggaaaaagatttaattaaaaaatgcctttctggagaagccgctacagacgctggtggagaccaaggcgtcgacgcttttactggagaggaattagaaaaccttttcaaagacgacgctggagaaaacgacgatacacggtaagaagaaaaaaactaaaaactataagactaaaagaatggcaacctccgtacataaaaaaactaactgttcgtggatactatcccattatcctcggaacaagagacagagttgccaacaacttaaactgctattttgaatctacagcgcctcactatgtacctgggggaggttgtttctctattaataactttagcttactgactctatacaaagaacacattgatattagaaattggtggacaacaggaaacgaaaactatcctttaattaaatactttggatgtacagtatttctatacagagaagaaaacatagactacttattctactataatagacaatggcccatgacagcatcactaacaacatatcaaagcacacaaccaacagctatgcttctaaacaagcacactataaaagtagcatgtaagaaaaatacaaaaaacaaaaaaccatacaaaagaataagaattccacctccatctcaactacaaaacaaatggtactttcaacatgacatagccacaacaccgttattacaaactatggcaacagcgtgttcgtttgaccgcatgtttctaaatagtaagagcatttcaaccacaataggattcgttactttagacaccaatacctttcttaatcatgatttccaaagaggcactcgtggttaccaaccacgaccaaatactttattatttaaagttacaaacggtgaatatgacataacaaaaattgaaattcaaaacataatatttctaggagaagtagaagacctacaacaaggaacagaaatacgacacataacaaatacaaaaacaccacctgctagcctagtaacacaccctacagatacacaaaaaaaactttacacagcaagtattgaacaccaatggtggggaaatgtatttaaatcttctaccttctggggagacgaaagaatgatagaaacaaacctatcatgggactctataataaaaaagtatacaaaacctaatgacaaattaactacaggatggacatggaaaacaacaaagtggtctgaatgtagatataatccatactcagaccatggatcaggaaacataatttatctactaaaaattaacagctcacttcatgcaaacgactggtcaccaccaacagacaaagatgttatagcaaaagacttaccactacatacattatgctggggatacttagactaccacagaaaatgcaaagaatacacagacattgacacaactactgtaatagtaatccaaagcccttacattacaccaagatcatttaaattttatgtgcctttagactactcatttttagaaggacgcagcccatacagaccacaacaaaacataataccctcagatgaccaacactggcaccctaaattaagatttcaagtagaaactataaactcaatttgccttagtggaccaggaacagttaaactcccaccagacatatcctgtgaagctcacatattatatcgctttcactttaaggtgggcggtcaaccagcccctatgtccaacattaccaaaccagacgaacaaccaaagtggcccgtacccaataacctcctccaaacaccttcgttacagagtccagcaataccattcacccaactattatggagctttgatgaaagacgaggagaacttacaaaaaaagctacaaatagaatcacagactacacacaacctgaaacatctcttttcccaattacagaaacaagtgtctcatgccctaccatacaccaacaaaaaaaagaaacacaagagacatcatcctcggaagaagaggaaacatcgatccaggaacagctcaacaagcagcgaagaaagcaaaaactcctccgacacagaatcaacctcctcctcagccagttagcaagtacacaataaaaactagtgaaataagagttgaactatttccaactccaaaaccaaatagaagactaacccctaaagaatatgaggaggaagtagcagattctattatatggaaaagagttcccagaacacacttgtatgataaacctacttatccatgggttccccaatgctctccttttactgtaaactttgacttaaatgcgccgcaataaaattctatgcctgcaaacttcaacttgaggtgtccatttaatataaataaaacttaaataaacatccaccacactccctaatacgcaggcgcactagggggctccgccccctagaacccccagggggggtccctaatacgcaggcgcactagggggctccgccccctagaacccccagggggggcaaagcccccccctataaccccccttataaatattcatacaggaaaccacaaaatttgaattgccgaccacaaacagccatatgctaattaacttccgtaaaacacacttacttcctcaaaaattaattagtaaacagcatcataagaggaggagctaacaatctatataatcaactgcacttccgaatggctgagtttatgccgccagacgaagcgcggatcacagactcagcgctgattcaggg

SEQ ID NO: 2217 - protein, 676 aa, Betatorquevirus sp.
MPFWRSRYRRWWRPRRRRFYWRGIRKPFQRRRWRKRRYTVRRKKLKTIRLKEWQPPYIKKLTVRGYYPIILGTRDRVANNLNCYFESTAPHYVPGGGCFSINNFSLLTLYKEHIDIRNWWTTGNENYPLIKYFGCTVFLYREENIDYLFYYNRQWPMTASLTTYQSTQPTAMLLNKHTIKVACKKNTKNKKPYKRIRIPPPSQLQNKWYFQHDIATTPLLQTMATACSFDRMFLNSKSISTTIGFVTLDTNTFLNHDFQRGTRGYQPRPNTLLFKVTNGEYDITKIEIQNIIFLGEVEDLQQGTEIRHITNTKTPPASLVTHPTDTQKKLYTASIEHQWWGNVFKSSTFWGDERMIETNLSWDSIIKKYTKPNDKLTTGWTWKTTKWSECRYNPYSDHGSGNIIYLLKINSSLHANDWSPPTDKDVIAKDLPLHTLCWGYLDYHRKCKEYTDIDTTTVIVIQSPYITPRSFKFYVPLDYSFLEGRSPYRPQQNIIPSDDQHWHPKLRFQVETINSICLSGPGTVKLPPDISCEAHILYRFHFKVGGQPAPMSNITKPDEQPKWPVPNNLLQTPSLQSPAIPFTQLLWSFDERRGELTKKATNRITDYTQPETSLFPITETSVSCPTIHQQKKETQETSSSEEEETSIQEQLNKQRRKQKLLRHRINLLLSQLASTQ

SEQ ID NO: 2218 - protein, 106 aa, Betatorquevirus sp.
LFYRMSFRLQPPKPTKRQAALKWMNMLHHVHDIFCDCPNSITHTAAFIFEQENKHNFLAPEKDLIKKCLSGEAATDAGGDQGVDAFTGEELENLFKDDAGENDDTR

SEQ ID NO: 2219 - protein, 121 aa, Betatorquevirus sp.
MPYHTPTKKRNTRDIILGRRGNIDPGTAQQAAKKAKTPPTQNQPPPQPVSKYTIKTSEIRVELFPTPKPNRRLTPKEYEEEVADSIIWKRVPRTHLYDKPTYPWVPQCSPFTVNFDLNAPQ

SEQ ID NO: 2220 - DNA, 2951 bp, Betatorquevirus sp.
cgggtgccgaaggtgagtgaaaccaccgaagtcaaggggcaattcgggcaaggtcagtctggcagaccgggcaagaaacttaatattatttatattttacagatatgtactcatcatggaagaatcccacatcatcaaagagacaacaagaactacaatggattggaataattaactcctgccacgatcaattttgccactgcgacgaccccacaaaccacctgctttactgcttaaacaagttttcaggtttccaaaaacctgaaccagatattcgcaacatacaatgcctccttactggaattactcctactaccgtagaagaagaaaccaaagaaaaagacgaccctggatttctagaaggggagttagaaaaccttttcgcagaagaaaatacagaaacaaaagaaaacgccgatacttccggaaggtaaaaaactttcgtttttctaaaagaaaaaaaaaatcaattatactaagacaatttcaacccagtactattaacaaatgcaaatgtattggatataaatgtttatttcaaggaagtcctcttagaacaatgaataactttgtacaatatatatattcttatataccagaaaagcaaccaggagggggaggatggagcatacaagttttaagtttagactctatatacgaggactaccaacatttacaatgcatctggactaaaggaaatgctggactaccattagttcgttacttaggatgtcaatttactttgtatcaatctcaagaaacagactatgtatttgtatatgataactgctggcccatggtagacactatacacactcacgcagactcagctccttttagaatgcttcaaaaaaaacataaagttgtaataccaagccgaaactctagtaaaagaaaaaaaccatataaaaaaatctttgttaaaccaccacaacaaatgcaaaacagatggtacttttccaaagaaatatgtaaaactccactagtaatgtttaccgctacagctatttctctatttaacccatttacagatcctagagctaaaagcaacaatgtaacagtacactgcataaatccatacatttttcaaaacccagactttcaacactggggtacaacaggatattcacctaaatctacagactcaaacataccactatacctatatgcctcaaacagccacaacttaaactatgaatcattaaaaactagacagcacgcaattatagctttaacaaacacaaaagaccacacaccaggacacgacttaagaaataacaatcaaaatatatcccaattagcaggaaacccatttcatgaagactacacttcaggaaacatgtacacatacatatcaatgataactcctagtgaaatgaaacagttagttacaacaggaagtgaaccacctaaagataaacaaagtataactaacacaggagaatttatatacacatttagatataatccagacaatgatgacggcagtactaacaaacaatacattgtaagtactgcctcaggacacacaatacaaccacctacagaagaaaactttattttatcaggatttccattcccatacatgttatggggatggacagactggattaaaaaactaggacaaacaccacaatttgacacaaacaaactagttgtactagaatctaaagcattcgatgacaaaactatacctaaatttattattgtagacccacaatttatacacggatttgatccctacgaagacttaaatgcagaaaatcatactatttcagcatacaacgcaaaaaactggtttcccagatatgaatttcaaaaactaaccattaacaacatatgcttatcaggtccacattgtcctagaccaccatgggatcattacttacaagctaattgtaaatacaaaatgtactttaaatggggaggctgtcctaaaaaccttcaaaaagcatataatccttgttcacagtccatttggcccacgcccgataacaagtacggaagatctgaagtgcagaatcctaacatcttcccacaaactgaactctatgaatgggactgggaagaagactacattacaaaatctgctattcaaagaatccaaagatttacagaaattgatccaaaaatgttctcaattacaggaagcaaaagcaaccccccagcactccaaaaaaagacgaaccaagaccaagaaaaagaggaggaggagaagctcaagctccagctccacaagctccgattcaacaaagtcctcctccagctccaactccgacaacaattaaaatcactaaaagcaaagtaaaagtacacctttttccaccagaaaaacaaacaaacagaagactaacaccatgggaacaagaacaagaaaacgaaatagcaaaaatattttgcagacctcaaagatactttcttttagatcctcccacatacccttttttccctccaacacctaaagttcctaaagtcaattttgatttaaactatacttttaaataaacaaggccaacaaatttcacttagtggtgtccatttatttaagtttaaaccttaataaacatccaccgcctccctaaaattagggcgccaaaatttaaaagggggctccgcccccttacacccccaagggggctccgcccccttacacccccacaagggggctccgcccccttacacccccaagggggctccgcccccttacaccccctaattaatattcaacaggaaaaccacctaatttaaattgccgaccacaaaccgtctttaacttccccattttacattacttcctctttcacttattattattcatgacattaattattaaacaccgtaaatccggggaggatcctcaaaactatataaccaactacacttccgaatggctgagtttatgctgccagacggaggcgaagttagtacactaacttcaggctgacctaggg

SEQ ID NO: 2221 - protein, 673 aa, Betatorquevirus sp.
MPPYWNYSYYRRRRNQRKRRPWISRRGVRKPFRRRKYRNKRKRRYFRKVKNFRFSKRKKKSIILRQFQPSTINKCKCIGYKCLFQGSPLRTMNNFVQYIYSYIPEKQPGGGGWSIQVLSLDSIYEDYQHLQCIWTKGNAGLPLVRYLGCQFTLYQSQETDYVFVYDNCWPMVDTIHTHADSAPFRMLQKKHKVVIPSRNSSKRKKPYKKIFVKPPQQMQNRWYFSKEICKTPLVMFTATAISLFNPFTDPRAKSNNVTVHCINPYIFQNPDFQHWGTTGYSPKSTDSNIPLYLYASNSHNLNYESLKTRQHAIIALTNTKDHTPGHDLRNNNQNISQLAGNPFHEDYTSGNMYTYISMITPSEMKQLVTTGSEPPKDKQSITNTGEFIYTFRYNPDNDDGSTNKQYIVSTASGHTIQPPTEENFILSGFPFPYMLWGWTDWIKKLGQTPQFDTNKLVVLESKAFDDKTIPKFIIVDPQFIHGFDPYEDLNAENHTISAYNAKNWFPRYEFQKLTINNICLSGPHCPRPPWDHYLQANCKYKMYFKWGGCPKNLQKAYNPCSQSIWPTPDNKYGRSEVQNPNIFPQTELYEWDWEEDYITKSAIQRIQRFTEIDPKMFSITGSKSNPPALQKKTNQDQEKEEEEKLKLQLHKLRFNKVLLQLQLRQQLKSLKAK

SEQ ID NO: 2222 - protein, 109 aa, Betatorquevirus sp.; identical to SEQ ID NO: 2148

SEQ ID NO: 2223 - DNA, 2951 bp, Betatorquevirus sp.
caggtgccgaaggtgagtgaaaccaccgaagtcaaggggcttaatgggctgaatcagtcttggcggaacgggcaactaactaaaaaatttgttttatagaatgtcctttagattacaaccaccaaaaccaactaaaagacaagctgctctaaaatggatgaacatgctacaccacgtacatgacatattctgcgactgcccaaactccattacacatacagcagcatttatctttgaacaagaaaacaagcacaactttttggcaccggaaaacagcagcatttatctttgaacaagaaaacaagcacaactttttggcaccggaaaaagatttaattaaaaaatgcctttctggagaagccgctacagacgctggtggagaccaaggcgtcgacgcttttactggagaggaattagaaaaccttttcaaagacgacgctggagaaaacgacgatacacggtaagaagaaaaaaactaaaaactataagactaaaagaatggcaacctccgtacataaaaaaactaactgttcgtggatactatcccattatcctcggaacaagagacagagttgccaacaacttaaactgctattttgaatctacagcgcctcactatgtacctgggggaggttgtttctctattaataactttagcttactgactctatacaaagaacacattgatattagaaattggtggacaacaggaaacgaaaactatcctttaattaaatactttggatgtacagtatttctatacagagaagaaaacatagactacttattctactataatagacaatggcccatgacagcatcactaacaacatatcaaagcacacaaccaacagctatgcttctaaacaagcacactataaaagtagcatgtaagaaaaatacaaaaaacaaaaaaccatacaaaagaataagaattccacctccatctcaactacaaaacaaatggtactttcaacatgacatagccacaacaccgttattacaaacgatggcaacagcgtgttcgtttgaccgcatgtttctaaatagtaagagcatttcaaccacaataggattcgttactttagacaccaatacctttcttaatcatgatttccaaagaggcactcgtggttaccaaccacgaccaaatactttattatttaaagttacaaacggtgaatatgacataacaaaaattgaaattcaaaacataatatttctaggagaagtagaagacctacaacaaggaacagaaatacgacacataacaaatacaaaaacaccacctgctagcctagtaacacaccctacagatacacaaaaaaaactttacacagcaagtattgaacaccaatggtggggaaatgtatttaaatcttctaccttctggggagacgaaagaatgatagaaacaaacctatcatgggactctataataaaaaagtatacaaaacctaatgacaaattaactacaggatggacatggaaaacaacaaagtggtctgaatgtagatataatccatactcagaccatggatcaggaaacataatttatctactaaaaattaacagctcacttcattcaaacgactggtcaccaccaacagacaaagatgttatagcaaaagacttaccactacatacattatgctggggatacttagactaccacagaaaatgcaaagaatacacagacattgacacaactactgtaatagtaatccaaagcccttacattacaccaagatcatttaaattttatgtgcctttagactactcatttttagaaggacgcagcccatacagaccacaacaaaacataataccctcagatgaccaacactggcaccctaaattaagatttcaagtagaaactataaactcaatttgccttagtggaccaggaacagttaaactcccaccagacatatcctgtgaagctcacatattatatcgctttcactttaaggtgggcggtcaaccagcccctatgtccaacattaccaaaccagacgaacaaccaaagtggcccgtacccaataacctcctccaaacaccttcgttacagagtccagcaataccattcacccaactattatggagctttgatgaaagacgaggacaacttacaaaaaaagctacaaatagaatcacagactacacacaacctgaaacatctcttttcccaattacagaaacaagtgtctcatgccctaccatacaccaacaaaaaaaagaaacacaagagacatcatcctcggaagaagaggaaacatcgatccaggaccagctcaacaagcagcgaagaaagcaaaaactcctccgacacagaatcaacctcctcctcagccagttagcaagtacacaataaaaactagtgaaataagagttgaactatttccaactccaaaaccaaatagaagactaacccctaaagaatatgaggaggaagtagcagattctattatatggaaaagagttcccagaacacacttgtatgataaacctacttatccatgggttccccaatgctctccttttactgtaaactttgacttaaatgcgccgcaataaaattctatgcctgcaaacttcaacttgaggtgtccatttaatataaataaaacttaaataaacatccaccacactccctaatacgcaggcgcactagggggctccgccccctagaacccccagggggggcaaagccccccctataaccccccttataaatattcatacaggaaaccacaaaatttgaattgccgaccacaaacagccatatgctaattaacttccgtaaaacacacttacttcctcaaaaattaattagtaaacagcatcataagaggaggagctaacaatctatataatcaactgcacttccgaatggctgagtttatgccgccagacgaagcgcggatcacagactcagcgctgattcaggg

SEQ ID NO: 2224 - protein, 676 aa, Betatorquevirus sp.
MPFWRSRYRRWWRPRRRRFYWRGIRKPFQRRRWRKRRYTVRRKKLKTIRLKEWQPPYIKKLTVRGYYPIILGTRDRVANNLNCYFESTAPHYVPGGGCFSINNFSLLTLYKEHIDIRNWWTTGNENYPLIKYFGCTVFLYREENIDYLFYYNRQWPMTASLTTYQSTQPTAMLLNKHTIKVACKKNTKNKKPYKRIRIPPPSQLQNKWYFQHDIATTPLLQTMATACSFDRMFLNSKSISTTIGFVTLDTNTFLNHDFQRGTRGYQPRPNTLLFKVTNGEYDITKIEIQNIIFLGEVEDLQQGTEIRHITNTKTPPASLVTHPTDTQKKLYTASIEHQWWGNVFKSSTFWGDERMIETNLSWDSIIKKYTKPNDKLTTGWTWKTTKWSECRYNPYSDHGSGNIIYLLKINSSLHSNDWSPPTDKDVIAKDLPLHTLCWGYLDYHRKCKEYTDIDTTTVIVIQSPYITPRSFKFYVPLDYSFLEGRSPYRPQQNIIPSDDQHWHPKLRFQVETINSICLSGPGTVKLPPDISCEAHILYRFHFKVGGQPAPMSNITKPDEQPKWPVPNNLLQTPSLQSPAIPFTQLLWSFDERRGQLTKKATNRITDYTQPETSLFPITETSVSCPTIHQQKKETQETSSSEEEETSIQDQLNKQRRKQKLLRHRINLLLSQLASTQ

SEQ ID NO: 2225 - DNA, 2951 bp, Betatorquevirus sp.
caggtgccgaaggtgagtgcaaccaccgaagtcaaggggcttaatgggctgaatcagtcttggcggaacgggcaactaacttaaaaatttattttacagaatgtcatttagattacaaccatcaaaacctactaaaagacaaactgccttaaaatggatgaacatgctacaccacgtccatgacctgttctgcgactgccccaactctataacacacaccgcttcatttatttttgaacaagaaccaaaacacaactttttagcaccagaaaaagatttaattaaaaaatgcctttctggagaacccgctacagacgctggtggagaccaaggcgtcgacgcttttactggagaggaattagaaaaccttttcaaagacgacgctggagaaaacgacgatacacggtaagaagaaaaaaactaaaaactataagactaaaagaatggcaacctccttacataaaaagactaactgttcgtggatattatcccattatcctcggaacaagagacagagttgccaacaacttgaactgctattttgaatctacagcacctcattatgtaccagggggtggatgtttctctattaataactttagcttactaactctttacaaagaacatattgatgttagaaactggtggacaacaggaaatgaaaactatcctttaattaaatactttggatgcacagtcctactttatagagaagaaaacatagactacttattttactataatagacaatggcccatgactgcatcactaacaacatatcaaagcacacaacctatggctatgctactaaacaaacacactataaaagtagcatgtaaaaaaaatacaaaaaacaaaaaaccttataaaagaattaaaattccaccaccatctcaactacaaaacaaatggtactttcaacatgacatagctacaacacccttattacaaactatgtcaacagcatgctcgtttgaccgcatgtttctaaactctaaaggcatttcaacaaccataggattcgttactttagacaccaacacctttctaaatcatgatttccaaagaggcactcgtggttacaaaccgcgaccagaaactctattatttaaagtaacaaatggggaacatgatataaataacattcaaattcaacatttaattttcttaggcgaagtagaagacttacaacaaggaacagaaatacaatacataacgaatttaaaatctccacctacatcactagttccaagtccaacagacttccaaaaaaaactttacacagccagcattgaccaccaatggtggggaaatgtatttaaatcttcaaccttttggggagacgaaagaatgatagaaacaaacaaaacttgggatgaaataataaaacaatttaaaacaccaaccgaaaaactaggcacaggatttacttggaaaacaacaaaatggtctgaatgcagatacaatccttactcagaccatggatcaggaaacataatttatcttctaaaaataaacagctcacttcattcaaatgactggtcaccaccaacagacaaagatgtaatagcaaaagacttaccactacacacattatgctggggatatttagactaccacagaaaatgcaaagaatatacagacatagacacaactacagtaatagtaattcaaagcccatacattacaccaaaatcatttaaattttatgttcctttagactactcatttttagaaggaagaagtccttacagaccacaacaaaacataataccttcagacgaacaacattggcacccaaaattaagattccaagtagaaactattaactcaatttgccttagcggaccaggaacagtaaaactaccaccagacatatcttgtgaagctcacatattatatcgatttcactttaaggtgggaggtcaaccagcccctatgtccaacattacaaagccagacgaacaaccaaaatggcccgttcccaataacctcctccaaacaacttcgttacagagtccagcaataccattcacccaacttttatggagctttgatgagagacgaggagaacttacaaaaaaagctacaaatagaatcacagactacacacaacctgaaacatcttttttcccaattacagaaacaagtgtctcatgccctaccatacaccaacaaaaaaaagaaacacaagagacatcatcctcggaagaagaggaaacatcgatccaggaccaactcaacaagcagcgaagaaagcaaaaactcctccgacacagaatcaacctcctcctcagccagttagcaagtacataataaaaaaaagtgaaataagagtagaactatttccaactcaaaaaccaaatagaaggttaactccaaaagagtatgaggaagaggtagcagattcaattgtatggaaaagagttcctagaacacacttgtatgataaacctacttatccatgggtgccccaatgctctccttttactgtaaactttgatttaaatgcgccgcaataaaatgttaagcctgcaaacttcaacttgaggtgtccatttaatataaataaagcttaaataaacatccaccacactcccttatacgcaggcgcactagggggctccgccccctagaacccccagggggggcaaagccccccctacaacccccctcataaatattcatacaggaaaccacaaaattagaattgccgaccacaaaccccctcataaatattcatacaggaaaccacaaaattagaattgccgaccacaaacagacatatgctaattaacttcccaaaaacatacacacttccttaaaaattaattagtaaacagcatcacactgggaggagccaaaactgtatataaccaactgcacttccgaatggctgagtttatgccgccagacggagcgcggatcacggactcagcgctgattcaggg

SEQ ID NO: 2226 - protein, 675 aa, Betatorquevirus sp.
MPFWRTRYRRWWRPRRRRFYWRGIRKPFQRRRWRKRRYTVRRKKLKTIRLKEWQPPYIKRLTVRGYYPIILGTRDRVANNLNCYFESTAPHYVPGGGCFSINNFSLLTLYKEHIDVRNWWTTGNENYPLIKYFGCTVLLYREENIDYLFYYNRQWPMTASLTTYQSTQPMAMLLNKHTIKVACKKNTKNKKPYKRIKIPPPSQLQNKWYFQHDIATTPLLQTMSTACSFDRMFLNSKGISTTIGFVTLDTNTFLNHDFQRGTRGYKPRPETLLFKVTNGEHDINNIQIQHLIFLGEVEDLQQGTEIQYITNLKSPPTSLVPSPTDFQKKLYTASIDHQWWGNVFKSSTFWGDERMIETNKTWDEIIKQFKTPTEKLGTGFTWKTTKWSECRYNPYSDHGSGNIIYLLKINSSLHSNDWSPPTDKDVIAKDLPLHTLCWGYLDYHRKCKEYTDIDTTTVIVIQSPYITPKSFKFYVPLDYSFLEGRSPYRPQQNIIPSDEQHWHPKLRFQVETINSICLSGPGTVKLPPDISCEAHILYRFHFKVGGQPAPMSNITKPDEQPKWPVPNNLLQTTSLQSPAIPFTQLLWSFDERRGELTKKATNRITDYTQPETSFFPITETSVSCPTIHQQKKETQETSSSEEEETSIQDQLNKQRRKQKLLRHRINLLLSQLAST

SEQ ID NO: 2227 - protein, 102 aa, Betatorquevirus sp.
MSFRLQPSKPTKRQTALKWMNMLHHVHDLFCDCPNSITHTASFIFEQEPKHNFLAPEKDLIKKCLSGEPATDAGGDQGVDAFTGEELENLFKDDAGENDDTR

SEQ ID NO: 2228 - protein, 121 aa, Betatorquevirus sp.
MPYHTPTKKRNTRDIILGRRGNIDPGPTQQAAKKAKTPPTQNQPPPQPVSKYIIKKSEIRVELFPTQKPNRRLTPKEYEEEVADSIVWKRVPRTHLYDKPTYPWVPQCSPFTVNFDLNAPQ

SEQ ID NO: 2229 - DNA, 2951 bp, Alphatorquevirus sp.
cagcgaggagaggtgagtttacacaccgcagtcaaggggcaattcgggctcgggactggccgggccctgggcaaggctcttaaaaaagctatgtttttcggtaggccttacagaaagaaaagggcactgtcactgctacgcgtgcgagctccagaggcgaaaccacctgctatgagctggagacccccggtgcacaaccccaatgggatcgagagaaacctgtgggaggcattctttcgcatgcatgcttcagcttgtggttgtggcgatattgttggccatcttactgtactggctggtcggtatggtgctcctcctcgtcccccggcccccggggctcccagaccaccactaaaccggcagctggcccttccggcgccccccgctgatcctcagcaggccaacccgacatggcctggtggggacggtggagaagatggcgctggaggccccgccgctggcggcgccgtcggagacgccgagtaccaagaagacgagctcaacgccctgttcgacgccgtcgagcaagaagagtaaggaggaggcgatgggggaggcggaggtggagacgggggtacagacgcagacttagactgagacgcagacgtagacgaaagaaaataagactgactcagtggaacccagctaaagtcaggagatgtactattaagggggtcctgcccatgatactgtgcggagcaggacgctcaggatttaactacggactgcacagcgacgactacaccatacaaaaacccctcggccaaaacccccacgggggcggcatgagcacagtaacttttagcctacaggtgctatatgaccagtaccagaggtttatgaacaagtggtcgtactccaacgaccagctagacctagccagatactttggctgcaccttctggttttacagacacccagaagtagactttgtcgctcagtttgacaacgttcccccaatgaaaatggacgagaacacagcccctaacactcacccgtcattcctactacaaaacaaacacagggttaaaatccccagctttaaaaccaagccttttgggagaaaaaaagttagagttacagtggggccccccaaactgtttgaagacaagtggtacagccagcatgacttgtgtaaggtgcccctagtcagttggcggttaaccgcagctgacttcaggtttccgttctgctcaccacaaactgacaacccttgctacaccttccaggtattgcatgaacagtattacccagtaataggcacttctgctttagaaccaggaacaaattacaatgagaataacatagaagcattagaaaaatttttatatggcaaatgtacccactatcaaacatttgccacagacacaagactaaaccctcagaaacccatttcatcacgcagaaatgagacatataatcccagtggtgctgaagaaaacattacatggtcaatagatgattttactaactttaaaaagcacacagacagcaactatggctactgcacctactgccctactgacgaattaattaaaaaaattaaaaagtacagagacaaaagattccaatggctaactgaaataccagaaaaaaacacctgccacataaatgccacctacgctcgaggaaaaattaaacagtgggaatatcacctaggctggtactcaaatatatttataggcaatctcagacacaaccttgcattccgcacagcatatatagatattacctacaatcctataacagacaaaggagaaggcaacatagtgtggttccaatatgccaccaaacccaacacacagtacatagagtcacaggcaaaatgcaccatcacaaacatacccctatatgctgctttttatggctacgaagactatatccaaagaacactaggcccctatcaagatgtagagaccctaggcataatatgtgttaaatgtccctacacagatcccccactagttcacaaagacaagaataagtcagactggggctatgtattctacgacgttcactttggcaacggaaagaccccggagggcctgggccaagtgcacccttactggatgcagagatggagaccctatgtacagttccagaaagacactatgaacaagatagccagaaccggaccgttcagctacagagacgagacgccttccatcaccttgactgccgggtacaagtttcgttttaactgggggggcgactctatatttccacagattattaaaaacccctgcccagacagcggggtacgaccttcaaccagtagagagcgtcgctcagtacaagttgttagcccgctcacaatggggccagaatacattttccaccggtgggactggcgacgggggttctttaatacaaaaactctcaaaagaatgcttgaaaaatcaattaatgatgaagaatattcaacaggcccaaaggtccctcgatggtttcccccactcgacaaccaagagcaagaaggcgtctcagatacagagacgacaacctcgcagtcctcacaagaagaagccgctcaagaagccctccaagaagtccaagaggcgtcgctacagcagcacctcctcaagcagtaccgagagcagcgaagaatcggaaagcaactccaactcgtcatgctgcaactcaccaagacacagagcaacctgcacataaatccccgtgtccttggccatgcataaataaagtgtacatgtttccccccgaaaaaccaatgcccatacacgggtaccacgggtgggaaacagagtttcaggcctgcaaagcgtttgacaggccccctagaaactacctgtcagacaaacccatctatccctggcttccccgctcccaaccagaattcaaagtgagttttaagcttggttttcaataaacaaggccgtgggaatttcacttgtcggtgtctacctcttaaggtcactaagcactccgagcgt

SEQ ID NO: 2230 - protein, 761 aa, Alphatorquevirus sp.
MAWWGRWRRWRWRPRRWRRRRRRRVPRRRAQRPVRRRRARRVRRRRWGRRRWRRGYRRRLRLRRRRRRKKIRLTQWNPAKVRRCTIKGVLPMILCGAGRSGFNYGLHSDDYTIQKPLGQNPHGGGMSTVTFSLQVLYDQYQRFMNKWSYSNDQLDLARYFGCTFWFYRHPEVDFVAQFDNVPPMKMDENTAPNTHPSFLLQNKHRVKIPSFKTKPFGRKKVRVTVGPPKLFEDKWYSQHDLCKVPLVSWRLTAADFRFPFCSPQTDNPCYTFQVLHEQYYPVIGTSALEPGTNYNENNIEALEKFLYGKCTHYQTFATDTRLNPQKPISSRRNETYNPSGAEENITWSIDDFTNFKKHTDSNYGYCTYCPTDELIKKIKKYRDKRFQWLTEIPEKNTCHINATYARGKIKQWEYHLGWYSNIFIGNLRHNLAFRTAYIDITYNPITDKGEGNIVWFQYATKPNTQYIESQAKCTITNIPLYAAFYGYEDYIQRTLGPYQDVETLGIICVKCPYTDPPLVHKDKNKSDWGYVFYDVHFGNGKTPEGLGQVHPYWMQRWRPYVQFQKDTMNKIARTGPFSYRDETPSITLTAGYKFRFNWGGDSIFPQIIKNPCPDSGVRPSTSRERRSVQVVSPLTMGPEYIFHRWDWRRGFFNTKTLKRMLEKSINDEEYSTGPKVPRWFPPLDNQEQEGVSDTETTTSQSSQEEAAQEALQEVQEASLQQHLLKQYREQRRIGKQLQLVMLQLTKTQSNLHINPRVLGHA

SEQ ID NO: 2231 - protein, 156 aa, Alphatorquevirus sp.
LGKALKKAMFFGRPYRKKRALSLLRVRAPEAKPPAMSWRPPVHNPNGIERNLWEAFFRMHASACGCGDIVGHLTVLAGRYGAPPRPPAPGAPRPPLNRQLALPAPPADPQQANPTWPGGDGGEDGAGGPAAGGAVGDAEYQEDELNALFDAVEQEE

SEQ ID NO: 2232 - protein, 147 aa, Alphatorquevirus sp.
MVSPTRQPRARRRLRYRDDNLAVLTRRSRSRSPPRSPRGVATAAPPQAVPRAAKNRKATPTRHAATHQDTEQPAHKSPCPWPCINKVYMFPPEKPMPIHGYHGWETEFQACKAFDRPPRNYLSDKPIYPWLPRSQPEFKVSFKLGFQ

SEQ ID NO: 2233 - DNA, 2950 bp, Alphatorquevirus sp.
gacccccccccggtgagtttacacaccgcagtcaaggggcaattcgggcacgggactggccgggctatgggcaagattcttaaaaaattttcccgatccgtctgtcgccaggacataaaaacatgccgtggagaccgccggtgcatagtgtccaggggcgagaggatcagtggttcgcaagtttttttcacagccacgcttcattttgcggttgcggtgaccctgttggccatcttaatagcattgctcatcgctttcctcgtgccggtccaccaaggccccttccggggctagaccagcctaaccccccggagcagggcccggccgggcccggagggccgcccgccatcttggccctgccggctccgcccgcggagcctgacgacccgcagccacgccgtggtggtggggacgctggcgccgccgctggcgccgcaggcgaccgtggagaccgagactacgacgaagaagagctagacgagcttttccgcgccgccgccgaagacgatttgtaagtaggagatggcgccggccttacaggcgcaggaggagacgcgggcgacgcagacgcagacgcagacgcagacataagcccaccttagtactcagacagtggcaacccgacgttatcagacactgtaagataacaggatggatgcccctcattatctgcggaaaggggtccacccagtttaactacatcacccacgcggacgatatcactcccaggggagcctcctacgggggcaacttcacaaacttgactttctcccttgaggccatatatgaacagtttttgtaccacagaaacaggtggtctgcctccaaccacgacctagaactctgcagatacaagggtaccaccataaagctatacaggcacccagacgttgactacatagtcacctacagcagaacaggccccttcgagatcagccacatgacctacctcagcactcaccccctactaatgctgctaaacaaacaccacatagtggtgcccagcctaaagactaagcccagaggcagaaaggccataaaagtcagaataagacccccaaaactaatgaataacaagtggtactttaccagagacttctgtaacataggcctcttccagctgtgggcaacaggcttagaactcagaaacccctggctcagaatgagcaccctgagcccctgcataggcttcaatgtcctgaaaaacagcatctacaccaacctaagcaacctgccacaacacaaaaacgccagactagatatcataaacaacacacttcacccagatcaaattacaggggcaaacaacaaaaagtggcagtacacatacacaaaactcatggcccctatttactattcagcaaacagggccagcacctatgactgggaaaattacagcaaagaaagtaactaccataacacatatcaaaagttttaccaaaaaagagaagaaaaattagcaaaaatcagaaaagaatggcagatgttatatccacaacaacctactgcactgccagattcctatgacctcctacaggagtatggcctatacagcccatactacctaaaccccacaaggataaacctagactggatgaccccctacacacacgtaaggtacaaccctctcgtagacaaaggctttggaaacagaatatacattcagtggtgctcagaggcagatgtcagctacaacagaacaaagtccaagtgtctcttacaagacatgcccctgtttttcatggcctatggctacatagactgggcaataaaaaacacaggggtgtcctcactagtcaaagacgccagaatctgcatcaggtgcccctacacagagccacagctcgtggggtccacagaagacataggctttgtacccatctcagagaccttcatgaggggcgacatgccggtacttgcaccatacataccgttaagctggttttgcaagtggtatcccaacatagctcaccagaaggaagtccttgaggcaatcatttcctgcagccccttcatgccccgtgaccaagacatgaacggttgggatatcacaatcggttacaaaatggacttcttatggggcggttcccctctcccctcacagccaatcgacgacccctgccagcagggaacccacccgattcccgaccccgataaacaccctcgcctcctacaagtctcgaacccgaaactactcggaccgaggacagtgttccacaagtgggacatcagacgtgggcagtttagcaaaagaagtattaagagagtgtcacaatactcaagcgatgatgaatctcttgcgccaggtctcccatcaaagcgaaacaagctcgactcggcgttcagaggagaaaatcgagagcaaaaagaatgctattccctcctcaaagcgctcgaggaagaagagaccccagaagaagaagaaccagcaccccaagaaaaagcccagaaagaggagctactccaccagctccagctccagagacgccaccagcgagtcctcagacgagggctcaagctcgtctttacagacatcctccgactccgccagggagtccactggaatcccgagctcacatagagcccccaccttacatcccagacctgctttttcccaatactggtaaaaaaaaaaaattctctcccttcgactgggaaacagaggcccagctggcggggtggatgcatcggcctatgcgcttctatccctcagacaccccttactacccgtggctaccccccgagcgagatatcccgaaaatatgtaacataaacttcaaaataaagcttcaagagtgagtaattcgaggccctcctctgttcacttagcggtgtctacctcttaaggtcaccaagcactccgagcgccagcgaggagtgcgaccctccaccaaggggcaacttcctcggggtccggcgctacgcgcttcgcgctgcgccggacgcctcg

SEQ ID NO: 2234 - protein, 641 aa, Alphatorquevirus sp.
MPLIICGKGSTQFNYITHADDITPRGASYGGNFTNLTFSLEAIYEQFLYHRNRWSASNHDLELCRYKGTTIKLYRHPDVDYIVTYSRTGPFEISHMTYLSTHPLLMLLNKHHIVVPSLKTKPRGRKAIKVRIRPPKLMNNKWYFTRDFCNIGLFQLWATGLELRNPWLRMSTLSPCIGFNVLKNSIYTNLSNLPQHKNARLDIINNTLHPDQITGANNKKWQYTYTKLMAPIYYSANRASTYDWENYSKESNYHNTYQKFYQKREEKLAKIRKEWQMLYPQQPTALPDSYDLLQEYGLYSPYYLNPTRINLDWMTPYTHVRYNPLVDKGFGNRIYIQWCSEADVSYNRTKSKCLLQDMPLFFMAYGYIDWAIKNTGVSSLVKDARICIRCPYTEPQLVGSTEDIGFVPISETFMRGDMPVLAPYIPLSWFCKWYPNIAHQKEVLEAIISCSPFMPRDQDMNGWDITIGYKMDFLWGGSPLPSQPIDDPCQQGTHPIPDPDKHPRLLQVSNPKLLGPRTVFHKWDIRRGQFSKRSIKRVSQYSSDDESLAPGLPSKRNKLDSAFRGENREQKECYSLLKALEEEETPEEEEPAPQEKAQKEELLHQLQLQRRHQRVLRRGLKLVFTDILRLRQGVHWNPELT

SEQ ID NO: 2235 - DNA, 2950 bp, Betatorquevirus sp.
cgggtgccgaaggtgagtgaaaccaccgtagtcaaggggcaattcgggctaggtcagtctagcggaacgggcaagaaacttaaaataatatactttatttacagaatgagcaccagatacaagccagcaaaatgctctttgagacaacaaaaactaaaatggatgaatagccttgttcacacacacgacatcttctgcgactgcccacatccactagaacatacaacttatatgatttttgaacaagaacctgaattaaaattcacaccaccagaacaagacaccattaaaaaatgccttactactacaactggtatggatatcgtcgcagacgaccacgacaacgacggttttggagaaggagacttagaagacctattcaaagaagattttggagaagaaaacaacgaagggtaagaaagaaacttaaaaaaattaagatatcagaatggcaaccacagtatataaaaagactaactgttaaaggatactatccactgtttatggctacttctgaaagactatccaataacttaccatgctatcttgaaagcatagcaccagaattttggccgggaggagggggcttttctatatataactttagccttaatactctgtatcaagaaaactctgtactacataactggtggacaacaagtaatgataatatgcctttaatacgatttactggtgtaaaaattatactatatagacaagaaactattgattacctgtttagctataacagaaattaccccatgcaagcctcaatgctaacatacaccagcacacatccacaagcaatgttacttaacaaacacactattaaagtgacatgcaaacaaagatctcgatctaaaaaaaactataaagtagtaaaaattaagcctccagtacaaatgatgtcaaaatggtatttccaaaaagacctagccttcttaccgttattacaaacaatgaccacaagctgcagtttagaccgcatgtttcttaacagtgcagcagttagttccacaataggttttgtaagtttagacacagaaggttttagaaaccacaattttacaaaattctcaaccacaggttactacccaatacatgaagaaaaattatttggctgtccaaacggacaacccatagaaaaattaaatataggacttcttacatacctaggcaacccacaagactttacagaaggaatacaaataaaaaatgtaccaataaacgcagtaggacaagaaccaagactaaaacaacaactaaaaagagctagaggtgaatggggtttccaaggaaatccattttacagtcattattttcacggagatttaagagtattagtaaccaccaaagactggacatatttagaaaccacttactgtaatagtgactcacacccacaagcattaaagaccgaggactttaaactaaaaacacaaaaatgggtaaactgtagatataacccatttaaagacaaaggaaaaggaaacaaaatttatttactaaaaacagacagcacacaacatccagatgagtggacagaaccaccaacagaagacatagtactagaagacttaccactatggttagcaacatggggatatttagactatcaaagaaaatgtggcgcacaacaacaaatagacacaaattcagtatttgtaatatactccaaatacatagaccctcctacacttaaatactatgtaccattagaccacccatttttacacggtcaaagcccatattcagaagacttatttcctagtgacagactaaactggcatccaaaagtaagataccaagtacaaacagtaaaccacatagcctgcagtggacctacagtagcaaaattaccagaacaaatatcatgtgaaggtcatatgagatatcaattttactttaaggttggaggacaacctgctccaatgtcaaccattattgacccagacaaacaaccaaaatataatatacccggtaacatcctccaaacaacttcgttgcagagtccaacaacaccgtttgaatacatcttatacaatttcgaccaaagacgacaacaacttacaaaaacagctacaaaaagaatcaaaacagacaaacaaactgaaacagatcttttatcaattacagaagcaggcatcgactgtccagtcgtgtccaccaaagcacagacgacatcggactcatcggacgaggaagaaacaaaagaaacatcgatcgaggagcagctcaagctccagcgaagagagcaaaagcttctccggagaggaatccagcaactcctcaacagattaacaaatatagaataaaaactggtcctgtaactgttcaactatttcccacaccaactcctaatcggagactaaacccatgggaatgggagcaagaactagaggactctaaaatatggtgcagagtacctagacattatataaaagacagacctacatacccctgggtaccccaagactctcaatttactgtaaactttgatttaaatgcgccgcaataaatttctaagcctgcaaactttcactctcggtgtccatttataatagttttaacttaaataaacatccaccacactccctaatacgcaggcgctaagggggctccgcccccttaaacccccagggggggcaaagccccccctataaccccccccatgaatattcattccggaaaccacaaaatttgcattgcccaccacaaacagacaaatgcaaattaagttccctaaaatacacataacttccctaaaaattaattaataatcatcgtcacaatgggcgtgacttgtaaactataaaactaactacactttcgaatggctgagtttacgccgctagacggagacaggatcacttcagtgactccgggctgaccaagggcgggtgccgaaggtgagtgaaaccaccgtagtcaaggggcaattcgggctagg

SEQ ID NO: 2236 - protein, 673 aa, Betatorquevirus sp.
MPYYYNWYGYRRRRPRQRRFWRRRLRRPIQRRFWRRKQRRVRKKLKKIKISEWQPQYIKRLTVKGYYPLFMATSERLSNNLPCYLESIAPEFWPGGGGFSIYNFSLNTLYQENSVLHNWWTTSNDNMPLIRFTGVKIILYRQETIDYLFSYNRNYPMQASMLTYTSTHPQAMLLNKHTIKVTCKQRSRSKKNYKVVKIKPPVQMMSKWYFQKDLAFLPLLQTMTTSCSLDRMFLNSAAVSSTIGFVSLDTEGFRNHNFTKFSTTGYYPIHEEKLFGCPNGQPIEKLNIGLLTYLGNPQDFTEGIQIKNVPINAVGQEPRLKQQLKRARGEWGFQGNPFYSHYFHGDLRVLVTTKDWTYLETTYCNSDSHPQALKTEDFKLKTQKWVNCRYNPFKDKGKGNKIYLLKTDSTQHPDEWTEPPTEDIVLEDLPLWLATWGYLDYQRKCGAQQQIDTNSVFVIYSKYIDPPTLKYYVPLDHPFLHGQSPYSEDLFPSDRLNWHPKVRYQVQTVNHIACSGPTVAKLPEQISCEGHMRYQFYFKVGGQPAPMSTIIDPDKQPKYNIPGNILQTTSLQSPTTPFEYILYNFDQRRQQLTKTATKRIKTDKQTETDLLSITEAGIDCPVVSTKAQTTSDSSDEEETKETSIEEQLKLQRREQKLLRRGIQQLLNRLTNIE

SEQ ID NO: 2237 - protein, 103 aa, Betatorquevirus sp.
MSTRYKPAKCSLRQQKLKWMNSLVHTHDIFCDCPHPLEHTTYMIFEQEPELKFTPPEQDTIKKCLTTTTGMDIVADDHDNDGFGEGDLEDLFKEDFGEENNEG

SEQ ID NO: 2238 - protein, 122 aa, Betatorquevirus sp.
LSSRVHQSTDDIGLIGRGRNKRNIDRGAAQAPAKRAKASPERNPATPQQINKYRIKTGPVTVQLFPTPTPNRRLNPWEWEQELEDSKIWCRVPRHYIKDRPTYPWVPQDSQFTVNFDLNAPQ

SEQ ID NO: 2239 - DNA, 2950 bp, Betatorquevirus sp.
cgggtgccgaaggtgagtgaaaccaccgagtcaaggggcttatcgggctgaatcagtcttggcggaacgggcaactaacttaaatattttattacagaaatgacaacaagatttagaccaactaaatctacattaagacaatcaaaattaaaatggattaaccttatccaccactgccatgatgccttctgcgactgcgacaatggaataactcacaccatacttcacctttttgaacaagaaaaccatcacaactttaccccacctgaaaaagattttattaaatcatgcctttctggagaagatactacaattaccgctggagaccacgaagaaggatttaccgaaggagatttggaagaacttttcaaagaagacgttggagacgaaaacgccgctaccgttgggtaagaaaaagaaaacttaaactactaccattaaagcaatggcaaccccaatatataaaaagactaactgtaataggactctatcccatgataatgggaacaagagaaagaatagctaacaatttaaactgttatttagaatctaaagcgcctcattatgtacctgggggtggatgcttttctatttgtaacttttctttaatgaccttatatcaagaacacctagaaataagaaactggtggacaacaagtaatgataactatcctttaataagatatatgggatgcacaatgtacttatatagagaagaaaatctagactacttattttactacaatagacaacctccaatgaatgcttcactaacaacatatcaaagcacacaacccacagctatgctattaaacaaacatacagttaaagtgcaatgcaaaaaaactagtaaaagcagaaagccatataaaagaattaaaattaaaccacctacacaactacaaaacaaatggtatttcagttatgatattgccaacacaccactgttacaaactatgaccacagccacatcgtttgaccgcatgtttcttaactcttcaagcatatctaacacaataggctttacaacactcgacaccaacggctttcttaaccaccaatttcgcagaactacaagcccatatacaccaagaccaggtactacactatttaaaactaaaaatggagtagaagacattcaaaaaataccaataggagacttaatactattaggagaagtagaagaactacaagatggcacacaactaaagttagttgaaaaatcctataatacagtgccaggaatagactcacccacagacttccaaaaacgattttacactgcacgcatgcaagaaaaatactggggaagcgtatttaaatcaacaacattttatagagatgaaagaatgatagaagctaacaaaacaatagatgagctaattaaacaattcaaattagaaaccacacaaataggaacaggatttactgaaaaaacaacaaaatgggcagaaattaggtacaacccatttgcagataaaggaaaaggcaacatggcatatttgttaaaaatagactcaggcctacatagcacagactggtcaccaccaacagacaaagatgtaatagccactgatcttccacttcacacattactatggggttatttagactatcaaagaagatgcaaagaatacagagacatagacacaacatgcgtattagtattacaatgtaaatatgttcaaccaaacaattttaaatttttagtaccactagatccagactttttagatggaacaagcccatacagaccacagggagaaataacaccaagtgacagacaacactggcacccaaaagtagcatttcaagtacaatctataaataatatatgtttatcaggacctggtactgtaaaattaccacctcaaatttcttgtgaagctcatgtaaaatataaatttcattttaagcttggaggacaacctgcaccaatgtccgtccttactaaacccgacgaacaaccaaaatatcccatacccaataatctcctccaaacaccttcgttacagagtccaacaatgccgttcacacaattactgtggaactttgatgaaaggagacaacaaatcactaaaaaagctgcagacagaattacagaataccaagaacctgaaacaacttttttatcaattacagacccaggcagcctatgcccaacactcaaagagacaaaagacccacaagagacaacatcctcggaagaagaagaaacaccgatcgagacacaactcctccaccagcgaagaaaacaacgcaagctcagacacaggatcaacgacctcctcaacagactaactcatttacaataactaactgtgttttcaaagtaaaactatttcctgatgataaaaaaccaaatagacgcatgactgcaaaagaatatgcagacgagttagaggacgccaaaatatggcatagagttcccagagattatatatttgatcaccccacatacccatgggttccccaagtaccaaaatatactgtaaactttgatttaaacgcgccgtaataaactacaaggcctgcaaatttccactctcggtgtccatttattataataaaaacttaaacaaacatccaccacactccctaatacgcaggcgcaaaagggggctccgcccccttaaacccccaggggggggcacagccccccctataacccccctaataaatattcataaaggaaaccacaaaattagaattgccgaccacaaactgatatgctaattaacttcctaaaattatacattccttccctaaaaattaattattaatctgcatcacaatgggaggagctacaacactataaaaataagtgcacttccgaatggctgagtttatgccgccagacggagcgcagatctaagactcagcgctgattcagggcgggtgccgaaggtgagtgaaaccaccgagtcaaagactcagcgctgattcaggg

SEQ ID NO: 2240 - protein, 675 aa, Betatorquevirus sp.
MPFWRRYYNYRWRPRRRIYRRRFGRTFQRRRWRRKRRYRWVRKRKLKLLPLKQWQPQYIKRLTVIGLYPMIMGTRERIANNLNCYLESKAPHYVPGGGCFSICNFSLMTLYQEHLEIRNWWTTSNDNYPLIRYMGCTMYLYREENLDYLFYYNRQPPMNASLTTYQSTQPTAMLLNKHTVKVQCKKTSKSRKPYKRIKIKPPTQLQNKWYFSYDIANTPLLQTMTTATSFDRMFLNSSSISNTIGFTTLDTNGFLNHQFRRTTSPYTPRPGTTLFKTKNGVEDIQKIPIGDLILLGEVEELQDGTQLKLVEKSYNTVPGIDSPTDFQKRFYTARMQEKYWGSVFKSTTFYRDERMIEANKTIDELIKQFKLETTQIGTGFTEKTTKWAEIRYNPFADKGKGNMAYLLKIDSGLHSTDWSPPTDKDVIATDLPLHTLLWGYLDYQRRCKEYRDIDTTCVLVLQCKYVQPNNFKFLVPLDPDFLDGTSPYRPQGEITPSDRQHWHPKVAFQVQSINNICLSGPGTVKLPPQISCEAHVKYKFHFKLGGQPAPMSVLTKPDEQPKYPIPNNLLQTPSLQSPTMPFTQLLWNFDERRQQITKKAADRITEYQEPETTFLSITDPGSLCPTLKETKDPQETTSSEEEETPIETQLLHQRRKQRKLRHRINDLLNRLTHLQ

SEQ ID NO: 2241 - protein, 103 aa, Betatorquevirus sp.
MTTRFRPTKSTLRQSKLKWINLIHHCHDAFCDCDNGITHTILHLFEQENHHNFTPPEKDFIKSCLSGEDTTITAGDHEEGFTEGDLEELFKEDVGDENAATVG

SEQ ID NO: 2242 - protein, 120 aa, Betatorquevirus sp.
MPNTQRDKRPTRDNILGRRRNTDRDTTPPPAKKTTQAQTQDQRPPQQTNSFTITNCVFKVKLFPDDKKPNRRMTAKEYADELEDAKIWHRVPRDYIFDHPTYPWVPQVPKYTVNFDLNAP

SEQ ID NO: 2243 - DNA, 2950 bp, Betatorquevirus sp.
caggtgctgaaggtgagtgaaaccaccgaaatcaaggggcaatatgggcacgggcagtctggcggaatgggcaactaacttaaaatacattttttacagatgagcaaactgcttaaaccaacatctcattcagaacgcaacataattcttcaaaatgtaaacgcctgggtatctattcacgatattacctgcaaatgcgactcaccacttaaatgtattattctacaaatttaccgccaagaaccaacactttcttttaaaccaaaggaattacaaaaatggcttactactaccgaccttaccgtcaaagatggtggagaagaagaagatatcgatggaaaagagctcgacgcccttttcgcttctttagaaaaagaagacgccaaagggtaagaaaaaaaaaattaaaatctcttaaaataagacaatggcaaccaggatgcataagaaaattagtagtaaaaggactatactgtttatttgaagctaaccatagacttctaactaataattatactcaatatatggaaagtgttccaccagaaggtattccttcaggaggaggattcagtattaatagatttaacataaactgcttatggagtgaaagacaaaaagctagaaatgtgtggacaacaggaaacaaaaacctacctatgataagatatacaggatgtgaatttaaaatatacagacctatacactgtgacgcagtaataaactttcaaaattgctttccaatggaagcaacagacctaacatatcactcagcacaaccatacatagccatgatgacaaaacacagtaaaaaaataacaagactttcaaacacaaaaaacaaaaaaccatataaaaagtataaattcccacctccacaacaaatgactaacagatggttctttgcaagtgacatatacaatacaggactaataatgttgacttcatcagcagcagactttgaaaatatatacatcagtccatattcagaatctaacacagtatctttaaaattattaaatgtaaaactatttaccaacagacactttaaccagctacccacaacaggctatcacccaaaagacggattttggttatgggcctccgctaacggagaagaaaacccacaatttaaagaaatgatatttttaggaaacacaattcaataccaaaaagggacagaaattggtaaactacaagacataagcactactactactattaaggacgcaatgagtaaatacacaaactcaaaatactggggaaacccatttcatgaagactatttaaataaaacacacagaatatggtacacacacaacagtccacaaataacattgggaacaaaaacagaacctataaccacaacaataaataaattacagtttcaaccactagaccaagaattatactttgaaggcagatacaaccctaatagagacagaagcaaaaactctcttgtatatttcctaaaaacaacagaagaagcctcaggatgggatcccccagaaaaagaaagcttaataacccgtggatttcccctatgggtatctatgtggggacttagggattaccatgaaaaactaaaagacatgcaacatatggacacagactacatagcagttatacaaactgaagccatagaaccacaagacatacaactaaaatattttgtactacttgacaaacaatttacacacggagacagcgagtggcatgacggacaaaacagaactccatgggacaacatacactggcatccaatgcttcactaccaacacagatctttagaaacaataggacaatcaggaccagctgttcctaaactaggcccctacaaaacagctgaattacattgtgaatacaaattttattttaaggttgggggctgcgtaccaccaatggcagaaattacagacccagcagaacaaacttctttcccaataccaactaacatcactgaatcaaattcgtttcagagtccaaacgaaccaatccaatcctacttgtactccttcgatcaaaggagacacgaaattactagtacagctgcaaaacgaatcacaaaagactttacaactacaacacctttattcacagattcaacaacaactggaacagacgtgccaatcctccaaacactccaagaaatcgaagactcggaggaggaggaggaaaccaaagaaacgacactgctccagcagctcatcaaccagcgagccaagcagcaacgaatcagcaagcgaatcaagcagctcctaaaattactacacaatacaacataaaatgcattaaaaaggtacaactttttgaaaaaccaaaacaaaacagacacctaacaccatgggaagaagaacaagacaaacaagaagcaacaatttggaaaagagcacgcaaacattacatttatgacataccctattattttgactgcccaccagaaccccgagtaaactttaaacttaacttttgtgaataaataaacaaataaagggctaggccccattaactcataactcggtgtctgtttctttaaatttaacttatttaaactgactccgcctccctaaattagggcgccaaaagggggctccgccccctttaacccccaagggggctccgcccccttcaacccccaagggggctccgcccccttacaccccctggggctccgcccccttcaacccccaagggggctccgcccccttacacccccttataaatattcaacaggaaaaccacataattagaattgccgaccacaaaccgtcactaacttctgcttttctacaacacttcctcatttactcataaatattcatttaattaattaataaacggcgtaaatccggggaggagtcaaaaacctataaaactaactacactgacgaatggctgagtttaccccgccagacggagacaagataacattgttaacttggctgccagtggg

SEQ ID NO: 2244 - protein, 667 aa, Betatorquevirus sp.
MAYYYRPYRQRWWRRRRYRWKRARRPFRFFRKRRRQRVRKKKLKSLKIRQWQPGCIRKLVVKGLYCLFEANHRLLTNNYTQYMESVPPEGIPSGGGFSINRFNINCLWSERQKARNVWTTGNKNLPMIRYTGCEFKIYRPIHCDAVINFQNCFPMEATDLTYHSAQPYIAMMTKHSKKITRLSNTKNKKPYKKYKFPPPQQMTNRWFFASDIYNTGLIMLTSSAADFENIYISPYSESNTVSLKLLNVKLFTNRHFNQLPTTGYHPKDGFWLWASANGEENPQFKEMIFLGNTIQYQKGTEIGKLQDISTTTTIKDAMSKYTNSKYWGNPFHEDYLNKTHRIWYTHNSPQITLGTKTEPITTTINKLQFQPLDQELYFEGRYNPNRDRSKNSLVYFLKTTEEASGWDPPEKESLITRGFPLWVSMWGLRDYHEKLKDMQHMDTDYIAVIQTEAIEPQDIQLKYFVLLDKQFTHGDSEWHDGQNRTPWDNIHWHPMLHYQHRSLETIGQSGPAVPKLGPYKTAELHCEYKFYFKVGGCVPPMAEITDPAEQTSFPIPTNITESNSFQSPNEPIQSYLYSFDQRRHEITSTAAKRITKDFTTTTPLFTDSTTTGTDVPILQTLQEIEDSEEEEETKETTLLQQLINQRAKQQRISKRIKQLLKLLHNTT

SEQ ID NO: 2245 - protein, 97 aa, Betatorquevirus sp.
MSKLLKPTSHSERNIILQNVNAWVSIHDITCKCDSPLKCIILQIYRQEPTLSFKPKELQKWLTTTDLTVKDGGEEEDIDGKELDALFASLEKEDAKG

SEQ ID NO: 2246 - DNA, 2950 bp, Alphatorquevirus sp.
ggaccccccctcgacccgaatcgctcgcgcgattcggagcaattcgggcacgggtctggccgggctatgggcaagattcttaaaaaatttccccgctccattgtccgccaggacaccaaaacatgccgtggagaccgccggcgcacgatatcccgggccgagaaagccagttctttgcagcaacttttcacatgcatgcttctttttgcggctgtggcgactttcttgggcatcttactagcatctctgttcgctttcctgctgccggaccccccccctccgccaggccttagaccacccagacccccggcacctgccggtcccgggggtcccccgggccacttcccagctctcccggctccgccagcggagcctgacaacccggcaccacgccgtggtggtggggaagatggcgccgccgctggcgcccaggacgcaggcgatggagaacaagacgcctacgccgtcgaggacctagaagaacttttccgcgccgccgaagaagacgatatgtaagtaggcgatggcgccgacggtacaggcgcagacggacgagggggcgacgcagacgcaggcacagacgaaaacataagcccactctgatactcagacagtggcaaccagacgttgttaagacctgcttcatcacagggtggatgccactcattatctgtggctccggacagacgcagtttaactttatcactcacatggacgacataaccccccgaggagcaagctacgggggcaattttaccaatgtcacatggagcctagaaggtctctgggaacagttccagtaccatagaaacaggtggtccgccagcaaccacgacctagacctagccagatacctattcaccaccttaaaactttacagacacgagaatgtagactacatattcagctacaccagaacaggccccttcgagatcagccacctcagccacctcagcacacaccctctactcatgctacttagcaaacaccacatagtagttcccagcttaaaaacaaagcccagaggcaggaggtacaaaaaagtcagaattaaacccccaaaactaatgctcaacaaatggtactttacaaaagacatctgtgacatgggcctctttcagttctgggccacagcctgtaacctagaaaatccctggctcagatcaggcgccgtaagcccctgcataggcattaatgtactgtcaaactctatatacacagatcttagcaatctacctagtcacagcagtaacagaactgccatacaaaacaacatgcacccaagcacaataaaagacaacaaagggcaatggcagtacacatacacaaaactaatgtcaaagtactactacaaaggcaatacaaacagcacatatgactggcaaaattacagtacctcacagaactatgacaacacatataaacaatggttacaagacaaaacgaaaagactagagacaattaaacaagagtaccaagctgtgtacccacagctacccacacaagcaccatcagactccacactatttcaagactttggcatatacagccccttctaccttactcccaccagaataagcctagactggaaaacaccatacatacacgccagatacaaccccctcacagacaaaggcataggcaacagaatctacctacagtggtgttcagaggccagctgtgagtacaaccccacaaagagcaagtgcacactagtagacatgcccctgtttattatgttctatggctacatagactggtgcataaagtgcacgggggtctccagcctagtaaaagacgccagggtaatgatcaggtgcccctacacagagccgcagctaataggggccaacgaaaacgtaggctactgcctcctcagcaacaccttcatgaatggagacatgcccgttcttgccccatacatccccatttcctggttcgttaagtggtaccccatgcttgcacaccaaaaggaagccatagaggatattgtgggctgcggaccgtttatggtcagagaccaggaagccaagagttgggacataaccatgggttacagatcctgctttaaatggggcgggtcgcctctgcctctacaggccatcgacgacccctgccagaagcccacccacgcagttcccgatcccgatagacaccctcgcttactacaagtctcagacccgacaaaactcggaccgaaaacactgttccacaagtgggacatgcgacgaggacagtttagcaaaagaagtattgaaagaatgtcagaatactcagaacatgatgaattttttgaaacaggcattgtatcaaaaaagaaaaagttcgacactcccgcgggaggactccaaggcgaggaaagaagaggctacactttactccaagccctccaggacagccaagaagaaatgtcagaagaagaacaagcaccccaaagcaaagaggagacgcaggagaaactcctccagcagctccagctccagaaacaccaccagcgactcctctcaaagggagtcagactcctcctcggagacgtcctcagactccggaggggagtccacttcgaccccctccttacatagagccgcctccaataataccagatctgctttttcccaattctggtaaaaaaaaaaaattctccaagttcgactgggaaacggaggcggagctagggcagatattcaggcggcccatgcgcttctatccctcagacctccctttctacccgtggctaccccccaagcgagatatccccaaagtatgtaaagtgaactttcaaataaagctcgcagagtaactaactcgaggccctcctctgttcacttagcggtgtctacctcttaaggtcaccaagcactccgagcgccagcgaggagtgcgaccctctaccctggggcaacttcctcggggtccggcgctacgcgcttcgcgctgcgccggacgcctc

SEQ ID NO: 2247 - protein, 660 aa, Alphatorquevirus sp.
LILRQWQPDVVKTCFITGWMPLIICGSGQTQFNFITHMDDITPRGASYGGNFTNVTWSLEGLWEQFQYHRNRWSASNHDLDLARYLFTTLKLYRHENVDYIFSYTRTGPFEISHLSHLSTHPLLMLLSKHHIVVPSLKTKPRGRRYKKVRIKPPKLMLNKWYFTKDICDMGLFQFWATACNLENPWLRSGAVSPCIGINVLSNSIYTDLSNLPSHSSNRTAIQNNMHPSTIKDNKGQWQYTYTKLMSKYYYKGNTNSTYDWQNYSTSQNYDNTYKQWLQDKTKRLETIKQEYQAVYPQLPTQAPSDSTLFQDFGIYSPFYLTPTRISLDWKTPYIHARYNPLTDKGIGNRIYLQWCSEASCEYNPTKSKCTLVDMPLFIMFYGYIDWCIKCTGVSSLVKDARVMIRCPYTEPQLIGANENVGYCLLSNTFMNGDMPVLAPYIPISWFVKWYPMLAHQKEAIEDIVGCGPFMVRDQEAKSWDITMGYRSCFKWGGSPLPLQAIDDPCQKPTHAVPDPDRHPRLLQVSDPTKLGPKTLFHKWDMRRGQFSKRSIERMSEYSEHDEFFETGIVSKKKKFDTPAGGLQGEERRGYTLLQALQDSQEEMSEEEQAPQSKEETQEKLLQQLQLQKHHQRLLSKGVRLLLGDVLRLRRGVHFDPLLT

SEQ ID NO: 2248 - DNA, 2949 bp, Alphatorquevirus sp.
agacccccgctcgtgctgacacgctcgcgcgtgtcagaccacttcgggctcgcgggggtcgggaaatttgctaaacagactccgagttgccattggactcaggagctgtgaatcagtaacgaaagtgagtggggccagacttcgccatagggcctttatcttcttgccattggtccgtgtcgggggtcgccgtaggcttcggactcggttttaggccttccggactacaaaattcgccattttagtgacgtcacgaccgccatcttaagtagttgaggcggacggtggcgtgagttcaaaggtcaccatcagccacacctactcaaaatggtggacaatttcttccaggtcaaaggtcacagacgccatcttaggtcacgtgacctactacgtcacggccgccattttagtttgcaaaatggccgacttccttcctctttttcaaaaaaaagcggaagtgccgccgcgcgccgcactcgacgaagaacagtaaggagacgcagacaatggaggagggggcgactaagacgcagactgtttaagcgaaaaagacgctttaagagacgcagacgaaaagctaagataaaaataactcagtggcaacctagctcagttaagagatgttttgttataggatactttccattagtaatatgtggccccggaaggtggtcagagaactttaccagtcacatagaggacaagataagcaaaggaccctttgggggagggcacagcactagtagatggtccctaaaagtactctacgaagagttccaaagacaccacaacttttggactagaagcaacaaagaactagaattagttagattctttggaagcagttggagattttacagacacgaggacgttgactatatagtatactactctagaagggctcccctgggaggtaacatactgacagcacccagcctacacccaggggcagccatgctcagcaaacacaagataatagttcccagctttaaaaccagacccggtggaaaacccaccgtaaaaattaatattaagccccctacaacactaatagacaaatggtacttccagaaagacatttgtgacacaacctttttaaacttgaacgttgtactctgcaacctgcggtttccgttctgctcaccacaaactgacaacatttgtgtaaccttccaggtattgcatgaggtttaccacaattacattagcataactgccaaagaattacttacaccttcaggctggaaaaactactatgaaaagtttttaaatgctgcctttccaaataacagatcaattaataaattaaacacttttagcacagaaggagcctacagccacccacaaataaaaaaatatacagaaaacataacaacttcagattcgaaatactttagagataaagacggacagtggggagatgctatttatataacagacagccaaagtcaagcagacgtaataaagttaataataaaaaatgcagaaaactacctaaaaaaagtacagcaagaatatgcaggacaagagaatttaaaaaacctaatacatccagttttctgtcagtacgtaggcatatttggcagtccactactaaacttccacagaataagtccagaaattccaggcctgtacaaagacataatatataatcccttaatagacaaaggcataggaaacagagtgtggatagactacctcagcaaagataacacaaagtacaaccccacacaaagtaaatgttacatagcagaccttccaatgtggatggcctgctttggcctagtagactggtgcaaaaaagaaacaggcaactggggaataccagcctgggctagagtagtaatgatatgtccatacacctatcccaaattatacaacacaccagacccagaaagtggattcataccaataggatacaactttagccaaggtttcatgccagacggcaccaaatacacacccatacagatgagacacagatggtatccaaacttactaaaccagcaagcagtattagaagacataagtcagtcagggcccttctcatacagagaaaaaacaaacacagcaaacataaacgcaaaatacaaatttagatttcactttgggggcaaccctgtgtccgaacagattgttgcagacccatgcaaacaacccacctttgaaatgcccggaaccagtacactccctcctcgactacaagtcacggacccgaaactcctcggaccgcactacacattccacagctgggacaaaagacgtgactattataacggaaaaactattaagagaatgtcagaacaacaagaaacttctgagtttttattcccaggcccgaaaaaacccagagtcgatctggacgcagtgcagcctgtcgaaaaagactctttgccccagcaaagagaacagagaccctgggagacgagcgagagcgagaaagagacagaagccctctcggaagaagaagagacgggctccgtccaccagcagctcaggcagcagctcaaggagcaaaagcagctcagacagggaatcgagtgcctcttcgagcagctaataaaaacccagcagggagtccacctagatccttccctcttgtaggccccagacagtggctgtttcccgagagaaagccagcccctgcccctacctcgggagactgggccacagaatatttagcagctagagtgtttgacagacccccgagaagcaaccttaaagatacaccctactacccctacgttaaaaaccaatacaatgtgtactttgacctaacctttgaataaagtgcagcttcaaatttgcaaggccgtgggagtttcactggtcggagtctacctctaaaggtcactaagcactccgagcgttagcgaggagtgcgacccttccccctgactcaacttcttcggagccgcgcgctacgccttcggctgcgcgcggcacctc

SEQ ID NO: 2249 - protein, 758 aa, Alphatorquevirus sp.
MVDNFFQVKGHRRHLRSRDLLRHGRHFSLQNGRLPSSFSKKSGSAAARRTRRRTVRRRRQWRRGRLRRRLFKRKRRFKRRRRKAKIKITQWQPSSVKRCFVIGYFPLVICGPGRWSENFTSHIEDKISKGPFGGGHSTSRWSLKVLYEEFQRHHNFWTRSNKELELVRFFGSSWRFYRHEDVDYIVYYSRRAPLGGNILTAPSLHPGAAMLSKHKIIVPSFKTRPGGKPTVKINIKPPTTLIDKWYFQKDICDTTFLNLNVVLCNLRFPFCSPQTDNICVTFQVLHEVYHNYISITAKELLTPSGWKNYYEKFLNAAFPNNRSINKLNTFSTEGAYSHPQIKKYTENITTSDSKYFRDKDGQWGDAIYITDSQSQADVIKLIIKNAENYLKKVQQEYAGQENLKNLIHPVFCQYVGIFGSPLLNFHRISPEIPGLYKDIIYNPLIDKGIGNRVWIDYLSKDNTKYNPTQSKCYIADLPMWMACFGLVDWCKKETGNWGIPAWARVVMICPYTYPKLYNTPDPESGFIPIGYNFSQGFMPDGTKYTPIQMRHRWYPNLLNQQAVLEDISQSGPFSYREKTNTANINAKYKFRFHFGGNPVSEQIVADPCKQPTFEMPGTSTLPPRLQVTDPKLLGPHYTFHSWDKRRDYYNGKTIKRMSEQQETSEFLFPGPKKPRVDLDAVQPVEKDSLPQQREQRPWETSESEKETEALSEEEETGSVHQQLRQQLKEQKQLRQGIECLFEQLIKTQQGVHLDPSLL

SEQ ID NO: 2250 - DNA, 2949 bp, Betatorquevirus sp.
cgggtgccgaaggtgagtgaaaccaccgtagtcaaggggcaattcgggctagatcagtctagcggaacgggcaagaaacttaaaatttatattttataggaatgagtcatcgttggacaactccaaaatcaagtattagagagaaaaaactacaatggctgaatttaatagcacatgcacacggcattttctgcgactgcccagaccctatggaacatacagcagctctcatttttgaacaagaacccgacctaaaatttaaagtacctgaaaaagatctaattaaaaaatgccttggtggagaacccgtcgttaccgctggagaaacagaagacgtagacgcttttgggcctggagacctggacgcccttttcgcagaagatggtggacaagaaaacgacgatcggtaagaaaaaaaaaacttaaaaaactaagactaactcaatggcaacctcactatatcagaaaactaactgtagtgggattttatcctatgtttatggctacatcagacagactatccaatatactaaactgctacctagaaactacaacaccccactatatgcatggaggcggaggattctctatcagcaacttttctttaatgactctttatttagagcacttacaagtaagaaactggtggactgttagcaaccagaatatgcctctaataagatttacaggatgtactatatacttgtacaaaatggctgaatatgattacttattttactataacacacaaccacccatgacagcaacattaacaacatatcaaagcacacaccctgcagccatgctactcaacaaacatacaaaaaaaataacatgcaaaagatacaacaaaaagaaaaaaccttacactaaattaaaaattaaacctccatcacaattcttaaacaaatggtatttccaatatgacattgcaaacacaccattattacaaactatgtgcacagcatgctcgtttgaccgcatgtttcttaattctacatcagttagttccacaataggttttgtaagtcttgacacacgaggctttctcaaccaccaatacacaccgttaggtacatctggctatataccaaaaccaaatactttattatttggcgtcaataatggaacacaagacatatcaaaaattacatacaatgaactaatatacatgggctgtaccactgacctacaagaaggcacacctattcaacacatatcaacaagcacatacacaggcccctcacactacactgactttcaaaagaaactatttaatgcaaaaacaaaacatgaaaactggggtaatccatttaaacaatcacgctttaccggagatcaaagattaattgaaacaaacaaaacatgggacgaaattttaaaaacaacagatggaaagacaaaactaaataccggatgggtagaaaaaacacataaaacttttgaatgccgctataacccattcgcagacaaaggctccggtaacatattataccttcttaaaataaattcagggttacattctacagattggggaccaccaacagacaaagatgtagtaacacaagatttacctttatggttactaacatggggatacctagactttcaaagaaactgcaaagaatatagagacatagacacaacatgcatatgtgtaatacaatcaccatatatatttcctaaaacagaaaaattttatgttccattagactatgactttttagaaggcagaagcccatatagaccagaaggtaacataattccctcagatgaatataactggcatcctaaagtagctttccaaacaagatcaattaattcaatagcaacaagcggaccagctacaataaaactacctaaagacatttcctgtgaaagtcacataagatatcgattttattttaaggttggaggacaaccaccaccaatgtcaatacttacaaacccaacagaccaaccaaaataccccatacccaataatctcatcagcacaccttcgttacagagtccagcaacaccaattgaacaactactctggagctttgacgaacgcagacaaacactcacaaaaactgctacacaaagaattacagactacaaaccaactgaaagctctcttttacaaattacagacccatccagctactgccctacaaccacactcttcaaagaaaaagaaacatcggagacagagagctcggaagaagaagaccaaacaccgatccaggagcaactccacaagcagcgaagaaagcaaaagcagctcagacagcaaatcaagctgctcctcaacagattaataaatatagaatagaaaaatgtaaagttaacgtactattatttcctccggatgagcctaaaaacaggcgcatgaatccgtgggaaaaagaacaagaaattttagaagcagctatatggggtagaaggccaagagattacatatttgataaaccattttatgatttatgtccagaagtacctaaatacactgtaaactttgatcttaatgcgccgcaataaaattcaaggcctgcaaatattcactctcggtgtccatttatataagttaaacttaaataaacatccaccacactcccaaatacgcaggcgccatagggggctccgccccctataacccccagggggggcacagcccccccctacaacccccctaataaatattcataacggaaaccacaaaattagaattgccgaccacaaacggctgtatgctaattaacttcccaaaaattcaccaacttcctcaaaaattaattaataatcaccgtcacaaagggcggagacaactacctataaaataaactgcacttccgaatggctgagtttatgccgctagacggagcgcagaacgaagtctcagcgctgatcttgggcgggtgccgaaggtgagtgaaaccaccgtagtcaaggggcaattcgggcggg

SEQ ID NO: 2251 - protein, 675 aa, Betatorquevirus sp.
MPWWRTRRYRWRNRRRRRFWAWRPGRPFRRRWWTRKRRSVRKKKLKKLRLTQWQPHYIRKLTVVGFYPMFMATSDRLSNILNCYLETTTPHYMHGGGGFSISNFSLMTLYLEHLQVRNWWTVSNQNMPLIRFTGCTIYLYKMAEYDYLFYYNTQPPMTATLTTYQSTHPAAMLLNKHTKKITCKRYNKKKKPYTKLKIKPPSQFLNKWYFQYDIANTPLLQTMCTACSFDRMFLNSTSVSSTIGFVSLDTRGFLNHQYTPLGTSGYIPKPNTLLFGVNNGTQDISKITYNELIYMGCTTDLQEGTPIQHISTSTYTGPSHYTDFQKKLFNAKTKHENWGNPFKQSRFTGDQRLIETNKTWDEILKTTDGKTKLNTGWVEKTHKTFECRYNPFADKGSGNILYLLKINSGLHSTDWGPPTDKDVVTQDLPLWLLTWGYLDFQRNCKEYRDIDTTCICVIQSPYIFPKTEKFYVPLDYDFLEGRSPYRPEGNIIPSDEYNWHPKVAFQTRSINSIATSGPATIKLPKDISCESHIRYRFYFKVGGQPPPMSILTNPTDQPKYPIPNNLISTPSLQSPATPIEQLLWSFDERRQTLTKTATQRITDYKPTESSLLQITDPSSYCPTTTLFKEKETSETESSEEEDQTPIQEQLHKQRRKQKQLRQQIKLLLNRLINIE

SEQ ID NO: 2252 - protein, 102 aa, Betatorquevirus sp.; identical to SEQ ID NO: 9

SEQ ID NO: 2253 - protein, 124 aa, Betatorquevirus sp.; identical to SEQ ID NO: 10

SEQ ID NO: 2254 - DNA, 2948 bp, Betatorquevirus sp.
caggtgccgaaggtgagtgaaaccaccgtagtcaaggggcaatatgggctaggtcagtcttggcggaccgggcaagaaacttaaaaatataacctttcttacagatatgtcatctatctggaagaaaccaacaactactccgagacaactagaactaggatggctgaacttattccaccaagcacacgaccaattctgccaatgtgaagaccctgaccttcactatttaatggtaattaacaaattttccaacttcaaaaagcctgaatctgaaattatcaacataaaatgcctccttaccggaaaacctactggaacaactactactaccgaagaagaaaaagatatccatatcgacgaaggagacttagaaagccttttcgaaaaagatttcgaagaagaacctactggagaaaacagcgaaaggtaaagaaatttaaacttaaaaaacttaaaaaactaactcttaaagtttttcaaccaaagactataagactattaaaaattaaaggatttaaatgcctatttcaaggaagcataaaaagagctaacaataactatatacaatatatatatgatactgtaaatgataaaagaccaggcggaggggcatggagtttacaagtatttagccttgcaagcttatatgaagaatggcaacacttacttaacatttggactgttagtaatgctggactgccactaatacgctttacgggagttagatttaaattttatcaaagtgcagaaaatgactatgttgttaaatatgataattgttggcctatggtagatacaccatacacacatgcagacagtgcaccatcaagaatgataagagcacaacataaaataactgtaccaagtagaaaaacaaaacttagaaaaaaaccatacaaaaaagtatttgttagaccaccatcacaaatgacaaacaactggtactttcaaagagatatatgcaaaacaccactaacaatgcttacaaccacagccgttgatcttagattcccatttgctcccccagaagctttaagtaacaatgtaactttatatacacttaatacatttcaatttaaaaacacaaactttcaacaacctgatgctagcggttactactacaaaatggaaggcacacaaaaatactacttatatgcagcagcaagagaccactcaaacacctggggatcactaattcctttaacaaacacaaaagacaatcaaccaggaaaacaacttaatcaattaataaaacgcactcccactaacgataataaaatgagcaactggggaaacccattttaccacttatatgactatgaaaactttaggttttactttttaacaaaaggtccaacagaaatacaatttacagatttaaacagacctttaaatgaaggaattactgaattttcaagttacatatactaccaaatcagatacaatccagagaaagacacaggacaagataataaagtatatttaatttctaatttacatgacacaaaatgggaagaaccttcaaacgaaaatttaatttttgatggttttccactaactatattactatggggatggacagactggcaaaaaaaactaaaacaagtatctaacatagataaccaatacatagtagttatacaaaccaaattcttttcagaaaacctaaaatactacgtacttattgataaagattttatagatggatttgaacctttctcaccacatgacgaacaagacaaattacctattacaccagctaatcaacaacattggtatccaaaacacttatttcaacaacaatccataaacacactatgtctatcaggccaagcatgtccaagacctccttggaaccattatctacaagcattttgtacatacacattttactttaaattaggaggctgtccaaaacaactagaaaaagcttatgatccttgtttacagtcaaaatggcccacagccgataacatccctgcaagatatcaaattacgaatcctgaaaccccaccagaaacagaactgtactcctgggactgggatgaagactttgttaaaaagacagctttacaacgaattacagaatacacaccaacttatgaaacaatattcctttctacaggaagcaaatcagatcccatcgcactcaaaaaagtccaagaaaatcaagcccaagaagaagaggaggagaaagaactattcctccagctccagcagctcagacaccgacgaaagctcctacaactccaactaaaagaattatcattaaaaagtgtacaaagatagtagaactattcccaaaacctataaaacaaaacagaagatttaccaaagatgaaagagagacagaaagacaagtagctatagcattttgtaggccacaaagatcatttttctatgatccacctatttacccttggttaccaccggaaccaaaagttccaaaagttaactttaaactaaattacaattctaacgaataaaaattacaaggccaactattttcacttgtcggtgtccatttatttaagtttaacttatataaacatccaccactctcccaacagtgttggcgccaaaagggggctccgcccccttacacccccaagggggctccgcccccttacacccccaagggggctctgcccccttacacccccaagggggctccgccccccttacacggggctccgcccccttacacccccttataaatattcaacaggaaaaccacctaattagaattgccgaccacaaacggtcactaacttctcttttttaacatacttcctttttttctaattattattcattacattaattattaaaccgcgtaattccggggaggagactataaactatataaccaactacactttcgaatggctgagtttatgccgccagacggagactgtgttacacagtaacaacaggctgacctaggg

SEQ ID NO: 2255 - protein, 666 aa, Betatorquevirus sp.
MPPYRKTYWNNYYYRRRKRYPYRRRRLRKPFRKRFRRRTYWRKQRKVKKFKLKKLKKLTLKVFQPKTIRLLKIKGFKCLFQGSIKRANNNYIQYIYDTVNDKRPGGGAWSLQVFSLASLYEEWQHLLNIWTVSNAGLPLIRFTGVRFKFYQSAENDYVVKYDNCWPMVDTPYTHADSAPSRMIRAQHKITVPSRKTKLRKKPYKKVFVRPPSQMTNNWYFQRDICKTPLTMLTTTAVDLRFPFAPPEALSNNVTLYTLNTFQFKNTNFQQPDASGYYYKMEGTQKYYLYAAARDHSNTWGSLIPLTNTKDNQPGKQLNQLIKRTPTNDNKMSNWGNPFYHLYDYENFRFYFLTKGPTEIQFTDLNRPLNEGITEFSSYIYYQIRYNPEKDTGQDNKVYLISNLHDTKWEEPSNENLIFDGFPLTILLWGWTDWQKKLKQVSNIDNQYIVVIQTKFFSENLKYYVLIDKDFIDGFEPFSPHDEQDKLPITPANQQHWYPKHLFQQQSINTLCLSGQACPRPPWNHYLQAFCTYTFYFKLGGCPKQLEKAYDPCLQSKWPTADNIPARYQITNPETPPETELYSWDWDEDFVKKTALQRITEYTPTYETIFLSTGSKSDPIALKKVQENQAQEEEEEKELFLQLQQLRHRRKLLQLQLKELSLKSVQR

SEQ ID NO: 2256 - protein, 107 aa, Betatorquevirus sp.; identical to SEQ ID NO: 1934

SEQ ID NO: 2257 - DNA, 2948 bp, Betatorquevirus sp.
cgggtgccgaaggtgagtgaaaccaccgtagtcaaggggcaattcgggctgaatcagtctagcggaacgggcaagtaacttaatttttattttttagatatgtccaaccgatttaaacaaccacaaactacacttagaggaaagaaaatacaatggatgaatctacttactcactgccatgatgttttctgcgaatgtgataatccaataacccacaccatcaccttaatatttgaacaagaaaaagaatttaaatttacaccaccagaaagagatttaatacaatcatgccttaccggagaaactactggtaccgaccatggagacaaagaagacgacgtatttggagaaggcgttttagaagaccttttcagagaaaatactggagaagaagaagatacccggtaagaaaaagaaaacttaaaaaaataactttaaaacaatggcaacctcattatatgaaaaaacttaaaattattggactataccctatactaatggagacacgagaaagagttgccaacaatttgaactgctatcttgactctattgcgccgcactatgtacctgggggaggattatttagcattcataactttagttttatgtctttgtacttagaacatttacaattaagaaactggtggacaactagtaatgaaaactacccacttattagaatactaggatgtactgttaaactgtatagacaagctgaacatgattacttattttgctacaataaccaaccacctatgacatccacattacttacataccaaagcacacaaccacaagcaatgctacttaataaacacacaattaaagttccatgcaaaagaaacaatagaaacaaaaaaccttatataaaactacacataaaaccaccaccacaatttcaaaacaaatggtactttcaatatgacattgctacaacaccactattacaaactatggcaacagcaacgtcttttgaccgcatgtttctaaactcaacctcaatctctaacacaataggttttacaacactagacacaaacggttttttaaaccaccaatttgaaagaactacatcaggttactctccaagaccaggaacattattatttaaaacaaaaaatggaaaccctaacatacaatcaatacaaataggagacttaatatttcttggagatgtagaagacctacaagacggtacacaactaaaaagtgtaccaccaactatcatacctcctacatcactaatcgcatcaccatcagagtttcaaaaacgcttatacaccactcgcatgaaacatgaatactggggaaatccatttaaatcatcaacattttactactctgaaagaatgatagaaacaaataaaacatgggacgacataattaaaaattataccatgccaacaaaaccactaaatacaggatggacattaaaaaccacaaaaacaggagaatgcagatacaatccatttaatgacaaaggcaaagataatataatttatctactcccaattaaatcaggcttacacagtactgactggaatccacctacagacaaagatgtagtagcaaaagacttaccactatggttactattctggggttatttagactaccacagaaaatgcaaagaatatagagatatagacacaacatgcatagtagtgatacaaagcccctacataatacctaaatcatataaattttatgtaccacttgacaaagacttcttagatggacaaagcccttacagaccagaaggagaaataacaccttctgatttacaaaattggcatcctaaagttgcatttcaagtacagtctatcaatgacatttgcttatcaggcccagccacaataaaacttcccaaattaacagctgcagaagctcacatacaataccgattttactttaaggttggaggacaacctgctccaatgtctacactcacaaagcctgacgaacaaccaaaatatcctatacccaataatctcatccaaacaccttcgttacagagtccaacaacaccctttgaccaactactctggcactttgatgaaagaagggaacaacttacaaaaaaagctactaaaagaatcactgaatactcagaacctcaaaaaactcttttgccaattacagaaacaagcagctggtgccctatacaaacaaaaacaaaagaaacatcggagacatcgtcctcggaagaagacgaaacaccgctccaggaccagctcaacaagcagcgaagaaagcaaaaactcctcagaaacagaatcaacctgctcctccacagattagctcacttagaataaaatcctcctcaattaaagtacaattatttcctgaacccaaaagaaataggcgaatgactccctgggaatttaaagaggaactagaggacgctgccttttggggaagggtacctagaacacatatacttgataagcctacatatccatatgtgcctcaaaacaccccatttactgtaaactttgacttaaacgcgccgcaataaaatacaacgcctgcaaacactcactctcggtgtccatttatatatattaaaccttaaataaacatccaccacactcccaaatacgcaggcgcagtagggggctccgccccctataacccccagggggggcaaagccccccctaaaacccccctcataaatattcatacaggaaaccgctaatttgaattgccgaccacaaacagtcatatgcaaattaacttccctaaatacactctaacttccctaaaaattaattaataaacaccgtcataataggcgtggttatgaacctataaaactaactacacttccgaatggctgagtttatgccgctagacggagcgcagatcgacagactcagcgctgattcagggcgggtgccgaaggtgagtgaaaccaccgtagtcaaggggcaattcgggctcaggg

SEQ ID NO: 2258 - protein, 675 aa, Betatorquevirus sp.
MPYRRNYWYRPWRQRRRRIWRRRFRRPFQRKYWRRRRYPVRKRKLKKITLKQWQPHYMKKLKIIGLYPILMETRERVANNLNCYLDSIAPHYVPGGGLFSIHNFSFMSLYLEHLQLRNWWTTSNENYPLIRILGCTVKLYRQAEHDYLFCYNNQPPMTSTLLTYQSTQPQAMLLNKHTIKVPCKRNNRNKKPYIKLHIKPPPQFQNKWYFQYDIATTPLLQTMATATSFDRMFLNSTSISNTIGFTTLDTNGFLNHQFERTTSGYSPRPGTLLFKTKNGNPNIQSIQIGDLIFLGDVEDLQDGTQLKSVPPTIIPPTSLIASPSEFQKRLYTTRMKHEYWGNPFKSSTFYYSERMIETNKTWDDIIKNYTMPTKPLNTGWTLKTTKTGECRYNPFNDKGKDNIIYLLPIKSGLHSTDWNPPTDKDVVAKDLPLWLLFWGYLDYHRKCKEYRDIDTTCIVVIQSPYIIPKSYKFYVPLDKDFLDGQSPYRPEGEITPSDLQNWHPKVAFQVQSINDICLSGPATIKLPKLTAAEAHIQYRFYFKVGGQPAPMSTLTKPDEQPKYPIPNNLIQTPSLQSPTTPFDQLLWHFDERREQLTKKATKRITEYSEPQKTLLPITETSSWCPIQTKTKETSETSSSEEDETPLQDQLNKQRRKQKLLRNRINLLLHRLAHLE

SEQ ID NO: 2259 - protein, 102 aa, Betatorquevirus sp.
MSNRFKQPQTTLRGKKIQWMNLLTHCHDVFCECDNPITHTITLIFEQEKEFKFTPPERDLIQSCLTGETTGTDHGDKEDDVFGEGVLEDLFRENTGEEEDTR

SEQ ID NO: 2260 - protein, 121 aa, Betatorquevirus sp.
LVPYTNKNKRNIGDIVLGRRRNTAPGPAQQAAKKAKTPQKQNQPAPPQISSLRIKSSSIKVQLFPEPKRNRRMTPWEFKEELEDAAFWGRVPRTHILDKPTYPYVPQNTPFTVNFDLNAPQ

SEQ ID NO: 2261 - DNA, 2947 bp, Alphatorquevirus sp.
ggacccccgctcgtgctgacacgcttgcgcgtgtcagaccacttcgggctcgcgggtcgggactggccgggctatgggcaaggctcttaaaaaagcatgtttctcggtaaactttacagaaagaaaaggaaactgcttctgtgctctctgcgtactacatcgaaagcacttaccttctcaatgagctggtccagacccatacacaatgttactgcactggaaagaaattggtaccagggtgttattcacactcatgctgcttgctgtggctgcggtaaccctggggctcacttcgctaccttggttgaaagatacaactccaaccaaatgcaacaccagcgtttactgccgccagcatccgctataaggtccccaaaccagatccgtagagcccgggccttgcccgaggctccggagcagcctccggcactgccatggcatggtggtggtggagaaggagacgccgcccgcggtggagaaggcgacgctggaggagacgagcccgtgtacgaaccaggagacctagacgccctgtacgccgccgtcgaagaagagtaaggagagggagacgggggtggcgtagactgtacagacgatggagacgcagggggcgacgcagacacaaacgaaaaaaactggtaatgagacagtggaaccccagtactgtaacaaaatgctttatagtgggctacctgcccattattatctgtggacagggtacctctgccatgaactatgcatctcactgcgatgatatagagtaccctggacccctgggagggggactaacctccatgaggtttactttaagaatactgtatgaccagtacaccaggggacagaacttttggacaaagagcaatgaggacctagacttagctagattcctgggatccaaatggactttttacagacatccagaagtagactttatagtaacctgggagacctcagccccctttacagactctatagtatcaggaccacaccaacacccaggcatacaaatgctcatgaaaaagaaaatactcataccaagttttagaacaaaacccaagggtcgcagcactataaaagttaaaataaacccccctaagctcatgatagacaagtggtacccacaaactgaattctgtgaggtaactctcctaacgattcatgccacagcatgtgacctgcggtttccgttctgctcaccacaaacgaacacttcctgcatacagttcctcgttttgtcaggagcttacagtggttacattagcatattacctgacaaagcaaacgaaagtcaacttagagcatttttagctactaatgtaacagatgattcaaatgtatgcaacacactagctacaccatacatgctaaaatatccaccaccaacaaaaaaaacaaactcaggtacagcagcacaatactcaccagacagccaagatggacaaaatatatacactaaccttgtacaaacaataatgcaaaataacaatgtatggtttaccaaagctaaaacggcatggaccaacttacattcgcaatatggcgttcccacatcaccaggcctggaataccacacaggatttttcagtgccatattcttatcaccagtaagactaaactcacagtttccaggcttgtataccaccattaaatacaacccacttacagacaaaggagagggaaacagaatctggtgcgacccttgcaataaagagtccttcatgtacagcccaccacagagcaaatttgtaatagaaaacatacagctatgggcggcagtatcaggctacttagactactgcacaaaagccagcaaagacgaaagctttaaatacaactacagagtacttatacagtgtccatacacagtgccacagctatacatacaaacacaaccacagagaggctacataccatacagcaacaactttggcatgggcaaaatgcccaatgacagctccgtaataccagttaggtggagatgcaggtggtatccagccctgtggaaccagcagcaggtactagaggacatattcatgtctggaccctttgcatacaagggagatcaaccctcagccacccttaacacaaagtatgcatttaagtggctctggggtggcaaccgtattttccaacaggttgttaaagacccctgctcacaccagcaagaccaggcagttggtcccagtagaaagcctagagcagtacaagtctttgacccgaagtaccaagcaccagagtggacgtttcacgcgtgggacctcagacgcggcctatttggcagacaagctattaagagagtgtcagcaaaaccaacagctgatgagattttgtcaacaggtccaaagcgacccaggttggaagtccccgcgttcgaagaggggcaagaaaaaagcttacttttcagacaaagaaaacacctcctctgggaagagaccacagaggaagagacagaagcccaatcagaagaggagcaggaggaagaggagcagcagcagctcctcagacgactccagcaacagcgggagttggggcgaggcctcagatgcctcttccagcaactaacccgcacccagatgggtctccacgtagacccccaattattagcccctgtataaataaagtatacatgtttcctccagcagaacccaaacccatctcaggctacgaagcctggagagatgagtttgaaacctgttccgcctggaacagacccccgagaaagtaccacacagacacccccttttacccctggatgcccccagaccagttccgtgtaacctttaagcttggctttcattaaaatttctaggccgtggaactttcacttgtcggtgtctacctcttaaggtcactaagcactccgagcgaagcgaggagtgcgaccctcggggtgggtgcaacgccctcggcggccgcgcgctacgccttcggctgcgcgcggcacctc

SEQ ID NO: 2262 - protein, 726 aa, Alphatorquevirus sp.
MAWWWWRRRRRPRWRRRRWRRRARVRTRRPRRPVRRRRRRVRRGRRGWRRLYRRWRRRGRRRHKRKKLVMRQWNPSTVTKCFIVGYLPIIICGQGTSAMNYASHCDDIEYPGPLGGGLTSMRFTLRILYDQYTRGQNFWTKSNEDLDLARFLGSKWTFYRHPEVDFIVTWETSAPFTDSIVSGPHQHPGIQMLMKKKILIPSFRTKPKGRSTIKVKINPPKLMIDKWYPQTEFCEVTLLTIHATACDLRFPFCSPQTNTSCIQFLVLSGAYSGYISILPDKANESQLRAFLATNVTDDSNVCNTLATPYMLKYPPPTKKTNSGTAAQYSPDSQDGQNIYTNLVQTIMQNNNVWFTKAKTAWTNLHSQYGVPTSPGLEYHTGFFSAIFLSPVRLNSQFPGLYTTIKYNPLTDKGEGNRIWCDPCNKESFMYSPPQSKFVIENIQLWAAVSGYLDYCTKASKDESFKYNYRVLIQCPYTVPQLYIQTQPQRGYIPYSNNFGMGKMPNDSSVIPVRWRCRWYPALWNQQQVLEDIFMSGPFAYKGDQPSATLNTKYAFKWLWGGNRIFQQVVKDPCSHQQDQAVGPSRKPRAVQVFDPKYQAPEWTFHAWDLRRGLFGRQAIKRVSAKPTADEILSTGPKRPRLEVPAFEEGQEKSLLFRQRKHLLWEETTEEETEAQSEEEQEEEEQQQLLRRLQQQRELGRGLRCLFQQLTRTQMGLHVDPQLLAPV

SEQ ID NO: 2263 - protein, 153 aa, Alphatorquevirus sp.
MFLGKLYRKKRKLLLCSLRTTSKALTFSMSWSRPIHNVTALERNWYQGVIHTHAACCGCGNPGAHFATLVERYNSNQMQHQRLLPPASAIRSPNQIRRARALPEAPEQPPALPWHGGGGEGDAARGGEGDAGGDEPVYEPGDLDALYAAVEEE

SEQ ID NO: 2264 - protein, 125 aa, Alphatorquevirus sp.
LGRDHRGRDRSPIRRGAGGRGAAAAPQTTPATAGVGARPQMPLPATNPHPDGSPRRPPIISPCINKVYMFPPAEPKPISGYEAWRDEFETCSAWNRPPRKYHTDTPFYPWMPPDQFRVTFKLGFH

SEQ ID NO: 2265 - DNA, 2947 bp, Alphatorquevirus sp.
ggacccccgctcgtgctgacacgcttgcgcgtgtcagaccacttcgggctcgcgggtcgggactggccgggctatgggcaaggctcttaaaaaagcatgtttctcggtaaactttacagaaagaaaaggaaactgcttctgtgctctctgcgtactgcatcgaaagcacttaccttctcaatgagctggtccagacccatacacaatgttactgcactggaaagaaattggtaccagggtgttattcacactcatgctgcttgctgtggctgcggtaaccctggggctcacttcgctaccttggttgaaagatacaactccaaccaaatgcaacaccagcgtttactgccgccagcatccgctataaggtccccaaaccagatccgtagagcccgggccttgcccgaggctccggagcagcctccggcactgccatggcatggtggtggtggagaaggagacgccgcccgcggtggagaaggcgacgctggaggagacgagcccgtgtacgaaccaggagacctagacgccctgtacgccgccgtcgaagaagagtaaggagagggagacgggggtggcgtagactgtacagacgatggagacgcagggggcgacgcagacacaaacgaaaaaaactggtaatgagacagtggaaccccagtactgtaacaaaatgctttatagtgggctacctgcccattattatctgtggacagggtacctctgccatgaactatgcatctcactgcgatgatatagagtaccctggacccctgggagggggactaacctccatgaggtttactttaagaatactgtatgaccagtacaccaggggacagaacttttggacaaagagcaatgaggacctagacttagctagattcctgggatccaaatggactttttacagacatccagaagtagactttatagtaacctgggagacctcagccccctttacagactctatagtatcaggaccacaccaacacccaggcatacaaatgctcatgaaaaagaaaatactcataccaagttttagaacaaaacccaagggtcgcagcactataaaagttaaaataaacccccctaagctcatgatagacaagtggtacccacaaactgaattctgtgaggtaactctcctaacgattcatgccacagcatgtgacctgcggtttccgttctgctcaccacaaacgaacacttcctgcatacagttcctcgttttgtcaggagcttacagtggttacattagcatattacctgacaaagcaaacgaaaatcaacttaaagcatttttaactactaatgtaacagatgattcaaatgtatgcaacacactagctacaccatacatgctaaaatatccaccaccaacaaaaaaaacaaactcaggtacagcagcacaatactcaccagacagccaagatggacaaaatatatacactaaccttgtacaaacaataatgcaaaataacaatgtatggtttaccaaagctaaaacggcatggaccaacttacattcgcaatatggcgttcccacatcaccaggcctggaataccacacaggatttttcagtgccatattcttatcaccagtaagactaaactcacagtttccaggcttgtataccaccattaaatacaacccacttacagacaaaggagagggaaacagaatctggtgcgacccttgcaataaagagtccttcatgtacagcccaccacagagcaaatttctaatagaaaacatacagctatgggcggcagtatcaggctacttagactactgcacaaaagccagcaaagacgaaagctttaaatacaactacagagtacttatacagtgtccatacacagtgccacagctatacatacaaacacaaccacagagaggctacataccatacagcaacaactttggcatgggcaaaatgcccaatgacagctccgtaataccagttaggtggagatgcaggtggtatccagccctgtggaaccagcagcaggtactagaggacatattcatgtctggaccctttgcatacaagggagatcaaccctcagccacccttaacacaaagtatgcatttaagtggctctggggtggcaaccgtattttccaacaggttgttaaagacccctgctcacaccagcaagaccaggcagttggtcccagtagaaagcctagagcagtacaagtctttgacccgaagtaccaagcaccagagtggacgtttcacgcgtgggacctcagacgcggcctatttggcagacaagctattaagagagtgtcagcaaaaccaacagctgatgagattttgtcaacaggtccaaagcgacccaggttggaagtccccgcgttcgaagaggggcaagaaaaaagcttacttttcagacaaagaaaacacctcctctgggaagagaccacagaggaagagacagaagcccaatcagaagaggagcaggaggaagaggagcagcagcagctcctcagacgactccagcaacagcgggagttggggcgaggcctcagatgcctcttccagcaactaacccgcacccagatgggtctccacgtagacccccaattattggcgcctgtataaataaagtatacatgtttcctccagcagaacccaaacccatctcaggctacgaagcctggagagatgagtttgaaacctgttccgcctggaacagacccccgagaaagtaccacacagacacccccttttacccctggatgcccccagaccagttccgtgtaacctttaagcttggctttcattaaaatttctaggccgtggaactttcacttgtcggtgtctacctcttaaggtcactaagcactccgagcgaagcgaggagtgcgaccctcggggtgggtgcaacgccctcggcggccgcgcgctacgccttcggctgcgcgcggcacctc

SEQ ID NO: 2266 - protein, 726 aa, Alphatorquevirus sp.
MAWWWWRRRRRPRWRRRRWRRRARVRTRRPRRPVRRRRRRVRRGRRGWRRLYRRWRRRGRRRHKRKKLVMRQWNPSTVTKCFIVGYLPIIICGQGTSAMNYASHCDDIEYPGPLGGGLTSMRFTLRILYDQYTRGQNFWTKSNEDLDLARFLGSKWTFYRHPEVDFIVTWETSAPFTDSIVSGPHQHPGIQMLMKKKILIPSFRTKPKGRSTIKVKINPPKLMIDKWYPQTEFCEVTLLTIHATACDLRFPFCSPQTNTSCIQFLVLSGAYSGYISILPDKANENQLKAFLTTNVTDDSNVCNTLATPYMLKYPPPTKKTNSGTAAQYSPDSQDGQNIYTNLVQTIMQNNNVWFTKAKTAWTNLHSQYGVPTSPGLEYHTGFFSAIFLSPVRLNSQFPGLYTTIKYNPLTDKGEGNRIWCDPCNKESFMYSPPQSKFLIENIQLWAAVSGYLDYCTKASKDESFKYNYRVLIQCPYTVPQLYIQTQPQRGYIPYSNNFGMGKMPNDSSVIPVRWRCRWYPALWNQQQVLEDIFMSGPFAYKGDQPSATLNTKYAFKWLWGGNRIFQQVVKDPCSHQQDQAVGPSRKPRAVQVFDPKYQAPEWTFHAWDLRRGLFGRQAIKRVSAKPTADEILSTGPKRPRLEVPAFEEGQEKSLLFRQRKHLLWEETTEEETEAQSEEEQEEEEQQQLLRRLQQQRELGRGLRCLFQQLTRTQMGLHVDPQLLAPV

SEQ ID NO: 2267 - protein, 153 aa, Alphatorquevirus sp.
MFLGKLYRKKRKLLLCSLRTASKALTFSMSWSRPIHNVTALERNWYQGVIHTHAACCGCGNPGAHFATLVERYNSNQMQHQRLLPPASAIRSPNQIRRARALPEAPEQPPALPWHGGGGEGDAARGGEGDAGGDEPVYEPGDLDALYAAVEEE

SEQ ID NO: 2268 - protein, 125 aa, Alphatorquevirus sp.
LGRDHRGRDRSPIRRGAGGRGAAAAPQTTPATAGVGARPQMPLPATNPHPDGSPRRPPIIGACINKVYMFPPAEPKPISGYEAWRDEFETCSAWNRPPRKYHTDTPFYPWMPPDQFRVTFKLGFH

SEQ ID NO: 2269 - DNA, 2946 bp, Gammatorquevirus sp.
cgggtgccgaaggtgagtgaaaccaccgtagtcaaggggcaattcgggcggctgcagtctagcggaacgggcaagaaacttaaaaattccgcgcgctgtgcgcgccctatgttttattacagatgtctcttcaaaacgtacctaaatgttacaaacctcctcttgtagatccatggggacaacaagaactctggatacaaaatgtcgaattttcacatgatacatggtgcagctgtgctcattggcttagtcatcttctttctattacttgtcctcttgattctaaaaatcgcgctcggaccgtccacgagattattgacataggtcaaaattgtgataaccttttgtctttgagagccttgcccagtgtccctgcagatccatggtctggccctggagagcccggcgccgctggcgccgcagaccacgcaggtggagacgctggaggtggcccagacgaaaccgaaagagacgcacctatacccgaagacgaactgttcgagcttctagaaaacgcagaaaaagacgaaaacgtaccagggtaagaaaaaaaaaacctttattgaacttaaaacaatggcagccagaaagcataaaactatgtaaaattattggacatacacctttaaatattggatgtaacggaagacaaatctataattatacatattggcaagactactacatacatccaaaatgtccatctggagggggattttcagtatataaatggtctttagcatacctatatgaagactactgtagaagaaaaaatatatggacaaaatctaactgcccatatgacttatgcagatacctaggaactagaattaaattttattcacacccagaagtagactatgtagcttcatactcaagaaactaccctatggtagtagatgaaacaacttacatgttaacacacccatctatactactactcagaaaacacagagtaataatacctagcagaaaaacaaaacctaacggaaaaggttacaaaaaaatatttataaaaccacctagacaacttgtaaacaaatggttttttcaaaaacaatttaatgaccagggtctatttttactacaaatagctgcaacagacttacaataccccaacataggcccaaactctccaaacagactagtaacattaaacattttaaacaaccaatacttttatggacaaccaaactggggagacgcctcaggaacatacacaatcaccgaaggaaaactacacctccttggaaaaaacacaaaaacacttattgatggaaaactaatagactatacaattcccaatgacataggtactcaaaagaaaaaacattactatgattcaggcctatttaacagaaaaatgcttaacatacaatattacactgacacagaactctcctcatatccaacaccaacaatgcaagttcaatacaaccctatgagagacacaggcaaaggaaacaaaatatactttatatctaccttacaaactagctggggaccaccaaccacagacagacttttattttggcaaggtgaacctctatggctacaactatatggcctaacagactacattttgaaagccaaagggacttcctctgccctacaggatgccatttgtgtaatagagtcaccatggatagaaccacaaacccacaacaaaaaattcgttgtggtaggaaatccatttatgcaaggacaaactgactgcaaaaacccacctacaggaacacaactaaacaaatggtttttaactttagaagatcaaatgccagcattaaatgacattgtaacagcaggaccatacatggtaaaacaaacaggttttagatgcacatgggaaatgcatgtagactataaatcttattttaaatggggaggtgcacaaccaccactacaaaatatttgtgacccccatttacaggaaaccttccctgtgcccgatactgtcagacaaacattacaaatcatcgatccgaaaaaacaagtcccagaatccttactccactcttgggactatagacgagggcttgttactcaaacagctcttaaacgaatgtacaaaggtctctcagatgcagagtcttcttcggcagatacctcagaagagtcagactcaccccaaagaaaaagaaagagaggagacccgccgtgcccggaagaaaaagacaactacaatatccagaccctcaaagaaatctgccaaacgccgcaagaaacaggaaacatcgagcagcagctccacaacttccagcagcagcaatacaacaaaaacatcaacatcttaaaattacttgcaatgttaaaacaaaaacagctgcaaatgcaactagcaatgggtatgatggagtaaaactatttccaaaaaaagaaaaaaacccaaaatttaaagggtggggtaaaattatagaagaagaatgcgcaaaagcattccacagacctcccagaaaatttgtaaatgaccctccattttacccttggttacctccagtacccaaagtttcatttgcactgaagtttaagggctaggcccacaatgttcacttagtggagtatgtttaataaagtcacacccccctttctgtaaccacgcctcttttgtatacgtcatgaatatattaaaaaccggaaataaattttcgcagagcggagggcccccccttaaaccccccggggggggcaaagccccccccactcccccccatacgtcacagaccacgtgaccgccgccatcttgggcgcggtctaggcgtggttaaaaaaagcgggaaccaatcaaattaaacatcacacaaccaatcacaaaccacctacgtcacaaaaatgggtggttcctttcactctataaaactaactgcacttccgaatggctgagtttttccccgctagacggtgcagagcacaacgagcgcagcgaggagagactcagcagcagcaggg

SEQ ID NO: 2270 - protein, 658 aa, Gammatorquevirus sp.; identical to SEQ ID NO: 893

SEQ ID NO: 2271 - protein, 149 aa, Gammatorquevirus sp.; identical to SEQ ID NO: 894

SEQ ID NO: 2272 - protein, 109 aa, Gammatorquevirus sp.; identical to SEQ ID NO: 895

SEQ ID NO: 2273 - DNA, 2946 bp, Betatorquevirus sp.
cgggtgccgaaggtgagtgaaaccaccgtagtcaaggggcaatatgggcagaatcagtcttggcagaacgggcaagaaactaaaatatatttattttttagatatgacccatcgttatataccaactaattctacatatagacaaaaccaattaaaatggctgaatattttacaccatgttcacggttccttctgcgactgtcccaatggaatggcacacactaccgccttaatctttgaaaataatccggatttacaattctcaccacctgaaaaagatataataaaatcatgcctttctggagaaaatactggagacaaagatggagaaaaccatggcgtcgacggttttacaggagaagaactagagctccttttcaaagaaccagatggagaagacgccgccgcagaccggtaagaagaaaactaaaaactattaaactaaaacaatatcaaccgccttatattaaagtactaaaaataaaaggactctacccaataattttgggtacaagagaaagagtggccaacaacttaaactgttactttgaaagtactgcgccacactgggtaccgggagggggatgcttttcaatatgtaactttagcttaatgactttgtataaagaacatctagatgtaagaaactggtggacaactggtaatgaaaattatccacttataagatacttaggatgtgatattagactgtacagagaagaaaacatagactatctattttactataatagacagccacctatgacagcctcattaaccacataccaaagcacacaacctatggcaatgatgctaaataaacacacagtaaaaatctcatgtaaaaaaaatactaaaaacaaaaaaccatacaaaagattaagaataccaccacctacacaattacaaaacaagtggtattttcagtttgatattgcaaccacaccattactacaaacaatggcaacagcatgctcgtttgaccgcatgtttctaaacagtggagcaatatcaaccacaataggctttacaacacttgacacaaacggcttcttaaaccacaattatgacagaaccacaaggggctactcaccaagaccaggaacacttttattcaaaactaaaaatggttcctacgacatacaaaaaatacaaataggagaattaatcttcttaggagaaacacaagacttaacagacggtacacaactaaaatcaatacctgcagcacaaactgtaccacaaataagtaatcccactgactttcaaaaaagactttacaatgcaagcataaaacatgaacactggggaaatgtatttaaatcatccactttttatggagatgagagaatgatagaaacaaacatgacttgggataaaataataaacacgtataaagactcaactacaacactagacacagggtggacacttaaaaccactaaatggggagaatgcagatacaatccctatgcagatcatggaaaaggaaacatagtgtatttacttaaaataaactcaggactacaccccacagaatggggaccaccaacagacaaagacgtagttgcacaagacttaccactacacacacttttatggggatatttagactaccaaagaaaatgtcaagaatacagagacatagacacaacaacaattatagttttcaaaagcccttttattttaccaaaaacatacacattttattgcccactagaccaagactttttagatggaaacagcccctatagaccatcacaacacataattccatcagattaccagcattggcatccaaaagtaagattccaagtacaaacaataaataatatatgcttatcgggaccaggtactgtaaaactaccgcctcaagtttcctgtgaagctcacattgtatataattttcgctttaagattggagggcaaccagcaccaatgtcaaacctcaccaaaccagacgaacaaccaaaataccccatacccaataatctcctccaaacaccttcgttacagagtccaacaacgccatttacccagctcttgtggagctttgatgaacgcagaggggaactcactaaaaaagctacagacagaattacagactaccaaacacctgaaacatcttttttaccaattacagaaacaagcaactcatgccctacaaccctccaagtactcaaagaaacacaagagacgacatccgaggaagaagaagaaacatcgatccaggaacagctccacaaccagcgaagaaagcaaaaacagctcagacagcgaatcaacctcctcctccagcacctagcaaatttacaataaaagaaactgtaataaaagtaaaacttttccctgatccccctcaaaatcgcagaatgactgcaaaagaatatgaggacgaactatttgatgctaaatgctggttaagagtgcctagaactcatatatttgatagacctacttatccatgggtaccccaagattctaaatttactgtaaactttgaccttaacgcgccacaataaagctacgcctgcaaacttccacttgaggtgtccatttaatataaataaacttatataaacatccaccacactccctaatacgcaggcgcaaagggggctccgcccccttaaacccccagggggggcaaagccccccctacaacccccctaataaatattcaacaggaaaaccagggggggcaaagccccccctacaacccccctaataaatattcaacaggaaaaccacctaatttaaattgccgaccacaaacagccatatgcaaatttacttccccaaaaaatacaacacgcccactatttaattaataaacaacatcatagtaggcgttcccttcaaaactatataacaaacaacacttccgaatggctgagtttatgctgccagacggagcggagagaaaacctctacgctgattctggg

SEQ ID NO: 2274 - protein, 675 aa, Betatorquevirus sp.
MPFWRKYWRQRWRKPWRRRFYRRRTRAPFQRTRWRRRRRRPVRRKLKTIKLKQYQPPYIKVLKIKGLYPIILGTRERVANNLNCYFESTAPHWVPGGGCFSICNFSLMTLYKEHLDVRNWWTTGNENYPLIRYLGCDIRLYREENIDYLFYYNRQPPMTASLTTYQSTQPMAMMLNKHTVKISCKKNTKNKKPYKRLRIPPPTQLQNKWYFQFDIATTPLLQTMATACSFDRMFLNSGAISTTIGFTTLDTNGFLNHNYDRTTRGYSPRPGTLLFKTKNGSYDIQKIQIGELIFLGETQDLTDGTQLKSIPAAQTVPQISNPTDFQKRLYNASIKHEHWGNVFKSSTFYGDERMIETNMTWDKIINTYKDSTTTLDTGWTLKTTKWGECRYNPYADHGKGNIVYLLKINSGLHPTEWGPPTDKDVVAQDLPLHTLLWGYLDYQRKCQEYRDIDTTTIIVFKSPFILPKTYTFYCPLDQDFLDGNSPYRPSQHIIPSDYQHWHPKVRFQVQTINNICLSGPGTVKLPPQVSCEAHIVYNFRFKIGGQPAPMSNLTKPDEQPKYPIPNNLLQTPSLQSPTTPFTQLLWSFDERRGELTKKATDRITDYQTPETSFLPITETSNSCPTTLQVLKETQETTSEEEEETSIQEQLHNQRRKQKQLRQRINLLLQHLANLQ

SEQ ID NO: 2275 - protein, 124 aa, Betatorquevirus sp.; identical to SEQ ID NO: 1562

SEQ ID NO: 2276 - protein, 121 aa, Betatorquevirus sp.; identical to SEQ ID NO: 1563

SEQ ID NO: 2277 - DNA, 2946 bp, Betatorquevirus sp.
cgggagccgaaggtgagtgaaaccaccgtagtctaggggcaactcgggctagcgaagtctggcggaacgggcaagacacttaaaaatatatttattttacagatgagcagatatgttccaccacaactatcaaagaaaaataaagacttagactggattaactgcatcgttcaagttcacaacttaagatgtggctgtgacactccattagaacacactgtggaagaaatttaccaccaagaacctaatttacaagcaaatataccatgccgccatactggagaccacgctactattcaagatggagacgcagacggctttggagaaggagacctcaacgctttgttcgcagaagactttggagaaaaagaagacaccgccgatacagggtaagaaaacttcgcaaacttaaatatcttcacttaaaagaatggcaaccgagaagaatagtaaagcttaaatgcaaaggaacacttccactatatataactactaatgacagagtatcatttaatctaagagaatatgaacatgaaataactcctcactatgtaccaggacttggtggatactctataacaaactttactctaggagcattatatcaattacaccaacaaggacgttgcttttggactcatagtaatgatgacttaccttttataagatatactggttgtacaatgtatttctatcgttcagaatctagtgactatataattaactatcataactgtgggcctttaatacctaatttactaacctttaactcagcacaaccatctataatgcaacttaacaatagacacaaaataattagatgcaaaagcaaaaactactctaaaaaaccatacaccaagttaaaaattaagcctccaagcaacatgactaatcaatggttcctacaaagagattttgcagacacgcaattattactgctaatggcttcaggaatgtccctagacagatactacatacactcaaattccatatcaaacaccataggattcaccagtttaaacactaacttctttcaaatgcatgacttttaccaaacaacaacatcaggatactatccaaaacaaagcacatacctatggacataccaacaatctaaccccaaacctacacaaataacagatatttgcattaaaaacatgatatttctgggcaacacaaacaaagcagacccaggaactactattaatgatgtcccaaaacaatcaacacacacctttaaaaatcaaattgacacctatataaacaaccacggatattggggaaatatatttatttccgcatatctcaaaggccctcaacccatactttattctaaaacacatcccagaacattactaaaatctacaacatactacaaagactctggagagacaaaattagtagaatctgattttcaacaagttaaagaaaaattcttaataaactgcagatacaacccatttcctgacacaggaaaagataacaaaatatactttacagacataacctcacaacagcataactgggatcctccagaagaccaaaccttacaaaataataatttgcctttatggataggactatttggactcacagactgggctaaactaacaaaaacagcacaactaatagatacaaaacgagtactaacattatcaagcaaatacatatcaggcaatttaaataccatagtaccaatagatgaagatgtattaaatggtgttagtccctttagaaaagatatttcgggctcagattctctattttggcacccaaaaacatcctttcaatacaaagtaataaataatattgcagcctgtggcccaggaactttaaaattaccaccaaatgtatcagcagaaggtcatgtaaaattttgcttttattttaagctggggggatgtacacaacctaaaagaacaattgaagaccctgaaaaacaacctattatttcctcaaccaataacatcctacaatcaaattcgttacagaatccataccaatcaatcgaaagctacttgttcccatttgactggaggagagacttccttacaaaatcagctcttgaaagaattaaaaaacacaaagaacctgaaacaactctttttgaatctacaggagtcaacctctttgtcccaaaagtgcccaccgaaacaacatcggagacggactcatcgaacgaggaagaagaaaaagaaacattacagctcctcctcagacacctccgaaagcaacgcagacaatacgagcacagaatcctccagttagtaaattcaaaataattggttgtaaaaataaagttactctatttgattgtaaagaaaagaaaaaccgtagatttacacccccagaatttgaagatgaattgttcatagctaaatggcttaaaagaccgcccagaaactatatacatgatacgccattttacccatggctaccccctgaacctaaagtacccaaagtaaactttgacctcatgtttaaagaataaaggccagcattaattcactctcggtgtccgtttattaaagttaaacctatataagcatccaccgcctccctaatacgcaggcgcagcagggggctccgccccctgaaacccccagggggggatacccccccctacacccccccaatagccacaaaatttgcattgccgaccacaaacagacaggaaaaccacaaaatttgcattgccgaccacaaactgaactattttaattaacttctgcttttacacaagccactccccaaattaattaataatcaccgtcattttacacatttcctaggaggtactacaccactatataactaagtacacttccgaatggctgagtttatgccgccagacggagacactatataactaagtacacttccgaatggctgagtttatgccgccagacggagacgcgataggaactatcagcgactgagcaaggg

SEQ ID NO: 2278 - protein, 671 aa, Betatorquevirus sp.
MPPYWRPRYYSRWRRRRLWRRRPQRFVRRRLWRKRRHRRYRVRKLRKLKYLHLKEWQPRRIVKLKCKGTLPLYITTNDRVSFNLREYEHEITPHYVPGLGGYSITNFTLGALYQLHQQGRCFWTHSNDDLPFIRYTGCTMYFYRSESSDYIINYHNCGPLIPNLLTFNSAQPSIMQLNNRHKIIRCKSKNYSKKPYTKLKIKPPSNMTNQWFLQRDFADTQLLLLMASGMSLDRYYIHSNSISNTIGFTSLNTNFFQMHDFYQTTTSGYYPKQSTYLWTYQQSNPKPTQITDICIKNMIFLGNTNKADPGTTINDVPKQSTHTFKNQIDTYINNHGYWGNIFISAYLKGPQPILYSKTHPRTLLKSTTYYKDSGETKLVESDFQQVKEKFLINCRYNPFPDTGKDNKIYFTDITSQQHNWDPPEDQTLQNNNLPLWIGLFGLTDWAKLTKTAQLIDTKRVLTLSSKYISGNLNTIVPIDEDVLNGVSPFRKDISGSDSLFWHPKTSFQYKVINNIAACGPGTLKLPPNVSAEGHVKFCFYFKLGGCTQPKRTIEDPEKQPIISSTNNILQSNSLQNPYQSIESYLFPFDWRRDFLTKSALERIKKHKEPETTLFESTGVNLFVPKVPTETTSETDSSNEEEEKETLQLLLRHLRKQRRQYEHRILQLVNSK

SEQ ID NO: 2279 - protein, 96 aa, Betatorquevirus sp.
MSRYVPPQLSKKNKDLDWINCIVQVHNLRCGCDTPLEHTVEEIYHQEPNLQANIPCRHTGDHATIQDGDADGFGEGDLNALFAEDFGEKEDTADTG

SEQ ID NO: 2280 - DNA, 2945 bp, Betatorquevirus sp.
cgggagccgaaggtgagtgaaaccaccgaagtctaggggcaattcgggctagatcagtctggcggaacgggcaagaaacttaaatattttttatatttacagatatgtcatttatttggaagaaaccaacatcctctgtgagacaactagaactaggatggatgaatttgatgtttagctcccacgatcaaatttgtcactgcgacgacccttggctacactttttaattattttaaacaaaaccggcgctgcaccaaaacctgaagaagaaattttgaatataaaatgccttattactggagaaaaagaaacctccgcaacgcgtacaaaagataccgtagaagaaggtggtttcttcgaaggggagttagaaaaccttttcaaagaagattctggagaaggaacctccgtagaagaaaatacaaggtaaaaagacttaaatttaaaaaaagaaaactacttaaacttaaacaatggcaacctgcctctattaaaaaatgtaaaattgtaggaattaaatgtctattacaaggaaatgtattaagtgctcaacataattatgctcaatatatatactcatatgtaccacctgaaaacccaggtggcggagggtggtctttaatggtattttccctaggaagcctatttgaagactatgatcacttacaaaatgtttggacaactagtaatagcggcttacctttggttagatatactggctgtactataaaactttttcaatctgaaaacacagactatgtattcacatatgatacttgctggcctatggtagatactccatacacacatgcagacagctctcctatgagaatgatccaaaaaagacataaagtaattatgcctagtaaacaaacaaaacaaagaagaaaaccatacaaaagaattaaaattaaacctccacaccaaatgattaacaaatggtactttcaaaaagacatatgtaaccaaccattactcttaacaacaactactgcaatatcactgttaaaaccatttgctggcacaaatagcctatcaaataacattacatttaaatgtttaaacacctttctatttaacaacccacactttcaacactttccagaaacagtaggatactcacacaaaattgtaaactcacaatccatgtttctttatgcaaccacagaaccaaaaccaacagaggacaaaaacatgaaagactggttactaaaattaatattcttaggaaatacagtagaaaatcaaccaggaaaacctatacatcaatggtatagtactaattctaatacaaagaaaaactggggaaacccattttaccacagatacttagaagacacatcagaaacttcatatacaatatatactagcaaacaaacaattgtaaacatagttaatcaactaaggggttcaactataactattcccaacacagattttcaagaaatttctagaccaatattttacacagttacatacaatcctgctagagatacaggactgaacaaaatttacctgttagaaacaagtaaaaccttaacttttgacgaaccagaaaataaaaacttagtatttgaaggttttccactttataatttaatatggggatggactgactttattagaaaactaaaaataataacaaacttaccacaaaatgcattactagtaattgtaacaaaaaactttgacgaccaaacactaaaaacatatgtacctatagatcaagacttcatagatggattagacccataccaaactgatcactcacatgaacaaacaaactactacaatagtttaaactggtttccaaaagtacaatttcaagaacaaactataaacaatattgctctaacatgtccattttcacctagaccaaacacctatgaatttttacaatgtttctgtaaatatacattttactttaaatggggaggttgtcctaaagtactacaaaaagctattgatccctgttcacagtctaaatggaccactcccgataacctcgaacaccgaattcaaatctgcgatcctaacaccgcaccacaaacagaactttactcttgggactgggactcagactttgttaaacaaaaaagtatcgaaagaatacaagagtatacaacaattgatgaaaatgtattccaacctacagaatcaaaatggtcagcaaaagcactcaaactccaagagaaagagacatccgaagaaaaagaggaggagaaactattcctcaagctccaccaactcagaaagcaacgactccacctcgaactcaagtgccgactcaaactaatggaattaaaatcaaaaattcaaacataaaagtaaagctgtttccagaaaccaagccaaaaaacagaagaatgacaccatgggaaaaacaagaagaaaaagaaatagcagctatctttttaagacctcaaagagattatatatttgacatgcctacctatcctatatttcctccaacacctaaaattccaaaagttaactttgatctaatgtttaaagaataaaattttcaaggccaacaatatacacttagtggtgtccatttatttaagttaaacttatataaacatccaccgcctccctaaaattcgggcgccaaaattcaaagggggctccgcccccttacacccccaagggggcggggctccgcccccttacacccccaagggggctccgcccccttacacccccttattaatattcaacaggaaaaccacctaatttaaattgccgaccacaaaccgtctttaacttccctttttacacttacttccttttttaccacttattattcattacattaattaataatcaccgtaattccggggaggagcttactacctatataactaactacacttccgaatggctgagtttatgccgccagacggagacgggatcactttagtgactccaggctgatcttggg

SEQ ID NO: 2281 - protein, 679 aa, Betatorquevirus sp.; identical to SEQ ID NO: 1551

SEQ ID NO: 2282 - protein, 108 aa, Betatorquevirus sp.; identical to SEQ ID NO: 1552

SEQ ID NO: 2283 - protein, 118 aa, Betatorquevirus sp.; identical to SEQ ID NO: 1553

SEQ ID NO: 2284 - DNA, 2944 bp, Betatorquevirus sp.
cgggagccgtaggtgagtgaaaccaccgaagtctaggggcaattcgggctagatcagtctggcggaacgggcaagaaatttaaaactatttttattttacagtatgaacttctacaaagaaccagtttatggtccaaaaaggcaagaattaaactggctaaatggctgtattatagctcatgacaacttttgcggctgcaacactccaactgaacatctcctctacattctcgcttccaagagtggatacttaattgttaaaaaccaacaaaaatgccttacttctggaacagaagaaactactggaaaagaagacgactttggcttagaagacggagagctcgagcggctattcgcagaagatacagacaaagaagatactgggtaagacattttaaaaactttcctaaaactttaagactaagacaatggaatccaaaagtacaaaaaagatgttatataaaaggactaataccgttatttttatgcggaaaagacagacaaatatttaactatatacaatataaagaatctatggtaccagaaagtcaatcgggaggaggcggatggtctctaatggtgtttaacttaggaggactatatgacgaatttaaaaaactaaataactggtggacagctgacaatgacggactacctttagtaaaatataaaggatgcgaatttaaattttaccaatcatgggactgtgactatatagtaaattataaaacatgcccaccaatgacagacacagaactacaacacttagattcacaccctagcagaatgctaatgaacaaaagagcaattgtagtacctaacataataagaaaatcaaacaaacgaagaaaatataaaaaaattaaattcccaccaccatctctattaaagaaccaatggttttttcaacaagacctatgcaactataacttactaatgctaacaacatccagttgctccttagaccaaatgtacctaccaaataatgaactttctaacaacataactttaatttctttaaacacaaacatatttcacgatgtaaactttttaatagacggaacaacaggatactcccccaaacctaactttcatttatggggagaaccaacaccatacacaggaacacaacctgcaacaaacgctaaaggacttatatatttaggaaacttaaaaacatacaactatggtacacaaatgaatagctacgaagactttcaaaaacaagaaaactggggaaacccattccactcactacatggacacgcagacacacatatatactatagccaaacattaccaactagcagcacaagccttgacaaagtaaaagtaacaatagcagaagaattattcacaaaatgcagatacaatccactaaaagacacaggagaaggcaatgaagtatactttaaaagcataacaatatcaagaggatatatatacgacccgccaacagacccacaagtacaaatacatggttatcctttatggctaattatgtggggctggacagactggcaagaaaagcttcatgctattaatcaaatacaactaaactatgtactaattgtaaaatctaaatttataacacctacaagagcagcatacttatttttagatgacttcttcacaaaccctcaaataacacaaatgacagacaatgacacaaaacactggcaccctagatttaaataccaactaaaatcaacaaatttaataggcacaacaggacccgcaagccctagagtaaacaaaagtagcagcatacaagctcatgcattttataaatttcagtttatatggggaggatgcccagcaccaatgcacaacatcaaagacccctgcaaccagtccaagttccccgtgcccaattaccagctacaagcagtacaagcaacgcatccagcaaaagaccccaaagaaatgctccacgactgcgacgaaagacgacaaacacttacaaaaaaatgtatcaaaagacttatgtcaatttctgaaactccaaaaactttacttccaggaacaaatgcattcaacccacaaatccaacaagaaacgacatcagaggaaagctcctcggaagaagagaaagagacaaacatcagagagcaactcctccatatccgaaaacagcaccgaaagctcaagcgaaacctcaacagactaaagctataccaattgtaaaaactgtagacctttttccaaaacaaaaacctataaaactaagtccctacgataaagtgggatgggaaactgaactacaatgctgtaaattgtttggtagacccatgagacaatatttaactgatactccattttactatgacttaaaaccagaacccattgtaaactttaaccttaattttactttctaggcctgcattaatacacttaacaagcatgtttaataaagtttcaacttaaataaacagactccgcctccctaaatcgccggcgtagggggctccgccccctacaacccccgggggggggcaaagcccccccccaccccccccccacaaacccactaaaacgggaactaacacaactaaaccacaaaatttgcattgcctacaagagcagcatacttatttttagatgacttctccacaaacccactaaaacgggaactaacacaactaaaccacaaaatttgcattgccaaccacaaactgacaggaaaaccacaaaatttgcattgccgaccacaaactgacaggaaaaccactaaatttgcattgccgaccacaaactgtcactaacttcctcatacactaactacttccttaaaaactacttattattcattacattaattattaaacactgtaattccggggaggagactattaactatataagtaactaacatgacgaatggctgagtttatactgccagacggagtcggcatcacttcagtgactgcagactgatcttggg

SEQ ID NO: 2285 - protein, 637 aa, Betatorquevirus sp.
MPYFWNRRNYWKRRRLWLRRRRARAAIRRRYRQRRYWVRHFKNFPKTLRLRQWNPKVQKRCYIKGLIPLFLCGKDRQIFNYIQYKESMVPESQSGGGGWSLMVFNLGGLYDEFKKLNNWWTADNDGLPLVKYKGCEFKFYQSWDCDYIVNYKTCPPMTDTELQHLDSHPSRMLMNKRAIVVPNIIRKSNKRRKYKKIKFPPPSLLKNQWFFQQDLCNYNLLMLTTSSCSLDQMYLPNNELSNNITLISLNTNIFHDVNFLIDGTTGYSPKPNFHLWGEPTPYTGTQPATNAKGLIYLGNLKTYNYGTQMNSYEDFQKQENWGNPFHSLHGHADTHIYYSQTLPTSSTSLDKVKVTIAEELFTKCRYNPLKDTGEGNEVYFKSITISRGYIYDPPTDPQVQIHGYPLWLIMWGWTDWQEKLHAINQIQLNYVLIVKSKFITPTRAAYLFLDDFFTNPQITQMTDNDTKHWHPRFKYQLKSTNLIGTTGPASPRVNKSSSIQAHAFYKFQFIWGGCPAPMHNIKDPCNQSKFPVPNYQLQAVQATHPAKDPKEMLHDCDERRQTLTKKCIKRLMSISETPKTLLPGTNAFNPQIQQETTSEESSSEEEKETNIREQLLHIRKQHRKLKRNLNRLKLYQL

SEQ ID NO: 2286 - protein, 109 aa, Betatorquevirus sp.
LAERARNLKLFLFYSMNFYKEPVYGPKRQELNWLNGCIIAHDNFCGCNTPTEHLLYILASKSGYLIVKNQQKCLTSGTEETTGKEDDFGLEDGELERLFAEDTDKEDTG

SEQ ID NO: 2287 - DNA, 2944 bp, Betatorquevirus sp.
cgggagccgaaggtgagtgaaaccaccgtagtctaggggcaattgccgaaggtgagtgaaaccaccgtagtctaggggcaattcgggctagttcagtctggcggaacgggcaagaaacttaaaatgttatattttacagatgagcaaatttatgacaccaccactatacacatctaaaggcttggaaaatcaactaaaaaatattggatttcaagcacacgaccttgtttgtggctgctcaaaaccatcagaacacctggaatacatattttctacaacatgccaccgtacagaagaagactattctaccaaaactactggagaccaagacgccgtagacggcctttcacctggagaactcgaaaaactcttttcagaagacgccaccgaagacgacagcgggtaaggagacgccgccgaccaaaaattaaaagaaaactaagacatttaaaacttgtacaatggcaacctgtaagaattagaaactgtagaatacaagggatgtttcctttatttcaagcaggttggggacgctatagtaacaattttgaaatgtacaaaaattcatatgtacctgaataccaacctggaggcggaggatggtcaatatttcaattatccttaaactcattatatgaacaacaccaacaactaatgaactggtggacaaaatctaataatgattataacttagtaagatatactaaattaaaacttaaattttacagacaacacaacacagactatgtagtatcatatcaaacccaatatccttttgaaataggtaaatttcaccatgctagctcacatccacaaagattactaatgtataatcacaaagtaattgtacccagttattcaaccctccccaactggaaaagagactatataaaaaaaactataagacctccaaagcaatttttaaacaaatggtattttcaaagcaaattttgccgctttccactaataatgattaactcagcagcctgttcattaaaagaatactttatttcagaccgttcagaaagtaacaacattagcctgttttcaattaacacagatgtatttacacacaaaaactttagagatgttaattatgaacaccatcagtttggatacattgccaattcttcctattatatgtatggaacagttaatggaacaacagaaggtcaaaaacctaaacgaggagaattaatttacttaggagacaccacccgtaatatgccaggtgaacccattaataaactaaactttggaggcacaacatacacaaacacaaaatggggaaacccattttggaaagaatacatcaataaaaactcaaaaacctggataagtacagtacaacccctagaagtatttaaaaaagaatcagacagacaatcaatagcagacaatataacagaaatgacaaaagatattataatacactgtagatataaccctaacatagacacaggccaaggtaatgtagcaaaatggcttaatactaatcttttacaaaatggctgggaaacagaagcaggcccagactttactatacaaggctttccgctatggatattattatggggctgggaagactggacaagaaaactaggcagactaaacaatttagacacagagtacgtacttgtaattcacagtccatttattgttccaaaattaaaggcctatgtatttatgtcacaaagttggtgtactggtcaaggaccatacaatcaaccacacgaagaaatatcacaatacaatagacttaattggcaaccttcatggcaataccaaaaagaggctatagaggatctattaatgtgtgggccagctgtacccagaaatcatggacaaatacaagctcatgtacactattcctttttttttaagtggggaggacaaccaaactacaccgaaaaaattgctgatccatgctcaaaacaagactgggccctccccaataacatccttgaagaatctgaaatctcaaatccaaacaatgacccaacaaaagaaatctactcctttgacattagacgaaacctccttacacaggcagctacagagagacttaaacaagactcagaaactgaatattctttgttcacagatggagagcaaacttcaacaacagtaccgctacaaacgcagtacaaaaagaaaaagaaaacacagacaaagaaagaaaagctccaaacattacagctccacatcaagcagctccaacaacaccgccagcagctcagacaccgataccaccaactaaccaaacatcttataaatacaaaatatataagagccgaatcagagtaagcatgtttccaccagaaaaaccaaaaaatagacgctttaacccttatgaattagaagatgaaattgtaacagctaaacactggcatagacctgtaaaatcttatgtatatgatccacctttttacccatggtgtgtaccagaacctgttgtaaattttcacttaaaatacaatgaataaaggcctgcagtaattcactctcggtgtccatttatataagttttaaccttaataaacatccatgtcctccctaatacgcaggcgcacaagggggctccgcccccttacacccccaagggggcaccgcccccttacacccccagggggctccgcccccttacacccccaagggggctctgcccccttaaaccccagggggctccgcccccttacaccccctaattaatattcaacaggaaaaccacttaattagaattgccgaccacaaaccgtcacttacttctgctttttacaacaacttctccttttactaattattattcattacattaattaatactcaccgtaattccggggaggagcctactatctatattaccaactacacttccgaatggctgagtttatgccgccagacgaagacgggatcacttcagtgactccaggctgaacttggg

SEQ ID NO: 2288 - protein, 692 aa, Betatorquevirus sp.
LWLLKTIRTPGIHIFYNMPPYRRRLFYQNYWRPRRRRRPFTWRTRKTLFRRRHRRRQRVRRRRRPKIKRKLRHLKLVQWQPVRIRNCRIQGMFPLFQAGWGRYSNNFEMYKNSYVPEYQPGGGGWSIFQLSLNSLYEQHQQLMNWWTKSNNDYNLVRYTKLKLKFYRQHNTDYVVSYQTQYPFEIGKFHHASSHPQRLLMYNHKVIVPSYSTLPNWKRDYIKKTIRPPKQFLNKWYFQSKFCRFPLIMINSAACSLKEYFISDRSESNNISLFSINTDVFTHKNFRDVNYEHHQFGYIANSSYYMYGTVNGTTEGQKPKRGELIYLGDTTRNMPGEPINKLNFGGTTYTNTKWGNPFWKEYINKNSKTWISTVQPLEVFKKESDRQSIADNITEMTKDIIIHCRYNPNIDTGQGNVAKWLNTNLLQNGWETEAGPDFTIQGFPLWILLWGWEDWTRKLGRLNNLDTEYVLVIHSPFIVPKLKAYVFMSQSWCTGQGPYNQPHEEISQYNRLNWQPSWQYQKEAIEDLLMCGPAVPRNHGQIQAHVHYSFFFKWGGQPNYTEKIADPCSKQDWALPNNILEESEISNPNNDPTKEIYSFDIRRNLLTQAATERLKQDSETEYSLFTDGEQTSTTVPLQTQYKKKKKTQTKKEKLQTLQLHIKQLQQHRQQLRHRYHQLTKHLINTKYIRAESE

SEQ ID NO: 2289 - protein, 102 aa, Betatorquevirus sp.
LAERARNLKCYILQMSKFMTPPLYTSKGLENQLKNIGFQAHDLVCGCSKPSEHLEYIFSTTCHRTEEDYSTKTTGDQDAVDGLSPGELEKLFSEDATEDDSG

SEQ ID NO: 2290 - protein, 58 aa, Betatorquevirus sp.
MFPPEKPKNRRFNPYELEDEIVTAKHWHRPVKSYVYDPPFYPWCVPEPVVNFHLKYNE

SEQ ID NO: 2291 - DNA, 2944 bp, Betatorquevirus sp.
cgggtgccgaaggtgagtaacaccaccgaagtcaaggggcaattcgggctaggtcagtctggcggaacgggcaagaaacttaaaatattaggggcaattcgggctaggtcagtctggcggaacgggcaagaaacttaaaatattttattttacagatatgagccaccgctttattcaaccaaaaccatctctcagacaaacaaaactaaaatggatgaacaccatcgcacaatgccatgacaacttctgcgactgcttcgatcctataacccacacagcagcattaatttttgaacaagaaaaggatttaaaatttacaacaccagaattggatataattaaacaatgtatttctggagaaactaccgccgccgctactacaggccaagaactcgacgttattggagaaggagaactagaagatttgtttcgagaagatactggagaagaaaaaagtacagggtaagaaaaagaaaacttaaaactctaagactaaaacaatggcaaccgcattatatcaaaaaacttaaaattaaaggagaatatcctatttttataacaacttctcaaagactatcaaacaacttaatttgctacttagaaagcattgcgccttgggactggccgggaggagggggcttcagcattgctaactttacctttgaaatgctttataaagaaaacttaactgctagcaattactggactataacaaatgataatatgccattatttagatatttaggatgctacataacattatttacacaaccagaagtagactacttattttactggaataacacacctcctatgaaagcaacaaaactaacatacatgtcaacacaaccagcaattatgctacaattaaaacatgtaaaagtaatgaaatgtagaaaaacaaacagaaaaaaaccatataaaagaatatatgtaccaccaccaactcaaatgcagaacaaatggtacttacaacatgacctagctaacgtaccactattacaaacaattgcaacagtatgttcgttagaccgcaaatacctacacgcaaatgcaaaatccactactataagcttctattcaattaacacagaagaaattcaaaatcattatttttcaataacacaaggaacacaaggctataacccaaaaaacaatgtaaaactatttctctgccaagaaccaccaaacaaatacagccttacagagatacaaatcggaacattatcatttttaggacaagtagacactcaaacaccaggagtaaaaataaaagacataaacgatgtaaacttttccacaaaactacaaaaagcactaactaatccaggcctacaaggaaacccattctacaaagaatgcctagattcagactcctacatagttaaaacaacagcagacttacaaacattacaaacacaatacaccaatgcagaaataaaattaaaaacacaacatttttcctgggcaggacacttattaaaagaaataagatataacccatttaaagataaaggaattggaaacaaagtatacttagtaaacatactacaacaagaccactcgcacacatgggacgcacccctagacgatgatatagtatggaaagaccttccactatacaatttaacatggggatacctagattttcaaagaaaatgcggcctaaacacagcaatagacacaaacaaatgccttgtaatatacacaccatatgtagaacctcaactaacaacaaaaatatacgtaccagtagataaaaaatttacagaaggcctaagcccatatgcaaatatgacatatccatcagaccacaataactggcacccaaaagtaagataccaagtagacacagcaaacttaattgcatctacaggacccaacacagtaaaactaccagacaatgtaagctgtgaaggtcatataaaatataattttcgctttaaacttggtggagaaccagctcctatgtcaattcttgtggatccacaggaacaaccaactcataccttccccaataacatcctacaaaaaacttcgttacagaatccagcacaacccattgaacacctactctggaaatttgatgaaaggagaggaatgcttacaaaaaaagctgcacagagaatcaaaacacacacagaaactgaaaaagatattctttcaattacagaaccaacaacaacctgcccaatatggaccacgaaagaaacaccgacaacggactcatcgacagaggaagaagaggaaacaccgctcgagacacaactcctccacgagcgaagaaagcaaagactcctccgacagcgaatcaacaagctactcaacagattaacaccattagaatagaaaaatgtaaaataaatgtaaagcttttcaatgatgatgaaccaaaaaaccgtagaatgacagcatgggaaagggaacaagaaatagctgacgccgctatgtggggcagaacacctagatggtttatatttgataaacatttttaccctgatgtaccccccgtacctaaatacactgtaaactttgatttaaatgcgccgcaataaaacaaggccagcaaatattcactctcggtgtccatttatataagaattaacttaaataaacatccaccactctccctaatacgcaggcctagaagggggctccgcccccttacacccccagggggggcaagcccccccctataaccccccctaataaatattcaacaggaaaaccacatcatttacatggctaaccacaaactgtcacttacttcctcatttacactcacttcctctttcactcattattattcattacattaattattaaacaccgtaattccggggaggagactaaaacctatataactaactacacttccgaatggctgagtttatgccgccagccgtagaccggatcactttagtgactacgggctgaccttggg

SEQ ID NO: 2292 - protein, 667 aa, Betatorquevirus sp.
MYFWRNYRRRYYRPRTRRYWRRRTRRFVSRRYWRRKKYRVRKRKLKTLRLKQWQPHYIKKLKIKGEYPIFITTSQRLSNNLICYLESIAPWDWPGGGGFSIANFTFEMLYKENLTASNYWTITNDNMPLFRYLGCYITLFTQPEVDYLFYWNNTPPMKATKLTYMSTQPAIMLQLKHVKVMKCRKTNRKKPYKRIYVPPPTQMQNKWYLQHDLANVPLLQTIATVCSLDRKYLHANAKSTTISFYSINTEEIQNHYFSITQGTQGYNPKNNVKLFLCQEPPNKYSLTEIQIGTLSFLGQVDTQTPGVKIKDINDVNFSTKLQKALTNPGLQGNPFYKECLDSDSYIVKTTADLQTLQTQYTNAEIKLKTQHFSWAGHLLKEIRYNPFKDKGIGNKVYLVNILQQDHSHTWDAPLDDDIVWKDLPLYNLTWGYLDFQRKCGLNTAIDTNKCLVIYTPYVEPQLTTKIYVPVDKKFTEGLSPYANMTYPSDHNNWHPKVRYQVDTANLIASTGPNTVKLPDNVSCEGHIKYNFRFKLGGEPAPMSILVDPQEQPTHTFPNNILQKTSLQNPAQPIEHLLWKFDERRGMLTKKAAQRIKTHTETEKDILSITEPTTTCPIWTTKETPTTDSSTEEEEETPLETQLLHERRKQRLLRQRINKLLNRLTPLE

SEQ ID NO: 2293 - protein, 102 aa, Betatorquevirus sp.
MSHRFIQPKPSLRQTKLKWMNTIAQCHDNFCDCFDPITHTAALIFEQEKDLKFTTPELDIIKQCISGETTAAATTGQELDVIGEGELEDLFREDTGEEKSTG

SEQ ID NO: 2294 - protein, 122 aa, Betatorquevirus sp.
LPNMDHERNTDNGLIDRGRRGNTARDTTPPRAKKAKTPPTANQQATQQINTIRIEKCKINVKLFNDDEPKNRRMTAWEREQEIADAAMWGRTPRWFIFDKHFYPDVPPVPKYTVNFDLNAPQ

SEQ ID NO: 2295 - DNA, 2943 bp, Alphatorquevirus sp.
actctgccggaggtgagtttacacaccgcagtcaaggggcaattcgggctcgggactggtcgggctatgggcaaggctcttaaaaaagcatgtttctcggtaaaatttacagaaagaaaaggaaagtgccactgtacggcctgccaactccaaagaaaaaaccacctactgctatgagccactggagcagacccgtccaccatgcaacggggatcgaacacctctggtaccagtctgttattaacagccattctgctagctgcggttgtggcgatcctgtacaccactttacttctcttgctcagaggtatggctttgccccaactccccgcgccccgccagtagccccaacgcccaccatccgtagagccaggcccgcgcctgccgctccggagccccgtgccctgccatggcatggggatggtggagaagaaggcgcaagtggtggtggaggcgccggttcgcccgaggcagacttcgcagacgacggattagacgccctcgtcgccgcactcgacgaagaacagtaaggaggcgcagacaatggaggagggggcgacccagacgcagactgtttaagcgaaagagacgctttaaaagacgcagacgaaaagctaagataaaaataacccagtggcagcctagctctgtaaaaagagcctttgtaataggctactttccaatggtaatatgtggtccaggaaggtggtcagagaactttaccagccacatagaggacaaggtagccataggaccctttgggggaggacacagcaccagcagatggtccctcaaagtactgtacgaagaattccagaagcaccacaacttctggacccaaagcaacaaagaactagaactagtaagatactttggcagcacgtggagattctatagacacgaagacgtagactatatagtttactacagcagaaagagtcccctaggaggaaacatactaacagcacccagcctgcaccccggagcagccatgttgagcaaacacaaaataatagtacctagctttaaaaccagaccaggaggcaaaccctccataaaagttaaagtaaagcccccaactacactaatagataagtggtactttcaacatgacatttgtgacactacactactaaacatgaacgttgtactatgcaacttgcggtttccgttctgctcaccacaaacgaacaacccttgtgtcaccttccaaatattgcatgaggtttaccacgacttcctctctataactgacagccggttacttagcacaaacgcagatgcatggaaaacgtactataaacaattcttaaatgctgtctttactacagagagatcagccaacaaactaaatacagcactaacagagggatcttttcacgccccgcaaatacaaaaagacaaaacagctttaggaaataactactttaaaactaaagacgcactatggggagacccaatattcttagcaggctcacaaccaacaggaaactcaacattagacaaactaaaagacaaaatagttgacaatgcaaacaactaccttcaaaaagtaaaacaagagttttcacaaaccactttagcaaccacaatgcacggcatgttcacacactggacaggcatgtacagcccagcctttttagactataacagaataagtccagaaattcccggtgtatacaaagacataatctataaccccctaacagacagaggcataggtaacgcagtatggatagactactgcagcaaaaaaggaacacagtacgaccccaaagccagcaaatgctacatagcagacctaccgctgtggatggcagtttttggtatagtagactggctaaaaaaagacactggaaactggggcatacctgcctggtccagaataattattaaatgcccctacacttacccgaaactactagacagcacagatgaatcaataggctttgtacccataggctacaactttgccagaggcagaatgcccgacggctcacactacatacccatacaaatgagacacaagtggtaccccaacctactaaatcaacaggcagtactagaagacttaagtgaaagcgggccctttgcctacagagagaaaacaaactctgccaacataaacgtaaaatacaaattcaggttccattttgggggcaaccctgtgtccgaacagattgttgcagacccatgcaaacaacccacctttgaaatgcccggaaccagtacactccctcctcgactacaagtcacggacccgaagctgctcggcccgcactacacattccacagctgggacaaaagacgtgactactatagcagacgaactattaaaagaatgtcagaacaacaagaaacttctgagtttttattctcaggcccaaaaaaacccagagtcgatctggacgcagtgcagcctgtcgaaaaagactcttcaccccaacaaagaaaacagagaccctgggaaacgagcgagagcgaggaagagacagaagccctctcggaagaagaagagacgggctcggtccaccagcagctcaagcagcagctcagggagcaaaagcagctcagacagggaatccagtgcctcttcgagcagctaataaaaacccagcagggagtccacctagatccttccctcttgtaggccccaggcagtggctgtttcccgaaagaaagccagcccctgcccctagctctggagactgggccacagagtacctagcagctagagtgtttgatagacccccaagaagcaaccttaaagatacaccctactacccctacataaaaaaccagtacaatgtgtattttgacctcacattcgaataaagtgcagcttcaaacttgcaaggccgtgggagtttcactggtcggtgtctacctctaaaggtcactaagcactccgagcgtcagcgaggagtgcgacccttccccctg

SEQ ID NO: 2296 - protein, 746 aa, Alphatorquevirus sp.
MAWGWWRRRRKWWWRRRFARGRLRRRRIRRPRRRTRRRTVRRRRQWRRGRPRRRLFKRKRRFKRRRRKAKIKITQWQPSSVKRAFVIGYFPMVICGPGRWSENFTSHIEDKVAIGPFGGGHSTSRWSLKVLYEEFQKHHNFWTQSNKELELVRYFGSTWRFYRHEDVDYIVYYSRKSPLGGNILTAPSLHPGAAMLSKHKIIVPSFKTRPGGKPSIKVKVKPPTTLIDKWYFQHDICDTTLLNMNVVLCNLRFPFCSPQTNNPCVTFQILHEVYHDFLSITDSRLLSTNADAWKTYYKQFLNAVFTTERSANKLNTALTEGSFHAPQIQKDKTALGNNYFKTKDALWGDPIFLAGSQPTGNSTLDKLKDKIVDNANNYLQKVKQEFSQTTLATTMHGMFTHWTGMYSPAFLDYNRISPEIPGVYKDIIYNPLTDRGIGNAVWIDYCSKKGTQYDPKASKCYIADLPLWMAVFGIVDWLKKDTGNWGIPAWSRIIIKCPYTYPKLLDSTDESIGFVPIGYNFARGRMPDGSHYIPIQMRHKWYPNLLNQQAVLEDLSESGPFAYREKTNSANINVKYKFRFHFGGNPVSEQIVADPCKQPTFEMPGTSTLPPRLQVTDPKLLGPHYTFHSWDKRRDYYSRRTIKRMSEQQETSEFLFSGPKKPRVDLDAVQPVEKDSSPQQRKQRPWETSESEEETEALSEEEETGSVHQQLKQQLREQKQLRQGIQCLFEQLIKTQQGVHLDPSLL

SEQ ID NO: 2297 - protein, 146 aa, Alphatorquevirus sp.; identical to SEQ ID NO: 1797

SEQ ID NO: 2298 - protein, 123 aa, Alphatorquevirus sp.; identical to SEQ ID NO: 1798

SEQ ID NO: 2299 - DNA, 2943 bp, Betatorquevirus sp.
cgggagccgtaggtgagtgaaaccaccgaagtctaggggcaattcgggctagatcagtctggcggaacgggcaagaaatttaaaactatttttattttacagtatgaacttctacaaagaaccagtttatggtccaaaaaggcaagaattaaactggctaaatggctgtattatagctcatgacaacttttgcggctgcaacactccaactgaacatctcctctacattctcgcttccaagagtggatacttaattgttaaaaaccaacaaaaatgccttacttctggaacagaagaaactactggaaaagaagacgactttggcttagaagacggagagctcgagcggctattcgcagaagatacagacaaagaagatactgggtaagacattttaaaaactttcctaaaactttaagactaagacaatggaatccaaaagtacaaaaaagatgttatataaaaggactaataccgttatttttatgcggaaaagacagacaaatatttaactatatacaatataaagaatctatggtaccagaaagtcaatcgggaggaggcggatggtctctaatggtgtttaacttaggaggactatatgacgaatttaaaaaactaaataactggtggacagctgacaatgacggactacctttagtaaaatataaaggatgcgaatttaaattttaccaatcatgggactgtgactatatagtaaattataaaacatgcccaccaatgacagacacagaactacaacacttagattcacaccctagcagaatgctaatgaacaaaagagcaattgtagtacctaacataataagaaaatcaaacaaacgaagaaaatataaaaaaattaaattcccaccaccatctctattaaagaaccaatggttttttcaacaagacctatgcaactataacttactaatgctaacaacatccagttgctccttagaccaaatgtacctaccaaataatgaactttctaacaacataactttaatttctttaaacacaaacatatttcacgatgtaaactttttaatagacggaacaacaggatactcccccaaacctaactttcatttatggggagaaccaacaccatacacaggaacacaccctgcaacaaccgctaaaggacttatatatttaggaaacataaaaacatacaactatggtaaacaaataaatagctacgaagattttcaaaaccaacaaaactggggaaacccattccactcactacatggacacgcagacacacatatatactatagccaaacattaccaactagcagcacaagccttgacaaagtaaaagtaacaatagcagaagaattattcacaaaatgcagatacaatccactaaaagacacaggagaaggcaatgaagtatactttaaaagcataacaatatcaagaggatatatatacgacccgccaacagacccacaagtacaaatacatggttatcctttatggctaattatgtggggctggacagactggcaagaaaagcttcatgctattaatcaaatacaactaaactatgtactaattgtaaaatctaaatttataacacctacaagagcagcatacttatttttagatgacttcttcacaaaccctcaaataacacaaatgacagacaatgacacaaaacactggcaccctagatttaaataccaactaaaatcaacaaatttaataggcacaacaggacccgcaagccctagagtaaacaaaagtagcagcatacaagctcatgcattttataaatttcagtttatatggggaggatgcccagcaccaatgcacaacatcaaagacccctgcaaccagtccaagttccccgtgcccaattaccagctacaagcagtacaagcaacgcatccagcaaaagaccccaaagaaatgctccacgactgcgacgaaagacgacaaacacttacaaaaaaatgtatcaaaagacttatgtcaatttctgaaactccaaaaactttacttccaggaacaaatgcattcaacccacaaatccaacaagaaacgacatcagaggaaagctcctcggaagaagagaaagagacaaacatcagagagcaactcctccatatccgaaaacagcaccgaaagctcaagcgaaacctcaacagactaaagctataccaattgtaaaaactgtagacctttttccaaaacaaaaacctataaaactaagtccctacgataaagtgggatgggaaactgaactacaatgctgtaaattgtttggtagacccatgagacaatatttaactgatactccattttactatgacttaaaaccagaacccattgtaaactttaaccttaattttactttctaggcctgcattaatacacttaacaagcatgtttaataaagtttcaacttaaataaacagactccgcctccctaaatcgccggcgtagggggctccgccccctacaacccccggggggggcaaagcccccccccacccccccccacaaacccactaaaacgggaactaacacaactaaaccacaaaatttgcattgccctacaagagcagcatacttatttttagatgacttcttcacaaacccactaaaacgggaactaacacaactaaaccacaaaatttgcattgccaaccacaaactgacaggaaaaccacaaaatttgcattgccgaccacaaactgacaggaaaaccactaaatttgcattgccgaccacaaactgtcactaacttcctcatacactaactacttccttaaaaactacttattattcattacattaattattaaacactgtaattccggggaggagactattaactatataagtaactaacatgacgaatggctgagtttatactgccagacggagtcggcatcacttcagtgactgcagactgatcttggg

SEQ ID NO: 2300 - protein, 637 aa, Betatorquevirus sp.
MPYFWNRRNYWKRRRLWLRRRRARAAIRRRYRQRRYWVRHFKNFPKTLRLRQWNPKVQKRCYIKGLIPLFLCGKDRQIFNYIQYKESMVPESQSGGGGWSLMVFNLGGLYDEFKKLNNWWTADNDGLPLVKYKGCEFKFYQSWDCDYIVNYKTCPPMTDTELQHLDSHPSRMLMNKRAIVVPNIIRKSNKRRKYKKIKFPPPSLLKNQWFFQQDLCNYNLLMLTTSSCSLDQMYLPNNELSNNITLISLNTNIFHDVNFLIDGTTGYSPKPNFHLWGEPTPYTGTHPATTAKGLIYLGNIKTYNYGKQINSYEDFQNQQNWGNPFHSLHGHADTHIYYSQTLPTSSTSLDKVKVTIAEELFTKCRYNPLKDTGEGNEVYFKSITISRGYIYDPPTDPQVQIHGYPLWLIMWGWTDWQEKLHAINQIQLNYVLIVKSKFITPTRAAYLFLDDFFTNPQITQMTDNDTKHWHPRFKYQLKSTNLIGTTGPASPRVNKSSSIQAHAFYKFQFIWGGCPAPMHNIKDPCNQSKFPVPNYQLQAVQATHPAKDPKEMLHDCDERRQTLTKKCIKRLMSISETPKTLLPGTNAFNPQIQQETTSEESSSEEEKETNIREQLLHIRKQHRKLKRNLNRLKLYQL

SEQ ID NO: 2301 - protein, 109 aa, Betatorquevirus sp.; identical to SEQ ID NO: 2286

SEQ ID NO: 2302 - DNA, 2943 bp, Betatorquevirus sp.
cgggtgccgaaggtgagtgaaaccaccgtagtcaaggggcaatatgggcagaatcagtcttggcagaacgggcaagaaactaaaatatatttattttttagatatgacccatcgttatataccaactaattctacatatagacaaaaccaattaaaatggctgaatattttacaccatgttcacggttccttctgcgactgtcccaatggaatggcacacactaccgccttaatctttgaaaataatccggatttacaattctcaccacctgaaaaagatataataaaatcatgcctttctggagaaaatactggagacaaagatggagaaaaccatggcgtcgacggttttacaggagaagaactagagctccttttcaaagaaccagatggagaagacgccgccgcagaccggtaagaagaaaactaaaaactattaaactaaaacaatatcaaccgccttatattaaagtactaaaaataaaaggactctacccaataattttgggtacaagagaaagagtggccaacaacttaaactgttactttgaaagtactgcgccacactgggtaccgggagggggatgcttttcaatatgtaactttagcttaatgactttgtataaagaacatctagatgtaagaaactggtggacaactggtaatgaaaattatccacttataagatacttaggatgtgatattagactgtacagagaagaaaacatagactatctattttactataatagacagccacctatgacagcctcattaaccacataccaaagcacacaacctatggcaatgatgctaaataaacacacagtaaaaatctcatgtaaaaaaaatactaaaaacaaaaaaccatacaaaagattaagaataccaccacctacacaattacaaaacaagtggtattttcagtttgatattgcaaccacaccattactacaaacaatggcaacagcatgctcgtttgaccgcatgtttctaaacagtggagcaatatcaaccacaataggctttacaacacttgacacaaacggcttcttaaaccacaattatgacagaaccacaaggggctactcaccaagaccaggaacacttttattcaaaactaaaaatggttcctacgacatacaaaaaatacaaataggagaattaatcttcttaggagaaacacaagacttaacagacggtacacaactaaaatcaatacctgcagcacaaactgtaccacaaataagtaatcccactgactttcaaaaaagactttacaatgcaagcataaaacatgaacactggggaaatgtatttaaatcatccactttttatggagatgagagaatgatagaaacaaacatgacttgggataaaataataaacacgtataaagactcaactacaacactagacacagggtggacacttaaaaccactaaatggggagaatgcagatacaatccctatgcagatcatggaaaaggaaacatagtgtatttacttaaaataaactcaggactacaccccacagaatggggaccaccaacagacaaagacgtagttgcacaagacttaccactacacacacttttatggggatatttagactaccaaagaaaatgtcaagaatacagagacatagacacaacaacaattatagttttcaaaagcccttttattttaccaaaaacatacacattttattgcccactagaccaagactttttagatggaaacagcccctatagaccatcacaacacataattccatcagattaccagcattggcatccaaaagtaagattccaagtacaaacaataaataatatatgcttatcgggaccaggtactgtaaaactaccgcctcaagtttcctgtgaagctcacattgtatataattttcgctttaagattggagggcaaccagcaccaatgtcaaacctcaccaaaccagacgaacaaccaaaataccccatacccaataatctcctccaaacaccttcgttacagagtccaacaacgccatttacccagctcttgtggagctttgatgaacgcagaggggaactcactaaaaaagctacagacagaattacagactaccaaacacctgaaacatcttttttaccaattacagaaacaagcaactcatgccctacaaccctccaagtactcaaagaaacacaagagacgacatccgaggaagaagaagaaacatcgatccaggaacagctccacaaccagcgaagaaagcaaaaacagctcagacagcgaatcaacctcctcctccagcacctagcaaatttacaataaaagaaactgtaataaaagtaaaacttttccctgatccccctcaaaatcgcagaatgactgcaaaagaatatgaggacgaactatttgatgctaaatgctggttaagagtgcctagaactcatatatttgatagacctacttatccatgggtaccccaagattctaaatttactgtaaactttgaccttaacgcgccacaataaagctacgcctgcaaacttccacttgaggtgtccatttaatataaataaacttatataaacatccaccacactccctaatacgcaggcgcaaagggggctccgcccccttaaacccccagggggggcaaagccccccctacaacccgggctccgcccccttaaacccccaggggggggcaaagccccccctacaacccccctaataaatattcaacaggaaaaccacctaatttaaattgccgaccacaaacagccatatgcaaatttacttccccaaaaaatacaacacgcccactatttaattaataaacaacatcatagtaggcgttcccttcaaaactatataacaaacaacacttccgaatggctgagtttatgctgccagacggagcggagagaaaacctctacgctgattctggg

SEQ ID NO: 2303 - protein, 675 aa, Betatorquevirus sp.; identical to SEQ ID NO: 2274

SEQ ID NO: 2304 - protein, 124 aa, Betatorquevirus sp.; identical to SEQ ID NO: 1562

SEQ ID NO: 2305 - protein, 121 aa, Betatorquevirus sp.; identical to SEQ ID NO: 1563

SEQ ID NO: 2306 - DNA, 2942 bp, Alphatorquevirus sp.
acgccttcggctgcgccggacacctcagaccccaaggggcaattcgggctcgggactggccgggctatgggcaaggctcttaaaaagatgcgtttctctaatatcacccgcagaaagaaaaggaaactgtcactgctacctgtgcacccttcacagaaaacacctaccatgagctttgtagaacccttactgagcagcaaccacagagagatagcatactaccatggctgtattcagatgcacaaggccttctgtggctgcgacaactttcttacccacctgcagcgcataacaacatacatttctgctaaccaacacactccacccaccacaccctcaaacaccctccgtagagcccgggccctgcccgcggctccggagccaactccatggcgtggtcctggtggtggcagaggaggcgccgaaggtggccgtggagaaagagaaggtggagaagactacgcacaagaagacctagacgcactgttcgacgccgtcgcaagagatacagagtaaggagacggaggtggcggggaaggagacgtgggcgacgcacataccttagacgcagacttaaaaagagaaagagacgaaaaaaactaagactgactcagtggaaccctagcacaattaggggatgtacaattaaaggtatggcccccctaataatatgcggccacaccatggcaggcaataactttgccatccgaatggaagactacatatctcagataagaccgttcggagggtccttcagtaccaccacctggagcctaaaagtactgtgggacgaacacaccagattccacaacacctggagctacccaaacactcaactagatctagcaaggtttaaaggagtaaccttctacttctacagagacaaagacacagactttataataacttatagctccgtaccaccctttaagatagacaaatactcctcagccatgctacacccaggcatgcttatgcagagaaaaaagaagatattattacctagctttacaaccagaccaaggggcagaaaaaaagttaaagtacacataaaacctcctgtattatttgaagacaaatggtacacccagcaggacctgtgcgacgttaatcttttgtcacttgcggtttctgcggcttcctttagacatccgttctgcccaccacaaactgaaaacatttgcataaccttccaggttttgaaagacttctattacacacaaatgtcagttacaccagatactacaggccaaactaaagacttagctatattcgatcaacacttatttaaaaatccacaattttatcaaactgttcacacacagggaataattaacaaaacacaaagaactgctaaattttcaacctcaaataatacactagcaaataaaacagacataagccaatacttagagcaaccaacatcaacaaacataggaaaaacattatccacaggtaacaactcaatatatggctttgcatcatacaacccagatatacaaaaacttcacttaattcaagactggttttgggaacaagaaactaacgaaaacaatttagttaccggctcctatcaaatacctactaacaaatcagtaagctaccatctaggaaaatacagccccatattcttaagctcatttagaactaacctacaatttataactgcatacacagatattacatacaatccactaaatgacaaaggtaaaggaaaccatatttgggtacagtatgtaactaaaccagatacaatttttaatgaaagacaatgcaaatgccacatacaagacataccactatggtctgcatttcatggatacattgactttgtacaaagcgaactaggcatacaagaagaaatactaaacattgccattatagtagttatatgcccatacacaaaacctaaactactacacgacccaccaaatcaaatgcaaggctttgtattctatgacacacaatttggagatggtaaaatgccagagggcacaggcctagtacccatctactaccaaaacagatggtatcctagaataaagttccaaagtcaggtagtgcatgactttatactaacaggccccttcagctacaaagatgaccttaagagcacagtactaacagtagaatacaagttcaaattcttatggggtggcaatatgattcccgaacaggttatcagaaacccttgtaaaacagaaggacacgatctccctcacaccagtagactccatcgcgacttacaagttgttgacccacagaccgtgggcccccaatgggcgctccacacctgggactggcgacgtggactctttggttcagaggctatcaaaagagtgtctgaacaacaaatacatgatgaactgtattacccaccttcaaagaaacctcgattcctccctccaatatcaggcctccaagagcaagaaagagactacagttcggaggaggaaaaagaccactcctcctcagaagaggagacggacccaaagaaaaaagagcaaatacagcagcagcgactccacctccagttccaagagcagcagcgactcggacaccaactccgactcatcttcagagagctgcagaaaacccaagcgggtctccacataaatcctatgttatcaaaccgtctataaataaagtgtacctttttcctcccgaggggcctaaacccatctctggctacagagactgggaagaagaattcacgtgctgtaagtactgggatagacctagtagaattaaccacacagaccctcctttctacccctggatgcccaaatacaatgtaagcttcaaacttggctggaaataaaattgcaaggccgtgcactattcacttgtcggtgtctacctctataagtcactaagcactccgagcgtagcgaggagtgcgaccctcccccccggtagcaacttcttcggagtccggcgct

SEQ ID NO: 2307 - protein, 750 aa, Alphatorquevirus sp.
MAWSWWWQRRRRRWPWRKRRWRRLRTRRPRRTVRRRRKRYRVRRRRWRGRRRGRRTYLRRRLKKRKRRKKLRLTQWNPSTIRGCTIKGMAPLIICGHTMAGNNFAIRMEDYISQIRPFGGSFSTTTWSLKVLWDEHTRFHNTWSYPNTQLDLARFKGVTFYFYRDKDTDFIITYSSVPPFKIDKYSSAMLHPGMLMQRKKKILLPSFTTRPRGRKKVKVHIKPPVLFEDKWYTQQDLCDVNLLSLAVSAASFRHPFCPPQTENICITFQVLKDFYYTQMSVTPDTTGQTKDLAIFDQHLFKNPQFYQTVHTQGIINKTQRTAKFSTSNNTLANKTDISQYLEQPTSTNIGKTLSTGNNSIYGFASYNPDIQKLHLIQDWFWEQETNENNLVTGSYQIPTNKSVSYHLGKYSPIFLSSFRTNLQFITAYTDITYNPLNDKGKGNHIWVQYVTKPDTIFNERQCKCHIQDIPLWSAFHGYIDFVQSELGIQEEILNIAIIVVICPYTKPKLLHDPPNQMQGFVFYDTQFGDGKMPEGTGLVPIYYQNRWYPRIKFQSQVVHDFILTGPFSYKDDLKSTVLTVEYKFKFLWGGNMIPEQVIRNPCKTEGHDLPHTSRLHRDLQVVDPQTVGPQWALHTWDWRRGLFGSEAIKRVSEQQIHDELYYPPSKKPRFLPPISGLQEQERDYSSEEEKDHSSSEEETDPKKKEQIQQQRLHLQFQEQQRLGHQLRLIFRELQKTQAGLHINPMLSNRL

SEQ ID NO: 2308 - protein, 149 aa, Alphatorquevirus sp.
MGKALKKMRFSNITRRKKRKLSLLPVHPSQKTPTMSFVEPLLSSNHREIAYYHGCIQMHKAFCGCDNFLTHLQRITTYISANQHTPPTTPSNTLRRARALPAAPEPTPWRGPGGGRGGAEGGRGEREGGEDYAQEDLDALFDAVARDTE

SEQ ID NO: 2309 - DNA, 2942 bp, Alphatorquevirus sp.
gacgcctcggaccccccctcgaacaccgcagtctaggggcaattcgggcacgggtctggccgggctatgggcaagattcttaaaaaattcccccgctccattgtccgccaggacatcaaaacatgccgtggagaccgccggcgcacgatatcccgggccgagaaagccagttctttgcagcaacttttcacatgcatgcttctttttgcggctgtggcgactttcttggtcatctcactagcatctctgctcgctttcctgctgccggaccccccccctccgccaggccttagaccacccagacccccagcacctgccggtcccgggggtcccccgggccactttccagccctaccggctccgccagcggagcctgacaacccggcaccacgccgtggtggtggggaagatggcgccgccgctggcgcccaagacgcaggcgatggacaaccagacgcctacgccgccgaggacctagaagaacttttccgcgccgccgccgaagacgatatgtaagtaggcgatggcgccgacggtacaggcgcagacggaccagggggcgacgcagacgcagacacagacgaaaacataagcccactctcgtactaagacagtggcaaccagacgttgttaagacctgcttcattacagggtggatgccactcattatctgtggctccggacagacgcagtttaattttatcactcacatggacgacatcaccccccgaggagcaagctacgggggcaattttaccaatgttacatggagcctagagggcctctgggaacagttccagtaccacagaaacaggtggtccgccagcaaccacgacctagacctagccagatacctattcaccaccctaaaactatacagacacgaaaatgtagactacatatttagctacactagaacaggccccttcgagatcagtcacctcagccatctcagcacacaccctctactcatgctcctcagcaaacaccacatagtagtgcccagcctgaagacaaaacccagaggcaaaaggtacaaaaaagttagaattaagcccccaaaactcatgctaaacaaatggtactttacaaaggacatctgtgacatgggcctttttcagttctgggccacagcctgtaacctagaaaatccctggctcagatcaggcacagtaagcccctgcataggcattaatgtcctctcaaactctatatactcagatctcagcaatttaccaagtcacaaagaacaaagagcagctatacaaaataacatgcacccatcaactctcaaagacaacaaaggacagtggcagtacacatacacaagactaatgtcaaaatactactacaaaggcaatacaaacagcacatatgactggcaaaattacagcaacgatacaaactattcaaaaacatatgaccaatggtcaagtgaaaaacaagcaaggctagaaaaaattaaaaaagagttccaagctgtgtatccacagctacctacacaggcaccatcagactccacactattacaagactttggtatatatagccccttctaccttactcccaccagaataagcctagactggaaaacaccctacatacacgccaggtacaaccccctaacagacaaaggcataggcaacagaatatacctacagtggtgctcagaggccagctgtgaatacagccccacaaaaagcaaatgcacactggtagacatgccactgtttataatgttctatggctacatagactggtgcataaaatgcacaggggtctccagcctagtaaaagacgccagagtaatggtcaggtgtccctacacagagccacagctagtaggtgcaaacgaaaacgtaggctactgcctaatcagcaacaccttcatgaacggagacatgcccgttcttgctccatacatccccatttcctggttcgttaagtggtaccccatgcttgcacaccaaaaggaagccatagaggatattgtgggctgcggaccgtttatggtcagagaccaggaagccaagagttgggacataaccatgggttacagatcctgctttaaatggggcgggtcgcctctgcctctacaggccatcgacgacccctgccagaagcccacccacgcagttcccgatcccgatagacaccctcgcttactacaagtctcagacccgacaaaactcggaccgaaaacactgttccacaagtgggacatgcgacgaggacagtttagcaaaagaagtattgaaagaatgtcagaatactcagaacatgatgaattttttgaaacaggcattataccaaaaaagaaaaaattcgacactcccgcgggaggactccaaggcgaggaaagaagaggctacactttactccaagccctccaggacagccaagaagaaacatcagaagaagaacaagcaccccaaagcaaagaggagacgcaggagaaactcctccagcagctccagctccagaaacaccaccagcgactcctctcaaagggagtcagactcctcctcggagacgttctccgactccggaggggagtccacttcgaccccctccttacatagagccgcctccaataataacagacctgctttttcccaatactggtaaaaaaaaaaaattctccaagttcgactgggaaacggaggcggagctagggcagatattcaagcggcccatgcgcttctatccctcagaccaccctttctacccgtgggtaccccccaagcgagatatccccaaagtatgtaaagtaaactttcaaataaagcttgcagagtgagtaactcgaggccctcctctgttcacttagcggtgtctacctcttaaggtcaccaagcactccgagcgccagcgaggagtgcgaccctctaccctggggcaacttcctcggggtccggcgctacgcgcttcgcgctgcgccg

SEQ ID NO: 2310 - protein, 641 aa, Alphatorquevirus sp.; identical to SEQ ID NO: 2092

SEQ ID NO: 2311 - DNA, 2941 bp, Betatorquevirus sp.
cgggtgctgaaggtgagtgaaaccaccgaaatcaaggggcttaatgggcaaagtcagtcttggcagaacgggcaactaacttaaattatattacagaaatgagttggagcaagccacaatatggaccccgtggacaagaactaaactggatgcaaagctgtatacagagccataatgctttttgtggatgcaacgacccagtatctcacctaattaaaacagctcttctacatggcggagtactagaattcaacaaaaaaaagcttaaacaactatgccacgatactacagaaactactactcaagatggagaagatacagacgaccatactactggcccagaaggagacctcgatttcggagacctcgacaaacttttcgaagaagaagacccctttggagaaaaagattccgggtaagaaaaagactttacagaaaaaagaaactgaaatacttttttataaaacaatttcaacctaaaaaaatcagaaaatgtaaaatcaaaggtataataagcctatttgaatgtggaccacatagacttaatagagaatggactaattttatgaactccttttatcctccaaactcagagggtggcggaggatggtctcaaatgcaatttaccttagaaagcttatatgaacaatttgaactactaagaaacaaatggactgctagcaatgttttaatgccgcttgttagatatactggttgttgtttaaaattttatagaagtaataatgttgattatattgcacattatacactatgttatcctatgaaaacaacaaaacaccaacacacaaatgcacaaccaagtaacatgctattatatcccaaaaagatattagtaccttcactaaaaagaaaacctaaaggtaaactttttataaaaaaaaagataagactaccagaacaatttgaaaacaaatggtactttcaaagtgatttatacaaaacaccattactactattaacaacaacagcatcagattttgacagatggtttttaaacccacaatccatcagtaataatataacgataataacacttaacacagactttatgaaatcacataacttcagacaatatggactaggaacaggattttggggaccacaaccccaacaatacctatacgcattatccaatggtagcgaacacagtaaaatagaagacctcatatttttaggacaaaccctaagagacacaccaggtacagaatttaaaaataatcagcctaaaagttgggattcatactcgcaaaaacaaaaacagagagacaactttggtaatatctttaatcacttttactttcaaggcactaaatcagtatatatgtcacaaacaccaccacaacaattattcaacacttcaaacatttataagactattaaagacgcaacagaattaaaattaacattagtaacacaagatttatacaaagaatgcagatataatccagaaagagacaaaggacacaacaaactatggttagtaagcacatcagacaacatatttggatggcatgaaccagaagataaagatttagtttatgagggatttccattatgggccctactatggggatatgtaaactggcatataaaatataaaaaactctccaaagtagaagacaattatataatggttattcaaacaccatacatatggccagaatatgacataatagtacctttaaactacacttttactgaaggctggagtaactggcaagatgaatctcacaaacaatttatagcagatgccgaagactggcatccaaaactaaaatttcaagacagacaaattgaaaatatatgtgcaacaggaccaggtgtagcaaaaacatcatctactagcattgaagctcatttaggttattctttttattttaagtggggaggatgtcccagcgaacttgaaaacattacaaatccaggagaacaaatccactatcccatccccaatcaagagctacaaacacctgaaatcgaagatccaaacatcgactacaaaacactcgtctggccctgggacgtcaggagacacacacttacaaaaaaaggtgcaaaaagaattacagaacaaaaaacatttacaatcccttctattacaggctcaaaactttcagcaacaacttcagctctccaaaccgacgaaataccaccaacacaaatccaaacgacgccagagaaagaaacgcaagagacatcacagctccagcagctcaacaacctcagacactccaacaacaagctcagactcaaactagcccaattactttcacacagtgcaaatttaaaatattagcaggtaaacaaaaacaatacttatttccagaaattataccaaaacaaaaccgtcgctttttaccacatgaaagagaattagaaaatatggtagctaaattgtttcgcagacccccaagacatttcttttatgatgaccctacttatccatactgtgtacctgaacctcgtgtaaactttcgcctaaactttactgaataaaggccaacaattttcacttaatggtgtcagtttatataaattaaacttaaataaacatccatgacctcccaacattaaggcctacaacaaagggggagggcaaagcccccccccccatccccccccggaacacttccacttccctaaaacacatacataccacaatgcaatacaaaaccacatactttgcattgccgaccacaaacagccacaggaaaccaccaaatttgcattgccgaccacaaacgaatatgctaattaacttccccaaaatacctacttacttccccaaaaattaattagtaatcaacatcaaattacactttcctgggaggagctacttaactataaaactaactacacttccgaatggctgagtttatgctgccagacggagacgagaaacttctcggctgactttggg

SEQ ID NO: 2312 - protein, 680 aa, Betatorquevirus sp.
MPRYYRNYYSRWRRYRRPYYWPRRRPRFRRPRQTFRRRRPLWRKRFRVRKRLYRKKKLKYFFIKQFQPKKIRKCKIKGIISLFECGPHRLNREWTNFMNSFYPPNSEGGGGWSQMQFTLESLYEQFELLRNKWTASNVLMPLVRYTGCCLKFYRSNNVDYIAHYTLCYPMKTTKHQHTNAQPSNMLLYPKKILVPSLKRKPKGKLFIKKKIRLPEQFENKWYFQSDLYKTPLLLLTTTASDFDRWFLNPQSISNNITIITLNTDFMKSHNFRQYGLGTGFWGPQPQQYLYALSNGSEHSKIEDLIFLGQTLRDTPGTEFKNNQPKSWDSYSQKQKQRDNFGNIFNHFYFQGTKSVYMSQTPPQQLFNTSNIYKTIKDATELKLTLVTQDLYKECRYNPERDKGHNKLWLVSTSDNIFGWHEPEDKDLVYEGFPLWALLWGYVNWHIKYKKLSKVEDNYIMVIQTPYIWPEYDIIVPLNYTFTEGWSNWQDESHKQFIADAEDWHPKLKFQDRQIENICATGPGVAKTSSTSIEAHLGYSFYFKWGGCPSELENITNPGEQIHYPIPNQELQTPEIEDPNIDYKTLVWPWDVRRHTLTKKGAKRITEQKTFTIPSITGSKLSATTSALQTDEIPPTQIQTTPEKETQETSQLQQLNNLRHSNNKLRLKLAQLLSHSANLKY

SEQ ID NO: 2313 - protein, 119 aa, Betatorquevirus sp.
LAERATNLNYITEMSWSKPQYGPRGQELNWMQSCIQSHNAFCGCNDPVSHLIKTALLHGGVLEFNKKKLKQLCHDTTETTTQDGEDTDDHTTGPEGDLDFGDLDKLFEEEDPFGEKDSG

SEQ ID NO: 2314 - protein, 161 aa, Betatorquevirus sp.
LALGRQETHTYKKRCKKNYRTKNIYNPFYYRLKTFSNNFSSPNRRNTTNTNPNDARERNARDITAPAAQQPQTLQQQAQTQTSPITFTQCKFKILAGKQKQYLFPEIIPKQNRRFLPHERELENMVAKLFRRPPRHFFYDDPTYPYCVPEPRVNFRLNFTE

SEQ ID NO: 2315 - DNA, 2941 bp, Betatorquevirus sp.
cgggagccgaaggtgagtgaaaccaccgaagtctaggggcaattcgggctagatcagtctggcggaccgggcaagaaacttaaaaatatatttattttacagatgtcctccaagaaaccaacaagaagagaattaaatcaactaattaacgtctgctgtggagcccacgacctcatctgcgactgcgacgaacctaccaaacacatcatcctacacctcttctcccaccaggaaccctatcaagtaaccaaacaacaaaaggataatatacaaaaatgccttattactacagaagaccatggagaaccaaccgctatcgttggagacgatggtataaacgaaggagacctagaggctatgttcgcagaagacaaagatggagaagacgccgaagggtaagaagaaagcttcctaaacttaatattaaagaatggcagccacagactattagaaaatgctgcataaaaggaatgcactgtttatttttatgtacagaagacactattagtagaaactatagaatgtatgaacatagcataattccagaaagatggccaggaggaggaggattttctgtaacaaaatacagcatagatggactatatgaacaacaccaactagatagaaactggtggacaaatagtaatacaaacttaccattgtgcagatacacaggatgtaaaattaaattctaccaaagctgggaaatagattatgtatgcaatactagcataaactacccaatgttagctactgaacttctatatcacagttgtcaaccgagctttatgatgatgaacaaaaactgtatatttgttccatcaaaaataactaaaaagattccaaaaggctatataactaaaagattcagaccaccaaaccaaatgagtaaccgttggttctttgcaaaagatctttcaaaagttggtttgctaatgctaaccgcatcagcagcttcctttgaccattactacatagcaacagacaaaacctcaaataactgctcctttaccacacttaacacttacttttggaaaaaacacaattttatacaaccaggcataaatggatacttactatccagtacaggaacaatagaaaaaagaatgtttgcaactacagaaaacttaacatcagaaaacagcatacaattccttacacctaatcaactaatatacttaggttggacaaagcaagaccaaccaggagaaaaggtatctagcaacaataaaaacaattatctttcagatcacaaatattggggaaaccctttttcacatgaagtcctaacaggctctcaacacgtattagtaacaactaacaactggaacacaataacacaaaaattaattaccgactttaataaagctataggaccaggctttctaacaacacctacagaaccattattacatcaatgcagatattcaccagatagagacacaggagcaggaacaaaagtgtacttaaaatcagtattaagagacgaatcaggttgggaacccccaacaaacgaagaacttataacagaagggtttcccctatggctatcactatttggctttgtagactggcacaaaaaactagcagtagcaaccaaactatatacaagctatgtaattgtcattgaatctaacttcataacaccacaactaccatactacatactattagatgaacactttatagaaggaaaatccagatacatgacagaacatgacacagaccaacaaacacaaacagacaaagattcctggtacccctgtgttaaataccagttacaaagcatagaaaacattgtaaaaacaggcccaggaatagccaaactaggcggaagaaaatcagtagaagctaaaatactctacaaattttattttaagtttggaggatgtccaccaaagatggacacaattaacgaccctactaaacaagagacataccccgttcccggttttcagtctacaacatattcgttacagaatccaacactccctcaagaaacctacttataccaatttgacgtccaccaagacatccttacaaagaaagctgcaaaaagaattacaagagactgggaaactcaaaaaactttattttcaactacaggacgaatggaaccagcaccatactcggaaaaagaaggagaaatctcgccgacaccctcagactcggaagaggacccggcactcctacaaatcaagctccgaaagctcaagcgacagcgactctacttggagcagcaaatccagcaactaatggaacaaccataaactttacatgtatacaaaaagctctgctttttgaaccaaagcagaaaaaactcagaaaaatgaacaaatatgaactacaaactgaaaaactatgtgctaaagcttttaaaagaccacctgtatgtatgtggggggaaattccttactggccatggttacaccctgaacccttagtaaatcaactaccaaaaattaactttgatttaaattacaaaccctaataaaatttcaaggcctacgaatttcacttagtggtgtctgtttatataagtttaaacttaaataaaccaactccgcctcccaatattgttggcgccataaaggggctccgcccccttacacccccaagggggctccgcccccttaaacccccaagggggctccgcccccttacacccccaagggggctccgcccccttacaccccctaataaatattcaacaggaaaagaaaaccacctaattagaattgccgaccacaaaccgtcacttacttctcctttttacacttacttccctctttcctcattattatacattacattaattaataatcaccgtaattccggggaggagcctgaacactatataactaactacactgacgaatggctgagtttaccacgccagacggagacggcatcacttcagtgactgcaggctgatcttggg

SEQ ID NO: 2316 - protein, 664 aa, Betatorquevirus sp.
MPYYYRRPWRTNRYRWRRWYKRRRPRGYVRRRQRWRRRRRVRRKLPKLNIKEWQPQTIRKCCIKGMHCLFLCTEDTISRNYRMYEHSIIPERWPGGGGFSVTKYSIDGLYEQHQLDRNWWTNSNTNLPLCRYTGCKIKFYQSWEIDYVCNTSINYPMLATELLYHSCQPSFMMMNKNCIFVPSKITKKIPKGYITKRFRPPNQMSNRWFFAKDLSKVGLLMLTASAASFDHYYIATDKTSNNCSFTTLNTYFWKKHNFIQPGINGYLLSSTGTIEKRMFATTENLTSENSIQFLTPNQLIYLGWTKQDQPGEKVSSNNKNNYLSDHKYWGNPFSHEVLTGSQHVLVTTNNWNTITQKLITDFNKAIGPGFLTTPTEPLLHQCRYSPDRDTGAGTKVYLKSVLRDESGWEPPTNEELITEGFPLWLSLFGFVDWHKKLAVATKLYTSYVIVIESNFITPQLPYYILLDEHFIEGKSRYMTEHDTDQQTQTDKDSWYPCVKYQLQSIENIVKTGPGIAKLGGRKSVEAKILYKFYFKFGGCPPKMDTINDPTKQETYPVPGFQSTTYSLQNPTLPQETYLYQFDVHQDILTKKAAKRITRDWETQKTLFSTTGRMEPAPYSEKEGEISPTPSDSEEDPALLQIKLRKLKRQRLYLEQQIQQLMEQP

SEQ ID NO: 2317 - protein, 98 aa, Betatorquevirus sp.
MSSKKPTRRELNQLINVCCGAHDLICDCDEPTKHIILHLFSHQEPYQVTKQQKDNIQKCLITTEDHGEPTAIVGDDGINEGDLEAMFAEDKDGEDAEG

SEQ ID NO: 2318 - DNA, 2941 bp, Betatorquevirus sp.
cgggtgccgaaggtgagtgaaaccaccgcagtcaaggggcaattcgggctagatcagtctggtggaacgggcaagaaacttaaaacaatttgttttacagatgcaaattgaagatcctaaatacaataaaaaacaacttaaactacaatggacgaataatatagtttctgtacacgaccttctctgctgctgcgacaacccactggaacacaccattcacaaccttcttgaacaagaacccaacctacgattttctgaagaaacaaagaaaaaactacaaaaatgccttacttctaccgacgatggaaaaaaagatggccccgccgcagacgatattatagaagatggagacctagaaaaccttttcgcagaagattttacagaagaagaaactgggtaagaaaaaagaaactttctaaattaatattaagacaatttcaaccagctaaaatacataagacttctataaaaggaatatatcctttactaatgtgtacttctgaaagaacatctcataatcttatacaatacttagactccattgctcccctacactggccaggaggaggaggaatgtctctaatacaatttaacttgaactgtttgtatgaacaatttctaaaagcaacaaactggtggactaaatcaaactgtaatttgcctcttgtaagatatatgggatgtactttaaaattttatgcaactgaaaaatatgattatgttgtaaaagtagaacgctgtttacctttagaagccacagatactatgtaccttagcacacaaccttctatattaatgctaacatcaggaagcatactagtaccatgcaaacaaaacaaaaactacaaaaaaccatataaaaaagtatttgttaaaccaccttctcaatttaccacaaaatggctgtttcaagcagatatatgtaaattcccactactaataattagagcctccagtgcttcatttgatagatattatacatcctcatcagctatttcacctaccatacaactcatatcacttaatactaacagttttgttttacacaactggaacacaccacccacatcaggatacaaaccacaagaaactcaatggctttacacattagaacatgcaaaagaaccacctgaaacagacctagtaaaaaacctaatatatttaggaaacacaggtccaacaacaggtgcaaccccaatgaaaacaatgcaagaagcagctttaacttcttacttttcagacccaaaaagatggggtaatatttttgaagtacacaactttatgggtgataatcccatatttgtaacaaataaatcaccctcacaaataatccaacttacaaaacaaggcatggaaggaataccaaaattaactaatgacacaaccatagaaagcagtcaaatatttactagaaaatccacaccaaatacaataacatgcagatacaatccatttgcagacaaaggaataggaaacaaaatttttctagtccacaactcaacagacagaggcccctgggacgaaccacatgacccaaaattaatgagacaagatctaccaatttggctactaacgtacgcatggttagactggcaaaacaaactacaagcagtaagcaaagtagacacatcatacatgacaataatagaatgtccctacattgaaccaaaactaaaatactatttatttttagacgatgactttatacaaggcacatctccttatgcatcagacttatatccttcagacgccacacactggtaccctaaaaacagataccaagcacaatcactaaacacaatagcaaacacaggcccaggtatgattaaactacaaccacaacaatctatggaagctcattttctttataaatttcattttaagtttggaggatgtcccccaccaatggaaaagatatgtagtccagcagcacagcctatataccccataccagatcctaaacatgaaacaacttcgttacagaatccaacaacacccatccaaacattcctctacaactttgatgaaaggaggggactcctcacagaaaaagctgcaaaaagaatgcgaaaagattacagaactgaaaaagatgctttcccatttacaggaatcccaaccgaccttccaccaccccaccaaaaaatacagacaacggacacggagacatcggaaagcgaagaagagacatgtctccagctccagctcctccgaaacaagcaaaagcgactcaagcggagaatcctccgattactaactcaacatcattcagaataaaaaaatgtacatatcatgttactctgtttccaccaaacagccctcctaaccgcagacttaggccccatgaactagaaactgaaatacagcttgctagctggatgaaaagacctgtaagagcctttacaaaagatcccccattttatccctggctacctattgaacctcttgtaaaccaacaccatgtaaactttgacttgggttttcaataaacaaggccagcaaatattcacttagtggtgtcagtttatataagtttaaccttaataagcatccaccgcctccctaatacgcaggcgcacaagggggctccgcccccttacacccccaagggggctccgcccccttaaacccccaagggggctacgcccccttacaccccctaattaatattcaacaggaaaaccacctaattagaattgccgaccacaaacggtccattacttctgctttttacactgacttccttttttactacttattattcattacattaattaataatcaccgtaattccggggaggagcctaaaaactataaaactaagtacacttccgaatggctgagtttatgccgccagacggagacgggatcacttcagtggctgagtttatgccgccagacggagacgggatcacttcagtgactccaggctgatcttggg

SEQ ID NO: 2319 - protein, 664 aa, Betatorquevirus sp.
MPYFYRRWKKRWPRRRRYYRRWRPRKPFRRRFYRRRNWVRKKKLSKLILRQFQPAKIHKTSIKGIYPLLMCTSERTSHNLIQYLDSIAPLHWPGGGGMSLIQFNLNCLYEQFLKATNWWTKSNCNLPLVRYMGCTLKFYATEKYDYVVKVERCLPLEATDTMYLSTQPSILMLTSGSILVPCKQNKNYKKPYKKVFVKPPSQFTTKWLFQADICKFPLLIIRASSASFDRYYTSSSAISPTIQLISLNTNSFVLHNWNTPPTSGYKPQETQWLYTLEHAKEPPETDLVKNLIYLGNTGPTTGATPMKTMQEAALTSYFSDPKRWGNIFEVHNFMGDNPIFVTNKSPSQIIQLTKQGMEGIPKLTNDTTIESSQIFTRKSTPNTITCRYNPFADKGIGNKIFLVHNSTDRGPWDEPHDPKLMRQDLPIWLLTYAWLDWQNKLQAVSKVDTSYMTIIECPYIEPKLKYYLFLDDDFIQGTSPYASDLYPSDATHWYPKNRYQAQSLNTIANTGPGMIKLQPQQSMEAHFLYKFHFKFGGCPPPMEKICSPAAQPIYPIPDPKHETTSLQNPTTPIQTFLYNFDERRGLLTEKAAKRMRKDYRTEKDAFPFTGIPTDLPPPHQKIQTTDTETSESEEETCLQLQLLRNKQKRLKRRILRLLTQHHSE

SEQ ID NO: 2320 - protein, 113 aa, Betatorquevirus sp.
LVERARNLKQFVLQMQIEDPKYNKKQLKLQWTNNIVSVHDLLCCCDNPLEHTIHNLLEQEPNLRFSEETKKKLQKCLTSTDDGKKDGPAADDIIEDGDLENLFAEDFTEEETG

SEQ ID NO: 2321 - protein, 99 aa, Betatorquevirus sp.
MSPAPAPPKQAKATQAENPPITNSTSFRIKKCTYHVTLFPPNSPPNRRLRPHELETEIQLASWMKRPVRAFTKDPPFYPWLPIEPLVNQHHVNFDLGFQ

SEQ ID NO: 2322 - DNA, 2941 bp, Betatorquevirus sp.
cgggagccgaaggtgagtgaaaccaccgtagtctaggggcaattcgggctagatcagtctggcggaacgggcaagaaacttaaaaatattttattttacagatatgtattctttatggaagaatcaatcatactcaaagagacaactagaactccaatggattaacgccaccaacaacatccacgacctattctgccactgcgacaaccccacttttcatctactttactgcattaacaagttttctagtgctcaaaaacccgaaactgatcttcgaaacatacaatgcctgcttactggagagcgaatcgctacagaagataccaacaaagaagacgccggagaccctactggatttctagatggagagctagaagacctcttcaaagaagaagatacagaagaaaaagatactcctaccgaaaggtaaagagacgctttaaactaaaaaaagctaaaaaaataactttaaaacaatttcaaccttatactatacaaaaatgtaaagttataggatacaaatgcttatttcaaggcagtacaaaaaacttacctgtaaactatatacaatatatatattccactgtaccacctttttggccgggaggcggagggtggagcataatggtttttagcttaacttctttatttgaagactgggaacatttagaaaacatatggactaaaagtaacttaggattaccacttgtaaaatatagaggatgcattttaaaactataccaaagctatgacacagactatgtagcagtttatgacagatgttggcctatggtagacacagaactaacacacccaaacgcagcacctagtagaatgctacaaaacaaacataaaattgttataccctccagaaaaacaaaccctagaaaaaaaccatataaaaaagtttttattaaaccaccgtctcaaatgataacacaatggtattttcaaagagatatttgcaaactaccactattcatgttaacaaccactgcagtagacctattatatccattttgtaatccacatgcctcatcaaacaacataacattatattcacttaacccatacacttttcaaaacctaaattttacagaatatggcacgtcgggatactcaccaaaaacaataaacaatgttgcttattacctatatgctagtactgaacaaaatttatcaacgctaaaaaaaaaagacattttcacattcattccactacttaacaccaaagactaccaaccaggacaaccatacacagacggttataaagatacaccagaaagttggggaaatcccttccaccataactacttaacagatgacaaagaaactccaaactatacaatttacatttcctcaagcacaagtactacatttaaatcaaacgctaaaaacagcgaagacgaaacatcaattagagttactccaattacaggccccatgctttatcaattaagatataatccatcaaaagacaaaggagacacaaacaaaatatatctagtaagcacatctacttcagataaaacaattactccaccaccaaatgaaaatttagttatagaaggcctaccactatttattttactatggagttggacagactgggtaattaaagctaaaataacaacagacataacaaaatacagaactttagttatagacacaaaaatgtttgacactgaattaccacactatattttattagacaaagactttagagaaggaaaagacccatacacaccagatcatacagacggaacaataatacaccctaattactataacagtaaaaactggcacccaaaactactatttcaacaacaaagtttaagagaaattgccatgtcaggccctgctgtacacagagatactaaccataaatatatacaagcatactgcaaatacaaatttctattcacatggggaggctgcccaaagcaactaccaaaaccatttgaaccttgcttacagccaaaatggaccacagccaataacatccctggaagacttgaaattacgaatccacaacatgaccccaaaacagaattatatgactgggactgggatgaagactatgttacagcagaagctgtcgaacgagttaaatgctacacaaaaactgattcaaaaactctctcaacagcaaacagaaacctgccaaaaagcatcacgaaaacatcaaagaaagagaaaacaccagaaaaagaggagcaggaaatactccaacagctcctccagctccgacagcagcgacagctcctccagctccaactgaagtcttacctaccataaaaataaaaaccggcaatataaaagcctatttgttccctccagtaaaaaaaaatagactaatgaatgcctgggaacaacaagaagaaaagcaagatgcagctatatggtgtagaccgcaaagaaaatatttgtatgataagcctacttatcctttctttcctccaactcctataataccaaaaattaactttgatttaatgtattctgaataaacttttcaacgccaacaattttcacttagtggtgtccatttattaaagtttaacttaaataaacagtcaccgcctccctatcaatagggcgccaaaatttaaagggggctccgcccccttacacccccaagggggctccgcggggctccgcccccttacacccccaagggggctccgcccccttacaccccctaataaatattcaacaggaaaaccacctaattagaattgccgaccacaaacggtctcttacttcccctttttacagctacttccctttttactaattattattcatgacattaattaatactcactgtaattccggggaggagctacatacctatataactaactacacttccgaatggctgagtttatgccgccagacggaggctgtatcacttcagtgactacagactgatcttggg

SEQ ID NO: 2323 - protein, 670 aa, Betatorquevirus sp.
MPAYWRANRYRRYQQRRRRRPYWISRWRARRPLQRRRYRRKRYSYRKVKRRFKLKKAKKITLKQFQPYTIQKCKVIGYKCLFQGSTKNLPVNYIQYIYSTVPPFWPGGGGWSIMVFSLTSLFEDWEHLENIWTKSNLGLPLVKYRGCILKLYQSYDTDYVAVYDRCWPMVDTELTHPNAAPSRMLQNKHKIVIPSRKTNPRKKPYKKVFIKPPSQMITQWYFQRDICKLPLFMLTTTAVDLLYPFCNPHASSNNITLYSLNPYTFQNLNFTEYGTSGYSPKTINNVAYYLYASTEQNLSTLKKKDIFTFIPLLNTKDYQPGQPYTDGYKDTPESWGNPFHHNYLTDDKETPNYTIYISSSTSTTFKSNAKNSEDETSIRVTPITGPMLYQLRYNPSKDKGDTNKIYLVSTSTSDKTITPPPNENLVIEGLPLFILLWSWTDWVIKAKITTDITKYRTLVIDTKMFDTELPHYILLDKDFREGKDPYTPDHTDGTIIHPNYYNSKNWHPKLLFQQQSLREIAMSGPAVHRDTNHKYIQAYCKYKFLFTWGGCPKQLPKPFEPCLQPKWTTANNIPGRLEITNPQHDPKTELYDWDWDEDYVTAEAVERVKCYTKTDSKTLSTANRNLPKSITKTSKKEKTPEKEEQEILQQLLQLRQQRQLLQLQLKSYLP

SEQ ID NO: 2324 - protein, 123 aa, Betatorquevirus sp.; identical to SEQ ID NO: 1083

SEQ ID NO: 2325 - protein, 60 aa, Betatorquevirus sp.; identical to SEQ ID NO: 1084

SEQ ID NO: 2326 - DNA, 2941 bp, Betatorquevirus sp.
cgggagccgaaggtgagtgaaaccaccgtagtctaggggcaattcgggctagatcagtctggcggaacgggcaagaaacttaaaatattatattttacagatatgtcatctgtatggaaaccaccgaaatcatctacaagacaactagagaatgcatggatgaattctactttccaaacccatgacctgttttgtcactgcaacgacccctggcttcactttatgattgttcttaacaaaaattccaacgcacccaaaccagaaccagaaattgaaaacataaaatggcttcttattggcaaaccaactattggagataccgcaaccgtagaagaccatggcttcgacgacggagacctagaaagactcttcgcagaagatggagaagaaaaagaaaatactaccgaagaaccaaaaaggtaaaaagaaaacgctttcgtaaaaagaaactgaaattaactttaaaagtatttcagccaaagcaaattagactttgtaaaattattggcactaaatgtctaatacaaggtagccctttaagaaaaaacaataactatattcaatactgttactctaaagtaccagataacaaaccaggaggagggggatggagcttaattgtattttcattagcaagtctatttcaagactatgaacacttgttaaatgtatggactacaagtaactctggtttacctcttgtaagatttctgggaacatctataaaattttatcaagatagtgaattagactatattgctatatatgataattgttggcctatggtagacacaccatatacacatgcagactcatgtccttcaagaatgtttttaagaaaaaacaaaataactattcctagcagaaaaacacaagccagaaaaaaaccatacaaaaaagtttttataaagccaccaacacaaatgacaaacaattggtattttcaaaaagacatatgtaacctaccgctacttatgctcaccaccacaggagtttcattaactaatccatactgcgatcctagagcaacaagtaacaatattactattacctgcttaagcccctttatttttcaaaacccagcatggagaaactttccaaaaacaacaggttactctccaaaaactgcagtagactcacatgaacacagagaatacaacatgtacttatgggcaacaacaatgaaattagacaataaccaagtaacaccagacaacattaccaacttacaacttataccacttacaaacccaacaaattatgacttaccagaacccattagaaacaccgaatgggaaaacaaaccagaaaactggggcaacccatttaaccatcacatactagacggagacacttactcagtatacattacaacaatgtcaccatttgatgctaaacaactattatcaaagacatctccaacacgtagttactatttaacaaatccttcaggaccactaatatacaaatgtagatacaatcctgactcagacacaggagacaataaccaatactacctaataaacacatctacaggaacaaacatgaatcccccaactaatactaatctagaaatacatggatttcctttatatgctatgtgttggggctggacagattttattaaaaaacttaacataacagtagacttagacgaaaactacatagtagcaataaaaactaagcaatttgatgtagaccttccaacatatattcctattgacttagacttcatagaaggatacgaaccatacactcccaaaactgaagaccacttaccaaatgtacctaatacacacaacaaaatacattggtacttgaaatatgaatttcaacaacaaacaattgaaaaaatatgtgacagtggtcctggttgtcctagaatgccatacaatcattatatgcaatgcttttgtaaatataaatttttgtttaaatggggaggttgtccaaaagtactacaaaaagctataaatccttgttcacagtccaaatggcccacggccgatcacctccatggacgacttgaaattaagaatcctaaccaaccaccacaaacagaactgtacgactgggactggattgacgactatgttaaaacagaaagtatacaacgaatacaaacatacacaggatctcatgaacaaactttctcaatttcagaatcactcagcaacccgaagccaacgaaaaaagtccaagaaaaagaaacattacaagaagaggagaagacactcctcctcaagctccaacaactccagcaacagcgacaacagctccagcaactcctcctcaacaaactaactttataataaaaaaaagcaatattaaagcttttctatttgaaccaaaaataaaaaaaaatagacgttttacaccaaaagaacaagaagaagaaaagatagtagctgctatctttggcagaccacaacgaacttggttttatgatacccctacctacccattttttccaccaactcctataatacccaaagtaaactttgacttaaactatggaaaataaaggccaacatactttcacttagtggtgtccatttatttaagctaaacttatataaacatccaccgcctccctaaaattcgggcgccaaaatttaaaaaaagggggctccgcccccttacacccccaagggggccccgcccccttacacccccaagggggctccgcccccttacacccccaagggggctctcaacaggaaaaccacataattagaattgccgaccacaaaccgtcacttacttctccttttacttaaacttcctctttacctatttattattcatgaaattaattagtacactccgtaattccggggcggagactaataactatataactaactacacttccgaatggctgagtttatgccgccagacgaagacgggatcactacagtgactccaggctgatcttggg

SEQ ID NO: 2327 - protein, 675 aa, Betatorquevirus sp.
MASYWQTNYWRYRNRRRPWLRRRRPRKTLRRRWRRKRKYYRRTKKVKRKRFRKKKLKLTLKVFQPKQIRLCKIIGTKCLIQGSPLRKNNNYIQYCYSKVPDNKPGGGGWSLIVFSLASLFQDYEHLLNVWTTSNSGLPLVRFLGTSIKFYQDSELDYIAIYDNCWPMVDTPYTHADSCPSRMFLRKNKITIPSRKTQARKKPYKKVFIKPPTQMTNNWYFQKDICNLPLLMLTTTGVSLTNPYCDPRATSNNITITCLSPFIFQNPAWRNFPKTTGYSPKTAVDSHEHREYNMYLWATTMKLDNNQVTPDNITNLQLIPLTNPTNYDLPEPIRNTEWENKPENWGNPFNHHILDGDTYSVYITTMSPFDAKQLLSKTSPTRSYYLTNPSGPLIYKCRYNPDSDTGDNNQYYLINTSTGTNMNPPTNTNLEIHGFPLYAMCWGWTDFIKKLNITVDLDENYIVAIKTKQFDVDLPTYIPIDLDFIEGYEPYTPKTEDHLPNVPNTHNKIHWYLKYEFQQQTIEKICDSGPGCPRMPYNHYMQCFCKYKFLFKWGGCPKVLQKAINPCSQSKWPTADHLHGRLEIKNPNQPPQTELYDWDWIDDYVKTESIQRIQTYTGSHEQTFSISESLSNPKPTKKVQEKETLQEEEKTLLLKLQQLQQQRQQLQQLLLNKLTL

SEQ ID NO: 2328 - protein, 106 aa, Betatorquevirus sp.; identical to SEQ ID NO: 1517

SEQ ID NO: 2329 - DNA, 2940 bp, Betatorquevirus sp.
cgggtgccgaaggtgagtgaaaccaccgtagtcaaggggcaattcgggctagctcagtctggcggaacgggcaagaaatttaaaataacatttattttacagatatgagctctatctggaagaaacctacattctcagtgagacaacaagaaaaccattggcttggaattgttttcagcactcatgacagcttctgccactgtgaagacccctggttacatttgatgattcttctaaacaaacaaggaaaagctccaaaacctgaatccgacgttcgcaatataaaatgcctccttactggaatagatacaactactaccaaagaagaccatacagaagaagacgtcgttaccggtttcgacgatggagagctggaaaaactattcgcagaaaatggcacagacgaaaatggagacgaaggaacaaggtaaaaagacgctttagaaagaaaaaactaaaaaaaattgttctaaagcaatttcaaccacataaaataactaaatgtaaaatagtaggcaaaaaatgtttatttcaaggtagtcctttaagatctagtaataactacatacagtactgttattcatatgtacctgaattatatcctggtggtggagggtggtctttacttgtacatagcttaggaagtatgtatgaagactatcaacatttaaacaatatatggacaacaagtaatgcaggaatgcctcttgtaagatacatgggagtggaatttaagttttatcaagatttgtatacagactatgttgttatctgggataattgctggccattggttgacaccccatacacacatgctaacagttgtcctagccaaatgcttcaaagaaaaaacaaaataatagtgcccagcaaactaacacaaaatagaaaaaaaccatacaaaagatgctttgtaacacctccaacacaaatgcttaaccgttggtatttccaaagagacatttgtgacacaccattagcaatgataaccgcaacagcagttagtcttacaaaaccattttgtgacccaaaagcaaaaagtaacaatataactattaactgcctgaacccacacagatttagaaaccctaactttcaaaacccgccaataacaacaggatacagtccattttcagcagacaatttagaaaaccatccaaaaatgtacttatacggttcacacacagtaatacaacaaaaaaaagacttactaacattaacacctttatgtaataccaaagacaacagagctggagcaatgttatcaactttactaaaccaagataacgcaaataaattcgaaaactggggaaatcctttcaattccatttacttttcctcagaagaaacacatatttaccaatcacaatacggcccaacatctgacgaagtaacacgaacctggaaatcatatgaaaataacaacggcactataggcagtgaagttacattaatggtaggtcacaacctgtatgcttgtagatacaatccagaaaaagacacaggagaaggaaacatgtgttacttactaaacaattcctcagcagctagcctagaaccgccagcaaacaaaaacctagtttttgaaggttttccactatacatactactatggggatggacagactttataaagaaactaaagcaaacaattgacattgacaaaaactactttttagtaataaaaaccccattttttgaagaaaaactaccatactatatacctatagatgatgactttagagatggatttgaaccctacactccacacgacactaacaatgcacaggcctacatttctccatacaacatgaaccactggtatccaaaactactatttcaatatcaaagtattgaaaaaatttgtagatctgggccagcatgccctagaccaacaaacgacaactacttacaagcattttacaaatacaaatttcactttaaatggggtggatgtcctaaacaactagcaaaagcatatgatccttgtttacagtcaaaatggcccactcccgataacatcactccaggacttgaaatctcgaatcctaatgaaccaccacaaacccacatctatgactgggactgggaagaagattatgttaaagaaaaagctctccaaagaattagagtatacacagaatctcctaaacaaatactcttccttacagactcgaaacaaaaccccaaaccactccaaatcaaggaaaagaaagaggagtcagaaaacgaagaggaaacgcagctactcctccagctccaccacatccgacaccagcgaaagcagctcgaactccttctccagtcaaaacagggactaataaatacacaataaaacactgtaaaattagagtaaaactatttccatctccaacaaaaaaccgtagaatgactccaaaagaaagagaactagaaaaagaggtggcaaaaatatttaaaagaccaccaagagactttatatttgactttcctacttatccttatattccacctacaccccttgcaaactttgaccttaatttcaaagaataaaggccaacatacttcacttgatggtgtctgtttattaaagtttaacttaaataagctaactccgcctccctagtatgttggcgctgtaaagggggctccgcccccttacacccccaagggggctccgcccccttacacccccaagggggctccgcccccttacaccccctaataaatattcaacaggaaaaccacctcatttaaattgccgaccacaaaccgtcttatacttcccctttttaccaacacttcccttttttctcattattattcattacattaattagtaaactgcgtaaatccggggagtggcaactaaactatataactaacaacacttccgaatggctgagtttatgccgccagtcgtagactgcaccacttcagtgactgcaggctgagcttggg

SEQ ID NO: 2330 - protein, 682 aa, Betatorquevirus sp.
MPPYWNRYNYYQRRPYRRRRRYRFRRWRAGKTIRRKWHRRKWRRRNKVKRRFRKKKLKKIVLKQFQPHKITKCKIVGKKCLFQGSPLRSSNNYIQYCYSYVPELYPGGGGWSLLVHSLGSMYEDYQHLNNIWTTSNAGMPLVRYMGVEFKFYQDLYTDYVVIWDNCWPLVDTPYTHANSCPSQMLQRKNKIIVPSKLTQNRKKPYKRCFVTPPTQMLNRWYFQRDICDTPLAMITATAVSLTKPFCDPKAKSNNITINCLNPHRFRNPNFQNPPITTGYSPFSADNLENHPKMYLYGSHTVIQQKKDLLTLTPLCNTKDNRAGAMLSTLLNQDNANKFENWGNPFNSIYFSSEETHIYQSQYGPTSDEVTRTWKSYENNNGTIGSEVTLMVGHNLYACRYNPEKDTGEGNMCYLLNNSSAASLEPPANKNLVFEGFPLYILLWGWTDFIKKLKQTIDIDKNYFLVIKTPFFEEKLPYYIPIDDDFRDGFEPYTPHDTNNAQAYISPYNMNHWYPKLLFQYQSIEKICRSGPACPRPTNDNYLQAFYKYKFHFKWGGCPKQLAKAYDPCLQSKWPTPDNITPGLEISNPNEPPQTHIYDWDWEEDYVKEKALQRIRVYTESPKQILFLTDSKQNPKPLQIKEKKEESENEEETQLLLQLHHIRHQRKQLELLLQSKQGLINTQ

SEQ ID NO: 2331 - protein, 108 aa, Betatorquevirus sp.; identical to SEQ ID NO: 3

SEQ ID NO: 2332 - DNA, 2940 bp, Alphatorquevirus sp.
cgggactggccgggctatgggcaaggctcttaaaaaagcatgtttctcggcaggcattggagaaagaaaagggcactgctactgttaccggtgccagctaaaccgaaagcaccttctcgacagatgagctggagcagacccgtacacgatgagcgcggaatacagcgcaactggttcgagggggtcattcgcacccactctgcttgctgtggttgtggcaatgcttgtactcatctatctgctctggcccagaggtatgggtacccttccctaccttcgcataccccgcgacccggcaccccgacacctgtgagcaccccggagcagatccgtagagcccgggccctgcccgcggctccggaccaccctccagccctgccatggcatggggatggtggaagagacggcggcgcggctggttccgacgtcggtggacccgtggcagagttcgcagaagatggcctcgacggacttatcgccgccctcgacgacgaacagtaaggaggcgcagacggaggaggagggggagacgaaaattcagacggtacagacttaaaagacgctaccgcagacgtaaaaagacccaaaaaattaaactaacacaatggcaacccgccaagacaaaacgctgctttatgataggatactttcctactgttattcagggacaaggacggtggtcagaaaactttaccagtcacatagaggataaggtagccaaaggaccctttgggggcggacacagcaccagcaggtggtctctaaaagtactgtacgaggaaaaccagagacaccacaacttctggacatccagtaacaacgacctggagctggccaggttctttggcagctcctggaggttctacagacacgacacacaagactacatagtaacctggaacaggagggctcccctgggaggcaacatactgacagctcctaacatgcacccgggaatagccatgctaagcaaacacaagatagtggtccccagtaaactgaccagacccaggggcagaaaatacattaaaattaatataaaaccccccactacattcatagacaagtggtacttccagaaagacatatgcgaccttacattgctaaacatgaacgttgtaacatgtgacctgcggtttccgttctgctcaccacaaactgacaacatttgtgtaaccttccaggtgcttgcaccaatctataacgacttcctctctataaccgcaaaacaactaaccgaaaaagactggaaagactactataaaacatttttagacaaagccatccctttagacaaagaaagaaaagcaaacatattaaacacatttttaacagagggatcatacagacgaccacaagtagacaaatataaaaaaccaccaacagacaaagaatactatctaccaaaagatgcacaatggggagatccaattcacattattaacaatagtgaaactgctacaaatcaaccaccacaaacaagagcacacctaattgaaaaaatacaacaaaatgcagaaaatgtattagctaaagtaaaccaagaattaaaggaatacaaagcaacacaagcacaacacggtctattcacacactggacaggcatatacggacctccatttctagactataacagaataagtccagaaattagaggactatacaaagacataatatacaaccccttaatagacaaaggagtaggcaaccatgtatgggtagactactgcagtaaaccatctgctgagtactcagaaacacaaagcaaatgccacatagcagacctacctttatggtgtgcactatttggatatgcagactgggtaaaaaaagacacaggcaactggggcatagtagactgggccagagtacttataatatgtccttacacttttccaaaactatatgacagcgcaaatcctaacacaggctttgtagtaatagggtataactttgccagaggagctatgcccgacggaagcaaatacgttccaatagctatgagacacaaatggtaccctactatgttaaaccaacaacaagtactagaagacattagtttatctggaccatttgcaaacagagacaaagtacctagtgtccaactgactgccaagtacaagttccgatggcattttggtggcaatcctgtttccgaacagattattaaagacccgtgccaacagcccaccttccaaatgcccggaaccggtacactccctcgcagaatacaagtggcggacccgaaatacctcgggccccagtacaccttccactcgtgggactacagacgtgacttctttaacagaaagactattaaaagaatgtcagaacaaccagacacttttgagtctatattctcaggcgcaaaaaaaccaagggtggacctcgacaaaatccagctgcaagaagacaactattcccaagagcaaagaaaacagaaaccgtgggaagacagcgagacccagacagagagcgaagtcccatcacaagaagagacgcaaaacctacagcagcagctccaacagcagctccgagaacaaaagcagctcagacagggaatcaactgcctcttcgagcagctgataaaaacccaacagggagtccatatagatccttcccttgtataggcccaaaagccttacttttcccagagagagcacccagaacctactctaagggagactgggaaacagagtatcaggcctgcagagcgtttgacagacctgctagaagcaacctaacagacatacccttttacccttaccttccaccaccccccgaaaaattctatgtaacctttaagcttggctttaaataaacaaggccgtgggagtttcacttgtcggtgtctgcttataaaggttactaagcactccgagcgaagcgaggagtgcgaccccctgccctgggcccacttcttcggagccgcgggggggg

SEQ ID NO: 2333 - protein, 749 aa, Alphatorquevirus sp.
MAWGWWKRRRRGWFRRRWTRGRVRRRWPRRTYRRPRRRTVRRRRRRRRGRRKFRRYRLKRRYRRRKKTQKIKLTQWQPAKTKRCFMIGYFPTVIQGQGRWSENFTSHIEDKVAKGPFGGGHSTSRWSLKVLYEENQRHHNFWTSSNNDLELARFFGSSWRFYRHDTQDYIVTWNRRAPLGGNILTAPNMHPGIAMLSKHKIVVPSKLTRPRGRKYIKINIKPPTTFIDKWYFQKDICDLTLLNMNVVTCDLRFPFCSPQTDNICVTFQVLAPIYNDFLSITAKQLTEKDWKDYYKTFLDKAIPLDKERKANILNTFLTEGSYRRPQVDKYKKPPTDKEYYLPKDAQWGDPIHIINNSETATNQPPQTRAHLIEKIQQNAENVLAKVNQELKEYKATQAQHGLFTHWTGIYGPPFLDYNRISPEIRGLYKDIIYNPLIDKGVGNHVWVDYCSKPSAEYSETQSKCHIADLPLWCALFGYADWVKKDTGNWGIVDWARVLIICPYTFPKLYDSANPNTGFVVIGYNFARGAMPDGSKYVPIAMRHKWYPTMLNQQQVLEDISLSGPFANRDKVPSVQLTAKYKFRWHFGGNPVSEQIIKDPCQQPTFQMPGTGTLPRRIQVADPKYLGPQYTFHSWDYRRDFFNRKTIKRMSEQPDTFESIFSGAKKPRVDLDKIQLQEDNYSQEQRKQKPWEDSETQTESEVPSQEETQNLQQQLQQQLREQKQLRQGINCLFEQLIKTQQGVHIDPSLV

SEQ ID NO: 2334 - protein, 153 aa, Alphatorquevirus sp.
MFLGRHWRKKRALLLLPVPAKPKAPSRQMSWSRPVHDERGIQRNWFEGVIRTHSACCGCGNACTHLSALAQRYGYPSLPSHTPRPGTPTPVSTPEQIRRARALPAAPDHPPALPWHGDGGRDGGAAGSDVGGPVAEFAEDGLDGLIAALDDEQ

SEQ ID NO: 2335 - protein, 84 aa, Alphatorquevirus sp.; identical to SEQ ID NO: 1907

SEQ ID NO: 2336 - DNA, 2940 bp, Alphatorquevirus sp.
cgctacgccttcggctgcgcgcggcacctcgtcaaggggcaattcgggctcgggactggccgggctatgggcaaggctcttaaaaagccatgtttctcggtaaactttacagaaagaaaaggaaagtgcttctgcagactgtgccagacccaaagaaagctaggcggcttctgattatgtggcagccccccgtgcacaatgtccccggcatcgagagaaactggtacgacagttgctttcgatcccatgctgctgtttgtggctgtggcgactttattactcatcttaatcatctggcagctactctgggtcgccctccgcgttctcggcaccccgggggccccggcactccgcagataagaaacctgccagcgctcccggcaccccagggtgagcccggtgacagagcgccatggcctacggatggtggggccggcggcgccgctggagaagatggaggacgcggcggagaccgtggagaaccaggagacgtagaagacgacgtgctcctcgccgctttcgacctcgccgaagagtaaggaggcgcagggggcggtggcgcaggcggtatagaaaatggaggcgacgcaggggcagacggacgcacagaaaaaagataatcataaaacagtggcagccgaactttataagacgctgctacatcataggctacctgcctataatattctgtggcgagaacaccaccgcccagaactttgccacccactcggacgatatgatagccaaaggaccgtggggggggggcatgactactaccaagttcactcttagaatcctgtacgacgagtttaccaggtttatgaacttctggactgttagtaacgaagacctagacctgtgtagatacgtaggctgcaaactcatattctttaaacaccccaccgtagactttatagtgaggataaacacacagcctccattcctagacactaacctgaccgcagcacagatacaccctggcatcatgatgctcagcaaaaaacacatactgataccctcactaaagaccaggcccagcagaaaacacagggtggtcgtcagagtgggcccacctagactttttcaagacaagtggtacccccaatcagacctgtgtgacacagttctgctttccgtgtttgcaacggcctgtgacttgcaatatccgttcggctcaccactaactaacaacccttgcgtcaacttccagattctggggcaccagtacaaaaacaaccttagtattagttccacaaatgatagcactaaccaaatccactatgaaaacaatttatttaacaaagtagaactatacaacacctttcaaacaatagctcaattaaaagaaacaggactagttacaaatgctacagcatcagaaaaactgtggaaccaagtacaaaacacaacagcactatcaccagaaggctcaaatgcacctaatagcaaagacacttggtacaagggaaacacatacaacaagaaaatatcagagttagctcagaaaaccagagccagattcaaagctgcaacacaggcagccctgccaaactaccctgcaattatgtccacagacttgtatgagtaccactcaggcatatactctagcatattcctagcagcaggaagaagctacttcgagaccactggggcctacacagacgttatatacaaccctttcacagacaaaggcactggaaacatggtgtggatagactacctaacaaaatcagactccatatacacaaagaacaaaagcaaatgcgaaatatttgacctgcctctgtgggccaccttcacaggatactcagagttctgttcaaaagtaacaggagacactgccatacacctggctgccagagtagtagtcagatgcccctacaccgaacccatgcttatagaccactcagaccccaacaggggctttgtaccatactcctttaactttggagagggcaaaatgcccggaggctcctccaaagtgcctataagaatgagggccaagtggtacgtgaacatatttcaccagcaagagttcatggaggccatagttcagagcggaccgtttgcttacaagggcgacataaaatcagcggtactcagcatgaaatacagattccactggaaatggggcggaaaccctatatccaaacaggtcgtccggaatccctgctccacctccagcacctccgcgggccatcgaggacctcgcagcgtacaagtcgttgacccaaaacacgttaccccggaagtcacctggcactcgtgggacatcaagcgaggtctctttggcaaagcaggtattaagagaatgcaacaagaatcagatgctctttacattcctacaggaccactcaagaggccgcgcagggataccaacgcccaagacccagaagagcaaaacgaaagctcaggtttcagagtccagcaacgactcccctgggtccactccagccaagaaacgcaaagctcccaagaagagatacaagcggaggggacggtacaggaacaactcctcctccagctccgagagcagcgagtactccgcttccagctccaacagctcgccagccaagtcctcaaagtgcaagcagagcaaggcctacaccccctattatcttcccaagcataaacaaagcctttatgtttgagcccaagggtcctaaagccatacagggctaccacgattggctagaagagtacacctgctgcaaatactgggatagaccccccagaaccctacacacagacatacccttctacccctgggcaccaaaaccccaagaccaagtaagggtctctttcaaactcaacttccaataaagtttcaaggccgtgggagtttcacttgtcggtgtctgcttattaaggtcaccaagcactccgagcgcagcgaggagtgcgaccctgggggtgggtgcaacgccctcggcggccgcg

SEQ ID NO: 2337 - protein, 739 aa, Alphatorquevirus sp.
MAYGWWGRRRRWRRWRTRRRPWRTRRRRRRRAPRRFRPRRRVRRRRGRWRRRYRKWRRRRGRRTHRKKIIIKQWQPNFIRRCYIIGYLPIIFCGENTTAQNFATHSDDMIAKGPWGGGMTTTKFTLRILYDEFTRFMNFWTVSNEDLDLCRYVGCKLIFFKHPTVDFIVRINTQPPFLDTNLTAAQIHPGIMMLSKKHILIPSLKTRPSRKHRVVVRVGPPRLFQDKWYPQSDLCDTVLLSVFATACDLQYPFGSPLTNNPCVNFQILGHQYKNNLSISSTNDSTNQIHYENNLFNKVELYNTFQTIAQLKETGLVTNATASEKLWNQVQNTTALSPEGSNAPNSKDTWYKGNTYNKKISELAQKTRARFKAATQAALPNYPAIMSTDLYEYHSGIYSSIFLAAGRSYFETTGAYTDVIYNPFTDKGTGNMVWIDYLTKSDSIYTKNKSKCEIFDLPLWATFTGYSEFCSKVTGDTAIHLAARVVVRCPYTEPMLIDHSDPNRGFVPYSFNFGEGKMPGGSSKVPIRMRAKWYVNIFHQQEFMEAIVQSGPFAYKGDIKSAVLSMKYRFHWKWGGNPISKQVVRNPCSTSSTSAGHRGPRSVQVVDPKHVTPEVTWHSWDIKRGLFGKAGIKRMQQESDALYIPTGPLKRPRRDTNAQDPEEQNESSGFRVQQRLPWVHSSQETQSSQEEIQAEGTVQEQLLLQLREQRVLRFQLQQLASQVLKVQAEQGLHPLLSSQA

SEQ ID NO: 2338 - protein, 149 aa, Alphatorquevirus sp.
MFLGKLYRKKRKVLLQTVPDPKKARRLLIMWQPPVHNVPGIERNWYDSCFRSHAAVCGCGDFITHLNHLAATLGRPPRSRHPGGPGTPQIRNLPALPAPQGEPGDRAPWPTDGGAGGAAGEDGGRGGDRGEPGDVEDDVLLAAFDLAEE

SEQ ID NO: 2339 - protein, 127 aa, Alphatorquevirus sp.
LGPLQPRNAKLPRRDTSGGDGTGTTPPPAPRAASTPLPAPTARQPSPQSASRARPTPPIIFPSINKAFMFEPKGPKAIQGYHDWLEEYTCCKYWDRPPRTLHTDIPFYPWAPKPQDQVRVSFKLNFQ

SEQ ID NO: 2340 - DNA, 2940 bp, Alphatorquevirus sp.
cgctacgccttcggctgcgcgcggcacctcgtcaaggggcaattcgggctcgggactggccgggctatgggcaaggctcttaaaaagccatgtttctcggtaaactttacagaaagaaaaggaaagtgcttctgcagactgtgccagacccaaagaaggctaggcggcttctgattatgtggcagccccccgtgcacaatgttcccgggatcgagagaaactggtacgagagttgctttcgatcccacgctgctgtttgtggctgtggcgactttgttggccatattaataatctggcagctactctgggtcgccctccgcgttctcgacacccaggaggccccggcactccgcagataagaaacctgccagcgctcccggcaccccagggtgagcccggtaacagagcgccatggcctacggatggtggggccggcggcgccgctggagaagatggaggacgcggcgcagaccgtggagaaccagaagacgtagaagacgacgcgctcctcgccgctttcgacctcgtcgaagagtaaggaggcgcagggggcggtggcggaggcggtatagaaaatggaggcgacgcaggggcagacggacgcacagaaaaaagataatcataaaacagtggcagccgaactttataagacgctgctacatcataggctacctgcctctgatattctgtggcgagaacaccaccgcccagaactttgccacccactcggacgatatgataggcaaaggaccgtgggggggaggcatgactacaacaaagtttactctaagaatcctgtacgacgagtttaccaggtttatgaacttctggactgtcagtaacgaagacctagacctgtgtagatacgtgggctgcaaactaatattttttagacaccccacagtagactttatagtcaggataaacacacagcctccgttcctagacactaacctcaccgcaccacagatccacccgggcatcatgatgctcagtaaaaaacacatactgataccctcgctaaagaccaggcccagcagaaaacacagggtggttgtcagagtgggcccacctagactttttcaagacaagtggtacccccagtcagacctctgtgacacagttctgctttccgtgtttgcaacggcctgtgacttgcaatatccgttcggctcaccactaactgacaacccttgcgtcaacttccagattctggggcaccagtacaaaaaccaccttagtataagttccataaatgatgaatctaacaaacagcactatcaaaccaatttatttaacaaagttgagctatacaacacttttcaaaccatagcccagctcaaagatacaggactagtcacaaaccttacaggatcacaaaacatgtggaaccaggtacaaaacacaacagcactcttaccaaacggcagtaatgcacctgaaagcaaagacacttggtacaaaggaaacacatacaacaataaaattaaagagttagcagaaaaaactagagctagatttgcaagtgcaacaaaggcagccctaccaaactaccccacaatcatgtctacagacctctatgagtaccactcaggcatatactccagcatattcctagcagcaggcaggagctactttgagaccccgggggcctacacagacgtcatatacaacccttttacagacaaaggcactggaaacatggtctggatagactacctaacaaaagaaaactccatatacacaaacaacaaaagcaaatgtgagatatttgacttacctctctgggccaccttcacaggatactcagagttctgttcaaaagttacaggagacacggccatacacctaaatgctagagtggttgtcagatgcccctacactgagcccatgctcatagaccactcagaccccaacaatggctttgtaccatactcctttaactttggagagggcaagatgcccggaggctcctccaaagtgcctataagaatgagggccaagtggtacgtaaacatgtttcaccagcaagagttcatggaggccatagtagagagcggaccgtttgcttacaagggcgacataaaatcagcggtactcagcctgaaatacagattccactggaaatggggcggaaaccctatatccaaacaggtcgtccggaatccctgctccacctccagcacctccgcgggccatcgaggacctcgcagcgtacaagtcgttgacccgaaacacgttaccccggaagtcacgtggcactcgtgggacatcaaacgaggactctttggtaaagcaggtattaaacgaatgcagcaagaatcagatgctctttacatttctacaggagcattcaagaggccccgcagggataccaacgccgaagacccagaaaagcaaaacgaaagctcagctttcagagtccagcagcgagtcccctggatccactccagccaagaaacgcaaagctcgcaagaagaaatacaaacggaggggacggtacaagaacaactcctcctccagctccgagagcagcgagtactccgcttccagctccaacagctcgccagccaagtcctcaaagtccaagcagggcaaggcctacaccccctattatcttcccaagcataaacaaggcctttatgtttgagcccaagggtcctaaacccatacagggctaccacgattggctagaagaatacacctgctgcaagttctgggacagaccccccagaacgctacacacagacacgcccttctacccctgggcaccaaaacccctagaacaagtaaaggtctctttcaaacttaacttccaataaaatttcaaggccgtgggagtttcacttgtcggtgtctgcttcttaaggtcaccaagcactccgagcgcagcgaggagtgcgaccctgggggtgggtgcaacgccctcggcggccgcg

SEQ ID NO: 2341 - protein, 739 aa, Alphatorquevirus sp.; identical to SEQ ID NO: 682

SEQ ID NO: 2342 - protein, 149 aa, Alphatorquevirus sp.; identical to SEQ ID NO: 683

SEQ ID NO: 2343 - protein, 127 aa, Alphatorquevirus sp.; identical to SEQ ID NO: 684

SEQ ID NO: 2344 - DNA, 2940 bp, Betatorquevirus sp.
cgggagccgaaggtgagtgcaaccaccgaagtctaggggcaattcgggctagatcagtctggcggaacgggcaagaaacttaaaatatattttctttacagatatgttctcatcatggaagacacctacatcatcaaagagacaacaagaactacaatggatgggaataattaattcaactcacgaccaaatttgccactgcgacgacccaacccttcatttactatactgcattaacaaattctccggattccaaaaaccagaaattgatattaacaacataaaatgcctccttaccggcaatcctactacttcaaaagaaatttctacaacaatagaagacgcaggtttagaagaaggggaattagaaaaccttttcgcagaagatactggagaacaaaaagaaaacgaaaacccagatacaaggtaaacaaatttaaattttataaaagaaaagcaaacaaaataacagttaaacaatttcaaccaagaactattaacagatgcaaatgtgttggatttaaatgtttatttcaaggtagtcctttaagagctatgaacaactttgtacaatatgtttactctattataccagaaaaacaaccaggaggagggggatggagtattcaaatactcagcctagactcaatatttgaagactatgaacatttacaatgtatatggacaaaaggaaacgcaggtttacctcttgttagatacatgggctgcaaatttactttataccaatccgcagaaacagactatgtattttgttatgataactgctggccaatggtcgataccatacatactcacgcagactgtgcaccatttagaatgctacaaaaaaaaaacaaaatagttattccctcaatgaacacaaaaaaaagacgtaaaccatacaaaaaagtttttgtaaaaccaccatctcaaatgtcaaacaaatggtactttcaaaaagacatatgcaaaacaccactagtcatgtttactgcaactgcagtttctcttggaaacccatttgcagaccctagagctaaaagcaataatgttaccatacactgcataaacccatacctttttcaaaacccagactttcaacattggggaacacaaggctactcacctaaaatggccgacaacacaacaccactatacttatatggatcacaaatagacaatttaacgtacgaaaacctaaaagaccataaagacactattatagcactcacaaatacaaaagaccacacaccaggaacaccactaacaaattcacaaagcgacatatcaaaattagcaggaaacccctttcacgaagactatacatcaggagatatgtttgtatacatatctaaaataactccacaagaaatgcaacagtatttaacaaagaatacatgcccaccagtaaccaaacaaagcataaccaatgccggtaatattatctatacatttagatacaacccagacaacgatgatggctccactaataaacaatatatagttagcacagcctcaggaaacaaaataaaaccaccagaaaacgaaaattggatattatcaggctttccatttccctacatgttatggggatggacagactggataaaaaaactaggtgaaacaccacaatttgacacaaacaaactagttatactagaaacaaaagcatttgatgataaaacaataccattatttatacctatagacttaacatttatacatggatatgacccatatgaacccattgaagacaaaacacacaatataagcccatacaatgcaaaaaattggtttccaagatatgaatatcaaaaaaaaactataaatgacatttgcttatctggacctgcctgtccaagaccaccatgggaccactatttacaagctatatgtaaatatactatgtattttaaatggggaggttgtcctaaatctttacaaaaagcttataatccctgtttacagtccaaatggcccactcccgataacctctatggaagacctgcgattcagaatcctaacatcttcccacaaacagaactgtactcctgggactgggaaaatgactatgttacagaagcagctattaacagaatccgaagatttacagaaattgatccaaaaatgttctcaattacagaaatcaaaaacaacccaccggcgatacaaaaaaagaaaacaacagaagacgaagaagaggagaagaagctcaagctccagctccacaagctccgatacaacaaagtcctcctgcagctccaactccaacagcaattaaaatcactaaaagcaaaataaaacttaacatttttgaagacccaaaaccaaaaaaccgcagaatgactccctgggaaaaagaacaagaaaaactagatgctgccatttggaaaagaccacaaagagagtttattttagatataccttattaccctggcattccccctactccgcttgtaaactttgacttaaaatacaagtatgaataaacaaggccaacagtaatacacttagtcgtgtccatttatttaagtttaacttatataaacatccaccgcctccctataatttgggcgccaaaatttaaaagggtgctccgcccccttacacccccaagggggctccgcccccttacacccccaagggggaagggggctccgcccccttacacccccaagggggctccgcccccttacacccccacattaatattcaacaggaaaaccacctaattagaatggctcaccacaaacggtctctaacttcccttttttaacaaacttccccttttttcaattattattcatgagattaattaataaacaccgtaattccggggaggaaactattacctataaaactaactacactttcgaatggctgagtttatgccgccagacggaggctgtatcacttcagtgactacagactgatcttggg

SEQ ID NO: 2345 - protein, 671 aa, Betatorquevirus sp.
MPPYRQSYYFKRNFYNNRRRRFRRRGIRKPFRRRYWRTKRKRKPRYKVNKFKFYKRKANKITVKQFQPRTINRCKCVGFKCLFQGSPLRAMNNFVQYVYSIIPEKQPGGGGWSIQILSLDSIFEDYEHLQCIWTKGNAGLPLVRYMGCKFTLYQSAETDYVFCYDNCWPMVDTIHTHADCAPFRMLQKKNKIVIPSMNTKKRRKPYKKVFVKPPSQMSNKWYFQKDICKTPLVMFTATAVSLGNPFADPRAKSNNVTIHCINPYLFQNPDFQHWGTQGYSPKMADNTTPLYLYGSQIDNLTYENLKDHKDTIIALTNTKDHTPGTPLTNSQSDISKLAGNPFHEDYTSGDMFVYISKITPQEMQQYLTKNTCPPVTKQSITNAGNIIYTFRYNPDNDDGSTNKQYIVSTASGNKIKPPENENWILSGFPFPYMLWGWTDWIKKLGETPQFDTNKLVILETKAFDDKTIPLFIPIDLTFIHGYDPYEPIEDKTHNISPYNAKNWFPRYEYQKKTINDICLSGPACPRPPWDHYLQAICKYTMYFKWGGCPKSLQKAYNPCLQSKWPTPDNLYGRPAIQNPNIFPQTELYSWDWENDYVTEAAINRIRRFTEIDPKMFSITEIKNNPPAIQKKKTTEDEEEEKKLKLQLHKLRYNKVLLQLQLQQQLKSLKAK

SEQ ID NO: 2346 - protein, 123 aa, Betatorquevirus sp.
LAERARNLKYIFFTDMFSSWKTPTSSKRQQELQWMGIINSTHDQICHCDDPTLHLLYCINKFSGFQKPEIDINNIKCLLTGNPTTSKEISTTIEDAGLEEGELENLFAEDTGEQKENENPDTR

SEQ ID NO: 2347 - DNA, 2940 bp, Alphatorquevirus sp.
cgcgcggcacctcggacccccgctcgtgctgacacgctgcaattcgggcacgggtctggccgggctatgggcaagattcttaaaaaatttcccacctctgttgtccgccaggacaccaagtcatgccgtggtctccgccgagagctaacatcaacgagagagaggagctctggatccagtcagttatttactcgcatgatactttttgcgggtgcactgacattgctgggcatattgctagccttctggcttgcatacaaccagctccacctcgagaccctccaccccgtctcgttcggagcctgccggcgctgccagcggctccggaacgcggtgagcagccacggcctggtggagatacagaagaaggccctggaaacgctggaggagacgccggtggggcctacggacaagaagatttagaagaacttttcgccgccgccgcggaagacgatatgtgagtagagggcggcgccgccgatacaggcgcagacggagacgggggcgacgcagaaagggacgcagacgcagacacaaaaagacccttatcctaagacaatggcagccagacgttgtaaaaagatgcttcatcacaggatggctgccccttatcatctgtggggctggacatactcaattcaacttcataacccacatggacgacatcccccctagaaatgcctcctatggaggcaatttcaccaacataacctttaacctagcctgtttttatgatgaatttatgcaccacagaaacaggtggtccgcctcaaaccacgacctagaactagtaagatacataaaaaccagcataaaactatacagacacgagacagtagactatgtagtctcctacaccaccacaggccccttcgagacaaatgaaatgtcctacatgctcactcaccctctggccatgctcctaagcaagaaacacgtagttgtacccagcctaaaaacaaaaccacacggcagaaagtacaaaagactaaccatcaagccccccaaactcatgacaaacaagtggtactttgccaaagacttctgccacataggcctcttccaaatgtgggccactggcctagaactcagaaacccctggctcagatcaggcactaacagcccagtcataggattctatgtccttaaaaatcaggtgtaccaaaacagatacagcaacctctccacagaaacacaaaaaagaaaagaggcatatagcgaactcaccaaacaaaatggcacaaaatggtacaattggcagtacacctacactaaagttatgaagcctatatactatgccgctgccaatgaaagtactaatacaggttttaaaaacaaaccatataactggaaaaattataaagagaattttaaagcagtccaaactaagtggacaagcattgtaaaagatgcttatgaactagttgcagatgagtacagacaaatatataccaccacactcacatatccacctccgtgggatcccagtaccactgcagacttaaacacaggaagacaatacctagaacatgactgtggcatatacagtccatactttttaacaccacaaatatacagcccagaatggcacacagcatggtcctacataagatacaatcccctcacagacaagggcataggcaacagagtctgcgtgcagtactgcagcgaggcctcctctgaatacaacccagttaagagtaagtgcatgttacaggacatgccactgtggatgatgctgtatggctacgcagactatgtaattaagagcacaggcatacagtccgcctggacagacatgagagtggctatcaggagtccatacacagaccccaaactcataggcagttcagaaaacaccatgttcatccccataggcctagaattcatgaacggagacatgccagacaagaggccctacattccgttaaagtggtggtttaaatggtaccccatgattacacaccaaaaaaccgcacttgaggcaatagtttcctgcagccccttcatgcccagagatcaggaagcttccagttgggacataaccataggttacaaagcaaccttcttatggggcggctcccccttacctccacagcctatcgacgacccctgccaaaaacccacacacgaactacccgaccccgatagaaaccctcctagaatacaaatctcagacccgcagcacctcggaccggcgacgctcttccactcgtgggacctcagacgtggatacattagtacaaaaagtattaaaagagtgtcagaacacctcgacactaatgaatatttttcgacaggcgtcgaatccaaaaaaccccggttcgatactccccaccacgggcagctatcaaaccaagaagaagacgccttacatattctcagacaactccagaaagagcaagaggaaagcagcaccgaagaagaacaagcactccaaaaagaagaggagcaaaaagaaaagctcctacaacaactccgactccagcgacagcaccagcgagtcctcacgcagggaatcaagcacctcatgggagacgtcctccgactcagacagggagtccactggaaccccatcctgtagtgctgcccccggagccaatcccagacctactttttcccaatactggtaaaaaaaaaaaattctctcccttcgaatggcagtgcgagcaagaggtggccacatggatgaagcggcctatgcgcttctatccctcagacagccccttctacccgtggttaccccccaagcgagatatcccaaatatatgtaaagtaaacttcaaaataaagctcagtgaatgaatctcgaggccccgggagtttcacttagcggtgtctacctcttaaggtcaccaagcactccgagcgccagcgaggagtgcgaccctcgggggtgggtgcaacgccctcggcggccgcgcgctacgccttcggctg

SEQ ID NO: 2348 - protein, 660 aa, Alphatorquevirus sp.
LPLIICGAGHTQFNFITHMDDIPPRNASYGGNFTNITFNLACFYDEFMHHRNRWSASNHDLELVRYIKTSIKLYRHETVDYVVSYTTTGPFETNEMSYMLTHPLAMLLSKKHVVVPSLKTKPHGRKYKRLTIKPPKLMTNKWYFAKDFCHIGLFQMWATGLELRNPWLRSGTNSPVIGFYVLKNQVYQNRYSNLSTETQKRKEAYSELTKQNGTKWYNWQYTYTKVMKPIYYAAANESTNTGFKNKPYNWKNYKENFKAVQTKWTSIVKDAYELVADEYRQIYTTTLTYPPPWDPSTTADLNTGRQYLEHDCGIYSPYFLTPQIYSPEWHTAWSYIRYNPLTDKGIGNRVCVQYCSEASSEYNPVKSKCMLQDMPLWMMLYGYADYVIKSTGIQSAWTDMRVAIRSPYTDPKLIGSSENTMFIPIGLEFMNGDMPDKRPYIPLKWWFKWYPMITHQKTALEAIVSCSPFMPRDQEASSWDITIGYKATFLWGGSPLPPQPIDDPCQKPTHELPDPDRNPPRIQISDPQHLGPATLFHSWDLRRGYISTKSIKRVSEHLDTNEYFSTGVESKKPRFDTPHHGQLSNQEEDALHILRQLQKEQEESSTEEEQALQKEEEQKEKLLQQLRLQRQHQRVLTQGIKHLMGDVLRLRQGVHWNPIL

SEQ ID NO: 2349 - DNA, 2939 bp, Betatorquevirus sp.
cgggtgctgaaggtgagtgaaaccaccgaaatcaaggggcaatatgggctcagtcagtctagcggaatgggcaactaactaaattatattttacagaatgtcagactactacaaaccaataacatggagcagaaaacactgcaaccttaattggattaacagcattgttactgtacatgaccttcaatgcgcctgcaacaatccactaaaacacacaataattggaataattaaccaagaaccatctatcaaatttaacaaagaagaatctacaaaaatacaaaaatgccttactactggagaccaagaagaaggcgatattttagaaaatattggagaaggagacctagaggcctttttcgccgcagactttggagaagaagacgcagaaacacggtaagaaaaagaaaactaaaaaaagtaatagtaagacaatggcaaccaagtactatacgaaaactaaaaataagaggaatgtacccattatatgaaggaaacagagagagaatttctaataactttaaccaatgggccgcatcaatagccccccatggatttcctggaggcggactatggtcaattataagattttctctatactctctgtatgaactacaccttaaaggcagaaactggtggacaatgtcaaactgctctttaccactaataaaataccaaggatgcagcattaaattttacaaatctactaatacagactatataacagtattcacaacttgtggagatatgacagcaaacttagaaacctatcactcctcacaaccatcaattttaaacttaaacaaaagaaaaataataatgacatgtaaagaaaataatcaatataaaaaaccctacaaaaaaaaatttataaaaccacctccactatttgaaaacaaatggtactttcaaagagatatagccaaaataccattattaatgctaataacatcatcatgcagtttagacagatggtacataagctcaaaatcagaatccaacacattaggatttatatcattaaacactgacttctttgtttaccataactttaaaaagccaccaataacaacaggctatataccaaacgcaacattctcattatacacatcaggaacaaatgttaaattaaatgaattaaaatggtcaaacttaatttacttaggaaacacaaaagatatgcaaccaggaaaaacaataggtagtatgcaaggaagcacagatacagaaaaattaaacaactatttttctgatataaaaaactggggaaatcccttttttccagcctactttcacgaagaataccctaactattttacaacaatgaacaaaattgataaaattaaagacctagcaaaaagtagccttaataacaaagtaagtgaatttacaaacctatcacaagacttattttgggaatgcagatacaatcccgaaaatgactctagcagaaatgcttactttattacagatatagaaacattaagaccatgggaaaacccatcaaaagataatttaacagaacaaggtttaccactatggctattactacatggcactatagattatcaccaaaaactaggagacatacaacacctaatgacagatcacatactatgcataacatcagactacatttcaccaacaaaagactactacgtaccactagacagagactttttagctggacatagtccctacacagacatagtaagagacaatgacaaactatactggttccctaaacttaattttcaacaaagaacaattaatgacatagtttcagtaggacctggaacaccaaaacttccaccagacataagctcagaggctcacattgaatataaatttcattttaagcttggaggatgtccaccacaaatggacgacgtttgcgaccctaactcaagatcaaaatggcccactcccagtaacctcatatcatcaactttattgcagagtccagaaacaccaatcgaatactaccttagcagctttgaccaaagacgaggactactcacaaacaaagctgcaaaaagaattaaaaaagactttgggcctaaagaaactttgcttcaatttacaggacaaactacaacagaagtaccgatacaaagcccagagacatcatcatcagaggaaacaaccgaggaaaaagagaaagaagagatacagctccagttcagacaccacagaagaaagcaaaggaaactccagcagcgaatcctccagctcctagacctactccaggaataataataaaaaagagtaacataagggtacaactgtttgaaactcctaaacctaacagaccacttacaccccaagaaaaacaaactgatctagaaatagctaaatggctaaagcgcccagtacgctacttttttaatgatcctccattttatccctggttggtacctgaacctaaagttaactttaaacttaactatgtagaataaaggcctgcattaattcacttgaggtgtccatttgtattatttaaaacttaaataaacagtcaccgcctcccaaaaaccgccggcgcacagggggctacgccccctgtaacccccagggggggacaccccccctaaacccccccgaaaaaccacaaaatttaaattgccgaccacaaacgaacaggaaaccacaaaatttgcattgccgaccacaaacgaacaggaaaaccacataatttgttgccgaccacaaacgaacaggaaaaccacataatttgcattgccgaccacaaacggtaactaacttcctcaaacagcacttacttcctcatttacttatgaatattcattacattaattattaaacacacgtcaaataggaggagttaacaacactataaaactaactacaatgacgaatggctgagtttatgccgctagacggagacgaagacaacactgacttcggctgactgaggg

SEQ ID NO: 2350 - protein, 656 aa, Betatorquevirus sp.
MPYYWRPRRRRYFRKYWRRRPRGLFRRRLWRRRRRNTVRKRKLKKVIVRQWQPSTIRKLKIRGMYPLYEGNRERISNNFNQWAASIAPHGFPGGGLWSIIRFSLYSLYELHLKGRNWWTMSNCSLPLIKYQGCSIKFYKSTNTDYITVFTTCGDMTANLETYHSSQPSILNLNKRKIIMTCKENNQYKKPYKKKFIKPPPLFENKWYFQRDIAKIPLLMLITSSCSLDRWYISSKSESNTLGFISLNTDFFVYHNFKKPPITTGYIPNATFSLYTSGTNVKLNELKWSNLIYLGNTKDMQPGKTIGSMQGSTDTEKLNNYFSDIKNWGNPFFPAYFHEEYPNYFTTMNKIDKIKDLAKSSLNNKVSEFTNLSQDLFWECRYNPENDSSRNAYFITDIETLRPWENPSKDNLTEQGLPLWLLLHGTIDYHQKLGDIQHLMTDHILCITSDYISPTKDYYVPLDRDFLAGHSPYTDIVRDNDKLYWFPKLNFQQRTINDIVSVGPGTPKLPPDISSEAHIEYKFHFKLGGCPPQMDDVCDPNSRSKWPTPSNLISSTLLQSPETPIEYYLSSFDQRRGLLTNKAAKRIKKDFGPKETLLQFTGQTTTEVPIQSPETSSSEETTEEKEKEEIQLQFRHHRRKQRKLQQRILQLLDLLQE

SEQ ID NO: 2351 - protein, 100 aa, Betatorquevirus sp.; identical to SEQ ID NO: 1131

SEQ ID NO: 2352 - protein, 57 aa, Betatorquevirus sp.; identical to SEQ ID NO: 1132

SEQ ID NO: 2353 - DNA, 2939 bp, Betatorquevirus sp.
cgggtgctgaaggtgagtgaaaccaccgaaatcaaggggcaatatgggctcagtcagtctagcggaatgggcaactaactaaattatattttacagaatgtcagactactacaaaccaataacatggagcagaaaacactgcaaccttaattggattaacagcattgttactgtacatgaccttcaatgcgcctgcaacaatccactaaaacacacaataattggaataattaaccaagaaccatctatcaaatttaacaaagaagaatctacaaaaatacaaaaatgccttactactggagaccaagaagaaggcgatattttagaaaatattggagaaggagacctagaggcctttttcgccgcagactttggagaagaagacgcagaaacacggtaagaaaaagaaaactaaaaaaagtaatagtaagacaatggcaaccaagtactatacgaaaactaaaaataagaggaatgtacccattatatgaaggaaacagagagagaatttctaataactttaaccaatgggccgcatcaatagccccccatggatttcctggaggcggactatggtcaattataagattttctctatactctctgtatgaactacaccttaaaggcagaaactggtggacaatgtcaaactgctctttaccactaataaaataccaaggatgcagcattaaattttacaaatctactaatacagactatataacagtattcacaacttgtggagatatgacagcaaacttagaaacctatcactcctcacaaccatcaattttaaacttaaacaaaagaaaaataataatgacatgtaaagaaaataatcaatataaaaaaccctacaaaaaaaaatttataaaaccacctccactatttgaaaacaaatggtactttcaaagagatatagccaaaataccattattaatgctaataacatcatcatgcagtttagacagatggtacataagctcaaaatcagaatccaacacattaggatttatatcattaaacactgacttctttgtttaccataactttaaaaagccaccaataacaacaggctatataccaaacgcaacattctcattatacacatcaggaacaaatgttaaattaaatgaattaaaatggtcaaacttaatttacttaggaaacacaaaagatatgcaaccaggaaaaacaataggtagtatgcaaggaaccacacctacagacaaattaaacaaatatttttctgatataaaaaactggggaaatcccttttttccagcctactttcacgaagaataccctaactattttacaacaatgaacaaaattgataaaattaaagacctagcaaaaagtagccttaataacaaagtaagtgaatttacaaacctatcacaagacttattttgggaatgcagatacaatcccgaaaatgactctagcagaaatgcttactttattacagatatagaaacattaagaccatgggaaaacccatcaaaagataatttaacagaacaaggtttaccactatggctattactacatggcactatagattatcaccaaaaactaggagacatacaacacctaatgacagatcacatactatgcataacatcagactacatttcaccaacaaaagactactacgtaccactagacagagactttttagctggacatagtccctacacagacatagtaagagacaatgacaaactatactggttccctaaacttaattttcaacaaagaacaattaatgacatagtttcagtaggacctggaacaccaaaacttccaccagacataagctcagaggctcacattgaatataaatttcattttaagcttggaggatgtccaccacaaatggacgacgtttgcgaccctaactcaagatcaaaatggcccactcccagtaacctcatatcatcaactttattgcagagtccagaaacaccaatcgaatactaccttagcagctttgaccaaagacgaggactactcacaaacaaagctgcaaaaagaattaaaaaagactttgggcctaaagaaactttgcttcaatttacaggacaaactacaacagaagtaccgatacaaagcccagagacatcatcatcagaggaaacaaccgaggaaaaagagaaagaagagatacagctccagttcagacaccacagaagaaagcaaaggaaactccagcagcgaatcctccagctcctagacctactccaggaataataataaaaaagagtaacataagggtacaactgtttgaaactcctaaacctaacagaccacttacaccccaagaaaaacaaactgatctagaaatagctaaatggctaaagcgcccagtacgctacttttttaatgatcctccattttatccctggttggtacctgaacctaaagttaactttaaacttaactatgtagaataaaggcctgcattaattcacttgaggtgtccatttgtattatttaaaacttaaataaacagtcaccgcctcccaaaaaccgccggcgcacagggggctacgccccctgtaacccccagggggggacaccccccctaaacccccccgaaaaaccacaaaatttaaattgccgaccacaaacgaacaggaaaccacaaaatttgcattgccgaccacaaacgaacaggaaaaccacataatttgttgccgaccacaaacgaacaggaaaaccacataatttgcattgccgaccacaaacggtaactaacttcctcaaacagcacttacttcctcatttacttatgaatattcattacattaattattaaacacacgtcaaataggaggagttaacaacactataaaactaactacaatgacgaatggctgagtttatgccgctagacggagacgaagacaacactgacttcggctgactgaggg

SEQ ID NO: 2354 - protein, 656 aa, Betatorquevirus sp.
MPYYWRPRRRRYFRKYWRRRPRGLFRRRLWRRRRRNTVRKRKLKKVIVRQWQPSTIRKLKIRGMYPLYEGNRERISNNFNQWAASIAPHGFPGGGLWSIIRFSLYSLYELHLKGRNWWTMSNCSLPLIKYQGCSIKFYKSTNTDYITVFTTCGDMTANLETYHSSQPSILNLNKRKIIMTCKENNQYKKPYKKKFIKPPPLFENKWYFQRDIAKIPLLMLITSSCSLDRWYISSKSESNTLGFISLNTDFFVYHNFKKPPITTGYIPNATFSLYTSGTNVKLNELKWSNLIYLGNTKDMQPGKTIGSMQGTTPTDKLNKYFSDIKNWGNPFFPAYFHEEYPNYFTTMNKIDKIKDLAKSSLNNKVSEFTNLSQDLFWECRYNPENDSSRNAYFITDIETLRPWENPSKDNLTEQGLPLWLLLHGTIDYHQKLGDIQHLMTDHILCITSDYISPTKDYYVPLDRDFLAGHSPYTDIVRDNDKLYWFPKLNFQQRTINDIVSVGPGTPKLPPDISSEAHIEYKFHFKLGGCPPQMDDVCDPNSRSKWPTPSNLISSTLLQSPETPIEYYLSSFDQRRGLLTNKAAKRIKKDFGPKETLLQFTGQTTTEVPIQSPETSSSEETTEEKEKEEIQLQFRHHRRKQRKLQQRILQLLDLLQE

SEQ ID NO: 2355 - protein, 100 aa, Betatorquevirus sp.; identical to SEQ ID NO: 1131

SEQ ID NO: 2356 - protein, 57 aa, Betatorquevirus sp.; identical to SEQ ID NO: 1132

SEQ ID NO: 2357 - DNA, 2939 bp, Alphatorquevirus sp.
cagcgaggagtgcgacccttccccctgactgtcaaggggcaattcgggctcgggactggccgggccccgggcaaggctcttaaatagctatgttttttggtaggcctcacagaaagaagaggctactgtcactgcttagcttgccagctgcaaagaaaaaaccacctatgagtctgtggaggcctcctctgcacaatgtcccggggatcgagcacctctggtacgagtccgtgcatcgtggccatgctgctatttgtggctgtggggatcctgtacgccattttactgctgttgctgaaagatatggcgtcccggggggcccacgatcttctggggcaccgggagtagggggcaaccacaaccctcccccaatccgtcgagcccgccacccggcggccgctccggaccccccagcaggtaaccagcctccggccctgccatggcatggggatggtggaagcgaaagcggcgctggtggtggagaaagcggtggacccgtggccgacttcgcagacgatggcctagacgacctcgtcgccgccctcgacgaagaagagtaaggaggaggaggaggtggaggagagggcgacccagacgcagactgtacagacgctacagacggtacagacgaaaacgaaagagggctaaaataactataagacagtggcaaccagccaaaactagaaaatgctacataaggggctacatgcccgcccttatgtgcggctggggagcctacagcagaaactacagcagtcacttagaggacaaaataactgcgggaccctatggtgggggacacagcactatgagattctctctacaggtgctctacgaagagcacctgaaacaccacaactactggacgcgcagcaaccaggacctagaactggccctgtactatggctgcacaattaagttttacagggaccccgaaacagactttatagttacataccagagaaaatctcctctgggaggtaacataatgacagcaccatcactacacccagcagaagccatgcttacaagaaacaaaatactaatacccagtctacaaactaaaccaaagggcagaaaaactgtaaaagttaacatagcaccccccactctatttgtgcacaagtggtactttcaaaaggacatatgtgacttaacactgttcaacttgaacgttgttgcggctgacttgcggtttccgttcggctcaccacaaactgacaacatttgcataaccttccaagttctctcttccgtttacaacaactttctctccataacccatacttcctcaaccagtgacactataatagacgaatttttaaaactagcaattccagacacacctaaaaaaagacactggaatgttttaaatacatacaaaacagaaggttgcttttcacacccacaactgcaaaaatacaaaatacctcaagcaggcataggtgctgagaattactttagcacaccagacggactatggggagaccctatatacagcaaaaacaatacaggcgcagagcaatcagcagagaacattcgaactacaattaaaaacaacatgaaatcttactttaaaaaaatacaagaggagagtacaataataacaaagggagacaaattattctgtcacctcacaggcatattttcaccaccctggctaaatataggcagagttagtagagagtttccaggcctatataatgacgttatatacaacccatggacagacaaaggctcaggcaacaaagtatggctagacagcctaacaaaacaagacaacatttacaaaaaaggacaaagtgtccttcttatggaagacatgcccttatacataatgctaaacggatacatagactgggccaaaaaagaactaaacaactggcagatgcaaaccatgtacagagtaatgatagtatgtccctatacttttcccagactatatttagaaaccaatccctacaacgggtatgtcatgtactcacaagcctttggagcaggccttatgccagacaaagtatcaattccacccatagcatggagaggcaagtggtacccacacgtactacaccaagaagcagtaataaatgacatagtgcagtgtggaccctttgcaccaaagatacaaaaaccaaacatgcagctcaacatgaaatactcatttagattcacatggggcggtaatcctatttccgcacagattgttaaagacccctgcacccagcccacctttgaaattcccggtggcggtaacatccctcgcagagtacaagtcatcaatccgaaattcctcgggcccaactacagtttcagatcatttgacatacgacgtgacctctttagcgacaagagtcttaaaagaatctcagaacaaccagagacttttgagtctttattctcaggtggcaaacgccccaggatcgacctacccaagtacgtcccgccagaagaaaactccgatacccagcagaggcaacaaagagaacagaggccgtggacgagcgaaagcgaaagcgaagcagaagcccaagaagagacgccgcagggctcggtccgagagcagctccagcagcagctccaagagcagcttcaactccgaagagggctccagtgcctcttcgagcagctagtgagaacacagcagggagtccacgtagacccctgccttgcgtaggccccaagcagtggctgtttccagagagaaagcccaaaccccctcctacttccggggactgggccatggagtacctaatgtgtaaaataatgaacaggcctccccgcactcacctcacagacccccctttctacccttactgcaaaaacaattacaatgtaacctttcagcttaactacaaataaaaggcatcctctctgtgcaaggccgtaggagtttcacttgtcggtgtctacctctaaaggtcactaagcactccgagcgc

SEQ ID NO: 2358 - protein, 744 aa, Alphatorquevirus sp.
MAWGWWKRKRRWWWRKRWTRGRLRRRWPRRPRRRPRRRRVRRRRRWRRGRPRRRLYRRYRRYRRKRKRAKITIRQWQPAKTRKCYIRGYMPALMCGWGAYSRNYSSHLEDKITAGPYGGGHSTMRFSLQVLYEEHLKHHNYWTRSNQDLELALYYGCTIKFYRDPETDFIVTYQRKSPLGGNIMTAPSLHPAEAMLTRNKILIPSLQTKPKGRKTVKVNIAPPTLFVHKWYFQKDICDLTLFNLNVVAADLRFPFGSPQTDNICITFQVLSSVYNNFLSITHTSSTSDTIIDEFLKLAIPDTPKKRHWNVLNTYKTEGCFSHPQLQKYKIPQAGIGAENYFSTPDGLWGDPIYSKNNTGAEQSAENIRTTIKNNMKSYFKKIQEESTIITKGDKLFCHLTGIFSPPWLNIGRVSREFPGLYNDVIYNPWTDKGSGNKVWLDSLTKQDNIYKKGQSVLLMEDMPLYIMLNGYIDWAKKELNNWQMQTMYRVMIVCPYTFPRLYLETNPYNGYVMYSQAFGAGLMPDKVSIPPIAWRGKWYPHVLHQEAVINDIVQCGPFAPKIQKPNMQLNMKYSFRFTWGGNPISAQIVKDPCTQPTFEIPGGGNIPRRVQVINPKFLGPNYSFRSFDIRRDLFSDKSLKRISEQPETFESLFSGGKRPRIDLPKYVPPEENSDTQQRQQREQRPWTSESESEAEAQEETPQGSVREQLQQQLQEQLQLRRGLQCLFEQLVRTQQGVHVDPCLA

SEQ ID NO: 2359 - protein, 156 aa, Alphatorquevirus sp.
MFFGRPHRKKRLLSLLSLPAAKKKPPMSLWRPPLHNVPGIEHLWYESVHRGHAAICGCGDPVRHFTAVAERYGVPGGPRSSGAPGVGGNHNPPPIRRARHPAAAPDPPAGNQPPALPWHGDGGSESGAGGGESGGPVADFADDGLDDLVAALDEEE

SEQ ID NO: 2360 - protein, 65 aa, Alphatorquevirus sp.
LPCVGPKQWLFPERKPKPPPTSGDWAMEYLMCKIMNRPPRTHLTDPPFYPYCKNNYNVTFQLNYK

SEQ ID NO: 2361 - DNA, 2939 bp, Alphatorquevirus sp.
cgggactggccgggctatgggcaaggctcttaaaaaagcatgtttctcggcaggcattggagaaagaaaagggcactgctactgttaccggtgccagctaaaccgaaagcaccttctcgacagatgagctggagcagacccgtacacgatgagcgcggaatacagcgcaactggttcgagggggtcattcgcacccactctgcttgctgtggttgtggcaatgcttgtactcatctatctgctctggcccagaggtatgggtacccttccctaccttcgcataccccgcgacccggcaccccgacacctgtgagcaccccggagcagatccgtagagcccgggccctgcccgcggctccggaccaccctccagccctgccatggcatggggatggtggaagagacggcggcgcggctggttccgacgtcggtggacccgtggcagagttcgcagaagatggcctcgacggacttatcgccgccctcgacgacgaacagtaaggaggcgcagacggaggaggagggggagacgaaaattcagacggtacagacttaaaagacgctaccgcagacgtaaaaagacccaaaaaattaaactaacacaatggcaacccgccaagacaaaacgctgctttatgataggatactttcctactgttattcagggacaaggacggtggtcagaaaactttaccagtcacatagaggataaggtagccaaaggaccctttgggggcggacacagcaccagcaggtggtctctaaaagtactgtacgaggaaaaccagagacaccacaacttctggacatccagtaacaacgacctggagctggccaggttctttggcagctcctggaggttctacagacacgacacacaagactacatagtaacctggaacaggagggctcccctgggaggcaacatactgacagctcctaacatgcacccgggaatagccatgctaagcaaacacaagatagtggtccccagtaaactgaccagacccaggggcagaaaatacattaaaattaatataaaaccccccactacattcatagacaagtggtacttccagaaagacatatgcgaccttacattgctaaacatgaacgttgtaacatgtgacctgcggtttccgttctgctcaccacaaactgacaacatttgtgtaaccttccaggtgcttgcaccaatctataacgacttcctctctataaccgcaaaacaactaaccgaaaaagactggaaagactactataaaacatttttagacaaagccatccctttagacaaagaaagaaaagcaaacatattaaacacatttttaacagagggatcatacagacgaccacaagtagacaaatataaaaaaccaccaacagacaaagaatactatctaccaaaagatgcacaatggggagatccaattcacattattaacaatagtgaaactgctacaaatcaaccaccacaaacaagagcacacctaattgaaaaaatacaacaaaatgcagaaaatgtattagctaaagtaaaccaagaattaaaggaatacaaagcaacacaagcacaacacggtctattcacacactggacaggcatatacggacctccatttctagactataacagaataagtccagaaattagaggactatacaaagacataatatacaaccccttaatagacaaaggagtaggcaaccatgtatgggtagactactgcagtaaaccatctgctgagtactcagaaacacaaagcaaatgccacatagcagacctacctttatggtgtgcactatttggatatgcagactgggtaaaaaaagacacaggcaactggggcatagtagactgggccagagtacttataatatgtccttacacttttccaaaactatatgacagcgcaaatcctaacacaggctttgtagtaatagggtataactttgccagaggagctatgcccgacggaagcaaatacgttccaatagctatgagacacaaatggtaccctactatgttaaaccaacaacaagtactagaagacattagtttatctggaccatttgcaaacagagacaaagtacctagtgtccaactgactgccaagtacaagttccgatggcattttggtggcaatcctgtttccgaacagattattaaagacccgtgccaacagcccaccttccaaatgcccggaaccggtacactccctcgcagaatacaagtggcggacccgaaatacctcgggccccagtacaccttccactcgtgggactacagacgtgacttctttaacagaaagactattaaaagaatgtcagaacaaccagacacttttgagtctatattctcaggcgcaaaaaaaccaagggtggacctcgacaaaatccagctgcaagaagacaactattcccaagagcaaagaaaacagaaaccgtgggaagacagcgagacccagacagagagcgaagtcccatcacaagaagagacgcaaaacctacagcagcagctccaacagcagctccgagaacaaaagcagctcagacagggaatcaactgcctcttcgagcagctgataaaaacccaacagggagtccatatagatccttcccttgtataggcccaaaagccttacttttcccagagagagcacccagaacctactctaagggagactgggaaacagagtatcaggcctgcagagcgtttgacagacctgctagaagcaacctaacagacatacccttttacccttaccttccaccaccccccgaaaaattctatgtaacctttaagcttggctttaaataaacaaggccgtgggagtttcacttgtcggtgtctgcttataaaggttactaagcactccgagcgaagcgaggagtgcgaccccctgccctgggcccacttcttcggagccgcgcgctac

SEQ ID NO: 2362 - protein, 749 aa, Alphatorquevirus sp.; identical to SEQ ID NO: 2333

SEQ ID NO: 2363 - protein, 153 aa, Alphatorquevirus sp.; identical to SEQ ID NO: 2334

SEQ ID NO: 2364 - protein, 84 aa, Alphatorquevirus sp.; identical to SEQ ID NO: 1907

SEQ ID NO: 2365 - DNA, 2938 bp, Alphatorquevirus sp.
cgctacgccttcggctgcgcgcggcacctcgtcaaggggcaattcgggctcgggactggccgggctatgggcaaggctcttaaaaagccatgtttctcggtaaaccttacagaaagaaaaggaaagtgcttctgcagactgtgccagacccaaagaaggctaggcggcttctgattatgtggcagccccccgtgcacaatgtacccggaatcgagagaaactggtacgaggcttgctttcgatcccatgctgctgtttgtggctgtggcgactttgttggtcatcttaatcatctggcagctactctgggtcgccctccgcgttctcggcaccccgggggccccggcactccgcagataagaaacctgccagcgctcccggcaccccagggtgagcccggtgacagagcgccatggcctacggatggtggggccggcggcgccgctggagaagatggaggacgcggcgcagaccgtggagaaccaggagacgtagaagacgacgcgctcctcgccgctttcgacctcgtcgaagagtaaggaggcgcagggggcggtggcgcaggcggtatagaaaatggaggcgacgcaggggcagacggacacacagaaaaaagataatcataaaacagtggcagcctaactttataagacgctgctacatcataggctacctgcctgtcatattctgtggcgagaacaccaccgcccaaaactttgccacccactcggacgatatgataacaaaaggaccgtggggggggggcatgactacaaccaagtttactcttagaatactgtacgacgagtataccaggtttatgaacttctggactgttagtaacgaagacctagacctgtgtagatacgtgggctgcaaactcatattcttcaaacaccccacggtagactttatagtcaggataaatacacagcctccatttttagacactaacctcaccgcagcacaaatacaccccggcatcatgatgctcagcaaaaaacacatactaataccctcgctaaaaaccaggcccagcagaaaacacagggtggtcgtcagggtgggcccacccagactttttcaagacaagtggtacccccagtcagacctgtgtgacacagttctgctttccgtgtttgcaacggcctgtgacttgcaatatccgttcggctcaccactaactgacaacccttgcgtcaacttccagattctggggccccagtacaaaaaccaccttagtattagcacacttaaagacactgaaaactcaaatcattatgactctaatttatttaataatgtgtcactatacaacacttttcaaacaatagcccaacttaaagaaacaggcatgatacagaaagacgataaagaccatgggtggaactcagtacaaaatacaacaagtctatccatagacggcaacaatgccactgaaagcaaagacacttggtacaaaggcaacacatacaataagaacatacaacaattagcaaaaaaaaccagagaaagatttcaaaaggctacacaaagcgcactaccacagtatggcacactaatgcccacagcactgtatgaataccactcaggaatatactccagcatatttctagcagcaggcagaagctactttgaaaccccaggagcatacacagatgttatatacaacccctttacagacaaaggcaccggcaacataatatggatagactacctaacaaaagaagacagcatatacactaaaaacaaaagcaaatgcgaaataatggacctacccctctggtcagcctttacaggctatgcagagttttgtaccaaatacacaggagactctgccatccaatacaacgccagggttgtagtcagatgcccctacaccgagcccatgcttatagaccactcagaccccaacaggggctttgtaccatactccttcaactttggagagggcaagatgcccggaggctcctccaaagtgcctataagaatgagggccaagtggtacgtcaacatgtttcaccaacaagagtttatggaggccatagttgaaagcggaccgtttgcttacaagggcgacataaaatcagcggtactcagcatgaaatacagattccactggaaatggggcggaaaccctatatccaaacaggtcgtccggaatccctgctccacctccagcaccaccgcgggccatcgaggacctcgcagcgtacaagtcgttgacccgaagcacgttaccccggaagtcacctggcactcgtgggacatcaagcgaggactctttggcaaagcaggtattaagagaatgcaacaagaatcagatgctctttacattcctacaggaccactcaagaggccgcgcagggataccaacgcccaagacccagaagagcaaaacgaaagctcacatttcagagtccagcagcgactcccctgggtccactccagccaagaaacgcaaagctcccaagaagaggtgcaagcggaggggacggtacaggaacaactcctcctccagctcagagagcagcgagtactccgcttccagctccaacagctcgccagccaagtcctcaaagtccaagcaggccaagggctacaccccctattatcttcccaagcataaacaaagcctttatgtttgagccccagggtcctaaacccatagagggctaccacgattggctagaggagttcacctgctgcaagttctgggacagaccccccagaaagctacacacagacacaccgttctacccctgggcaccaaaacccctagaccaagtaagggtctcctttaaactcaacttccaataaagtttcaaggccgtgggagtttcacttgtcggtgtctgcttctaaaagtcaccaagcactccgagcgtcagcgaggagtgcgaccctaggggtgggtgcaacgccctcggcggccgcg

SEQ ID NO: 2366 - protein, 738 aa, Alphatorquevirus sp.
MAYGWWGRRRRWRRWRTRRRPWRTRRRRRRRAPRRFRPRRRVRRRRGRWRRRYRKWRRRRGRRTHRKKIIIKQWQPNFIRRCYIIGYLPVIFCGENTTAQNFATHSDDMITKGPWGGGMTTTKFTLRILYDEYTRFMNFWTVSNEDLDLCRYVGCKLIFFKHPTVDFIVRINTQPPFLDTNLTAAQIHPGIMMLSKKHILIPSLKTRPSRKHRVVVRVGPPRLFQDKWYPQSDLCDTVLLSVFATACDLQYPFGSPLTDNPCVNFQILGPQYKNHLSISTLKDTENSNHYDSNLFNNVSLYNTFQTIAQLKETGMIQKDDKDHGWNSVQNTTSLSIDGNNATESKDTWYKGNTYNKNIQQLAKKTRERFQKATQSALPQYGTLMPTALYEYHSGIYSSIFLAAGRSYFETPGAYTDVIYNPFTDKGTGNIIWIDYLTKEDSIYTKNKSKCEIMDLPLWSAFTGYAEFCTKYTGDSAIQYNARVVVRCPYTEPMLIDHSDPNRGFVPYSFNFGEGKMPGGSSKVPIRMRAKWYVNMFHQQEFMEAIVESGPFAYKGDIKSAVLSMKYRFHWKWGGNPISKQVVRNPCSTSSTTAGHRGPRSVQVVDPKHVTPEVTWHSWDIKRGLFGKAGIKRMQQESDALYIPTGPLKRPRRDTNAQDPEEQNESSHFRVQQRLPWVHSSQETQSSQEEVQAEGTVQEQLLLQLREQRVLRFQLQQLASQVLKVQAGQGLHPLLSSQA

SEQ ID NO: 2367 - protein, 149 aa, Alphatorquevirus sp.
MFLGKPYRKKRKVLLQTVPDPKKARRLLIMWQPPVHNVPGIERNWYEACFRSHAAVCGCGDFVGHLNHLAATLGRPPRSRHPGGPGTPQIRNLPALPAPQGEPGDRAPWPTDGGAGGAAGEDGGRGADRGEPGDVEDDALLAAFDLVEE

SEQ ID NO: 2368 - protein, 127 aa, Alphatorquevirus sp.
LGPLQPRNAKLPRRGASGGDGTGTTPPPAQRAASTPLPAPTARQPSPQSPSRPRATPPIIFPSINKAFMFEPQGPKPIEGYHDWLEEFTCCKFWDRPPRKLHTDTPFYPWAPKPLDQVRVSFKLNFQ

SEQ ID NO: 2369 - DNA, 2938 bp, Betatorquevirus sp.
cgggtgccgaaggtgagtaacaccaccgaagtcaaggggcaattcgggctaggtcagtctggcggaacgggcaagaaacttaaaatattttattttacagatatgagccaccgctttattcaaccaaaaccatctctcagacaaacaaaactaaaatggatgaacaccatcgcacaatgccatgacaacttctgcgactgcttcgatcctataacccacacagcagcattaatttttgaacaagaaaaggatttaaaatttacaacaccagaattggatataattaaacaatgtatttctggagaaactaccgccgccgctactacaggccaagaactcgacgttattggagaaggagaactagaagatttgtttcgagaagatactggagaagaaaaaagtacagggtaagaaaaagaaaacttaaaactctaagactaaaacaatggcaaccgcattatatcaaaaaacttaaaattaaaggagaatatcctatttttataacaacttctcaaagactatcaaacaacttaatttgctacttagaaagcattgcgccttgggactggccgggaggagggggcttcagcattgctaactttacctttgaaatgctttataaagaaaacttaactgctagcaattactggactataacaaatgataatatgccattatttagatatttaggatgctacataacattatttacacaaccagaagtagactacttattttactggaataacacacctcctatgaaagcaacaaaactaacatacatgtcaacacaaccagcaattatgctacaattaaaacatgtaaaagtaatgaaatgtagaaaaacaaacagaaaaaaaccatataaaagaatatatgtaccaccaccaactcaaatgcagaacaaatggtacttacaacatgacctagctaacgtaccactattacaaacaattgcaacagtatgttcgttagaccgcaaatacctacacgcaaatgcaaaatccactactataagcttctattcaattaacacagaagaaattcaaaatcattatttttcaataacacaaggaacacaaggctataacccaaaaaacaatgtaaaactatttctctgccaagaaccaccaaacaaatacagccttacagagatacaaatcggaacattatcatttttaggacaagtagacactcaaacagcaggagtaaaaataaaagacatacacgatgcaaacttttccacaaaactagaaaaagcactaactaatccaggcctacaaggaaacccattctacaaagaatgcctagattcagactcctacatagttaaaacaacagcagacttacaaacattaaaaacacaatacaaccagccagaaacaaaattaaaaacacaacatttttcctgggcaggacacttattaaaagaaataagatataacccatttaaagataaaggaattggaaacaaagtatacttagtaaacatactacaacaagaccactcgcacacatgggacgcacccctagacgatgatatagtatggaaagaccttccactatacaatttaacatggggatacctagattttcaaagaaaatgcggcctaaacacagcaatagacacaaacaaatgccttgtaatatacacaccatatgtagaacctcaactaacaacaaaaatatacgtaccagtagataaaaaatttacagaaggcctaagcccatatgcaaatatgacatatccatcagaccacaataactggcacccaaaagtaagataccaagtagacacagcaaacttaattgcatctacaggacccaacacagtaaaactaccagacaatgtaagctgtgaaggtcatataaaatataattttcgctttaaacttggtggagaaccagctcctatgtcaattcttgtggatccacaggaacaaccaactcataccttccccaataacatcctacaaaaaacttcgttacagaatccagcacaacccattgaacacctactctggaaatttgatgaaaggagaggaatgcttacaaaaaaagctgcacagagaatcaaaacacacacagaaactgaaaaagatattctttcaattacagaaccaacaacaacctgcccaatatggaccacgaaagaaacaccgacaacggactcatcgacagaggaagaagaggaaacaccgctcgagacacaactcctccacgagcgaagaaagcaaagactcctccgacagcgaatcaacaagctactcaacagattaacaccattagaatagaaaaatgtaaaataaatgtaaagcttttcaatgatgatgaaccaaaaaaccgtagaatgacagcatgggaaagggaacaagaaatagctgacgccgctatgtggggcagaacacctagatggtttatatttgataaacatttttaccctgatgtaccccccgtacctaaatacactgtaaactttgatttaaatgcgccgcaataaaacaaggccagcaaatattcactctcggtgtccatttatataagaattaacttaaataaacatccaccactctccctaatacgcaggcctagaagggggctccgcccccttacacccccagggggggcaagccccccctataaccccccctaataaatattcaacaggaaaaccacatcatttacatggctaaccacaaactgtcacttacttcctcatttacactcacttcctctttcactcattattattcattacattaattattaaacaccgtaattccggggaggagactaaaacctatataactaactacacttccgaatggctgagtttatgccgactaaaacctatataactaactacacttccgaatggctgagtttatgccgccagccgtagaccggatcactttagtgactacgggctgaccttggg

SEQ ID NO: 2370 - protein, 667 aa, Betatorquevirus sp.
MYFWRNYRRRYYRPRTRRYWRRRTRRFVSRRYWRRKKYRVRKRKLKTLRLKQWQPHYIKKLKIKGEYPIFITTSQRLSNNLICYLESIAPWDWPGGGGFSIANFTFEMLYKENLTASNYWTITNDNMPLFRYLGCYITLFTQPEVDYLFYWNNTPPMKATKLTYMSTQPAIMLQLKHVKVMKCRKTNRKKPYKRIYVPPPTQMQNKWYLQHDLANVPLLQTIATVCSLDRKYLHANAKSTTISFYSINTEEIQNHYFSITQGTQGYNPKNNVKLFLCQEPPNKYSLTEIQIGTLSFLGQVDTQTAGVKIKDIHDANFSTKLEKALTNPGLQGNPFYKECLDSDSYIVKTTADLQTLKTQYNQPETKLKTQHFSWAGHLLKEIRYNPFKDKGIGNKVYLVNILQQDHSHTWDAPLDDDIVWKDLPLYNLTWGYLDFQRKCGLNTAIDTNKCLVIYTPYVEPQLTTKIYVPVDKKFTEGLSPYANMTYPSDHNNWHPKVRYQVDTANLIASTGPNTVKLPDNVSCEGHIKYNFRFKLGGEPAPMSILVDPQEQPTHTFPNNILQKTSLQNPAQPIEHLLWKFDERRGMLTKKAAQRIKTHTETEKDILSITEPTTTCPIWTTKETPTTDSSTEEEEETPLETQLLHERRKQRLLRQRINKLLNRLTPLE

SEQ ID NO: 2371 - protein, 102 aa, Betatorquevirus sp.; identical to SEQ ID NO: 2293

SEQ ID NO: 2372 - protein, 122 aa, Betatorquevirus sp.; identical to SEQ ID NO: 2294

SEQ ID NO: 2373 - DNA, 2938 bp, Betatorquevirus sp.
cgggtgccgaaggtgagtaacaccaccgaagtcaaggggcaattcgggctaggtcagtctggcggaacgggcaagaaacttaaaatattttattttacagatatgagccaccgctttattcaaccaaaaccatctctcagacaaacaaaactaaaatggatgaacaccatcgcacaatgccatgacaacttctgcgactgcttcgatcctataacccacacagcagcattaatttttgaacaagaaaaggatttaaaatttacaacaccagaattggatataattaaacaatgtatttctggagaaactaccgccgccgctactacaggccaagaactcgacgttattggagaaggagaactagaagatttgtttcgagaagatactggagaagaaaaaagtacagggtaagaaaaagaaaacttaaaactctaagactaaaacaatggcaaccgcattatatcaaaaaacttaaaattaaaggagaatatcctatttttataacaacttctcaaagactatcaaacaacttaatttgctacttagaaagcattgcgccttgggactggccgggaggagggggcttcagcattgctaactttacctttgaaatgctttataaagaaaacttaactgctagcaattactggactataacaaatgataatatgccattatttagatatttaggatgctacataacattatttacacaaccagaagtagactacttattttactggaataacacacctcctatgaaagcaacaaaactaacatacatgtcaacacaaccagcaattatgctacaattaaaacatgtaaaagtaatgaaatgtagaaaaacaaacagaaaaaaaccatataaaagaatatatgtaccaccaccaactcaaatgcagaacaaatggtacttacaacatgacctagctaacgtaccactattacaaacaattgcaacagtatgttcgttagaccgcaaatacctacacgcaaatgcaaaatccactactataagcttctattcaattaacacagaagaaattcaaaatcattatttttcaacaacacaaggaacacaaggctataacccaaaaaacaatgtaaaactatttctctgccaagaaccaccaaacaaatacagccttacagagatacaaatcggaacattatcatttttaggacaagtagacactcaaacaccaggagtaaaaataaaagacatacacgaacaaaacttttccacaaaactagaaaaagcactaactaatccaggcctacaaggaaacccattctacaaagaatgcctagattcagactcctacatagttaaaacaacagcagacttacaaacattaaaaacacaatacaaccagccagaaacaaaattaaaaacacaacatttttcctgggcaggacacttattaaaagaaataagatataacccatttaaagataaaggaattggaaacaaagtatacttagtaaacatactacaacaagaccactcgcacacatgggacgcacccctagacgatgatatagtatggaaagaccttccactatacaatttaacatggggatacctagattttcaaagaaaatgcggcctaaacacagcaatagacacaaacaaatgccttgtaatatacacaccatatgtagaacctcaactaacaacaaaaatatacgtaccagtagataaaaaatttacagaaggcctaagcccatatgcaaatatgacatatccatcagaccacaataactggcacccaaaagtaagataccaagtagacacagcaaacttaattgcatctacaggacccaacacagtaaaactaccagacaatgtaagctgtgaaggtcatataaaatataattttcgctttaaacttggtggagaaccagctcctatgtcaattcttgtggatccacaggaacaaccaactcataccttccccaataacatcctacaaaaaacttcgttacagaatccagcacaacccattgaacacctactctggaaatttgatgaaaggagaggaatgcttacaaaaaaagctgcacagagaatcaaaacacacacagaaactgaaaaagatattctttcaattacagaaccaacaacaacctgcccaatatggaccacgaaagaaacaccgacaacggactcatcgacagaggaagaagaggaaacaccgctcgagacacaactcctccacgagcgaagaaagcaaagactcctccgacagcgaatcaacaagctactcaacagattaacaccattagaatagaaaaatgtaaaataaatgtaaagcttttcaatgatgatgaaccaaaaaaccgtagaatgacagcatgggaaagggaacaagaaatagctgacgccgctatgtggggcagaacacctagatggtttatatttgataaacatttttaccctgatgtaccccccgtacctaaatacactgtaaactttgatttaaatgcgccgcaataaaacaaggccagcaaatattcactctcggtgtccatttatataagaattaacttaaataaacatccaccactctccctaatacgcaggcctagaagggggctccgcccccttacacccccagggggggcaagccccccctataaccccccctaataaatattcaacaggaaaaccacatcatttacatggctaaccacaaactgtcacttacttcctcatttacactcacttcctctttcactcattattattcattacattaattattaaacaccgtaattccggggaggagactaaaacctatataactaactacacttccgaatggctgagtttatgccgactaaaacctatataactaactacacttccgaatggctgagtttatgccgccagccgtagaccggatcactttagtgactacgggctgaccttggg

SEQ ID NO: 2374 - protein, 667 aa, Betatorquevirus sp.
MYFWRNYRRRYYRPRTRRYWRRRTRRFVSRRYWRRKKYRVRKRKLKTLRLKQWQPHYIKKLKIKGEYPIFITTSQRLSNNLICYLESIAPWDWPGGGGFSIANFTFEMLYKENLTASNYWTITNDNMPLFRYLGCYITLFTQPEVDYLFYWNNTPPMKATKLTYMSTQPAIMLQLKHVKVMKCRKTNRKKPYKRIYVPPPTQMQNKWYLQHDLANVPLLQTIATVCSLDRKYLHANAKSTTISFYSINTEEIQNHYFSTTQGTQGYNPKNNVKLFLCQEPPNKYSLTEIQIGTLSFLGQVDTQTPGVKIKDIHEQNFSTKLEKALTNPGLQGNPFYKECLDSDSYIVKTTADLQTLKTQYNQPETKLKTQHFSWAGHLLKEIRYNPFKDKGIGNKVYLVNILQQDHSHTWDAPLDDDIVWKDLPLYNLTWGYLDFQRKCGLNTAIDTNKCLVIYTPYVEPQLTTKIYVPVDKKFTEGLSPYANMTYPSDHNNWHPKVRYQVDTANLIASTGPNTVKLPDNVSCEGHIKYNFRFKLGGEPAPMSILVDPQEQPTHTFPNNILQKTSLQNPAQPIEHLLWKFDERRGMLTKKAAQRIKTHTETEKDILSITEPTTTCPIWTTKETPTTDSSTEEEEETPLETQLLHERRKQRLLRQRINKLLNRLTPLE

SEQ ID NO: 2375 - protein, 102 aa, Betatorquevirus sp.; identical to SEQ ID NO: 2293

SEQ ID NO: 2376 - protein, 122 aa, Betatorquevirus sp.; identical to SEQ ID NO: 2294

SEQ ID NO: 2377 - DNA, 2938 bp, Betatorquevirus sp.
cgggagccgaaggtgagtgaaaccaccgtagtctaggggcaattcgggctagatcagtctggcggaacgggcaagaaacttaatttattatattttacagatatgacatctttttggaggaaacccacatcatcactgagacaacaagaactaaaatggataaatttaatgcatgaaagccacgattttttctgccactgcgacgaaccagatcttcactttcttgtatgcataaacaagttttcaacctgcccaaaaccagaattggatattaaaaatataaaatgcctccttaccggagatactaccagaatcgctacagaagaaactactacaggagaagatggaggtttcctagacggagaactagaaacacttttcgacgaaaacaatggtacagaacaaaaagacgacgcaaatacaaggtaaaaagatttagacttaaaaaaaagaaaacttttttaaaacttaaacaatttcaaccaaaatccataaactactgtaaaattactggatttaaatgtctttttcaaggatctcctctaagaaaacaacataactatattcaatatatatacagttatgtaccacctacttatcccgggggaggcggatggagtttacttgtatttagtctagatagtctttttgaagactaccaacacttacaatgtatttggagcaaaagcaatgccggtttgcctcttgtaagatttttagggggtaaaattaagttgtatcaaactgaatcaactgattatgctgttgtatatgatagttgctggcctatggtagacacaccacacacacacgcagattcagctccaagtagaatacttcaaaagaaacataaaacaataatacctagtacaaacacacaaaagagaaaaaaaccatataaaactattagatttaaaccaccaccacaaatgcaaaacaaatggtactttcaaagagacatttgtaaaattccactactaatgctcacatcaactagcattgatcttacaaaacctttttgcaatcccacatgcaaaagtaacaatattataataagatacattaacccatacctttttaaaaataacaactttcaagactatccaaaaacaacaggatattcaccaaaatcactaagtgacggtccatattacttatatgcaagttataataatgaccctccacctcaaaatacaaactcaacgacttttaagcaatggatacttaacacagttccactaataaatactaaaaactataactctggagcaatgatgtcaaccattgttaaggaaggatatgacaaaccagaaaactggggaaacccattttatcacacacacttagatttacaatcaacaaccatttacatatgcaattccaacacatcaacattaaaaactgcaatagctgccatggattttaaaaacgttaaaataactaaagccacagaaaatctaatttatcaaacaatttataatccagataacgataccggagaaacaaacaaaatttatttagttaaagcaacacaagaaacaaactttcaaccaccaacagacgaagatttagtatttgaaggttttcccctgtacattttattctggggatggacagactttgttagaaaattaaacaaaacacctaacattgacaccaactacatgatagttatacaaacaaaaacttttcacgaaaaaaatgacccatactttgtaccaatagacatacagtttgaacatggttacgacccttacataccattagacacacaaaaccacgaaccatcatattacaatcaacaaaactggtatccacaattaaaatatcaagaacttactatagaaaatatttgtgaatcaggaccagctgtaagccgttcaaaagattatttacaagcatactgcaaatatacattttattttaaatggggagggtgtccaaaaactcttgataaagcatataacccttgttcacagccaaaatggcccacaaccgatacagtccttccaggacttgaaattacgaatccatcagaaccaccagaaacccaactatactcctgggactgggaaaatgactttgttacacaaaaagctatacaaagaattagagaccacacagaacctcatgaaacattactctcaattacagagtccaaatcctcagcaaagccacaaaaaacaacacaagaaacgcaggaccagaaagaggaggagaaactactcttcaagctccaccagctcagaaagcagcgaatgcaactcgaactcctcataaagatgaaagagtacactttacaataattaatcaagttgaactatttcctaaaccaaaaaaacgcaaacgctttaactcctgggagcaaaacgaagaaagagaactagcaactatctttaaaagaccccaacgctattatcacggtgataaaccctattacccatggcttccccctgaaccttatgtaaactttgacttaaaatttcgtgattaaaaattcaaggccaacaaatttcactgagtggtgtccatttatataagttttactttaataaacagtcaccgcctccctaacaatagggcgccaaattcaaaagggggctccgcccccttacacccccaagggggctccgcccccttacccccaagggggctctgcccccttacacccccaagggggctccgcccccttacaacccctaataaatatttaacaggaaaaccacctaatttaaattgccgaccacaaaccgtcacatacttcctctttttacagaacttccttttttactcattattattcattacattaattaataatcactgtaattccggggaggagctaactaactatataactaaatacacttccgaatggctgagtttatgccgccagacggagactgaatcacttcagtgacttcaggctgatcttggg

SEQ ID NO: 2378 - protein, 673 aa, Betatorquevirus sp.
MPPYRRYYQNRYRRNYYRRRWRFPRRRTRNTFRRKQWYRTKRRRKYKVKRFRLKKKKTFLKLKQFQPKSINYCKITGFKCLFQGSPLRKQHNYIQYIYSYVPPTYPGGGGWSLLVFSLDSLFEDYQHLQCIWSKSNAGLPLVRFLGGKIKLYQTESTDYAVVYDSCWPMVDTPHTHADSAPSRILQKKHKTIIPSTNTQKRKKPYKTIRFKPPPQMQNKWYFQRDICKIPLLMLTSTSIDLTKPFCNPTCKSNNIIIRYINPYLFKNNNFQDYPKTTGYSPKSLSDGPYYLYASYNNDPPPQNTNSTTFKQWILNTVPLINTKNYNSGAMMSTIVKEGYDKPENWGNPFYHTHLDLQSTTIYICNSNTSTLKTAIAAMDFKNVKITKATENLIYQTIYNPDNDTGETNKIYLVKATQETNFQPPTDEDLVFEGFPLYILFWGWTDFVRKLNKTPNIDTNYMIVIQTKTFHEKNDPYFVPIDIQFEHGYDPYIPLDTQNHEPSYYNQQNWYPQLKYQELTIENICESGPAVSRSKDYLQAYCKYTFYFKWGGCPKTLDKAYNPCSQPKWPTTDTVLPGLEITNPSEPPETQLYSWDWENDFVTQKAIQRIRDHTEPHETLLSITESKSSAKPQKTTQETQDQKEEEKLLFKLHQLRKQRMQLELLIKMKEYTLQ

SEQ ID NO: 2379 - protein, 108 aa, Betatorquevirus sp.
MTSFWRKPTSSLRQQELKWINLMHESHDFFCHCDEPDLHFLVCINKFSTCPKPELDIKNIKCLLTGDTTRIATEETTTGEDGGFLDGELETLFDENNGTEQKDDANTR

SEQ ID NO: 2380 - DNA, 2938 bp, Betatorquevirus sp.
caggtgccgaaggtgagtgaaaccaccgtagtcaaggggcaatatgggctaggtcagtcttggcggaccgggcaagaaacttaaaaatataacctttcttacaggtatgtcatctatctggaagaaaccaacaactactccgagacaactagaactaggatggctgaacttattccaccaagcacacgaccaattctgccaatgtgaagaccctgaccttcactatttaatggtaattaacaaattttccaacttcaaaaagcctgaatctgaaattatcaacataaaatgcctccttaccggaaaacctactggaacaactactactaccgaagaagaaaaagatatccatatcgacgaaggagacttagaaagccttttcgaaaaagatttcgaagaagaacctactggagaaaacagcgaaaggtaaagaaatttaaacttaaaaaacttaaaaaactaactcttaaagtttttcaaccaaagactataagactattaaaaattaaaggatttaaatgcctatttcaaggaagcataaaaagagctaacaataactatatacaatatatatatgatactgtaaatgataaaagaccaggcggaggggcatggagtttacaagtatttagccttgcaagcttatatgaagaatggcaacacttacttaacatttggactgttagtaatgctggactgccactaatacgctttatgggagctagatttaaattttatcaaagtgcagaaaatgactatgttgttaaatatgataattgttggcctatggtagatacaccatacacacatgcagacagtgcaccatcaagaatgataagagcacaacataaaataactgtaccaagtagaaaaacaaaacttagaaaaaaaccatacaaaaaagtatttgttagaccaccatcacaaatgacaaacaactggtactttcaaagagatatatgcaaaacaccactaacaatgcttacaaccacagccgttgatcttagattcccatttgctcccccagaagctttaagtaacaatgtaactttatatacacttaatacatttcaatttaaaaacacaaactttcaacaacctgaagctagcggttactactacaaaatggaaggcacacaaaaatactacttatatgcagcaccaagagaccacgaaaccaactggggatcactaattcctttaacaaacacaaaagacaatcaaccaggaaaacaacttaatcaattaataaaaagcggtaacaatagcgaaaataaaatgagcaactggggaaacccattttaccacttatatgactatgaaaactttaagttttacttttcaacaaaaggtccaacacaaataacatactcagatttaaacaactctttaaataacggaattactgaattttcaagttacatatactaccaaatcagatacaatccagagaaagacacaggacaagataataaagtatatttaatttctaatctacatgacacaaaatgggaagaaccttcaaacgaaaatttaatttttgatggttttccactaactatattactatggggatggacagactggcaaaaaaaactaaaacaagtatctaacatagataaccaatacatagtagttatacaaaccaaattcttttcagaaaacctaaaatactacgtacttattgataaagattttatagatggatttgaacctttctcaccacatgacgaacaagacaaattacctattacaccagctaatcaacaacattggtatccaaaacacttatttcaacaacaatccataaacacactatgtctatcaggccaagcatgtccaagacctccttggaaccattatctacaagcgttttgtacatacacattttactttaaattaggaggctgtccaaaacaactagaaaaagcttatgatccttgtttacagtcaaaatggcccacagccgataacatccctgcaagatatcaaattacgaatcctgaaaccccaccagaaacagaactgtactcctgggactgggatgaagactttgttaaaaagacagctttacaacgaattacagaatacacaccaacttatgaaacaatattcctttctacaggaagcaaatcagatcccatcgcactcaaaaaagtccaagaaaaccaagcccaagaagaagaggaggagaaagaactattcctccagctccagcagctcagacaccgacgaaagctcctacaactccaactaaaagaattatcattaaaaagtgtacaaagatagtagaactattcccaaaacctataaaacaaaacagaagatttaccaaagatgaaagagagacagaaagacaagtagctatagcattttgtaggccacaaagatcatttttctatgatccacctatttacccttggttaccaccggaaccaaaagttccaaaagttaactttaaactaaattacaattctaacgaataaaaattacaaggccaactattttcacttgtcggtgtccatttatttaagtttaacttatataaacatccaccactctcccaacagtgttggcgccaaaagggggctccgcccccttacacccccaagggggctccgcccccttacacccccaagggggctccaagggggctccgcccccttacacccccaagggggctccgcccccttacacccccttataaatattcaacaggaaaaccacctaattagaattgccgaccacaaacggtcactaacttctcttttttaacatacttcctttttttctaattattattcattacattaattattaaaccgcgtaattccggggaggagactataaactatataaccaactacactttcgaatggctgagtttatgccgccagacggagactgtgttacacagtaacaacaggctgacctaggg

SEQ ID NO: 2381 - protein, 666 aa, Betatorquevirus sp.
MPPYRKTYWNNYYYRRRKRYPYRRRRLRKPFRKRFRRRTYWRKQRKVKKFKLKKLKKLTLKVFQPKTIRLLKIKGFKCLFQGSIKRANNNYIQYIYDTVNDKRPGGGAWSLQVFSLASLYEEWQHLLNIWTVSNAGLPLIRFMGARFKFYQSAENDYVVKYDNCWPMVDTPYTHADSAPSRMIRAQHKITVPSRKTKLRKKPYKKVFVRPPSQMTNNWYFQRDICKTPLTMLTTTAVDLRFPFAPPEALSNNVTLYTLNTFQFKNTNFQQPEASGYYYKMEGTQKYYLYAAPRDHETNWGSLIPLTNTKDNQPGKQLNQLIKSGNNSENKMSNWGNPFYHLYDYENFKFYFSTKGPTQITYSDLNNSLNNGITEFSSYIYYQIRYNPEKDTGQDNKVYLISNLHDTKWEEPSNENLIFDGFPLTILLWGWTDWQKKLKQVSNIDNQYIVVIQTKFFSENLKYYVLIDKDFIDGFEPFSPHDEQDKLPITPANQQHWYPKHLFQQQSINTLCLSGQACPRPPWNHYLQAFCTYTFYFKLGGCPKQLEKAYDPCLQSKWPTADNIPARYQITNPETPPETELYSWDWDEDFVKKTALQRITEYTPTYETIFLSTGSKSDPIALKKVQENQAQEEEEEKELFLQLQQLRHRRKLLQLQLKELSLKSVQR

SEQ ID NO: 2382 - protein, 107 aa, Betatorquevirus sp.; identical to SEQ ID NO: 1934

SEQ ID NO: 2383 - DNA, 2938 bp, Betatorquevirus sp.
cgggagccgaaggtgagtgaaaccaccgtagccgaaggtgagtgaaaccaccgtagtctaggggcaattcgggctagatcagtctgacggaacgggcaagtaacttaaatttatattttacagaatgacaactcgcataattcctacaaaagattctattaaacaaaagaatctaaaatggatgaacctaatggtccacgaccatgatattttctgcgactgcgatactccactgcaacacataattattttaatctgccaacaagaaccaaaacttgaattaaaaccaatagaaaaggatatagttaaaaaatgccttattggagaaactacggataccgctggaaccgccgcagacgatggcgtcgaagaaggccttttagacgcccttttcaaagaagactttggagaagaagacaccgcagggtaagaaagaaaaaactgaaatctattaaactaaaacagtggcaaccacaattcataaaaagactaaaaattgttggaactgagccactttttcttacaacttcagaaagactaactaatgaatttacttcttataaagacagtattgcgcctcactatgtaccagggggaggagggttttcaataatgaactttactttaaatgcattgtataaaaaacatttagtattagaaaactggtggactgcaagtaatgaaaatatgcctttaataagatttactggagtaacattgtactattacagacaagcagaatatgactacttaactcaatatgtaagacaatatccaatgaatgcttcacatctcaaatatactagcacacatccacaagtaatgttactacacaaaaacacacttaaaataacatgtaaaagaaacaataaaaacaagaaaccatacaaaaaaattaaaatacttccaccaacacaaatgcaaaaccgttggtactttcaaaaagatcttgcagacatacctctattacaactaataaccacagccacatcgttagaccgcatgtttctaaattcaagctcaataagctccacaataggtttcacaagccttgaccacctaggattttacaaccacaattacacaaaagacggcacacaaggatatgtagcaaaaccaggacaactgttatttggcattctacaaggaacttataatattaaaacagtaaaattcacacaattaatatatatgggtaatgcacttgacttacttgaaggaacacaagcaggatccataccacaaaacgactacagcacaataactgatagcaaatacacaaacaaaattcaaaaacaacttaaatacatgcaactaaaccaaaaaacctggggaaacccatttaatgatgtctttcatagaacaggagctttaataacaacaagcttagactgggaaagcctaatagaaaaagcaacctcagaaactgccaatttaactgatgacttcacatggaaaaccacttttacatttccagttagatacaacccatttgcagacaaaggaacaggcaataaactatatttaataaaatggaaagacccaggtcacgacacagactgggacatacctgcagccacaaccttatatgaaaacatgccactctggttaatgatatggggttacttagatttttacagaaaatcaggagaacttagcaccatagatactacacatttacttgtaataaaaacaccatacactcaacctaaagacaaaacaatgctaataccattagatgaagactttttagaaggtagaagcccctatatgggacaacaagaaaccactgctagtgacagacaaaactggcaccctaaagtaagatttcaaataagaacagctaacgctataggttcttgtggacccgcaactataaaacttccaccacaagtatctgccgaagctcatgttagatatgcattttattttaagattggaggaacaccaccaccaatggcaacactcacagaaccagacaaacaacctaaatataccactcccgataacatcctcacatcaacttcgttgcagagtccaacatctccctttgaatacatcttgtacaactttgatgaaagacgaggacaacttacaaaaaaagctgcagaaagaatcactaaataccaagaaactgaacaaactattctcccatttacagagtcagctctatccagctttacaacaccccaagaaaaaacacagacaccagaaacatcggacgaggaaaaagaagaaatgtcgctcgaggaacagctccacctccagcgaaagcagcaaaaactcctccgaaacagaatcaacaaactcctcaaccgactagcactattagaatagataaatgtaaagttcatgttcaattatttcctcctgatgtaaaaccaaatcgtagaatgactaagtgggaatatgaacaagaattagaagatgcttatcattggtgtagagtccctagaacttttattaatgacaaacctacttatccttgggtaccccaaaactccccatacactgtaaactttgatttaaatgcgccgcaataaatatacaaggcctgcaaatattcattctcggtgtccatttatataagtataaacttaaataaacatccaccacactcccgaatacgcaggcgcagaagggggctccgcccccttacccccagggggggctaacgcccccccctcaaaccccccctaattaacatattcaacaggaaaaccacataatttgaattgccgaccacaaactgtcaactacttccctattcacacatacttccctttttatcttataaatatttattacataaattagtaatcactgtaattccggggaggagttaaaaaactatataaccaactacactgacgaatggctgagtttacgccgtcagacggagacggcatcacatcagtgactgcaggctgatcttggg

SEQ ID NO: 2384 - protein, 674 aa, Betatorquevirus sp.
MPYWRNYGYRWNRRRRWRRRRPFRRPFQRRLWRRRHRRVRKKKLKSIKLKQWQPQFIKRLKIVGTEPLFLTTSERLTNEFTSYKDSIAPHYVPGGGGFSIMNFTLNALYKKHLVLENWWTASNENMPLIRFTGVTLYYYRQAEYDYLTQYVRQYPMNASHLKYTSTHPQVMLLHKNTLKITCKRNNKNKKPYKKIKILPPTQMQNRWYFQKDLADIPLLQLITTATSLDRMFLNSSSISSTIGFTSLDHLGFYNHNYTKDGTQGYVAKPGQLLFGILQGTYNIKTVKFTQLIYMGNALDLLEGTQAGSIPQNDYSTITDSKYTNKIQKQLKYMQLNQKTWGNPFNDVFHRTGALITTSLDWESLIEKATSETANLTDDFTWKTTFTFPVRYNPFADKGTGNKLYLIKWKDPGHDTDWDIPAATTLYENMPLWLMIWGYLDFYRKSGELSTIDTTHLLVIKTPYTQPKDKTMLIPLDEDFLEGRSPYMGQQETTASDRQNWHPKVRFQIRTANAIGSCGPATIKLPPQVSAEAHVRYAFYFKIGGTPPPMATLTEPDKQPKYTTPDNILTSTSLQSPTSPFEYILYNFDERRGQLTKKAAERITKYQETEQTILPFTESALSSFTTPQEKTQTPETSDEEKEEMSLEEQLHLQRKQQKLLRNRINKLLNRLALLE

SEQ ID NO: 2385 - protein, 101 aa, Betatorquevirus sp.
MTTRIIPTKDSIKQKNLKWMNLMVHDHDIFCDCDTPLQHIIILICQQEPKLELKPIEKDIVKKCLIGETTDTAGTAADDGVEEGLLDALFKEDFGEEDTAG

SEQ ID NO: 2386 - DNA, 2938 bp, Alphatorquevirus sp.
cgcgcttcgcgctgcgccggacatctcgcagtcaaggggcaattcgggctcgggactggccgggctatgggcaaggctcttagggtattcattcttaaaatgcacttttctagaatctctcgctcgaaaaggaaagtgcttctgccggcactgccagctccaccgccgcctaggcaacttctaatgtggcagccaccgatccagaatggaactcaactcgaccgccattggttcgagtcagtctggcgttcgcatgctgccttttgtggctgtggcgactgtattggccatcttcaccatctggctgctaacctgggtagaccacctgctccacaacccccgcgagaacagcacccaccgcagataagagggctcccggcactcccggcacctcccagtaacagaaactcatggcctggtactggtggaggcgccgccggaggagaggctggtggaagcctaggcggaggagatggaggacacggagaacccgcagacgacgacctgctagacgctatcgcactcgccgaagagtaaggaggagaagggggaggtggaggagacgatatagacgctggcgcagacgcgggggggggcgacgcagacacagaaaaaaacttataattaaacagtggcaacctaactttataagacactgttatataataggatacctgccacttataatatgtggagaaaacactttctctcacaactatgccacccactcggacgacatggtctctacgggggcctacggagggggcatgactaccacaaaatttactctaagaatactatttgacgagtaccaaagacacttaaacttctggactgttagcaaccaagacctagacctagcaaggtacctgggagtaaaactcacaatatttagacaccccactgtagactttatagtgcagatacacacacaacccccttttcaagacacagaaataacaggccccagcatacacccagggatgctcatactctctaaaaaacacatacttatacccagcttaaaaaccagaccctctagaaaacactatataaagctcagagtaggggccccaagactttttcaagacaagtggtacccccagagcgaactctgtgacgtcacattgctcgttatatatgcaaccgcatgtgacttgcaatatccgttcggctcaccacaaactgacaacgtatgtgtcaacttccagatattggggcaaccctataaccaacacctcaaggtgacgttagcctcaactgaagaaaacacatataaaaatcactatgaaaacaacttatatagccatactgaattttataacactacagaaacagtagcacaactaaaaccaatagttgatgccaccactaatggaaactggtctcaatacataaacactgacaaactagaccaaacacctccaacaacattaaaccataacaacacatggtacaaaggcactgtatataaaccctcaattaaagaagtttcaacaaaagttagagccacctaccagaaagccacagagcttgctctaccaggagcagtaaaacccaccacagacttatttgagtatcacgcaggaatatacagctcaatattcctatctccaggaagagcatactttgagacccccggagcataccaagacataatttacaatcccctaacagacaaaggagtaggtaacatagtgtggatagactggctaagcaaatcagattcactatactctgaaaaacaaagcaaatgtgctatatttgacctaccactatgggcctccttctttggatacgcagaattctgctctaaaagcacaggagacacagccatagcatacaacgccagagtatgtgtcagatgtccctacacagagccacagctgctaaaccacaacaacccctctcaggggttcgtgttttactcctacaactttggcaaaggcaaaatgccgggaggcagctcccaggtacctataagaatgagatggaagtggtacgtgtgcatgttccaccagctagaggttatggaagctatatgtcagagcggaccgtttgcataccacagcgacgaaaaaaaagcagtactgggtataaaatataagttcgactggaaatggggaggaaatcctatctcccaacagattgtcagaaacccctgcagtggacaaaactcctcgggcaatagagtgcctcgctcagtacaagcagttgacccgaaatacgtctcgccccaactcgtctggcactcgtgggacttcagaagaggactctttggccaggcaggtattaaaagaatgcaaaacgaatcagatgctcttacactttctccagtccacagaccaaaacgccccaaaagggacacccaggtcaaagaaaaaacgccagaaaaagactcagattcagcactccaactccgaagactccagccctggatccactccagtcaagaaacaaaagacgaagaggaggagataccggaggggccggtacaagaacaactcctccaccagctccagcagcagcgattcctcagagtgcagctggagtccatcgcccaagaagtcctcaaaatcaggaggggccacagcctacaccccctactatcctcccatgcataaacaaggtctttatgtttaaccctccaggtccaaaacccatcgttgggtacgagtcctggagggatgagtttgaatcatgcaaggcctgggacaggccccctagatcctaccacacagatattcccacttacccctggatgcccaaacccccagaccaaatacgtgtaagcttcaaacttggctttcattaaaatttcaaggccgtgcaacattcacttgtcggtgtctacctctaaaggtcactaagcactccgagcgcaagcgaggagtgcgaccctccccccctggggcaactccctcgaagtccggcgcta

SEQ ID NO: 2387 - protein, 737 aa, Alphatorquevirus sp.
MAWYWWRRRRRRGWWKPRRRRWRTRRTRRRRPARRYRTRRRVRRRRGRWRRRYRRWRRRGGGRRRHRKKLIIKQWQPNFIRHCYIIGYLPLIICGENTFSHNYATHSDDMVSTGAYGGGMTTTKFTLRILFDEYQRHLNFWTVSNQDLDLARYLGVKLTIFRHPTVDFIVQIHTQPPFQDTEITGPSIHPGMLILSKKHILIPSLKTRPSRKHYIKLRVGAPRLFQDKWYPQSELCDVTLLVIYATACDLQYPFGSPQTDNVCVNFQILGQPYNQHLKVTLASTEENTYKNHYENNLYSHTEFYNTTETVAQLKPIVDATTNGNWSQYINTDKLDQTPPTTLNHNNTWYKGTVYKPSIKEVSTKVRATYQKATELALPGAVKPTTDLFEYHAGIYSSIFLSPGRAYFETPGAYQDIIYNPLTDKGVGNIVWIDWLSKSDSLYSEKQSKCAIFDLPLWASFFGYAEFCSKSTGDTAIAYNARVCVRCPYTEPQLLNHNNPSQGFVFYSYNFGKGKMPGGSSQVPIRMRWKWYVCMFHQLEVMEAICQSGPFAYHSDEKKAVLGIKYKFDWKWGGNPISQQIVRNPCSGQNSSGNRVPRSVQAVDPKYVSPQLVWHSWDFRRGLFGQAGIKRMQNESDALTLSPVHRPKRPKRDTQVKEKTPEKDSDSALQLRRLQPWIHSSQETKDEEEEIPEGPVQEQLLHQLQQQRFLRVQLESIAQEVLKIRRGHSLHPLLSSHA

SEQ ID NO: 2388 - protein, 156 aa, Alphatorquevirus sp.; identical to SEQ ID NO: 318

SEQ ID NO: 2389 - protein, 126 aa, Alphatorquevirus sp.; identical to SEQ ID NO: 1285

SEQ ID NO: 2390 - DNA, 2937 bp, Alphatorquevirus sp.
gagcgaagcgaggtgagtttacacaccgcagtcaaggggcaattcgggctcgggactggccgggctctgggcaaggctcttaaaaaagctatgtttctacgcagagctcaccagaaaaggatactgctactgcaaattgtgccagctacaccgcaggcacctgccatgagctttcgcgcacccaccattcaaggtggagtccgagaccagcaatggttcgaggcctgtattcgatcacacgccgctttctgtggctgtggcgatcccgtgcttcattttaataacattgctgctcgctttcactatctgcctgctacctcctcgcctctggaccctaccggaggagcgccgccgcgccgcccgcagctacgccgccttgcagcgctcccggcggcgccccccagcacctctgagagccagccatggcgtggtggtggtggagacgatggcgccggtggcccagacgccgctggaggacccgtcgccgacgccgagtacgaaccagaagacctagacgacctgttcgccgctatcgaagcagatacacagtaaggaggcgaaggcggagagggtggcgagggcgacgtaggcgcagactgtacagacgcagatacactataaggagaaaaagaaagaaactcatactgaaacagtggcagcccgccaatgttagaaaatgcaaaataaggggcctgtttccaatagttatctgtggacacggcaagagtgccaataactatgccctacactcggacgacgtactaccaatgagacaggcttttggaggggctctaagcactgtatcttttagcctaaaagtactgtatgatcagtatttaagacacctgaacagatggagcacctcaaacgatgtgctagaccttgccaggtacctaggatgcaccttttggttttacagagacaaaaaaactgactacttagtgcagtatgacatctctgctccctacaagctagacaaagacagcggaccgtcctaccatccaggagtactcatgcaagccaaacacaaagtactagtgcccagttttgacacgcaccccaaaggaaaagctaaagtaaaaattagaattaagccccccaaactttttatagataagtggtactctcaagaggatctgtgtaccgttaatcttgtaacatttgtggtcagcctagcttccttctcacatccgttctgcccaccactaacgaacaacccttgtgtaaccttccaagtgttgaacaacttctacaattccgttataggttcctcaattaatgttgcagacactacagtaaactcagtcttcaataactttttatataacaaaggagccttttaccaacaagtactagtagactcttacattaaagaaattaaaacaaatcctgatggctctcctgtagttgcaggccctaacgatagaccctcaacaagcgaaatgagtgcttataacgaatgggtaaaatctaaatttaaagtaccaggaacatctgttcactacaacttttgcacatacaaacctgacagtgccaaattaaatacacttagacaatactactttcattgggaaactgcacagtccacaaaccataaatttaatgtagaacacgtaccacacgcgggcacaaaacctacaaaagactggtgggagtatagaacaggcctattttcacctatatttcttagtccatacagaaccagtcccatagacagctggttgctggcatacagagacgtgtcctacaatccactaaatgacaagggagtaggcaaccgagtatggatgcagagtctagtaaaaccagacacccagttcacactgccctcatgtgtatttgtactagaagacaaacccctgtggtgctgtttctatggctatactgactttataaagagtgtcagagagggccaagacatagactttgaaaacattatttgcattcagtgtccttacacagagcctcctctatatgaaaagcacaaccccaacatgggcttcatagtatatgacagcaactttggcaatggcaaatggctagacggaaccgggttcgtcccggtagaataccagtgccgctggcggccctgcatagctttccagcaacaggtactaacagacattaccatgagcgggcccttcagctacaaagacgatgttaaaaacacctgcatacaggccaaatacagatttgactttaaatggggcggcaatattctttatcagcagaccatcagaaacccatgtaaagacggacaagctaccgattcccatagacagcctagagacgtacaagtcactgacccgcttaccatgggaccccgatacgctttccaccaatgggactggcgacgtgggtggcttagtgacaaagctctcaaaagaatgctccagaaaccgctcgattttgaactgtatccaatcaatccaaagagacctagactattccctcccacagaagcaggagaaggagaggtcccaaaagaaagctcattttcagaggaagaaagcgagccgtcctcgcaagaagagacgaggccggagaggctccagctcaagctccgacagcagctccgagagcagcgagagctccgagtccacctcaagcacctcttccagcagctcctcaagacacaagcggggctccacctcaacccgctcttattcaaccagcaataaacaaagttcttctgtttccagaaatgggtccaaagcccgctcctactagtggagactgggaaacagaataccaggcctgtaaattctgggacagacctcccagaaaatttctcaccgatacacccttttatccctggatgcctccggcacccccaaaattctctgttagtttcaaactaggcttcaaaccctaaataaacaaggccatacactgttcacttgtcggtgtctacctctataagtcactaagcactcc

SEQ ID NO: 2391 - protein, 752 aa, Alphatorquevirus sp.
MAWWWWRRWRRWPRRRWRTRRRRRVRTRRPRRPVRRYRSRYTVRRRRRRGWRGRRRRRLYRRRYTIRRKRKKLILKQWQPANVRKCKIRGLFPIVICGHGKSANNYALHSDDVLPMRQAFGGALSTVSFSLKVLYDQYLRHLNRWSTSNDVLDLARYLGCTFWFYRDKKTDYLVQYDISAPYKLDKDSGPSYHPGVLMQAKHKVLVPSFDTHPKGKAKVKIRIKPPKLFIDKWYSQEDLCTVNLVTFVVSLASFSHPFCPPLTNNPCVTFQVLNNFYNSVIGSSINVADTTVNSVFNNFLYNKGAFYQQVLVDSYIKEIKTNPDGSPVVAGPNDRPSTSEMSAYNEWVKSKFKVPGTSVHYNFCTYKPDSAKLNTLRQYYFHWETAQSTNHKFNVEHVPHAGTKPTKDWWEYRTGLFSPIFLSPYRTSPIDSWLLAYRDVSYNPLNDKGVGNRVWMQSLVKPDTQFTLPSCVFVLEDKPLWCCFYGYTDFIKSVREGQDIDFENIICIQCPYTEPPLYEKHNPNMGFIVYDSNFGNGKWLDGTGFVPVEYQCRWRPCIAFQQQVLTDITMSGPFSYKDDVKNTCIQAKYRFDFKWGGNILYQQTIRNPCKDGQATDSHRQPRDVQVTDPLTMGPRYAFHQWDWRRGWLSDKALKRMLQKPLDFELYPINPKRPRLFPPTEAGEGEVPKESSFSEEESEPSSQEETRPERLQLKLRQQLREQRELRVHLKHLFQQLLKTQAGLHLNPLLFNQQ

SEQ ID NO: 2392 - protein, 161 aa, Alphatorquevirus sp.; identical to SEQ ID NO: 503

SEQ ID NO: 2393 - protein, 60 aa, Alphatorquevirus sp.; identical to SEQ ID NO: 504

SEQ ID NO: 2394 - DNA, 2937 bp, Alphatorquevirus sp.
gagtgcgacccttccccctggtgcaacgcagtcaaggggcaattcgggctcgggactggccgggctatgggcaaggctcttaaaaaagacatgtttctcggtaaactctacagaaagaagagggcactgccactgtgccgcctgcgagcttcaaagaagaaaccacctcctgacatgacctggagacccccggtgcataacgcccatgggatcgagagaaatctctaccagtgcattttctgcgcacatgctgctagctgtggctgcggtgatcttgttagccatatttctctactggctcagcggtatggtgctcctccaagaccgccggcgcccggggctcccagaccacagatgagacgccagctggcccttccagcgccccccgccgatccgcagcaggctaacccagaatggcttggtggggacggtggagaccgtggcgatggaggcgccgctggaggaggggtcgccgccgacggagactacgaacccgaggaactcgacgccctcttcgacgccgtagaacaagaagagtaaggagaaggagatgggggaggcggaggtggagacgggggtacagacgcagactgagactgagacgcaaacgcagacgcagaaaaaagatagtactgactcagtggaaccccgccaaagtgcggaggtgcaggatatcgggggtcctgcctatggtactgtgcggcgcggggaggtcagggtttaactatggactgcacagcgacgacctgactgtacagaaaccccttaaccagaacccccacgggggaggcatgagcacagtgactttctctctcaaagtgctctatgaccagtaccagaggttcttaaacaagtggtcttaccccaacgaccagctagacctggccagatacaagggctgcaaattcaccttctacagacacccagagacagactttgtagttcagtatgacaacgttccccctatgaaaatggatgagtttacagcccctaacactcatccaagcttgctgctacaggccaaacacaggcgcaaaatccccagttttaaaaccaggccttttggtaaaaagacaataactattaaagtggggcctcctaaactatttgaagacaagtggtacccccagtcagatctgtgcaaggtgccccttgtcagttggcgggtgaccgcagctgacttgcggtttccgttctgctcaccacaaactgacaacccttgcttcaccttccaagtattgcacgagaactattacacatgctttggaacttcctgtttagaccaacggacacagtacgactcagaaattaacactttagaaaactggctatatggctcctgcagtcactatcaaacatttgctacagacactagattagccccagagaaaacaacacaaccatcaggattaagtaacaatcctgaatggacacaatcagagtttcaacggtttaaaaaaagtatagacagcaactatggctactgtacatactgccccacaagtgaattaataagcaaaataaaaaactacagaaacaaaagatttaaatggctaacaagccctgacactaccaacatatgtcacataaacatgacatacagcaagggcaagtacgaagagtacgagtaccaccttggctggtactctaacatatttataggcaacctaagacacaacctagcattcaggccagcatacatagatgtaacctataaccccatagtagacaaaggcctgggaaaccacatatggtttcagtacctgacaaagcccaccactgaactaatagaagcacaggcaaaatgtcacatccaggacctgcccctgtacgccatgacctttggctacgaggactacctccagagaacactaggccctttccaggacgtagagaccgtgggcataatctgctttatatgcccttacacagaaccgccctgcgttaacaaaaacgagggcaaaaagaactggggctacgtgttctatgacacacactttggcaacggcaagactccagagggactgggccaagtgcacccttactggatgcagagatggagaccagtgtcccaggtgcaaaaagagactctaaacaagattagcagaaccggaccgttcagctacagagacgagcaccctagcgtgacgctgaccgcgaactacaagttctactttaactgggggggcgactctatatttccacagattattaaaaacccctgtccagacaacagcctgcgtcccggcggccatagagagcctcgctcagtacaagtcgttagcccgctcacaatgggaccgcaatacctctttcactcctgggactggcgacgggggttctttaatccaaaaactctcaaaagaatgcttgaaaaaccagatgatgatgcagagtatccaacaggtccaaaaatccctcgatgggtacccgctctcgagcaccaagggcaagaaagcaacttcgattcggagacagagatctccgagtcctcggaagaagaagccgctcaagaagtcctccaagaaatccaggaggcgccgctacagcagcacctcatccagcagtaccgagagcagcgacgcctcggaaagcaactcaaactcgtcatgctgcaactcaccaagacgcaaagcaatctgcacataaatccccgcgtccttggccatgcataaataaagtgtacatgtttccccccgaaaaaccccttggcatacacgggtaccacgggtgggagacggagtatcaggcctgcaaggccttcgacaggccccctagaaactacctgtcagataaacccatctacccctggcttccccgctcccagccagaaattaaagtgagttttaaactcggttttcaataaacaaggccgtgggaatttcacttgtcggtgtctacctcttaaggtcactaagcactccgagcgtcagcgag

SEQ ID NO: 2395 - protein, 753 aa, Alphatorquevirus sp.; identical to SEQ ID NO: 1261

SEQ ID NO: 2396 - protein, 157 aa, Alphatorquevirus sp.; identical to SEQ ID NO: 1262

SEQ ID NO: 2397 - protein, 147 aa, Alphatorquevirus sp.; identical to SEQ ID NO: 1263

SEQ ID NO: 2398 - DNA, 2937 bp, Betatorquevirus sp.
cgggtgccgaaggtgagtgaaaccaccgtagtcaaggggcaattcgggctagctcagtctggcggaacgggcaagaaatttaaaataacatttattttacagatatgagctctatctggaagaaacctacattctcagtgagacaacaagaaaaccattggcttggaattgttttcagcactcatgacagcttctgccactgtgaagacccctggttacatttgatgattcttctaaacaaacaaggaaaagctccaaaacctgaatccgacgttcgcaatataaaatgcctccttactggaatagatacaactactaccaaagaagaccatacagaagaagacgtcgttaccggtttcgacgatggagagctggaaaaactattcgcagaaaatggcacagacgaaaatggagacgaaggaacaaggtaaaaagacgctttagaaagaaaaaactaaaaaaaattgttctaaagcaatttcaaccacataaaataactaaatgtaaaatagtaggcaaaaaatgtttatttcaaggtagtcctttaagatctagtaataactacatacagtactgttactcatatgtacctgaattatatcctggtggtggagggtggtctttacttgtacatagcttaggaagtatgtatgaagactatcaacatttaaacaatatatggacaacaagtaatgcaggaatgcctcttgtaagatacatgggagtggaatttaagttttatcaagatttgtatacagactatgttgttatctgggataattgctggccattggttgacaccccatacacacatgctaacagttgtcctagccaaatgcttcaaagaaaaaacaaaataatagtgcccagcaaactaacacaaaataggaaaagaccatacaaaagatgctttgtaacacctccaacacaaatgcttaaccgttggtatttccaaagagacatttgtgacacaccattagcaatgataaccgcaacagcagttagtcttacaaaaccattttgtgacccaaaagcaaaaagtaacaatataactattaactgcctaaacccacacagatttagaaaccctaactttcaaaacccgccaataacaacaggatatagtccattttcagcagacaatttaacaggccatccaaacatgtacttatacggttcacacacagtaatacaaaaaaaaaaagacttactaacattaacacctttatgtaataccaaagacaacagagctggagcaatattagcaaatttaataaacaattcaaactcaaataaattcgaaaactggggaaatcctttcaattccatttacttttcctcagaagaaacacatatttaccaatcacaacacggcccaacatctaaggaagtaacacaaacctggaagaattatcaaaataatgacgagaatataggcagtgaagttacattaatggtaggtcacaacctgtatgcttgtagatacaatccagaaaaagacacaggagaaggaaacatgtgttacttactaaacaattcctcagcagctagcctagaaccgccagcaaacaaaaacctagtttttgaaggttttccactatacatactactatggggatggacagactttataaagaaactaaagcaaacaattgacattgacaaaaactactttttagtaataaaaaccccattttttgaagaaaaactaccatactatatacctatagatgatgactttagagatggatttgaaccctacactccacacgaaactaacaatgcacaggcctacatttctccatacaacatgaaccactggtatccaaaactactatttcaatatcaaagtattgaaaaaatttgtagatctgggccagcatgccctagaccaacaaacgacaactacttacaagcattttacaaatacaaatttcactttaaatggggtggatgtcctaaacaactagcaaaagcatatgatccttgtttacagtcaaaatggcccactcccgataacatcactccaggacttgaaatctcgaatcctaatgaaccaccacaaacccacatctatgactgggactgggaagaagactacattaaagaaaaagctttacaaagaattagaatacacacagagtctcctaaacaaatactcttccttacagactcaaaacagaaccccaaaccactgcaaatcaaagaagcgaaagaggagacagaaaacgaagaggaaacgcaactactcctccagctccaccgaatccgacaccagcgaaagcagctcgaactccttctccagtcaaaatacggacaaataactacaccataaaacaatgtaaaattaaagttaaactgtttcctagcccaaaaaagaatagaagaatgacaccaaaggaaagagaactagaaaaagaaatagcaactatttttaaaagaccacaaagagactttatatttgatacacctatatacccttacataccaccagcaccccttgctaactttgacctaaattttaaagaataaaggccaacatacttcacttaatggtgtctgtttatttaagtttaacctaaataagctgtctccgcctcccaactatgttggcgccataaagggggctccgcccccttacacccccaagggggctccgcccccttacacccagggggctccgcccccttacaccccctaataaatattcaacaggaaaaccacctcatttaaattgccgaccacaaaccgtcttttacttcccctttttaccaacacttcccttttttctcattattattcattacattaattagtaaactgcgtaaatccggggagtggcaactaaactatataactaacaacacttccgaatggctgagtttatgccgccagtcgtagactgcaccacttcagtgactgcaggctgagcttggg

SEQ ID NO: 2399 - protein, 682 aa, Betatorquevirus sp.
MPPYWNRYNYYQRRPYRRRRRYRFRRWRAGKTIRRKWHRRKWRRRNKVKRRFRKKKLKKIVLKQFQPHKITKCKIVGKKCLFQGSPLRSSNNYIQYCYSYVPELYPGGGGWSLLVHSLGSMYEDYQHLNNIWTTSNAGMPLVRYMGVEFKFYQDLYTDYVVIWDNCWPLVDTPYTHANSCPSQMLQRKNKIIVPSKLTQNRKRPYKRCFVTPPTQMLNRWYFQRDICDTPLAMITATAVSLTKPFCDPKAKSNNITINCLNPHRFRNPNFQNPPITTGYSPFSADNLTGHPNMYLYGSHTVIQKKKDLLTLTPLCNTKDNRAGAILANLINNSNSNKFENWGNPFNSIYFSSEETHIYQSQHGPTSKEVTQTWKNYQNNDENIGSEVTLMVGHNLYACRYNPEKDTGEGNMCYLLNNSSAASLEPPANKNLVFEGFPLYILLWGWTDFIKKLKQTIDIDKNYFLVIKTPFFEEKLPYYIPIDDDFRDGFEPYTPHETNNAQAYISPYNMNHWYPKLLFQYQSIEKICRSGPACPRPTNDNYLQAFYKYKFHFKWGGCPKQLAKAYDPCLQSKWPTPDNITPGLEISNPNEPPQTHIYDWDWEEDYIKEKALQRIRIHTESPKQILFLTDSKQNPKPLQIKEAKEETENEEETQLLLQLHRIRHQRKQLELLLQSKYGQITTP

SEQ ID NO: 2400 - protein, 108 aa, Betatorquevirus sp.; identical to SEQ ID NO: 3

SEQ ID NO: 2401 - protein, 57 aa, Betatorquevirus sp.
LFPSPKKNRRMTPKERELEKEIATIFKRPQRDFIFDTPIYPYIPPAPLANFDLNFKE

SEQ ID NO: 2402 - DNA, 2937 bp, Betatorquevirus sp.
cgggtgccgaaggtgagtgaaaccaccgaagtcaaggggcaattcgggctgggtcagtctggcggaacgggcaagaaacttaaaatgtattttattttagatatgagccaccgtctaattcaaccaaaaccatctgcaaaacaacaaaaactaaaatggatgaatatgctcgctcactgccatgatactttctgcgattgctacgatccaataacccacactgcagcactaatttttgaacaagaaccaaacctaaaattctctgcaccagaaaaggatataattagaaaatgtattactggagaaactaccgccgcaattactaccgacccagaacaagacgttattggagacggagaactcgccgctttgtttcaagaagacgttggagaagaaaaagatacagggtaagaaaaagaaaactaaaaactttaaaactaaaacaatggcaaccacattacataaagaaacttaaaattaaaggagactatccaatttttttaacaacttcacaaagaatatctaataacttgatatgctacttagaaagcatagcaccttgggactggccgggaggtgggggctttagtattgctaactttacatttgaaatgctgtataaagaaaacttaactgctaataattactggactgtaagcaatgataatatgccactatttagatatcttggatgccacattacactatacacacaaccagaagtagactacttattttactggaacaacacaccacccatgaaagcaacaaaactaacatacatgagcacacaaccacaaataatgttacaattaaaacatgtaaaagtaatgaaatgtagaaaaacaaacagaaaaaaaccatacaaaagaatatgggtaccacccccaacacaaatgcagaacaaatggtacttacaacacgacctagctaacgttccattattacaaactattgccacagtatgctcgttagaccgcaaatacttacatgcaaatgccaaatcaaccacaatgagtttctacactattaacacagaagaaatacaagaccattactttgcacaaacacaaggaacacaaggttacaatccaaaaaacaatgtaaagctttttggttgtctagaaccaccagctaaatactccctaacagatattaagataggaactttaacatacctaggacaagtagatactcaacatgcaggaacaaaactaaaagatataaacacgtccactgcatcctttgctgacaaaatacagaaggcacttaatactccaggactacaaggaaaccccttttacaaagaatggctaaacccagactcctatgttgtaaaaacaacagcagacttccaaacattaaaagaaaactacccaacagcagatacaaaattaaaccaacaacacttttcatgggcaggaaatcttctaaaagaagttagatacaatccttttaaagacaaaggcataggaaacaaagtatacttagtaaacatactaactagagaacattctcacacctgggacgctccattagacgatgacatagtctggaaagacctaccactttacaacctaacatggggatacctagattttcaaagaaaatgtggcctaaacacagctatagacacaaacaaatgccttgtaatatacacaccttacgtagaaccacaactcacaacaaaaatatacgtaccagtagataaaaaatttacagaaggactaagcccctattcacaaataacatatccatcagaccactcaaactggcatccaaaagtaagataccaagtagatactgctaaccttatagcttctactggacctaatacagtaaaactacctgacaatataagctgtgaaggacatataagatataactttaaattcaaaattggaggagaaccagcaccaatgtcagttcttgtggatccacaggaacaaccagcacataccttccccaataacatcctacaaacaacttcgttacagagtccagcaaggccaattgaacaactattatggaaattcgatgaaagacgaggactgcttacaaaaaaagctgcacaaagaatcaaaacacacacagaaactgaaaaagatattctttcaattacagacccagcaacaagctgcccaatatggaccaccaaagaaacatcgacatcggacacatcgacagaggaagaagaagaagcaccactccagacacaactcctccacgagcgaagaaagcaaaaactcctccgaaagcgaatcaacagactcctcaaccgactaacaacattagaatagataattgtaaaataaaagtaaaactattccctgatgaacaaccccgtaaccgtagaatgactaactgggaaagagaacaagaaatacaagaggcagctctgtggggtagaacaccaagatggtttatatttgacaaacatttttaccccgacgttcctcctgtaccaaaatatactgtaaactttgacttaaatgcgccgtaataaaacaaggccagcaaatattcactctcggtgtccatttatataagctttaacttaaataaacatccaccactctccctaatacgcaggcccagaagggggctccgcccccttcaacccccagggggggccaagccccccctataaccccccctaatgaatattcaacaggaaaaccacacaattagaatggctaaccacaaactgccacttacttcccctttttactaaacttcctcttttagtcattattattcataaaattaattagtaatcaccgtaaatccggggagtgtccaactacctatataactaactacacttccgaatggctgagtttatgccgccagacggagacgggatcacttcagtggctgagtttatgccgccagacggagacgggatcacttcagtgactccaggctgaccaaggg

SEQ ID NO: 2403 - protein, 669 aa, Betatorquevirus sp.
MYYWRNYRRNYYRPRTRRYWRRRTRRFVSRRRWRRKRYRVRKRKLKTLKLKQWQPHYIKKLKIKGDYPIFLTTSQRISNNLICYLESIAPWDWPGGGGFSIANFTFEMLYKENLTANNYWTVSNDNMPLFRYLGCHITLYTQPEVDYLFYWNNTPPMKATKLTYMSTQPQIMLQLKHVKVMKCRKTNRKKPYKRIWVPPPTQMQNKWYLQHDLANVPLLQTIATVCSLDRKYLHANAKSTTMSFYTINTEEIQDHYFAQTQGTQGYNPKNNVKLFGCLEPPAKYSLTDIKIGTLTYLGQVDTQHAGTKLKDINTSTASFADKIQKALNTPGLQGNPFYKEWLNPDSYVVKTTADFQTLKENYPTADTKLNQQHFSWAGNLLKEVRYNPFKDKGIGNKVYLVNILTREHSHTWDAPLDDDIVWKDLPLYNLTWGYLDFQRKCGLNTAIDTNKCLVIYTPYVEPQLTTKIYVPVDKKFTEGLSPYSQITYPSDHSNWHPKVRYQVDTANLIASTGPNTVKLPDNISCEGHIRYNFKFKIGGEPAPMSVLVDPQEQPAHTFPNNILQTTSLQSPARPIEQLLWKFDERRGLLTKKAAQRIKTHTETEKDILSITDPATSCPIWTTKETSTSDTSTEEEEEAPLQTQLLHERRKQKLLRKRINRLLNRLTTLE

SEQ ID NO: 2404 - protein, 120 aa, Betatorquevirus sp.
LGQSGGTGKKLKMYFILDMSHRLIQPKPSAKQQKLKWMNMLAHCHDTFCDCYDPITHTAALIFEQEPNLKFSAPEKDIIRKCITGETTAAITTDPEQDVIGDGELAALFQEDVGEEKDTG

SEQ ID NO: 2405 - protein, 121 aa, Betatorquevirus sp.
LPNMDHQRNIDIGHIDRGRRRSTTPDTTPPRAKKAKTPPKANQQTPQPTNNIRIDNCKIKVKLFPDEQPRNRRMTNWEREQEIQEAALWGRTPRWFIFDKHFYPDVPPVPKYTVNFDLNAP

SEQ ID NO: 2406 - DNA, 2937 bp, Betatorquevirus sp.
cgggtgccgaaggtgagtgaaaccaccgtagtcaaggggcaatgccgaaggtgagtgaaaccaccgtagtcaaggggcaattcgggctagatcagtctagcggaacgggcaagaaacttaaatttaacttattttttaggcatgagccatcgttggacaacacctaaatcaacacttagagaaaaaaaactacaatggctcaatttaattgcacacgcgcatggaattttctgcgactgtccagacccaatggaacatacagctgccttaatttttgaacaagaaccagatttaaaatttaaagtaccagaaagagatctaatacaaaaatgccttggtggaggacccgccgctaccgttggagaaacagaagacgtagacgcttttggacctggagacctggacgcccttttcgcagaagatggtggagaagaaagcaccgcccggtaagaaaaaagaaacttaaaaaattaaaactaactcagtggcagccacgctatattagaaaactaactgtagtaggattttatccaatgtttatggcaacttctgaaagactttcaaatgtactaaactgttacttagaaactacagcacctcattatatgcacggaggaggaggattttctattagtaacttttctctaatgactctctatttagagcacttacaagtaagaaactggtggactgttagtaaccaaaacatgcctctaataagatttttgggagcctccatatacctatacaaagcagctgaatacgattacctattttactacaatacacaaccacctatgacagctacattaacaacatatcaaagcacacaccctgcagctatgctactaaacaaaaacacaagaaaaattacatgtaaaagatataacaaaaagaaaaaaccatacacaaaacttaaaattcaaccacccacacaattacaaaacaaatggtactttcaacatgatctggcaaacacaccactattgcaaactatgtgcacagcatgttcgtttgaccgcatgtttcttaaccttaattcagttagttcaaccataggtttcacaagtcttgacacaagaggctttctaaaccaccaatacaaaccgttaggaacagcgggatacactccaaaaccaaacacattattatttggagtagaaaacggtagcaaagacatatcaaaaataacctacaatgaactaatatacatggcatgcacaacagacttacaagaaggaacacctatgcaacacatagatactacaacttattcaggaccctcaggctacaatgacttccaaaagaaactatttaatgctaaaacaaaacatgaaaactggggtaatccatttaaacctagtttttttaccggagaacaaagacttatagaaaccaacaaaacatgggaggacatattaaaaataaacataggaaccacacaattaggaacaggatggacagaaaaaactcacaaaacctttgagtgtagatataatccatttgcagacaaaggctcaggaaacatattgtatttactaaaaatagacagtggactacattctatagactgggcaccaccgacaaataaagacgtagtaacacaagatttaccactgtggctcctaacatggggatatttagactttcaaagaaactgtaaagaatacagagacatagacacaacctgcattgctgttatacaatcaccttacatacttccaaaatctgaaaaattctatgtgcccttagactatgactttttagaaggcacaagtccatacagaccacaatatgaaattacaccttctgactcttacaactggcacccaaaagtggcatttcaaacaagagctataaactctatagccacttcaggaccagccacaattaaactaccaaaagacacatcttgtgaagctcatataagatatcgcttttatttcaaggtcggaggacaaccaccacctatgtccattcttaccaaccccacagaacaaccaaaatatcccattcccgataacctcatcagcacaaattcgttacagagtccagcaacaccaattgaacaactcctctggagctttgacgaacgcagacaaatgctcacaaaaactgctacacaaagaattacagactaccaaccaactgaaagctctcttttacaaattacagacccatccagccactgcccaacaacaacactcttcaaagaaaaagaaacatcggagacagagagctcggaagaagaagaccaaacaccgatccaggaacaactcaacaagcagcgaagaaagcaaaagcagctacgacagcagatcaagcacctcctcaacagattaataaatatagaatagaaaaatgtaaaaccacagtactgttatttccaccggatgagcctaaaaacaggcgtatgactccctgggaaaaacaacaagaattattagatgcagcaatttgggggaggagacctagagattatattttggataaaccattttatgatttatgccctgaagtgccttactatactgtaaactttgatcttaatgcgccgaaataaatttcaaggccagcaaatattcactctcggtgtccatttatataagtttaacttaaataaacatccaccacactccctaatacgcaggcgccatagggggctccgccccctataacccccagggggggcacagccccccctacaacccccctaataaatattcataacggaaaccacaaaatttgaattgccgaccacaaacagccatatgctaattaacttccctaaaacacaaccaacttccccaaaaattaattagtaatcaccgtcaccatgggaggagacacacatctatataactaatattacttccgaatggctgagtttatgccgctagacggagcgcagaacagagtctcagcgctgatcttggg

SEQ ID NO: 2407 - protein, 675 aa, Betatorquevirus sp.
MPWWRTRRYRWRNRRRRRFWTWRPGRPFRRRWWRRKHRPVRKKKLKKLKLTQWQPRYIRKLTVVGFYPMFMATSERLSNVLNCYLETTAPHYMHGGGGFSISNFSLMTLYLEHLQVRNWWTVSNQNMPLIRFLGASIYLYKAAEYDYLFYYNTQPPMTATLTTYQSTHPAAMLLNKNTRKITCKRYNKKKKPYTKLKIQPPTQLQNKWYFQHDLANTPLLQTMCTACSFDRMFLNLNSVSSTIGFTSLDTRGFLNHQYKPLGTAGYTPKPNTLLFGVENGSKDISKITYNELIYMACTTDLQEGTPMQHIDTTTYSGPSGYNDFQKKLFNAKTKHENWGNPFKPSFFTGEQRLIETNKTWEDILKINIGTTQLGTGWTEKTHKTFECRYNPFADKGSGNILYLLKIDSGLHSIDWAPPTNKDVVTQDLPLWLLTWGYLDFQRNCKEYRDIDTTCIAVIQSPYILPKSEKFYVPLDYDFLEGTSPYRPQYEITPSDSYNWHPKVAFQTRAINSIATSGPATIKLPKDTSCEAHIRYRFYFKVGGQPPPMSILTNPTEQPKYPIPDNLISTNSLQSPATPIEQLLWSFDERRQMLTKTATQRITDYQPTESSLLQITDPSSHCPTTTLFKEKETSETESSEEEDQTPIQEQLNKQRRKQKQLRQQIKHLLNRLINIE

SEQ ID NO: 2408 - protein, 102 aa, Betatorquevirus sp.
MSHRWTTPKSTLREKKLQWLNLIAHAHGIFCDCPDPMEHTAALIFEQEPDLKFKVPERDLIQKCLGGGPAATVGETEDVDAFGPGDLDALFAEDGGEESTAR

SEQ ID NO: 2409 - protein, 124 aa, Betatorquevirus sp.
LPNNNTLQRKRNIGDRELGRRRPNTDPGTTQQAAKKAKAATTADQAPPQQINKYRIEKCKTTVLLFPPDEPKNRRMTPWEKQQELLDAAIWGRRPRDYILDKPFYDLCPEVPYYTVNFDLNAPK

SEQ ID NO: 2410 - DNA, 2936 bp, Betatorquevirus sp.
cgggagccgaaggtgagtgaaaccaccgaagtctaggggcaattcgggctagatcagtctggcggaccgggcaagaaacttaaaaatatatctattttacagatgtcctccaagaaaccaacaagaagagaattaaaccaactaatcaacgtttgctgtggcgcccacgacctcatctgcgactgcgacgaacccaccaaacacatcatccttcacctattctcccaccaggaaccctaccaagtaacaaaacaacaaaaggataatatacaaaaatgccttattactacagaagaccatggagaaccaaccgctatcgttggagacgatggtataaacgaaggagacctagaggctattttcgcagaagacaaaaatggagaagacgccgaagggtaagaagaaagcttcctaaacttaatattaaagaatggcagccacagactattagaaaatgctgcataaaaggaatgcactgtttatttttatgtacagaacagactattagtagaaactatagaatgtatgaacatagcataataccagaaagatggccaggaggaggaggattttctgtaacaaaatacagcatagatggactatatgaacaacaccaactagatagaaactggtggacaaacagtaacacaaacttaccattatgcagatacacaggatgtaaaattaaattttaccaaagctgggaagtagactatgtagtaaatactagcctaaactatccaatgttagctactcaactactataccacagttgtcaacccagctttatgatgatgaacaaacactgtatatttgtaccatcaaaaataactaaaaaaattccaaaaggctatataactaaaaaatttagaccacctaaccaaatgagtaaccgttggttctttgcaaaagatctttcaaaagtaggtttgctaatgctaaccgcatcagcagcttcctttgaccattactacatagcaacagacaaaacctcaaataactgttcttttaccacacttaacccatacttatggaaaaaacataactttatacaaccaggcattaatggatattcactatccacaactgggactgtagaaaaaagaatgttcacaaccacacaacacatcaacaacgacactcaaatatcaaacctacaaccaagcacaattacatacttaggttggacaaaacaagaccaacaaggagaacctgtatcagcaaataacaaacaaaactacttaacagaccacaaatactggggaaaccctttttcacatgaaattctaacaggctcacaacctgtattagtaacaactaaagattggactactatcaaacaaaacttaatagaaaagtttgactgtaaaatacccacaggatttttaacaacacccacagaaccattactacatgaatgcagatactctccagacagagacacaggagcaggaacaaaagtatatttaaaatctgtactaagagacgaatcaggttgggaaccaccaacaaacgaagaacttataacagagggctttccactatggttagcattatttggctttgtagactggcacaaaaaactagcagtagcaacaagcctatatacaagctacgtaattgtaattgaatccaactttataacaccacaactaccatactacatattattagaccaacactttattgaaggaaaatccagatacatgacagaacatgacacagaccaacaaactcaagcagacaaagattcctggtacccctgtgttaaataccaactagaaagcatagaaaacattgtaaaaacaggcccaggaattcctaaactaggtggaagaaaatcagtagaagctaaaatattctacaaattttattttaagtttggaggatgtccaccaaagatggacacaattaacgaccctactaaacaagagacataccccgttcccggttttcagtctacaacatattcgttacagaatccaacactccctcaagaatcctacttataccaatttgacatcaaccaagacatccttacaaagaaagctgcaaaaagaattacaagagactgggaaactcaaaaaactctattttcaactacaggacaaatggaaccagcaccatactcggaaaaagaaggagaaatctcgccgacagcctcagactcggaagaggacccggcactcctacaaatcaagctccgaaagctcaagcgacagcgactctacttggagcagcaaatccagcaactaatggaacaaccataaactttatgtgcataaaaaaagctctgcttttcgaaccaccgcataaaaaactgagaaaaatgaacaaatatgaactagaaactgaaagactgtgtgctacagcctttaaaagaccacctgtatctatgtggggggaaattccttactggccatggttaaaaactgaacccttagtaaatcaacttccaaaagttaactttgacttaaattttaaaccctaataaaatttcaaggcctacaaaattcacttagtggtgtctgtttatataagtttaaacttaaataaaccaactccgcctcccaaaattgttggcgccataagggggctccgcccccttaaacccccaagggggctccgcccccttaaaccccaaagggggctccgcccccttaaacccccaagggggctccgcccccttacaccccctaataaatattcaacaggaaaaccacataattagaattgccgaccacaaaccgtcagttacttccccttttagcacttacttcccttttccttcattattattcattacattaattaataatcaccgtaattccggggaggagcataaacactatataactaactacactgacgaatggctgagtttaccacgccagacggagacggcatcacttcagtgactgcaggctgatcttggg

SEQ ID NO: 2411 - protein, 664 aa, Betatorquevirus sp.
MPYYYRRPWRTNRYRWRRWYKRRRPRGYFRRRQKWRRRRRVRRKLPKLNIKEWQPQTIRKCCIKGMHCLFLCTEQTISRNYRMYEHSIIPERWPGGGGFSVTKYSIDGLYEQHQLDRNWWTNSNTNLPLCRYTGCKIKFYQSWEVDYVVNTSLNYPMLATQLLYHSCQPSFMMMNKHCIFVPSKITKKIPKGYITKKFRPPNQMSNRWFFAKDLSKVGLLMLTASAASFDHYYIATDKTSNNCSFTTLNPYLWKKHNFIQPGINGYSLSTTGTVEKRMFTTTQHINNDTQISNLQPSTITYLGWTKQDQQGEPVSANNKQNYLTDHKYWGNPFSHEILTGSQPVLVTTKDWTTIKQNLIEKFDCKIPTGFLTTPTEPLLHECRYSPDRDTGAGTKVYLKSVLRDESGWEPPTNEELITEGFPLWLALFGFVDWHKKLAVATSLYTSYVIVIESNFITPQLPYYILLDQHFIEGKSRYMTEHDTDQQTQADKDSWYPCVKYQLESIENIVKTGPGIPKLGGRKSVEAKIFYKFYFKFGGCPPKMDTINDPTKQETYPVPGFQSTTYSLQNPTLPQESYLYQFDINQDILTKKAAKRITRDWETQKTLFSTTGQMEPAPYSEKEGEISPTASDSEEDPALLQIKLRKLKRQRLYLEQQIQQLMEQP

SEQ ID NO: 2412 - protein, 98 aa, Betatorquevirus sp.; identical to SEQ ID NO: 1767

SEQ ID NO: 2413 - protein, 139 aa, Betatorquevirus sp.; identical to SEQ ID NO: 1768

SEQ ID NO: 2414 - DNA, 2936 bp, Betatorquevirus sp.; identical to SEQ ID NO: 2410

SEQ ID NO: 2415 - protein, 664 aa, Betatorquevirus sp.; identical to SEQ ID NO: 2411

SEQ ID NO: 2416 - protein, 98 aa, Betatorquevirus sp.; identical to SEQ ID NO: 1767

SEQ ID NO: 2417 - protein, 139 aa, Betatorquevirus sp.; identical to SEQ ID NO: 1768

SEQ ID NO: 2418 - DNA, 2934 bp, Alphatorquevirus sp.
gggactggccgggctatgggcaaggctcttaaaaagccatgtttctcggtaaactttacagaaagaaaaggaaagtgcttctgcaaactgtgccagacccaaagaaggctaggcggcttctgattatgtggcagccccccgtgcacaatgtacccgggatcgagagaaactggtacgagagttgctttcgatcccatgctgctgtttgtggctgtggcgactttgttggccatcttaataatctggcagctactctgggtcgccctccgcgttctcggcaccccgggggccccggcactcctcagataagaaacctgccagcgctcccggcaccccagggtgagcccggtgacagagcgccatggcctacggatggtggggccggcggcgccgctggagaagatggaggacgcggcgcagaccgtggagaaccaggagacgtagaagacgacgcgctcctcgccgctttcgacctcgtcgaagagtaaggaggcgcagggggcggtggcgcaggcggtatagaaaatggaggcgacgcaggggcagacggacgcacagaaaaaagataatcataaaacagtggcagcccaactttataagacgctgctacatcataggctacctgcctctcatattctgtggcgagaacaccaccgcccagaactttgccacccactcggacgatatgatagccaaaggaccgtggggggggggcatgactactaccaaatttactctaagaatcctgtacgacgagtttaccaggtttatgaacttttggactgttagtaacgaagacctagacctatgtagatacgtgggctgcaaacttatattctttaaacaccccacagtagacttcatagtcaggataaacacacagcctccttttctagacactaacctcaccgcagcacagatacaccccggcatcatgatgctcagcaaaaaacacatactaataccctcgctaaagaccagacccagcagaaaacacagggtgatcgtcagggtgggcccaccaagactttttcaagacaagtggtacccccagtcagacctgtgtgacacagttctgctttccatatttgcaacggcctgcgacttgcaatatccgttcggctcaccactaactgacaacccttgcgtcaacttccagattctggggccccagtacaaaaaccaccttagtattagcacacttaaagacacacataacctaaatcactataatgagaatctgtttaacaaaatcgaactgtacaacacttttcaaacaatagctcaacttaaagaaacaggcatgatacagaaagatgatgaaaattatgggtggaacaaggtacaaaacacagagtcactatccttcaacggtaacaatgcaactagcagcaaagacacctggtacaaaggcaacacatacaataacaagataaaagagttagcagaaaaaactagagaaagatttcaaaaagctacacaaagcgcactaccacagtatgccacacttatgcccacagcactatatgaataccactcaggaatatactccagcatattcctagcagcaggcagaagctactttgaaaccccaggggcatactcagacattatatacaaccccttcacagacaagggcacaggcaacataatatggatagactatctaacaaaagaagacaccatattcactaaaaacaaaagcaaatgcgaaataatggacttgccgctgtgggcagcctttacaggatacgcagaattttgtgcaaaatacacaggagactctgctattcagtacaacgccagactattagtaaggtgtgcatacactgaccctatgcttatagaccactcagaccccaacaagggctttgtgccctactcctttaactttggagagggtaaaatgccaggagggtcctccaaagtacccataagaatgagagctaagtggtacgtaaacatgttccaccaacaagaattcatggaagcaattgtacagagcggaccgtttgcttataggggcgacataaaatcagcggtactaagcataaagtacaaattccactggaaatggggcggaaatcctatatccaaacagatcgtccggaatccctgctccaactcctcctcctccgcgggccatagaggacctcgcagcgtacaagcagttgacccgaaatacgttaccccggaagtcacctggcacgcgtgggacatcaagagaggtctctttggcaaagcaggtattaaaagaatgcaacaagaatcagatgctctttacattcctccaggagcagtcaaaaggcctcgcagagacaccaacgcccaagatccagaagagcaaaacgaaagctccgctttcagagtccagcagcgactcccctgggtccactccagccaagaaacgcaaagctcgcaagaagagatgcaaacggaggggacgctacaggaacaactcctcctccagctccgagagcagcgagtactccgcttccagctccaacagctcgccagccaagtcctcaaagtccaagccgggcaaagcctacaccccctattatcttcccaagcgtaaacaaagcctttatgtttgagcccaagggtcctaaacccatacagggctaccacgattggctagaagagtacacctgctgcaaatactggaacagaccccccagaaagctacacaccgacacacccttctacccctgggcaccaaaacccccagaccaaataagggtctcttttaaactcaacttccaataaagtttcaaggccgtgggagtttcacttgtcggtgtctgcttcttaaggttaccaagcactccgagcgcagcgaggagtgcgaccctgggggtgggtgcaacgccctcggaggccgcgcgctacgccttcggctgcgcgcggcacctcggacccccgctcgtgctg

SEQ ID NO: 2419 - protein, 738 aa, Alphatorquevirus sp.
MAYGWWGRRRRWRRWRTRRRPWRTRRRRRRRAPRRFRPRRRVRRRRGRWRRRYRKWRRRRGRRTHRKKIIIKQWQPNFIRRCYIIGYLPLIFCGENTTAQNFATHSDDMIAKGPWGGGMTTTKFTLRILYDEFTRFMNFWTVSNEDLDLCRYVGCKLIFFKHPTVDFIVRINTQPPFLDTNLTAAQIHPGIMMLSKKHILIPSLKTRPSRKHRVIVRVGPPRLFQDKWYPQSDLCDTVLLSIFATACDLQYPFGSPLTDNPCVNFQILGPQYKNHLSISTLKDTHNLNHYNENLFNKIELYNTFQTIAQLKETGMIQKDDENYGWNKVQNTESLSFNGNNATSSKDTWYKGNTYNNKIKELAEKTRERFQKATQSALPQYATLMPTALYEYHSGIYSSIFLAAGRSYFETPGAYSDIIYNPFTDKGTGNIIWIDYLTKEDTIFTKNKSKCEIMDLPLWAAFTGYAEFCAKYTGDSAIQYNARLLVRCAYTDPMLIDHSDPNKGFVPYSFNFGEGKMPGGSSKVPIRMRAKWYVNMFHQQEFMEAIVQSGPFAYRGDIKSAVLSIKYKFHWKWGGNPISKQIVRNPCSNSSSSAGHRGPRSVQAVDPKYVTPEVTWHAWDIKRGLFGKAGIKRMQQESDALYIPPGAVKRPRRDTNAQDPEEQNESSAFRVQQRLPWVHSSQETQSSQEEMQTEGTLQEQLLLQLREQRVLRFQLQQLASQVLKVQAGQSLHPLLSSQA

SEQ ID NO: 2420 - protein, 149 aa, Alphatorquevirus sp.
MFLGKLYRKKRKVLLQTVPDPKKARRLLIMWQPPVHNVPGIERNWYESCFRSHAAVCGCGDFVGHLNNLAATLGRPPRSRHPGGPGTPQIRNLPALPAPQGEPGDRAPWPTDGGAGGAAGEDGGRGADRGEPGDVEDDALLAAFDLVEE

SEQ ID NO: 2421 - protein, 127 aa, Alphatorquevirus sp.
LGPLQPRNAKLARRDANGGDATGTTPPPAPRAASTPLPAPTARQPSPQSPSRAKPTPPIIFPSVNKAFMFEPKGPKPIQGYHDWLEEYTCCKYWNRPPRKLHTDTPFYPWAPKPPDQIRVSFKLNFQ

SEQ ID NO: 2422 - DNA, 2934 bp, Betatorquevirus sp.
agacggaggctgtatcacttcagtgactacagctaggggcaattcgggctagatcagtctggcggaacgggcaagaaacttaaaataaatttattttacagatatgttctcttcatggaagaatcctacatcctcacagagacagaaagaactccaatggattggcatcattaactctacacacgaccaaatttgccactgcgacgacccaacattacacctactttactgcctcaacaaattctctggatttaacaaaccagaattggatataaataatataaaatgcctccttaccggccctactaccaaaactacagaagaaaatacttccgaaaaagaagaaacaggttttatagaaggggagttagagcgacttttcgacgaagacaatggagaagaaaaagaaaatacaagcccaaatacaaggtaaagaaatttaaattttataaaaaaaagaagaaatcaattatactaagacagtttcaaccaactgctattaacaaatgtaaatgcatagggtttaaatgcttactacaaggatctatattaagagctatgaataactttgtacaatatatttactcatttgtacctgaaaagcaaccagggggtggcggatggagtattcaaatactaagtttagactctgtatacgaagactaccaacacttacaatgcatttggactaaaggaaatgcaggcctaccattagtaagatatctaggaacaaaatttacactataccaatcacaagaaacagactacgtattcaaatacgacaactgctggcccatggtagacaccatacacacacacgcagactctgctccatttagaatgctacaaacaaaaaataaagtagtagtacccagcataaacaccaaaaaaaggagaaaaccatataaaaaagtatttgtacgcccaccagcacaaatgacaaacaaatggtactttcaaaaagaaatatgcaaaacaccactcgtaatgtttacaacaactgccgtctcactaacatttccatttgctgatccaaaagctaaaagcaataatgtaacagtactctgtataaacccatacatttttaaaaaccctgactttcaacactacggaactacagggtattcacctaaatccactaatgacggaacgccattatacttatacggcagcaatcaagccaatgttacttatgaaaaattaaaatcaggcaaccaaaaaccgatgataacagcattagtagacacaaaaaaccacacaccaggaacaccactaaataactcacagaaccaaagtatagataaacttgccggaaacccattccatgaggaatggaccagcggagatcaatacatatacttttcactaatgacacccacagaaatgcaagctcttttaacaaaaagtgaagagccatctgatagtaaaaaaaaatccatcacaaacacgggtgaaattatttacacattcagatataacccagacaaagatgatggatccaccaacaaacaatacattgttagcacatcttcaggacgaataatacaaccaccagacaatgaaaaccacatactatcaggctttccatttccatacatgctatggggatggacagactggataaaaaaactaggagaaacaccatcattcgacacaaacaaactagtagtacttgaatcaaaagcctttaacgataccactattccattatttattccaatagacccacaatttgcacacggctttgacccatactcagacatgaatgaaccaaaccacactatctcaccttacaatgccaaaaactggtttcctagatatgaatatcagaaatatacaataaatgaaatatgtttatctggacctgcgtgtcctagaccaccttggaatcactatttacaagccttatgtaaatatactatgtattttaaatggggaggatgtcctaaaaacctacaaaaagcttataatccttgttcacagtcaatatggcccacgcccgataacaagtatggacgatctgaggtgcagaatcctaacatcttcccacaaacagaactatactcatgggactggcaaaaagactatgttacagaagaagctattaaaagaatcaaaagatatacagacattgatccaacaatattctcagttacaggaccaaagtcaaacccgccaccactcaaaaagatcaagaaacaagacgaagaagaagaggaggagaagaaactccagttccagctccacaagctgcgattccagaaagtcatcctccaactccagctccagcagcaattaaaatctataaatcaaaaataaaagtaaacttatttgaacccacaaaaccaaaaaataggagaatgacaccaagagaaaaagaagaagaaaaactagacgcagcaatatggaaaagaccacaaagagactttatactcgatatacctttctaccctggtataccccctaccccactagtaaactttgacttaaaatacaaatatgaataaacaaggccaacattaattcacttagtggtgtccatttatttaagttcaacttatataaacatccaccgcctccctgaaattcgggcgccaaaatttaaaagggggctccgcccccttcaacccccaagggggctccgcccccttacacccccaagggggctccgcccccttacacccccaagggggccacgcccccttcaacccccaagggggctccgccccctaacacccccttataaatattcaacaggaaaaccacctaatttaaattgccgaccacaaaccgtcgtttacttccccttttaacactacttcctcaaattctcattattattcattacattcattagtaaacaccgtaattccggggaggagactattcactatataactaactacacttccgaatggctgagtttatgccgcc

SEQ ID NO: 2423 - protein, 677 aa, Betatorquevirus sp.; identical to SEQ ID NO: 1443

SEQ ID NO: 2424 - protein, 109 aa, Betatorquevirus sp.; identical to SEQ ID NO: 27

SEQ ID NO: 2425 - DNA, 2934 bp, Alphatorquevirus sp.
ctaagcactccgagcgtcagcgaggagtgcgtcaaggggcaattcgggctcgggactggccgggctatgggcaaggctcttagggtcttcattcttaaaatgtttctcggcagagtataccgccaaaagaaaaggaaactgctactgctggctgtgcagactccaccgaagacatcttccatgagtctgtggcgccccccgacgcgacatgtctccgccagggaaagagattgggctgaatcaacgttcagagcccacgctgctttttgtggctgtcctagtcctgttattcatttcactagtgtacttgcacgttttaatcttcaaggaggcccgcagacaccaccggacgagccgggtgagggtgcgccggtgctgagggccctaccggccccgagcccgcgcagacacacccggagcgagaacccaggacctgagccatggcctactggtggcgccgccgccggtggccgtggagacgcagatggaggcgccgcggacgccgcagacgagtaccgagacgaagatatagacgacctcttcgccgctatcgaaagagatacacagtaaggaggcgcaggcggagagggaggcgagggcgaccaagacgcagactgtacagacgcaggtacaccctcagacgaaagagaaagagactaataatcaaacagtggcagcctaacaatatcagaaaatgtagaataacaggcatgctgcccatggtaatttgtgggcacggaatgagtgccaataactatgctattagatctgacgatacagaaagcatgaaattctcttttggaggcggctttagcaccaccacattcaccctaaaagtactatatgaccagcacctaaggggaatgaacaaatggagcacttccaatgacatactagaccttgccaggtacctaggctgtgacttttacttttacagggacaaacacacagactatatagtccaatatgacacagcagctccttttactatagacaaagacagttcccccaactatcacccaggagtactaattaaagctagaaagaaagtcctagttcccagctatgacacgcaccccaagggtcgcgcaaaaataaaaatacatatagaaccccccaaaatgttcgttgacaagtggtatgcacaacatgacctgtgcgacgttgaccttgtgtcatttgtggttagcctggcttcctttcaacatccgttctgccgaccacaaactgacaacccttgtgtaaccttccaagttctgcaaaatttctacaacaagtgcataggtacttccgttaacctttcagacagcacttttgaatctatattcagagactatttatacaaaatgggttccttttatcagcaagtactagtacccagctatatcaaaagaattacacacaaccctgatggttccacaggaggcacactgtcaaccctatcaacctataatgagtgggttacaggtacaggaccaaacaaatttataccaggcaacacatcagtacactacaacttttgcacatacaatcctaaatatgaccacctaaaaactctcagaagctactactattattgggaaacagtacagtcagtagccacctcaagctttaatgcccaacacgtacccatagcatccactatgcccacaaaggactactgggagtatagaataggaatgttttctccaatattcctcagcccatacagaaccagccccatagaaaactggcctatggcctacagagacatctcctacaatcccctaaatgacaaagctgtaggaaacaaactgtggcttcagagtatagtgaaagctgacacacagtttcacacaccctcatgcacttatgtgctagaggacaaaccactatgggctatgtgctttggatatagagactttattaagagtgtaaaagaaaaacaggacccggactttgaaaacattgtttgtataatctgcccctatactatacctcccctatacgatgaaaaaaaccctctcatgggctatgtattctatgacaccaactttggaaatggaaaatggctggacggatcaggactggtaccagtagaaatgcaaagcagatggagaccgtacctagcttttcagacaaaagtaatgactgacattgccatgagcggaccgtttagctaccctgacgaactgaaaaacactactataaatgccaagtacaaattcagattcaaatggggcggtaatatgatttatcagcagaccatcaaaaatccctgcacggacggacaagacccccattcctatagacaccctagagatgtacaagttgcagacccgattaccgtggggcctagatacgccttccaccagtgggactggcgacgtgggtggcttggtgacaaagctctcaaaagaatgctccagaaaccgctcgattttgaattctatccaatcgctccaaagagacctagactgttccccccaacagaagcagaaggagaggaaaagcaagaagaaagctccacttcagaggaagaaagcatccttatctcgcaagaagagacgccgacacaactactcagagtccagctccgaaagcagctccgcgaccagcgagagctacgagtccagctcaagcacctcttccaccaagtcctcaaaacccaagcgggggtccatctcaatcccctattattcatccagcggtaaacaaggtgtatcttttcccagagagagaggcaaagcccgctcctactagtggagactgggccacagagctagaggcctgcaaggcctgggataggcccatgaggcagaacctccaagatacccccttctacccctggatgcctaacaatttcagagtcagcttcagactcggttttaaaccctaaataaaaatttcaaggccgtgcactgttcacttgtcggtgtctacctcttaaggtca

SEQ ID NO: 2426 - protein, 750 aa, Alphatorquevirus sp.
MAYWWRRRRWPWRRRWRRRGRRRRVPRRRYRRPLRRYRKRYTVRRRRRRGRRGRPRRRLYRRRYTLRRKRKRLIIKQWQPNNIRKCRITGMLPMVICGHGMSANNYAIRSDDTESMKFSFGGGFSTTTFTLKVLYDQHLRGMNKWSTSNDILDLARYLGCDFYFYRDKHTDYIVQYDTAAPFTIDKDSSPNYHPGVLIKARKKVLVPSYDTHPKGRAKIKIHIEPPKMFVDKWYAQHDLCDVDLVSFVVSLASFQHPFCRPQTDNPCVTFQVLQNFYNKCIGTSVNLSDSTFESIFRDYLYKMGSFYQQVLVPSYIKRITHNPDGSTGGTLSTLSTYNEWVTGTGPNKFIPGNTSVHYNFCTYNPKYDHLKTLRSYYYYWETVQSVATSSFNAQHVPIASTMPTKDYWEYRIGMFSPIFLSPYRTSPIENWPMAYRDISYNPLNDKAVGNKLWLQSIVKADTQFHTPSCTYVLEDKPLWAMCFGYRDFIKSVKEKQDPDFENIVCIICPYTIPPLYDEKNPLMGYVFYDTNFGNGKWLDGSGLVPVEMQSRWRPYLAFQTKVMTDIAMSGPFSYPDELKNTTINAKYKFRFKWGGNMIYQQTIKNPCTDGQDPHSYRHPRDVQVADPITVGPRYAFHQWDWRRGWLGDKALKRMLQKPLDFEFYPIAPKRPRLFPPTEAEGEEKQEESSTSEEESILISQEETPTQLLRVQLRKQLRDQRELRVQLKHLFHQVLKTQAGVHLNPLLFIQR

SEQ ID NO: 2427 - DNA, 2934 bp, Alphatorquevirus sp.; identical to SEQ ID NO: 2425

SEQ ID NO: 2428 - protein, 750 aa, Alphatorquevirus sp.; identical to SEQ ID NO: 2426

SEQ ID NO: 2429 - DNA, 2934 bp, Alphatorquevirus sp.
gccgcgcgctacgccttcggctgcgcgcgagtcaaggggcaattcgggctcgggactggccgggctatgggcaaggctcttaaaaagccatgtttctcggtaaactttacagaaagaaaaggaaagtgcttctgcagactctgccagactcagagaaggctaggcggcttctgattatgtggcagccccccgtgcacaatgtacccgggatcgagagaaactggtacgagagttgctttcgatcccacgctgctgtttgtggctgtggcgactttgttggtcatcttaatcatctggcagctactctgggtcgccctccgcgttctcggcaccccggaggacccggcactcctcagataagaaacctgccagcgctcccggcaccccagggtgagcccggtgacagagcgccatggcctacggatggtggggccggcggcgccgctggagaagatggaggacacggcgcagaccgtggagaaccaggagacgtagaagacgacgcgctcctcgccgctttcgacctcgtcgaagagtaaggaggcgcagggggcggtggcgcagacggtatagaaaatggaggcgacgcaggggcagacggacgcacagaaaaaagataattataaaacagtggcagccaaactttataagacgctgctacatcataggctacctgcctctcatattctgtggcgagaacaccaccgcccagaactttgccacccactcggacgatatgatagctaaaggaccgtggggggggggcatgactacaacaaagtttactctaagaatcctgtacgacgagtttaccaggtttatgaacttctggactgttagtaacgaagacctagacctgtgcagatacgtaggctgcaaacttatattttttaagcaccccactgtagactttatagtcaggataaacacacagcctcctttcctagacactaacctcaccgcggcacagatccacccgggcatcatgatgctcagcaaaaaacacatactaataccctcgctaaagacgaggcccagcagaaaacacagggtggtcgtcagggtgggcccaccgagactgtttcaagacaagtggtacccccagtcagacctgtgtgacacagttctgctttccgtgtttgcaacggcctgtgacttgcaatatccgtttggctcaccactaactgacaacccttgcgtcaacttccagattctggggcaccagtacaaaaaccaccttagtattagttccacaaatgatgattctaacaaagcacactataacgttaatttatttaacgaaacatcactatacaacacattccaaacaatagcccaacttaaagaaacaggactagttacaaacggtgcaacaacacaaaacatgtggaacgaggtacaaaacacaaaaccactatcacaagacggcaaaaatgcacttgagagcaaagacacatggtacaaaggaaacacatacaataagcagataacaactttggctgaaaaaaccagagccagatttaaagctgcaacacaagcagccctgccaaactacccaacaataatgtctacagacttgtatgaataccactcgggcatatactccagcatattcctggcagcaggcagaagctactttgagacccctggggcctacacagacgttatatacaacccttttacagacaaaggcactggaaacatggtgtggatagactacctaacaaaatcagactccatatacacaaagaacaaaagcaaatgtgggatatttgacctgcctctatgggccaccttcacaggatactcagagttctgttcaaaagtaacaggagacaccgccatacacctaactgccagagtagtagtcagatgcccctacaccgaacccatgcttatagaccactcagaccccaacaatggcttcgtaccatactcctttaactttggagagggcaaaatgcccggaggctcctccaaagtgcctataagaatgagggccaagtggtacgtaaacatgtttcaccagcaagagttcatggaagccatagttgagagcggaccgtttgcttacaagggcgacataaaatcagcggtacttagtgtaaaatacagattccactggaaatggggcggaaaccctatatccaaacaggtcgtccggaatccctgctccacctccagcacctccgcgggccatagaggacctcgcagcgtacaagtcgttgacccgaaatacgttaccccggaagtcacctggcactcgtgggacatcaaacgaggcatctttggcaaagcaggtattaagagaatgcagcaagaatcagatgctctttacattcctacaggaccactcaagaggcctcggagagataccaacgcccaagacccagaagagcaaaacgaaagctcaggtttcagagtccagcagcgactcccctgggtccactccagccaagaaacgcaaagctcgcaagaagagatgcaaacggaggggacggtacaagaacaactcctcctccagctccgagagcagcgagtactccggttccagctccaacagctcgccagccaagtcctcaaagtccaagccggccaaggcctacaccccctattatcttcccaagcataaacaaagcctttatgtttgagcccaagggtcctaaacccatacagggctaccacgattggctagaggagtacacctgctgcaagttctggaacagaccccccagaaagctacacacagatacacccttctacccctgggcaccaaaacccctagaccaagtaagggtctcctttaaactcaacttccaataaaatttcaaggccgtgggagtttcacttgtcggtgtctgcttcttaaagttaccaagcactccgagcgcagcgaggagtgcgaccctgggggtgggtgcaacgccctcggcg

SEQ ID NO: 2430 - protein, 739 aa, Alphatorquevirus sp.
MAYGWWGRRRRWRRWRTRRRPWRTRRRRRRRAPRRFRPRRRVRRRRGRWRRRYRKWRRRRGRRTHRKKIIIKQWQPNFIRRCYIIGYLPLIFCGENTTAQNFATHSDDMIAKGPWGGGMTTTKFTLRILYDEFTRFMNFWTVSNEDLDLCRYVGCKLIFFKHPTVDFIVRINTQPPFLDTNLTAAQIHPGIMMLSKKHILIPSLKTRPSRKHRVVVRVGPPRLFQDKWYPQSDLCDTVLLSVFATACDLQYPFGSPLTDNPCVNFQILGHQYKNHLSISSTNDDSNKAHYNVNLFNETSLYNTFQTIAQLKETGLVTNGATTQNMWNEVQNTKPLSQDGKNALESKDTWYKGNTYNKQITTLAEKTRARFKAATQAALPNYPTIMSTDLYEYHSGIYSSIFLAAGRSYFETPGAYTDVIYNPFTDKGTGNMVWIDYLTKSDSIYTKNKSKCGIFDLPLWATFTGYSEFCSKVTGDTAIHLTARVVVRCPYTEPMLIDHSDPNNGFVPYSFNFGEGKMPGGSSKVPIRMRAKWYVNMFHQQEFMEAIVESGPFAYKGDIKSAVLSVKYRFHWKWGGNPISKQVVRNPCSTSSTSAGHRGPRSVQVVDPKYVTPEVTWHSWDIKRGIFGKAGIKRMQQESDALYIPTGPLKRPRRDTNAQDPEEQNESSGFRVQQRLPWVHSSQETQSSQEEMQTEGTVQEQLLLQLREQRVLRFQLQQLASQVLKVQAGQGLHPLLSSQA

SEQ ID NO: 2431 - protein, 149 aa, Alphatorquevirus sp.
MFLGKLYRKKRKVLLQTLPDSEKARRLLIMWQPPVHNVPGIERNWYESCFRSHAAVCGCGDFVGHLNHLAATLGRPPRSRHPGGPGTPQIRNLPALPAPQGEPGDRAPWPTDGGAGGAAGEDGGHGADRGEPGDVEDDALLAAFDLVEE

SEQ ID NO: 2432 - protein, 127 aa, Alphatorquevirus sp.
LGPLQPRNAKLARRDANGGDGTRTTPPPAPRAASTPVPAPTARQPSPQSPSRPRPTPPIIFPSINKAFMFEPKGPKPIQGYHDWLEEYTCCKFWNRPPRKLHTDTPFYPWAPKPLDQVRVSFKLNFQ

SEQ ID NO: 2433 - DNA, 2934 bp, Betatorquevirus sp.
cgggtgccgaaggtgagtgaaaccaccgtagtcaaggggcaattcgggctagctcagtctggcggaatgggcaagaaacttaaattattttatgttttaggtatgtcatctgtatggaagaaaccaacatactcattgagacaacaagaactacaatggctgaatttagtacacaccgcccatgatcaattttgccactgcgacgacccaactcttcacctgttaattataattaaccgcggatctaaagcaccaaaaccagaagttgatattaaaaatatacaatgcctgcttactggaattaccgcagaaaaagaagatactacccaagaagacgtcgtaacaggtttcgacgatggagagctagaaaaactatttacagaaactatagaagaagaaactggacccgcagacgcaaggtaaaaaaaagacttagaaaaagaaagcttaaaaaaattattgtaaaacaatttcaacctaaaaaaattgttaaatgtaaaattgttggacataaatgcctatttcaaggaagtcctttaagaagcagtaacaactatataatgtactgttatagttttgtacctaagtatttcccagggggaggaggatggtcaatacttgtacatagcctaggtagcctttatgaagactttaaacacttaaaaaattactggacttctagtaatgttgctttacctctagttagatacctaggatgtgaatttacattttatcaatcagactatacagattattgtgttgtatgggataattgctggccactagtagatacacctttaacacacgcagacagctgccctagcagaatattacaaagaaaacataaaacaataataccaagcagatacacacaaaaaagaaaaaaaccatacaaaaaagttagagtaacaccacccactcaaatgatgaaccgttggtactttcaaaaggacatttgcgacacacctttagtaatgctaaccgcaactgccatttccttaacacatccattttgtgaccctaaagctaaaagtaacaatatttcactatgggcactaaatccacacagatatagaaatccaaactttcaaagtccaccaataacaaacggctactcaccatttaaagcagataacatagcagaccatccaaacatctacttatgggcttctcatgaaccaataacccaacaaaaacatctaaaaaacgctataccattggcaaatacaaaagacaataaaataggagtacctctattcgaattaggtaaaaacaacgactttgacagcaataacaaatttgaaaactggggaaacccatttgaacacacacacttaaatagcgacgaaatgtcactatacatatcaaaaacaggacctacagataaagaagtaaaaaactggctaacatatactagcacagatccacaaaatgaacttacattagtagtaggaccaaatttatatgagtgtagatacaatccagaaagagacacaggtgaaggaaacaaagcatacttaataaacaactcttcagccacaaacctagaacccccaagtaacgaaaacttaataattgaaggctttccacttccagttatgctttggggatggacagactttgtaaaaaaactaaaacaaacaatagacattgacaaaaactacatactagtaattgtatcaccattttttcaagaaaaacttccatactatatttttctagatgaagactttaaagatggctttgaaccatttacaagtaacttagaaaacaaccaacacataaaaactgcttacaatcaacaacactggtaccctaaatacctatttcaaacacaatccatagaaaaaatatgtagatgtggcccagcatgtcccagaccaacagacgaaaaatacttacaagcattttacagatacaaattttattttaaatggggaggctgtcctaaacaactagaaaaagtaaatgatccttgttcacagtctaaatggcccactcccgataacttcacaccaagacttgaaattacgagtcctaacgaacacccacaaacacaactctatgattgggactgggaagaagaatatgttaaagaagaagctattagacgaatacaagcttacacagaatctcctaaatcaatactcttccttacagactccaaaaacaacccaaagccactccaaaagacacaagaaaaagaagcaccggacaacgaagaggaaacgaaactactcctccagctccacagactccgaaaccagcgacagctcatccaactccaactccagtcgaaactaacaaccctaaatttatcataaaaaaatcaaagactcaaataaaactatttcccagtcccaaaaagaacagaagaatgactccaaaagaaatggaagacgaaaaattactagcatctatatttaaaagacctaaaagagactttatatatgatactcctacttatccatggcttcctcctacaccccttgcaaactttgacttaaattacaaagaataaaggccaacatacttcaacttgacgtgtctgtttatataagtttaactttaataaacgaactccgcctccccattatgttggcgccaaaagggggcaccgcccccttacacccccaagggggctccgcccccttacacccccaagggggctcgggctccgcccccttacacccccttataaatattcaacaggaaaaccacctaatttaaattgccgaccacaaaccgtcttttacttcccttttttacctacacttccccttttactacttattattcattacattaattagtactctacgtaattccggggaggagactataacatatataactaactacacttccgaatggctgagtttatgccgccagtcgtagactgcaccacttcagtgactgcaggctgagcttggg

SEQ ID NO: 2434 - protein, 679 aa, Betatorquevirus sp.; identical to SEQ ID NO: 1000

SEQ ID NO: 2435 - protein, 118 aa, Betatorquevirus sp.; identical to SEQ ID NO: 1001

SEQ ID NO: 2436 - DNA, 2933 bp, Gammatorquevirus sp.
cgggtgcccgaggtgagtgaaaccaccgaggtcaaggggcaattcgggctagggcagtctagcggaacgggcaagaaacttaaattattttattttacagatgcaaaacatctccagctctgacttttttatgccaacaccatacaaccaagagacgaaaacacaaatatggatgtctcaaattgctgactctcatgataatatctgccattgctgtcatccatttgctcaccttattgcttccatttttcctcctggccacaaagacagggagcttactattaatcaaatactcgcaagggattacacagataaatgcctttctggtggaaaagaagacgccgcccctggtttgggcgctaccggtaccggaggaggtttcaaaccaaaagaagaaaatacagaagaagaaaatttaccagaagaagaaatagaagggctcctcgccgccgccgccgcacaagacgccacaaggtaagaagaaaactcaaaaaaattaaaatacagcagtggcaaccagatagcataagaaaatgcaaaataaagggattaagtactattgtgcttggggcatcaggaaggcaatctagatgctacacaaacacatatggagaatatgttcaaccaaaagccccagcaggaggcggttttggcagtgaacttattactcttaaatggctatacaatgaatacctagctcacaggaatatttggacaacttctaatgaatacaaagacttacttagatacacaggagctacaataaccctttttagacataaatacgtagactttataattacctatgaattacaaccaccttttgacttaaacaaatacacatatgctgaactgcaaccccacaacatgctacttagacgcagaaaaaaaatactactcagccaagaatcaaatccaaaaggcaaacttaaagttaaactaaaaattaaacctcctaaacaaatgataactaaatggttttttgctaaagacttttgtccctttggcttagtaaaaatatcagcttcagcagctaattttaactacccaaatttaccacctggaggacaaagcaacatactaacattatacagcctaaacacttttttttaccacaacagtgactgggcaaaaacacaacaggacggatacaaaaacataacaacacaaaaatatccacttttttttaaatacaaagacaaaacaggcaataaattctataaatatgaaccagacgatacaaacatacttagaaaatacaataataacaaatatttaagaagcattagctatgaagatggcatgtttaatccaaaaattttactagcatttgaagtatgggcaggaggtactcaaactggcactgaagaccctaaaggaagtgaaaagctagccacactaccaatactaccacttagatataatccagaagtggactcaggctttgacaatatagtttatttaacaagcatttttaaaggctcatttgacaaacctacagttacacctgactatattttcacaggtataccactatggatggttttttttggatatgcagacttcttactgcaaaaatccaatgacaaaggcttattaacaacacatatgtttgttgtaaaaagcccagcacttcaccctatctcacaaaacacagaacaaaaataccatccaataattaacttagactttgcatttggcaaactaccatatgatgaatacatatcacaacaaataaaagctaaatggtatcctacagcagaacaacaagacacaattataaatgacatagtaaccacaggaccatatgtgccaaaattttacacaaatcaaccagtaactacatgggaacttgactatagatattccttttattttaagtggggaggcccagaagttacagatccaaaaattgaagacccctgcacaagacctacataccctgtgcccgataagctgttcaaaacagtacaaattaaaaacccagagaaacttgacacaaacaccattttccatgagtgggactacagaaggggcattattacacagtcagctcttaaaagaatgtcagcgcacctcgaaattgatacagacttcgaaaatgatattacagaaacaccaagaaaaagacagaaagtcacaaaagagatcccatgcatcgagaacaagcaaaaagaaatccaaacatgtctccaggaactctgcagcgaaaattccttccaagaaacaccagaggacctacagcagtacatccagcaacagcagcagcaacagcacaagctcaaaagaaacctcatcttactcctcactcacctgaaaaaagaacagagatgcctacagctacaaacaggaatgctagattaactccttttcaaaaaggctttgaaatggacacagaacatgagttagcacaagcatttaaaagaccccctagaatgtttaaagaagacacccccttctatccatggcttcctaaacttgaaccccttgtaaactttcaccttaattttaagttctaggccgacactgttcacttagcggagtctgtttatataagtttgcaccccaaaaaaattgtaaaataaaaaaaaaaaaaaaaaataaaaaattgcaaaaattcggcgctcgcgcgcgctgcgccccccccccccacaccccccgcggggggggggggcagagccccccccgcaccccccctacgtcacaggccacgcccccgacgccatcttgggtgcggcagggcgggggctaaaatggcgggacccaatcattttatactttcactttccaattaaaaactgccacatcacaaacaaggggtggagactttaaaactatataaccaagtgaggtggcgaatggctgagtttaccccgctagacggtgcagggaccggatcgagcgcagcgaggaggtccccggctgcccatggg

SEQ ID NO: 2437 - protein, 682 aa, Gammatorquevirus sp.
MPFWWKRRRRPWFGRYRYRRRFQTKRRKYRRRKFTRRRNRRAPRRRRRTRRHKVRRKLKKIKIQQWQPDSIRKCKIKGLSTIVLGASGRQSRCYTNTYGEYVQPKAPAGGGFGSELITLKWLYNEYLAHRNIWTTSNEYKDLLRYTGATITLFRHKYVDFIITYELQPPFDLNKYTYAELQPHNMLLRRRKKILLSQESNPKGKLKVKLKIKPPKQMITKWFFAKDFCPFGLVKISASAANFNYPNLPPGGQSNILTLYSLNTFFYHNSDWAKTQQDGYKNITTQKYPLFFKYKDKTGNKFYKYEPDDTNILRKYNNNKYLRSISYEDGMFNPKILLAFEVWAGGTQTGTEDPKGSEKLATLPILPLRYNPEVDSGFDNIVYLTSIFKGSFDKPTVTPDYIFTGIPLWMVFFGYADFLLQKSNDKGLLTTHMFVVKSPALHPISQNTEQKYHPIINLDFAFGKLPYDEYISQQIKAKWYPTAEQQDTIINDIVTTGPYVPKFYTNQPVTTWELDYRYSFYFKWGGPEVTDPKIEDPCTRPTYPVPDKLFKTVQIKNPEKLDTNTIFHEWDYRRGIITQSALKRMSAHLEIDTDFENDITETPRKRQKVTKEIPCIENKQKEIQTCLQELCSENSFQETPEDLQQYIQQQQQQQHKLKRNLILLLTHLKKEQRCLQLQTGMLD

SEQ ID NO: 2438 - protein, 125 aa, Gammatorquevirus sp.
MQNISSSDFFMPTPYNQETKTQIWMSQIADSHDNICHCCHPFAHLIASIFPPGHKDRELTINQILARDYTDKCLSGGKEDAAPGLGATGTGGGFKPKEENTEEENLPEEEIEGLLAAAAAQDATR

SEQ ID NO: 2439 - protein, 121 aa, Gammatorquevirus sp.
MHREQAKRNPNMSPGTLQRKFLPRNTRGPTAVHPATAAATAQAQKKPHLTPHSPEKRTEMPTATNRNARLTPFQKGFEMDTEHELAQAFKRPPRMFKEDTPFYPWLPKLEPLVNFHLNFKF

SEQ ID NO: 2440 - DNA, 2933 bp, Betatorquevirus sp.
cgggagccgaaggtgagtgaaaccaccgaagtctaggggcaattcgggctagatcagtctggcggaacgggcaagaaacttaaaatgtctttcttttacagatgagcaaacttttaaaaccaacaaaacttactgaaaaacaacaaattctacaaaatgtaaatctatttgtgtctattcacgacttatcctgtacttgctccaaccccttgaagtgtattattctacaaatttacaaccaagaaaaaggattacaaattaaaccagaagaaattcaacaatggcttactactaccgccgctggagaaataactactggaaaagaagaaactttcgatggcgaagacctagacgcccttttcgcagacgacgctggcacaagcgctgggtaaggaaaaaaaaactctcttatttaaaacttaaagaatggcaaccaaaagtgataagaaaacttgttataaaaggaatgtactgcttatttgaatgtaaccataacctactaacaagaaactatacacaatacatggaatctattccaccagaaggaactccttcaggaggaggattttcactaaataaatttacattagactgtttatacagcgaacacgaaaaggcaagaaatgtatggacaaaaggtaataaaaacttgccacttataagatacacaggatgtgaatttaaaatatacagaccaacaaatacagacgcagttgttaaatttcaaacatgctatccaatgtcagcaacaccattaacatacactagtacacaaccatatataatgatgatgtcttatggaagcaaaaaaataagtagattagaaaacacaaaaaacaaaaaaccatataaaagatttaaatttaaaccaccacaacaaatgacaaacaaatggtttttttcaacagatttagcaaacaaaggactaataatgttagcagccacagcagctaactttgaaaatatatacataagtaaatatgcagaaagcaacacaatatcactcagattcttaaacaccttaatatttgaaaacagacatttcaacaaattacccatatcaggctaccacccaaaagacaacatgtggctatgggcagcagacaatggtgcagaaccacctgaattcaaagacatgatatttttaggtaacacagtagaataccgcctaggaacaccaataaaaacctatgcctccacaggaaaaataggacaagcaatatcaaaaactgaattcacaaaactagaaaattggggcaacccattccatgaaaactacttaaatcataaacaccaactatggtggacaacaagtagcccaaccacacatttatcagcacacaaagaacaatcagtatcagaaaaagtaacaaacttaggatttaacaaacttcaacaagaactatttttttatggcagatacaacccaaatagagacaaaggagaaaacacacaattatattatttaaaaaactatgaagaagaaaaaggttggcaaccaccaccaaacaaaaacttaatactaacaggatttccattatggctactagtatggggtaaccttgattatcaactaaaactagcagaaataaaccacatagacacaaactacattgcatgcataaaaaccgacaaaatagaaccaacaataccaccacaacaagcatacatactacttgacaataactttacacacggagacagtgaatggcatgatgaccacggcagaacagactatgataacatacactggtttccacaagtaaattaccaaaaaagaacacttgaaaacataggaaaatgtggaccagcaactgccaaactaggacaatacaaaaatgcagaactacattgtgaatataaattttattttaaggtgggaggatgtgtaccaccaatggacaaaattacagacccaagcctacaaccaacttatcccataccaactaacatcgctgacccaaattcgttacagagtccaagagaaccaattgaatcattcttatactgctttaatgaaaggagagggcaaattacggaaacagctgcagaacgaatcacaaaagactttaaaccttcaaaaactttgttcacagattcaattacaactggaacagacgtcccagtcctccaaacattccaagaaacacaagactcggaggaggaggaggaaacccaagaagcgacattgttccagcagctccagcagcagcgaatcaaacagcacaatatccgcagacgaatacaacagttattaactcaactacaacaactatcatgaaatgtgttaaacatgtaaaattgtttgaagataaaccaaaaattcgtaggctaaataaatgggaattacaagaagaaaaagaagacgccaaacactggtgtcgccctatgcgtacattttggggggatacacctatttacccatggtgcccacctgaaccttatgtaaattttgaacttaactacccctttaaataaacaaggcctattaattcacttgacgtgtctgcttctttaagtttaaacttaaataaacgtccaccacctcccaaacaataggcgtagcaagggggctccgccccctttaaccccagggggctccgccccctacaacccccaagggggctccgcccccttacaccccctaataaatattcaacaggaaaacaagggggctccgcccccttacaccccctaataaatattcaacaggaaaaccacaaaattagaattgccgaccacaaaccgtcactaacttctgctttttacagcacttccccttttgctacttattattcatatgattaattattaaacagcataattccggggaggagactaaacactatataactaagtacacttccgaatggctgagtttatgccgccagacggagacgggatcacttcagtgactccaggctgatcttggg

SEQ ID NO: 2441 - protein, 666 aa, Betatorquevirus sp.
MAYYYRRWRNNYWKRRNFRWRRPRRPFRRRRWHKRWVRKKKLSYLKLKEWQPKVIRKLVIKGMYCLFECNHNLLTRNYTQYMESIPPEGTPSGGGFSLNKFTLDCLYSEHEKARNVWTKGNKNLPLIRYTGCEFKIYRPTNTDAVVKFQTCYPMSATPLTYTSTQPYIMMMSYGSKKISRLENTKNKKPYKRFKFKPPQQMTNKWFFSTDLANKGLIMLAATAANFENIYISKYAESNTISLRFLNTLIFENRHFNKLPISGYHPKDNMWLWAADNGAEPPEFKDMIFLGNTVEYRLGTPIKTYASTGKIGQAISKTEFTKLENWGNPFHENYLNHKHQLWWTTSSPTTHLSAHKEQSVSEKVTNLGFNKLQQELFFYGRYNPNRDKGENTQLYYLKNYEEEKGWQPPPNKNLILTGFPLWLLVWGNLDYQLKLAEINHIDTNYIACIKTDKIEPTIPPQQAYILLDNNFTHGDSEWHDDHGRTDYDNIHWFPQVNYQKRTLENIGKCGPATAKLGQYKNAELHCEYKFYFKVGGCVPPMDKITDPSLQPTYPIPTNIADPNSLQSPREPIESFLYCFNERRGQITETAAERITKDFKPSKTLFTDSITTGTDVPVLQTFQETQDSEEEEETQEATLFQQLQQQRIKQHNIRRRIQQLLTQLQQLS

SEQ ID NO: 2442 - protein, 96 aa, Betatorquevirus sp.
MSKLLKPTKLTEKQQILQNVNLFVSIHDLSCTCSNPLKCIILQIYNQEKGLQIKPEEIQQWLTTTAAGEITTGKEETFDGEDLDALFADDAGTSAG

SEQ ID NO: 2443 - protein, 66 aa, Betatorquevirus sp.
MKCVKHVKLFEDKPKIRRLNKWELQEEKEDAKHWCRPMRTFWGDTPIYPWCPPEPYVNFELNYPFK

SEQ ID NO: 2444 - DNA, 2932 bp, Betatorquevirus sp.
cgggagccgaaggtgagtgaaaccaccgtagccgaaggtgagtgaaaccaccgtagtctaggggcaattcgggctagatcagtctggcggaacgggcaagtaacttaaatttttattttacagaatgactactcgcataataccaacaaaagatagcattaaacaaaagaatctcaaatggatgaatctcctagtacacagccatgacatcttctgcgattgccccaacccacttcaacacacaattattttaatctgccaacaagaacctgaaattgatttaaaaccaattgaaaaggatataattaaaagatgccttattggagaaactacggataccgctggaaccgccgccgacgatggcgtagaagaaggcgttttggacgcccttttcaaagaagactttggagacgaagacaccgcagggtaagaaagagaaagcttaaatgtcttagactaaaacagtggcaaccacaatttataaaaagactaaaaattattggaactgagccactctttataacaacttcagaaagactaacaaatgaatttacttcttacaaagacagtattgcgcctcatcttgtacctgggggagggggcttttcaataatgaactttactttaaacgcattgtataaaaaacatttagtactagaaaactggtggactacaagcaatgaaaatatgccactaattagattaactggtattacactgtacttttacagacaagcagaatttgactacctagcacaatacataagacaatatccaatgactgcatcacacctaaaatacactagcacacacccacaagtaatgctattacataaaaatacattaaaaattacatgcaaacgaaacaacaaaaacaaaaaaccatacaaaaaaattaaaattaaaccacctacacaaatgcaaaaccgttggtactttcaaaaagatctagcagacataccgctattacaactaataaccactgcaacatcgttagaccgcatgtttcttagctcaacatcagttagctcaactataggtttcacaagtctagattacttaggattttataaccacaattacacaaaagacggaacacaaggatatgtagcaaaaccaggccaactactttttggagtactacaaggctcttataatataaaatcaataaaagcttctcaattaatatatatgggaaacgctatggacttaacagaaggcacacaagcaggatcaataaaagcacaacaatacaatcaatactcacaatattcaaacaccatacaaaaacaactaaaatacatacaactacaccaagacacttggggaaatccatttaatgaccaatttcacagaactggtggcttaataactactagtttacaatgggaacaaataatacaaaaattcacagacggcaacatgaacttaacagatgactttacatggaaaacaacatttacatttccagtaagatataacccatttgcagacaaaggaacaggaaacaaactatatttaatcaaatggaaagatcctgcacacgaaacagactgggacataccagcagcaacaacactttatgaaaacatgcctttatggttaatgctatggggatacttagacttttatagaaaatcaggagaactatcatcaatagatacaacacacttactagtaataaaaacaacatacactcaaccaaaggaaaaacaattacttatacctttagacgacgactttttagaaggtagaagcccttatatgggacaacaagaaacaacagcaagtgacagacaaaactggcacccaaaagtaagatttcaaataagaacagttaacaccataggttcttgtggacctgcaaccattaaacttccacctgaacaatcagcagaagctcatgtaaaatatgtattttattttaagattggaggaacaccaccaccaatggccacactcacagaacctgataaacaacctaaatataccactcccgataacatcctctcgtcaacttcgttgcagagtccaacatctccctttgaatacatgctctacaactttgacgaaagacgaggccaaattacaaaaagagctgcacaaagaatctctaaataccaagaaactgaacaaactgttctcccatttacagaatcagctctatccagttatacaacaccccaaaaagaagcatcgacaccagaaacatcggacgaggaaaaagaagaaatgtcgctccaggaacagctccagctccagcgaaagcagcaaaaactcctccgaaacagaatcaacaaactcctccagcgactagcactattagaatagaaaaatgtaaaattcaagttcaattgtttccaccagatgtaaccccaaatcgtagaatgactaagtgggaatatgaacaagaattagaggatgctaaatggtggtgtagagtccctagaacatttataaaagataaacctacatatccatgggtgccacaagacacaccatactgtgtaaactttgatttaaatgcgccgcaataaatatacaaggcctgcaaactttcaatctcggtgtccatttatataagtataaacttaaataaacatccaccacactcccaaatacgcaggcgcagaagggggctccgcccccttacccccaagggggggcctaacgcccccccttacaccccccctaattagcatattcaacaggaaaaccacataattagaattgccgaccacaaactgtcaccaacttccccatattcccttacttcctctttaattaataaatattcattaaattaattagtaatactcgtaaatccggggaggagtcaacaatctatataaccaagtacactgacgaatggctgagtttacaccgccagacggagacggcatcacaacagtgactgcaggctgatcttggg

SEQ ID NO: 2445 - protein, 672 aa, Betatorquevirus sp.
MPYWRNYGYRWNRRRRWRRRRRFGRPFQRRLWRRRHRRVRKRKLKCLRLKQWQPQFIKRLKIIGTEPLFITTSERLTNEFTSYKDSIAPHLVPGGGGFSIMNFTLNALYKKHLVLENWWTTSNENMPLIRLTGITLYFYRQAEFDYLAQYIRQYPMTASHLKYTSTHPQVMLLHKNTLKITCKRNNKNKKPYKKIKIKPPTQMQNRWYFQKDLADIPLLQLITTATSLDRMFLSSTSVSSTIGFTSLDYLGFYNHNYTKDGTQGYVAKPGQLLFGVLQGSYNIKSIKASQLIYMGNAMDLTEGTQAGSIKAQQYNQYSQYSNTIQKQLKYIQLHQDTWGNPFNDQFHRTGGLITTSLQWEQIIQKFTDGNMNLTDDFTWKTTFTFPVRYNPFADKGTGNKLYLIKWKDPAHETDWDIPAATTLYENMPLWLMLWGYLDFYRKSGELSSIDTTHLLVIKTTYTQPKEKQLLIPLDDDFLEGRSPYMGQQETTASDRQNWHPKVRFQIRTVNTIGSCGPATIKLPPEQSAEAHVKYVFYFKIGGTPPPMATLTEPDKQPKYTTPDNILSSTSLQSPTSPFEYMLYNFDERRGQITKRAAQRISKYQETEQTVLPFTESALSSYTTPQKEASTPETSDEEKEEMSLQEQLQLQRKQQKLLRNRINKLLQRLALLE

SEQ ID NO: 2446 - protein, 101 aa, Betatorquevirus sp.
MTTRIIPTKDSIKQKNLKWMNLLVHSHDIFCDCPNPLQHTIILICQQEPEIDLKPIEKDIIKRCLIGETTDTAGTAADDGVEEGVLDALFKEDFGDEDTAG

SEQ ID NO: 2447 - protein, 60 aa, Betatorquevirus sp.
LFPPDVTPNRRMTKWEYEQELEDAKWWCRVPRTFIKDKPTYPWVPQDTPYCVNFDLNAPQ

SEQ ID NO: 2448 - DNA, 2932 bp, Gammatorquevirus sp.
cgggagcccgaggtgagtgaaaccaccgaggtctaggggcaattcgggctagggcagtctagcggaacgggcaagaaacttaaaatatatgtttattttacagatgtcacagatacaagccaaagacttttataatcccacacccttcaatcaagaaacgaaaaatcaaatttggatgtctcaaattgctgatgctcacgacaatatctgctattgtaaccatccctttgctcatttgcttgccaatatctttcctgtgggtcacaaagatcgtgatctcacaattaatcaaatacttctgagagactacaaacaaaaatgcctttctggtggggccgaagaagaaaatactggtggggacgccgccggtaccgcaggaggtttcaaaggtataaaagaagaaaaccaagatacagatctaccaggagacgaaatagaagagctccttaccgccgcagaaaaagaaaacgattcaaggtaagaagaaaacttaaaaaaattatattaaagcaatggcagccagaatcaatagttaaatgtaaaattaaaggcttttctacacttgtattgggagctgaaggcagacaatatctgtgttggactaatgaagcagatgaatacatacagcctaaagcccctgggggaggacaatttggctgtgaagccataacattagaatggctatatgaacaatatagagcgcatacaaacatttggactaagggaaacaaaaacaaagacttatgcagatatacaggatgccaaataacattatttaggcaccctgaaatagactttttatttgcatacagtatacaaccaccttttgatataaataaatttacttatacagatatacatcccataaacatgctactaagaccacatgtcaaagttatacttagtaaagcatctaaaccaaattctaaaaactttgttaaagttaaaattaaaccacccaaacaaatgagcaccaaatggttttttcaaaaagaattttgtgacaaagttctagttgttttacaagcaacagcctgcacattcagataccctagaattagcccactttcacaaagtcaaatggttagcatatactatttaaacacagacttttttccataccctaactgggcaaaaactttagaacaaccatgggcaccctatccaactaaaagaccaacagattaccagttttattctacacctaactggactggaaacccttatacatttaaattcagcggtggaggtcaagaacaatactatcaaagcatacaccatgacactggttggtttaattcaaaagttttacaagcagcttcagttaaagtatcaaaccaacagtatgggtctattcctattaatgtagccagatacaaccccaacatggatacaggcataggcaactctgtatatgtagtctctgttttatctaattcctataagccaccacttgcagactacaattataaaatatcaggtatgcctatttggatggccctatttgggttctggagctatctaaaatacaccacaaaagacaaaggcttcatggaacattacatgttcattatagaatctcctgccattcacccaattagccaaacaagcaaacaaactattttcccatttgtagacttacaatttatacaaggaaaactaccctttgatgaatacctttcagaaaatattaaaaagttttggtatcccaaagccacaatgcaaacagtaactataaatgcacttgtagaatcaggcccttttatacaaagactaagcaacataacaaacagcacctgggaactaccatttaaatataaattttattttaaatggggtggcccacaggttcatgaccaaccagttgatgacccaaaataccagcaagaatatcctactcccagtgctctccaagaggcaatacaggtatccaaccccaaaaaattgtcaacagaaactttactccatgactgggactacagacgaggattcattacacaagcagctcttaaaagaatgtcagaacacctcgaaactgatacagatttccaatctgatgactcaggtacaccaagaaaaagaaggaaaatatccaaagagctcccatgcctcgagaagaaagaagaaaagattcacaaatgtctccaggaactcttcaaagaaagtaccttccaagaaacaccacagacaatcgaagagctcatccagcagcagcagcagcaccaaaacaagctcaagcacaacatcctccacctcctaacacacctaaaacaacagcaacgctttttgagccttcagacaggagtattagactagaaagatttaaaccaggctttgaagaagacacagaacgtgaactaagcaaaatattcaaaagaccacccagaacatacaaaaatgatcccccattttacccatggttacctattgctccaaaagttgtatttaacctaaactttaaaggctaggccaacaatgtacacttagtaaagcatgtttaataaagtttgcaccccaaaaaaattgtaaaataaaaaaaaaaaaaaaaaaataaaaaattgcaaaaattcggcgctcgcgcgcgctgcggccatatgctaattagttccccttttacacagtaaaaaggggaagtgggggggcatagcccccccacaccccccgcgggggggggcagagccccccccgctccccccctacgtcactaaccacgcccccgccgccatcttgcgtgcggcagggcgggggctgaaatggcgggaaccaatcattttatactttcactttccaattaaaacatgccacatcacaacaaaagggaggagttaactaaactatataactaagtagggtggcgaatggctgagtttaccccgctagacggtgcagggaccgatcgagcgcagcgaggaggtccacagctgcccatggg

SEQ ID NO: 2449 - protein, 665 aa, Gammatorquevirus sp.
MPFWWGRRRKYWWGRRRYRRRFQRYKRRKPRYRSTRRRNRRAPYRRRKRKRFKVRRKLKKIILKQWQPESIVKCKIKGFSTLVLGAEGRQYLCWTNEADEYIQPKAPGGGQFGCEAITLEWLYEQYRAHTNIWTKGNKNKDLCRYTGCQITLFRHPEIDFLFAYSIQPPFDINKFTYTDIHPINMLLRPHVKVILSKASKPNSKNFVKVKIKPPKQMSTKWFFQKEFCDKVLVVLQATACTFRYPRISPLSQSQMVSIYYLNTDFFPYPNWAKTLEQPWAPYPTKRPTDYQFYSTPNWTGNPYTFKFSGGGQEQYYQSIHHDTGWFNSKVLQAASVKVSNQQYGSIPINVARYNPNMDTGIGNSVYVVSVLSNSYKPPLADYNYKISGMPIWMALFGFWSYLKYTTKDKGFMEHYMFIIESPAIHPISQTSKQTIFPFVDLQFIQGKLPFDEYLSENIKKFWYPKATMQTVTINALVESGPFIQRLSNITNSTWELPFKYKFYFKWGGPQVHDQPVDDPKYQQEYPTPSALQEAIQVSNPKKLSTETLLHDWDYRRGFITQAALKRMSEHLETDTDFQSDDSGTPRKRRKISKELPCLEKKEEKIHKCLQELFKESTFQETPQTIEELIQQQQQHQNKLKHNILHLLTHLKQQQRFLSLQTGVLD

SEQ ID NO: 2450 - protein, 130 aa, Gammatorquevirus sp.
MFILQMSQIQAKDFYNPTPFNQETKNQIWMSQIADAHDNICYCNHPFAHLLANIFPVGHKDRDLTINQILLRDYKQKCLSGGAEEENTGGDAAGTAGGFKGIKEENQDTDLPGDEIEELLTAAEKENDSR

SEQ ID NO: 2451 - protein, 120 aa, Gammatorquevirus sp.
MPREERRKDSQMSPGTLQRKYLPRNTTDNRRAHPAAAAAPKQAQAQHPPPPNTPKTTATLFEPSDRSIRLERFKPGFEEDTERELSKIFKRPPRTYKNDPPFYPWLPIAPKVVFNLNFKG

SEQ ID NO: 2452 - DNA, 2932 bp, Alphatorquevirus sp.
ctcaacttcttcggagccgcgcgctacgcagtcaaggggcaattcgggctcgggactggccgggctatgggcaaggctcttaaaaaagcatgtttctcggtaaaatttacagaaagaaaaggaaagtgctactgtacggcctgccagctccaaagaagaaactacctactgctatgagccactggagcacacccgtccaccatgcaacggggatcgagcacctctggtaccagtctgttattaacagccattctgctagctgcggttgtggcgatcctgtacgccactttacttatcttgctgagaggtatggctttgccccaactccccgcgccccgccagtagccccgacgcccaccatccgtagagccaggcccgcgcctgccgctccggagccccgtgccctaccatggcatggggatggtggagaagaaaacgcaagtggtggtggagacgccggtttgcccgagggagacttcgcagacgacggattagacgccctcgtcgccgcactcgacgaagaacagtaaggaggcgcagacaatggaggagggggcgacccagacgcagactgtttaagcgaaagagacgctttaggagacgcagacgaaaagctaagataaaaataacacagtggcagcccagtagaacaaagagatgctttattataggctactttccagcacttatatgtggtcagggaagatggtcagagaactttaccagccacatagaagacaaaacccctaagggaccctttggaggggggcacagcacagccaggctatctttaaaagtactatacgaagaaaaccagaagcatcacaacttctggacagccagtaacaaagagctagagctagccaggttttttggcagtacctggacactgtacagacacgaagaagtagactacatatgcacctttaacagaaaaagccccctgggaggcaacctgctaacagcacccagtctgcacccgggggccgccatgctatctaaacataaaatactaatacccagttttaagaccagaccgggcggaaaacccactgtaaaattcaggataaaaccccccacaacactaatagacaaatggtactttcaaaaagatatttgtgacactacactgctcaacatcaactttgttgcatgtgacttgcggtttccgttctgctcaccacaaactgacaacgtttgtgtaacatttcaagtcctttccgcggtttataacgacttcctctctataaccaacagcaagttacaagcaacaaattgggaaaacgaatacacaaattttttaaacaaagcatttccatcagacagaagcattaataaattaaacacatttacaacagaaggagcctttagtcaccctaaaatagaaaaatataaaccacaaattccactacctgatggaaagtactttcaagataaagatggccaatggggagacccaatacacattacagataagcaaagtagacaagaaattataaagaaaatagttgaaaatgcaaaaaactacctaaaaaaatacacagaagagtttaaacaatttccaaacattgcccagttccaccacggattttttacacagtggacaggcatatacagtgctgcttttttaaactaccacagaatatctccagaagtaccaggcctatacacagataccatctacaacccacttgtagacaaaggcataggaaaccacatatggatagactacctcagcaaaccagaccctaacttagatccagtaaaaagtaaatgccacatagcagacctgccaatgtggatggcaacctttggcctagtagactggtgcaaaaaagacacaggcaactggggcatacccgcgtgggccagagtactaatgatatgtccctatacgtttccacctatgtatgaccaaaacaacccaaacagaggatttataccgataggttacaacttctcacaaggactaatgccagacggcagcaaatacattccaatgcaaatgagagctaagtggtaccccaacctgttaaaccaacaagcagtacttgaagacataagtgagtcaggaccctttgcatttagagaaaaaaaacctagcgccagcataacagtaaaatacaaatttagatggcactttgggggcaaccctgtgtccgaacaggttattgcagacccatgccaacaaccaacctttgaaatgcccggagccggttcgctgcctcgcagactacaagtcacggacccgaaactcctcgggccacactacacattccacagctgggactggagacgtgactactttaacagaaagactcttaaaagaatgtcagaacaacaagaaacttctgagtttttattcccaggcccaaaaaaacccagagtggatctcggggtcgtccaagctgtcgaaaaagtctcttccccgaggaaaagagaacagaaaccgtgggaagacagcgagcagcaatcagagacagaagccctctcggaagaagaagaagagggctcgatacagcagcagctccagcagcagctgcatcagcaaaagcagctcaggagaggaatcaactgcctcttcgagcagctagtaaaaacccagcagggagtccacctagatccttccctcttgtaggccccaggcagtggctgtttccagagagaaagccggcccctgcccctagctcgggagactgggccacagagtatttagcagccagagtgtttgacagacccccgagaagcaacctgaaggatacaccctactatccctacattaaaaaccaatacaatgtgtactttgacctaacctttgaataaagtgcagctttcaacttgcaaggccgtgggagtttcactggtcggtgtctacctctaaaggtcactaagcactccgagcgtcagcgaggagtgcgacccttccccctga

SEQ ID NO: 2453 - protein, 742 aa, Alphatorquevirus sp.
MAWGWWRRKRKWWWRRRFARGRLRRRRIRRPRRRTRRRTVRRRRQWRRGRPRRRLFKRKRRFRRRRRKAKIKITQWQPSRTKRCFIIGYFPALICGQGRWSENFTSHIEDKTPKGPFGGGHSTARLSLKVLYEENQKHHNFWTASNKELELARFFGSTWTLYRHEEVDYICTFNRKSPLGGNLLTAPSLHPGAAMLSKHKILIPSFKTRPGGKPTVKFRIKPPTTLIDKWYFQKDICDTTLLNINFVACDLRFPFCSPQTDNVCVTFQVLSAVYNDFLSITNSKLQATNWENEYTNFLNKAFPSDRSINKLNTFTTEGAFSHPKIEKYKPQIPLPDGKYFQDKDGQWGDPIHITDKQSRQEIIKKIVENAKNYLKKYTEEFKQFPNIAQFHHGFFTQWTGIYSAAFLNYHRISPEVPGLYTDTIYNPLVDKGIGNHIWIDYLSKPDPNLDPVKSKCHIADLPMWMATFGLVDWCKKDTGNWGIPAWARVLMICPYTFPPMYDQNNPNRGFIPIGYNFSQGLMPDGSKYIPMQMRAKWYPNLLNQQAVLEDISESGPFAFREKKPSASITVKYKFRWHFGGNPVSEQVIADPCQQPTFEMPGAGSLPRRLQVTDPKLLGPHYTFHSWDWRRDYFNRKTLKRMSEQQETSEFLFPGPKKPRVDLGVVQAVEKVSSPRKREQKPWEDSEQQSETEALSEEEEEGSIQQQLQQQLHQQKQLRRGINCLFEQLVKTQQGVHLDPSLL

SEQ ID NO: 2454 - protein, 146 aa, Alphatorquevirus sp.; identical to SEQ ID NO: 65

SEQ ID NO: 2455 - protein, 82 aa, Alphatorquevirus sp.; identical to SEQ ID NO: 66

SEQ ID NO: 2456 - DNA, 2932 bp, Betatorquevirus sp.
cgggtgccgaaggtgagtgaaaccaccggagtcaaggggcaattcgggctaggtcagtctggcggaacgggcaagaaacttaaattatattattttttacagatatgtccacccgctttatacctgctaaattaacactgagacaaactaaactaacatggatgaatatgctagctcatatccatgatgaaaaatgcaactgcccacaccctatggaacatacctgcatgctgatctttgaagaagaaaaagaattaaaattcaacacacctgaaattgatttaattaaaaaatgcctttctggagatacaactaccgccgcccatggagaccctacagacgacgttattggagaaggagatctcgccgctttcttcgcagaagattttggagaccaagaaaatacggggtaagaaaaagaaaagctaagactataaaactaaaagaatatcaacctcactttataagaactcttaaaattaatggaacttacccactttttatgacaacaagcaaaagactatcaaataatatgtgctgttacttagaaagtatcgcgccgcacgattggccgggtgggggaggctttagcatactaaacttttccttacatactttgtacaaagaaaatttaattgctagaaactactggactaccagtaatcaaaatatgcctttaattagatttttaggatgttatataactttgtattcacaacctgaagtagactacctattttattatcataatgcttatccaatgcaagcaggaaaacttacatacatgagcacacatccacaaataatgatacaaacaaaacatgttaaagtaataagatgtagaagattttccaaaagaaaaaaaccatataaaaaattctttataaaacctccatctcaaatgcaaaaccgttggtactttcaacatgacattgccacaatacctcttctgcaagtacttacaacagtatgctcgttagaccgcacatttctacatgccaacgctcaatccagtacaataggtttcacaagtatagataccacagaacttcaaaaccacgattttataaaccaaggcacacaaggctacttacctattcatgaccaacatttatttggagtatacacagcaccaactaaacatgaaatagctgaaataaaaataggagacttagtttacttaggaactgctgactataaccaagaaggtacacccataaaatccataccaaatggaaatttccaacaaaaactgcaaaaagccatgcaacaatcaggttttatgggaaacccattctataaacaatggctacacaaagacaattggatagtaaaaactacaaaaacataccaacaattagtaacaaattatagtagcgatagcgacaaactaaaaacagcagacttttctttcaaaaacccattaacaatggaatgcagatataatccatttgcagataaaggaaaagacaataaaatttacttattaaaagtaacaggaggaccacactcagatgacttaagtccaccaacagagcctgaattaatatggtctgatttacctttatggttactaacttggggatacttagactttcaaaaaaaatgtggcacacacagtcaaatagatacaaattccatggtagttatagtaagcccatacataacaccacaaaaaaacaaaatatacataccaatagaccaatactttatatcaggaaatagtccatgggaatccgaccacttagaaccctcagactatagtaaatggcaccccaaagttagataccaagtagatacaataaatacaattgcaagtacaggaccttttactgtaaaactacaagatagaatctcttgtgaagctcatatgaaatacaaatttttatttaaggttggaggagaaccagcaccaatgtctgttacaattgaccccacagaacaacctaaatatgctattcccagtaacatcctacaaccaaattcgttacagagtccaacaacaccaattgaaaactacttgtggagatttgatgaaagacgaggactacttacaaaaaaagctattgaaagaatcaaagcagaccacgaaactgaaacaaatgtttttacaattacagacccaagcacagcagtaccaatcccacgccaaaaagaaatacagacatcagaatcggagacatcggaagaagaggaaacatcgctcgagacgaaactcctccacgagcgaagaaagcaaagactcctcagaaagcgaatcaacctcctcctcaacaaattagcaaatttagaatagagtcttgtaaaataaaagtaaacctttttggtgacgaccccccaaaaaataggagaatgactccttgggaaagagctgaagaaataaaagacgcagctctatggggtagagtacctagaagctttatatttgataaacatttctatccagactgcccacaagttcccaaatactgtgtaaattttgacttaaacgcgccgcaataaactaggcctgcaaactttcactctcggtgtccatttatataagttaaacttaaataaacatccaccacactccctaatacgccggcgtagaaagggggctccgccccctttaacccctagggggggcaagcccccccttcaccccccctaattaatattcataaaggaaaccacaaaattagaattgccgaccacaaacagccatatgcatattcataaaggaaaccacaaaattagaattgccgaccacaaacagccatatgcaaattaacttctgcaaatacacaaccacttccctaaaaattaattattaatccccgtcacaatgggaggagccacacatctatataactaaatacacttccgaatggctgagtttatgctgccagacggagacaggagcagtttactgatcctggctgaccaaggg

SEQ ID NO: 2457 - protein, 667 aa, Betatorquevirus sp.
MPFWRYNYRRPWRPYRRRYWRRRSRRFLRRRFWRPRKYGVRKRKAKTIKLKEYQPHFIRTLKINGTYPLFMTTSKRLSNNMCCYLESIAPHDWPGGGGFSILNFSLHTLYKENLIARNYWTTSNQNMPLIRFLGCYITLYSQPEVDYLFYYHNAYPMQAGKLTYMSTHPQIMIQTKHVKVIRCRRFSKRKKPYKKFFIKPPSQMQNRWYFQHDIATIPLLQVLTTVCSLDRTFLHANAQSSTIGFTSIDTTELQNHDFINQGTQGYLPIHDQHLFGVYTAPTKHEIAEIKIGDLVYLGTADYNQEGTPIKSIPNGNFQQKLQKAMQQSGFMGNPFYKQWLHKDNWIVKTTKTYQQLVTNYSSDSDKLKTADFSFKNPLTMECRYNPFADKGKDNKIYLLKVTGGPHSDDLSPPTEPELIWSDLPLWLLTWGYLDFQKKCGTHSQIDTNSMVVIVSPYITPQKNKIYIPIDQYFISGNSPWESDHLEPSDYSKWHPKVRYQVDTINTIASTGPFTVKLQDRISCEAHMKYKFLFKVGGEPAPMSVTIDPTEQPKYAIPSNILQPNSLQSPTTPIENYLWRFDERRGLLTKKAIERIKADHETETNVFTITDPSTAVPIPRQKEIQTSESETSEEEETSLETKLLHERRKQRLLRKRINLLLNKLANLE

SEQ ID NO: 2458 - protein, 102 aa, Betatorquevirus sp.
MSTRFIPAKLTLRQTKLTWMNMLAHIHDEKCNCPHPMEHTCMLIFEEEKELKFNTPEIDLIKKCLSGDTTTAAHGDPTDDVIGEGDLAAFFAEDFGDQENTG

SEQ ID NO: 2459 - DNA, 2931 bp, Betatorquevirus sp.
cgggtgccgaaggtgagtgaaaccaccgaagtcaaggggcaattcgggctagatcagtctggcggaacgggcaagaaacttaaaacaaatttatattttacaggtatgacatctatttggaagaaacctttatacagtccgaaacaacaagaattaaaatggcttaaccttatgtgggaaagccatgatcaaatgtgcagctgccaagatccacctcttcacttgatgattttaattaacaaagattctaacgcaccaaaaccagaagcagatattcgaaacctaaaatgcctccttaccggtatggatactactaccaaagaagatatagaaaacgaagaccctatcttttgcgaaggagaactagaaagactcttcgcagaagatggagaagaaaaagatacaaaagaagacgaaaggtaaactttaaattttttaaaaagtttaataagaaattaaagactattaaagtaaaacaatggcaaccaaagcaaattattaaatgtaaaattaaaggaactaaatgcctaatacaaggctctccattacggagctcaaacaactttatacaatatgtatactcttatatacctgaatttcaacccgggggaggaggatggactttaatcatacacagtttagaaactctttatgaagactaccaacatttacaaaatatatggaccacaagcaacgcaggaatgccattagccagatatataggctgtaaaatgcgattttatcaaagcccagaaacagactacgttgttacatacgacaactgctggccaatggtagacacacctttaagccatgcagacgcagcaccaggatttatgttacaaaagaaaaacaaaataattattccctcaacattaaacaaaaaaaaaagaaaaccatacaaacaagtctggattagaccaccagcgcaaatgtataaccattggtacttcactaaagatatatgcaaaacaccattagtactcataactgctacaacttgcagcttaaacaatccttttgctaaaccagaagcacaaagcaataatatctcactaaaatgcttaaatgtaagactttttcaaaatacaaactttcaacacccaccagaaacaacatactactctccaaaaacaacagacacattacctacaaaaaacatttacttatactcaagtcacttagattacaacgaagcaaaagttaccaacttacatccactaggaaatacaaaagaaatgaaaataggagctccttacaccaatatacaaacagaagcagacataaaactctcaaacctaggaaacccatttgaaaaaagtaactttatatcagacgaaatgtacctatactactcaacaaaaaattttacagaaatgtataagctaaaaggttgcaatgacacattaaacaaaataccagatattttacctgtagagtctaaaacagtaataacagtaagatacaacccagacaaagataccggaaaagacaacaaagtatacttagtaaaaaattttgagaaccaaggttggaaagaaccaacagacgaaaacctaattattgaaggctttccattatactatgcattatggggatggctagactggcaaaaaaaactaaaaaaagcagttagaatttttaatgactacactttagtaatacaaacaaaaatgttcgatgttgaattaccatactacgtactattagatcaagattttatagacgggtatgaaccttatggagatttacatcaaccacctatacaaccatcatactacagcacacaaaattggtttccaaaaacaacattccaagaacaatcaattcaaaaaatttgtgacaccggtccatttacacctaaaacaccttggaaccactacttacaaattagatatcaatattgtttttactttaaatggggaggatgtccaaaagagttaaaaaaagcatatgacccttgcttacagccaaaatggcccactcccgataacatctcaccagcaactgaaatctcgaatccttcaacctctccatcaactatcctctactcatgggattggaaagaagactacattaaaaagaaagctattaaacgaattgcagaccacacaccaattaatgaaaatatactctccattacagaatcaaactacaacccaaaacccctacaaaagaaaagaaaaacagaaacatcggagagcgaagaagagaaggaagaggaggagctcctccagcagctcctcaagctcaagaagcaacgaaagcacctccaacagctcctccaattaacaggtataaaataaaagactgcaaattcaaagtagaactttttcctactacaaaaccatttaaaaacagaaaatttactcctgaggaatgggaagacgaaaaattcttagcatcatggatgaaaagaccccaaagacactttttctatgaccctcctacctatccctggttaccaccagaacccctagtaaactttgatgtaaactttaaagaataaaggccaacaaaattcacttgatggagtccgtttctttaatataaacttaataaacatccaccacactcccaaaattgttggcgccaaagggggctccgcccccttacacccccaagggggctccgcccccttacacccccaagggggctccgcccccttacgggctccgcccccttacaccccctaattaatattcaacaggaaaaccacctaatttaaattgccgaccacaaactgtcactaacttccctttttaccaacacttccctttttactacttattattcatgacattaattattaaacaccgtaattcctgggaggagtcaataaactatataaccaactacacttccgaatggctgagtttatgccgccagacggagactgaatcactctagtgacttcaggctgatcttggg

SEQ ID NO: 2460 - protein, 672 aa, Betatorquevirus sp.; identical to SEQ ID NO: 1875

SEQ ID NO: 2461 - protein, 105 aa, Betatorquevirus sp.; identical to SEQ ID NO: 1876

SEQ ID NO: 2462 - DNA, 2931 bp, Betatorquevirus sp.
cgggagccgaaggtgagtgaaaccaccgtagtctaggggcaattcgggctagttcagtctggcggaacgggcaagaaacttaaaatattttattttacagatgtcagactacttcaaacatattacaatctcacaaagacataaggatttaaattggaccaacgctattgttcatcttcatgacatccaatgtatgtgcaatgaaccactagcacatacaattgacaccattttcaaacaagaaccgaacctacctttacatcaatcaacaaaagacaaaattaaacaatgccttactactggagaagaccatactaccaaagacgtcgtagaagaatttggagacgacgatttagagcgcctcttcgcagacgacgatacagaagaagataccgggtaagatttaaaagaaaattacctaaaattcatataactgaatggcaaccttctaagattaacaaagtaaaagtaattggactatacccattatttgaaggaactaatgaaagaataggtaataataatactcaatatatagactctactgcaccttatcaatatcctgcaggaggactctttgctataactgtatttactttaagaggactatgggaactgcatacaaaagctagaaactggtggacaaaatcaaactgtaatttaccgcttgtaaaatacttaggatgtactataactttgtatagatctctaactgcagactatgtaatggtatattctagatgtgggtcactaacagccactgaagaactatatagatcatgccaaccttccatactcacacttaacaaaaacaaaagaataatacaatgcaaacaacacaacaacaaacgcaggaacgcaaaaaaaatattcataaaacctccagcacttatgaaaaaccaatggtacatgcaaaaagacatagcaaactttccattactaatgatactatcttcagcactaagcctagacagatggtatataggagcaaacgcagtatctagcacagtaggatttttctccataaacacagatgtatttgaatactcagcatttaaaccaccggcaagcacaacaccatacaaaccaaacgacaaatattggctatttacaacaggacacactacaagcacatggcaaaatgccacagtagcaaacttaatatttttaggacaaacaaaagactttacaccaggaacaacagtaggaaacgcagtaaatgcatactggtctacaccatcaaagtggggaaatcccttttattctccttactttgatgacactagccacaccatactaatacattcaaacctagaagcagtaaaagcaatgcaacccacagacaaactacaagaaaaaaacttcacagaaataacaaaacctctaatacaccactgtagatataacccacaagcagacaaatctctccacaacgcagtatacgtaagcaacataacaacacaaggaaacaaatggggagggtcttcagatcctaaacaatcagcagacggtttacccctatggttactgttttttggatttcatgattggttaaaaaaaagcaatgctgtacaaagactagatacagactatgcatttgtatttatatcagaatatgtaacccctcaactacattggtatgtacctatagactataactttactataggcagaagtccatatgaaaccacagaccacagaaaaccatatgatgaaacatcatggcatccaaaatctaactttcaacagtcagctattgcatccatactaaacactggacctggaactataaaattaccagacaaaataagcacagagggacattttaaatacaaatttcactttaaatttggaggatgccctccaccaatggacaatgtttgtgatccacagaaccaaccaaactttcccacgcccggtaacatcctatcaccaactatattgcaggatccagaacaaccagtcgaatactatctgcaagcctttgatcaaaggaggcaactcattacagaaaaagctgcgaaacgcctcaaaaaataccactctactaaagaaactattttcacacctacaggaacaactgccatggacatccaatacctccccgaggaagaaacatcgacggacagctcatcggaggaggaaaaagacaaagagacattacagctcaagctccagcgacaccgcctccgacaaagaaaactcagggacaacatcagacagctcctgaaaatgttaaaataaaaattgtaaagagcaaaataaacattaaactgttcccagaaactgataacaaacctaaaaggttcacaccacaagaatatgagactgaacttgaaatatgtaagtggcttaaaagaccacctagatactttaaaacagataccccattttacccatgggttgtttaaaagaccacctagatactttaaaacagataccccattttacccatgggttgtacctgaacccaaagtgaactttatgttaaactacaaagaataaaggccagcattgattcactctcggtgtccgtttattaaagtataaacttatataaacagcctccgcctcccaaatacgcaggcgcacttgggggctccgcccccaaaccccaagggggctccgcccccttaaacccccaggggggacacccccctataccccccgaaagccacaaaatttgcattgccgaccacaaacgaacaggaaaaccacaaaatttgcattgccgaccacaaaccgtcaataagttcccctttctgtaacgacttccctttctgctaattattattcataacattaattaataatcaccgtaattccggggaggagccaaaagactataaaactaactacactgacgaatggctgagtttacgccgccagacggagacgggatcacttcagtgactccaggctgaacttggg

SEQ ID NO: 2463 - protein, 651 aa, Betatorquevirus sp.
MPYYWRRPYYQRRRRRIWRRRFRAPLRRRRYRRRYRVRFKRKLPKIHITEWQPSKINKVKVIGLYPLFEGTNERIGNNNTQYIDSTAPYQYPAGGLFAITVFTLRGLWELHTKARNWWTKSNCNLPLVKYLGCTITLYRSLTADYVMVYSRCGSLTATEELYRSCQPSILTLNKNKRIIQCKQHNNKRRNAKKIFIKPPALMKNQWYMQKDIANFPLLMILSSALSLDRWYIGANAVSSTVGFFSINTDVFEYSAFKPPASTTPYKPNDKYWLFTTGHTTSTWQNATVANLIFLGQTKDFTPGTTVGNAVNAYWSTPSKWGNPFYSPYFDDTSHTILIHSNLEAVKAMQPTDKLQEKNFTEITKPLIHHCRYNPQADKSLHNAVYVSNITTQGNKWGGSSDPKQSADGLPLWLLFFGFHDWLKKSNAVQRLDTDYAFVFISEYVTPQLHWYVPIDYNFTIGRSPYETTDHRKPYDETSWHPKSNFQQSAIASILNTGPGTIKLPDKISTEGHFKYKFHFKFGGCPPPMDNVCDPQNQPNFPTPGNILSPTILQDPEQPVEYYLQAFDQRRQLITEKAAKRLKKYHSTKETIFTPTGTTAMDIQYLPEEETSTDSSSEEEKDKETLQLKLQRHRLRQRKLRDNIRQLLKMLK

SEQ ID NO: 2464 - protein, 113 aa, Betatorquevirus sp.
LAERARNLKYFILQMSDYFKHITISQRHKDLNWTNAIVHLHDIQCMCNEPLAHTIDTIFKQEPNLPLHQSTKDKIKQCLTTGEDHTTKDVVEEFGDDDLERLFADDDTEEDTG

SEQ ID NO: 2465 - DNA, 2931 bp, Betatorquevirus sp.
cgggagccgaaggtgagtgcaaccaccgtagtctaggggcaattcgggctagttcagtctggcgaaggtgagtgcaaccaccgtagtctaggggcaattcgggctagttcagtctggcggaacgggcaagaaacttaaatattattattttacagatgcaaatacaaccacctattagaaccttcaaacaaacaatttcagattggaaaaacttaattgttcacgttcacgacaacatttgcaactgcaataaaccattagaacacaccattgatacctgtaccagcaatccggatgaattaagattaaacaaatctactaaacaacaactacaaaaatgccttggtaccccagaagaagatacccaagaagacgttatcgatggcttcgcagatggagagctagacgcccttttcgcccaagatacagaagaagatactgggtaagaaactattctcgaaagagaaaactatttaaaataaccaccaaagaatggcaaccaaaagttataagaaagactcatgtaaaaggcacctatcctttgtttctttgtacaaagcacagaattaacaataatatgatacaatatttagactctatagctccagagcactattatggaggaggaggattttcaataatgcaattttccttacaagctttatatgaagaatttataaaagcaaaaaactggtggactaatacaaactgctttttaccacttataagatatatgggttgctcatttaaattttataaaactgaattttatgattatattgtactaattgaaagatgttatccacttgcttgtactgatgaaatgtacttatctactcaacctagtattatgatgcttacaagaaaatgtatttttgtaccatgcaaacaaaacagcaaaggtaaaaaaccttacaaaaaagttagagtaagaccaccttcacaaatgaatacaggatggcatttttcacaagacttagcaaacatgccactagtagtactaaaaacttcagtatgcagctttgaccgatattacacagacagtacagctaaatcaaccacaataggctttaaaacacttaacacacaaacatttagatatcatgactggcaagaaccacctacaacaggatacaaaccacaaaaccaactatggttttatggggcagaaaacggatcaccaatagaccccaacaacacagttgtatcaaacctaatatacttaggaggcacaggaccttatgaaaaaggaacaccaataaaaacaaacataaacacatactttacagagcctaaactgtggggaaatatatttcacgatgattacacatcaggaacagcacccgtctttgttacaaacaaaacaccaacagaaattaaaaacatgtggaatactataaaagaccaaactgttaaacaaagcaatgtatttacagtaaggacaattccactatggctaccttgcagatacaacccatttgcagacaaagcaaccaacaacaaaatatggctagtttcaatacattcagaccacacagaatggaaaccaatagacaatccactactacaacgaacagaccttcccttatggttacttgtatggggttggcaagattggcaaaaaaaaaaccaacaaacttcacagcctgatattaattatttaacagtaatatcttcaccatacatatcatgctacccaaaattagattactatgtgttactggatgaatcattttgggaaggtcactcaacatacatagaatccattacagactcagacaaaaaacactggtaccctaaaaatagatttcaaatagaaacacttaatctaatagctaacacaggtccaggaactgtaaaacttagagaaaaccaagcagcagaaggtcatatggtatatcgctttaattttaagcttggaggatgtcccgcaccgatggaaaaaatatgtgaccctagcaaacaatccaaatatcctattcccaataaccagcaacaaacaacttcgttgcagagtccagaaaacccaattcaaacctatctctacaacttcgacgaaaggaggggcctacttacagaaagagctgcaaaaagaatcaaacaagattacacatctgaaaaaactgttttgccatttacaggagcagcaacagacctccccatactccaaacaacatcacaggaggaaagctcctcggaagaagaagaagagcaacaagcggagaagaaactactccagctccgaagaaagcagcaccgactccgggagcgaatcctccagctattagacatacaaaatacataataaaacaaagttctgtaaaaattgatatgtttggagatactcatgtaccaaatcgtagaatgaccccagaagaatttgaacaagaactaattattgctggtatttttcgcagacctccttgttactatataaaagatagacctacttatccttatgtaccaaaacctactgatgaaaaatgtatggtaaactttgacttaaactttccttaataaactaggcctgcaaactttcactctcggtgtccatttatataagataaaacttaaataaacatccaccactctcccaaatacgcaggcgcacaagggggctccgcccccttaaacccccaagggggctccgcccccttaaacccccaagggggctccgcccccttacaccccctaataaatattcaacaggaaaaccacctaattagaattgccgaccacaaaccgtcacttacttctccttttttcacttacttcctcttttacttattattattcataacattaattaataaacactgtaattccggggaggagctaacaatctatataactaactacacttccgaatggctgagtttatgccgccagacggagacgggatcacttcagtgactccaggctgaacttggg

SEQ ID NO: 2466 - protein, 655 aa, Betatorquevirus sp.
MPWYPRRRYPRRRYRWLRRWRARRPFRPRYRRRYWVRNYSRKRKLFKITTKEWQPKVIRKTHVKGTYPLFLCTKHRINNNMIQYLDSIAPEHYYGGGGFSIMQFSLQALYEEFIKAKNWWTNTNCFLPLIRYMGCSFKFYKTEFYDYIVLIERCYPLACTDEMYLSTQPSIMMLTRKCIFVPCKQNSKGKKPYKKVRVRPPSQMNTGWHFSQDLANMPLVVLKTSVCSFDRYYTDSTAKSTTIGFKTLNTQTFRYHDWQEPPTTGYKPQNQLWFYGAENGSPIDPNNTVVSNLIYLGGTGPYEKGTPIKTNINTYFTEPKLWGNIFHDDYTSGTAPVFVTNKTPTEIKNMWNTIKDQTVKQSNVFTVRTIPLWLPCRYNPFADKATNNKIWLVSIHSDHTEWKPIDNPLLQRTDLPLWLLVWGWQDWQKKNQQTSQPDINYLTVISSPYISCYPKLDYYVLLDESFWEGHSTYIESITDSDKKHWYPKNRFQIETLNLIANTGPGTVKLRENQAAEGHMVYRFNFKLGGCPAPMEKICDPSKQSKYPIPNNQQQTTSLQSPENPIQTYLYNFDERRGLLTERAAKRIKQDYTSEKTVLPFTGAATDLPILQTTSQEESSSEEEEEQQAEKKLLQLRRKQHRLRERILQLLDIQNT

SEQ ID NO: 2467 - protein, 110 aa, Betatorquevirus sp.
LAERARNLNIIILQMQIQPPIRTFKQTISDWKNLIVHVHDNICNCNKPLEHTIDTCTSNPDELRLNKSTKQQLQKCLGTPEEDTQEDVIDGFADGELDALFAQDTEEDTG

SEQ ID NO: 2468 - protein, 61 aa, Betatorquevirus sp.
MFGDTHVPNRRMTPEEFEQELIIAGIFRRPPCYYIKDRPTYPYVPKPTDEKCMVNFDLNFP

SEQ ID NO: 2469 - DNA, 2930 bp, Betatorquevirus sp.
cgggtgctgaaggtgagtgaaaccaccgaaatcaaggggcaattcgggctagctcagtctggtggaacgggcaagacacttaaaatacattctttttacagatgagcaaacttctaaatccaaccaaactaactgaaaaacaacaaattctacaaaatgtgaacctgtttgtttccattcacgatttatcctgcaaatgcaacaacccactgaagtgcattattctacaaatctataaccaagaaaaaggattaaaatttaaaacagaagaaatacaacaatggcttactactaccgaagatggagaaacaactactggaaaagacgacgatatccttggagaagacttagacgcccttttcgcagacgacgctggcacaagcgctgggtaagaaaaagaaaactttcttaccttaaactaaaacaatggcaacctaaagtaataagaaaaatgtgtgtaaaaggaatgtactgtttatttcaagcaaaccataatttacttactagaaattatactcaatatatggactccataccgccagaaggcataccaagcggaggaggcttttcattaaatagatttactttagactgtttatttaatgaacatgaaaaagcaagaaatgtatggactaaaggaaacaaaaacttacctttaattagatacacaggatgtgaatttaaaatatacagacctaaaaacacagatgctgttgtaaaattccaaaattgctatcctatgacagccacacaactaacctacacttcaactcaaccatacattatgatgatgtctaaaggatcttctaaaataagcagactagacaacacttttaagaaaaaaccatacaaaaaatttaaatttccacctccacaagaaatgacaaacaaatggtttttttccgcagacttagctaacaaaggcttaatacttatagcagcaacagcagcaaactttgaaaacatgtatataagtccctattcagaaagcgacacaatatcagttagatttttaaacactttactttttaaaaacagacattttaataaacttccaacacacggatatcatccaaaagacaacttttggctatgggcatcagtaaatggttccactccaccaaaactaacagaaatggttttcttaggtaacacagtaacttatcaagaaggaaaagagataggcaaaatacaagcaacaggaaaaatatcaatgttactacctaaattcacaaacatagcagactggggaaacccatttcatgaaaaatacatggacaaaaaagtacaaatatactacacaacatcagcacccgctatacacttaaatgcacatggtgacaaagatgtaacaacagcaataaccaatttaggatttacaaccttagatcaagaatttttcttttatggtagatataaccccaacagagacaaaggtgaaaatacctcaatttactttttaaaaaactatcaagaagagtcaggctgggacccaccacaaaacaaaaacctaatactaacaggctttccattatggctaatagtatggggatttttagactaccatttaaaattagcagaaatcccacatatagacgaagactacataatatgtgttaaatcaacagctatagaaccacaaataccacgacaagaagcatttatatttttagacaaagaattcacacacggtagcagtgaatggcatgatgaagagggcagaacaggatgggacaacaaccactggtttcctatgtcacattaccaacacagaactatagaaaacataggaaaatcgggaccagcagtagcaaaactcggaaaatttattaatgctgaactacattgtgaatataaattttattttaaggtgggaggatgtgtaccaccaatggacaaaattacaaacccaagcttacaaccaacttatcccataccaactaacatcgctgacccaaattcgttacagagtccaagagaaccaattgaatcattcttatactgctttgatgaaaggagagggcaaattacggaaacagctgcagaacgaatcacaaaagactttaaaccttcaaaaactttgttcacagattcaattacaactggaacagacgtcccagtcctccaaacattcaaagaaacacaagactcggaggaggaggaggaaaccaaagaagcgacattgttccagcagctccagcagcagcgaatcaaacagcacaacatccgcagacgaatacaacagttattaactcaactacaacaactatcatgaaatgtgtaaaatatgttaaactgtttgaggacaaaccaaaaatacgtagactaaatacctgggaattacaagaggaaaaggaagacgccaaacactggtgtcgtcctatgcgtactttttggggggacaaacctacatatccctggtgcccacctgaaccttatgtcaactttgaacttaactatccctttaaataaacaaggcctattaattcacttgacgtgtctgcttctttaagtttaaacttaaacaaacatccatcacctccctaccaataggcgtagcaagggggctccgcccccttaaacccctagggggctccgccccctaaaacccccaagggggctccgcccccttacacccccttattaatattcaacaggaaaaccacctaattagaattgccgaccacaaaccgtcacttacttcccttttttattaaacttcctttttttataatgaatattcattaaattaattagtaatcaccgtaattccggggaggagcaaaaaaactataaaagtaactacacagacgaatggctgagtttatgccgccagacggagacggtaaaggcaacttcaccggctgagcttgggcgggtgctgaaggtgagtgaaaccaccgaaatcaaggggcaattcgggctagggg

SEQ ID NO: 2470 - protein, 664 aa, Betatorquevirus sp.
MAYYYRRWRNNYWKRRRYPWRRLRRPFRRRRWHKRWVRKRKLSYLKLKQWQPKVIRKMCVKGMYCLFQANHNLLTRNYTQYMDSIPPEGIPSGGGFSLNRFTLDCLFNEHEKARNVWTKGNKNLPLIRYTGCEFKIYRPKNTDAVVKFQNCYPMTATQLTYTSTQPYIMMMSKGSSKISRLDNTFKKKPYKKFKFPPPQEMTNKWFFSADLANKGLILIAATAANFENMYISPYSESDTISVRFLNTLLFKNRHFNKLPTHGYHPKDNFWLWASVNGSTPPKLTEMVFLGNTVTYQEGKEIGKIQATGKISMLLPKFTNIADWGNPFHEKYMDKKVQIYYTTSAPAIHLNAHGDKDVTTAITNLGFTTLDQEFFFYGRYNPNRDKGENTSIYFLKNYQEESGWDPPQNKNLILTGFPLWLIVWGFLDYHLKLAEIPHIDEDYIICVKSTAIEPQIPRQEAFIFLDKEFTHGSSEWHDEEGRTGWDNNHWFPMSHYQHRTIENIGKSGPAVAKLGKFINAELHCEYKFYFKVGGCVPPMDKITNPSLQPTYPIPTNIADPNSLQSPREPIESFLYCFDERRGQITETAAERITKDFKPSKTLFTDSITTGTDVPVLQTFKETQDSEEEEETKEATLFQQLQQQRIKQHNIRRRIQQLLTQLQQLS

SEQ ID NO: 2471 - protein, 96 aa, Betatorquevirus sp.
MSKLLNPTKLTEKQQILQNVNLFVSIHDLSCKCNNPLKCIILQIYNQEKGLKFKTEEIQQWLTTTEDGETTTGKDDDILGEDLDALFADDAGTSAG

SEQ ID NO: 2472 - protein, 66 aa, Betatorquevirus sp.
MKCVKYVKLFEDKPKIRRLNTWELQEEKEDAKHWCRPMRTFWGDKPTYPWCPPEPYVNFELNYPFK

SEQ ID NO: 2473 - DNA, 2930 bp, Betatorquevirus sp.
cgggtgccgaaggtgagtgaaaccaccgtagtcaaggggcttaatgggcagaatcagtcttggcggaacgggcaactaacttaaatatatttgttttagaatgactacaagatacaaaccagcaaaatgctcacccagacaaacaactttaaaatggatgaatatgatctgcgccgttcatgacaacttctgcgaatgcccacatccagtagaacacacttctatacttcttttccaacaagaacctgaacaaaagttttcaccaatagaaaaagatataattaaaaaatgccttggtggagaagttaccgctacagaaaatacagaccaagatggagacgttcttggagacggagatttagacgcccttttcgctacagattttggagacccagaagacaaagggtaagaaaaagaaaacttaaaactttaaaacttaaagtatggcaaccgcactatataagacgctgtaaaatcataggattttatccaatggctttagcaacaacagaaagaacttctaataatttgaacttatacttagaaactgccgcttctcactatttacctggaggaggttcatttagtattgacaattttagcttagaatctctatataaagaacatatgatattaagaaatgtatggacttctagtaatgacaatttaccacttgtaagatacatgggatgcacaatgtacctatatagaaatgcaaccgctgactggttattcttttacaataatcaatatcctatgaaagcagatttaacaatgtatcaaagctgtcaaccttatataatgttactaaacaacaaaactattgttataccatgtaaacaatataatagaaacaaaaaaaactatgtaaaaataagaataagaccaccaacattaatgcaaaacaactggtattttcaaagaaaattttcagatattcctatattacaaactatgtctacactatgctcgttagaccgcatgtacacatcagccaccgctatttcaacaacaataggtttctacactttagacatactatactggcaaaaccaccaatttacacaacaaccgacatcaggctacttcccaaaacaagatgctataatatttggcttagaaaacggagacatagatatatctaacgaaaaattagagaatttaatatttttaggaaacacagacgactacacactaggaacacctgctaaacacgtaccagaagacaccaaaagccctcaattaactaacactttacaaaaaaaattatctaaaatgagacaagataaacaatactggggaaatccatttataacagactattttaatggacacagaaccatgctcactactaacatgaattggaataccttaatacaatatgcaaaagacaataccacatgtggaaacaaatttcaaaaactatcaagtccatactttgaagttagatacaatccttacaaagacaaaggaataggcaacaaaatatacatgctaccaatatacacatcagaaaatcaatacaactggacatctacaatagcagacaaagaatctatagcacaagacttacccctttgggtattatttcatggatacctagatttccacagaaaatgggcacaaatacaatcaatagacacaaaacatatagtagtaatatacagcacttatatgcaaccaacagacaaacattactttgtacctttagactgggactttataaatggaacatcaccatacagaccagaacacgaaagaacaccatcagatacacacttttggcacccaaaaacatcattccaactacaatcaataaataatattgtacaatcaggaccagcaaccataaaactccctaaagatatatcagcagaatgtaagataaaatataaattttcttttaagttcggaggatcaccagcacccatggccaccattaaagacccagatgatcaaccacaatttattacacccagtaacatcttacaaacaacttcgttacagaatccaacacaaccactccaatactatctcagcagcttcgatgaaagacgaggaatgcttactaaaaaagctgcaaaaagaatcagtgaatacaaagaaactgaaacaagtgttattccaattacagaaacaagctgcagcccatggggaccaccctaccaagaaacacagacaccggacacatcggacacggaagaagaggaaacaccacaagaggcaatcaagcgactcagaaaagagcagcacctcctccgacaccgaatcaacaagctcctcaaccaactagctcaataaaaatacataaatgtacatttaatgtaaagctatttgatgatgatcccccaaaaaatcgtagaatgaccgcatgggaatttaaagaagaattagaggacgctgccttttggcatagagcgcctagaatgtttattaaagatagacctacatatccctgggtaccccaagacactccattcactgtaaactttgatcttaatgcgccgaaataaaaattcaaggcctgcaaacattccttctcggtgtccatttatataagttcaacttaaataaacatccaccactcccccaaatacgcaggcgcactagggggctccgccccctaaaacccccagggggggtaaaccccccctaaaacccccccccctaataaatattcataaaggccctaaaaccccccctaataaatattcataaaggaaaccacaaaattagaattgccgaccacaaacagacatatgcaaattacttccccaaattttcacttaacttccctaaaaattaattaataatcagagtcacagtgggcggagacaacacactatatattcaactacacttccgaatggctgagtttatgccgccagacgaagagagcatcacaacagtgactgcgcgctgattctggg

SEQ ID NO: 2474 - protein, 670 aa, Betatorquevirus sp.
MPWWRSYRYRKYRPRWRRSWRRRFRRPFRYRFWRPRRQRVRKRKLKTLKLKVWQPHYIRRCKIIGFYPMALATTERTSNNLNLYLETAASHYLPGGGSFSIDNFSLESLYKEHMILRNVWTSSNDNLPLVRYMGCTMYLYRNATADWLFFYNNQYPMKADLTMYQSCQPYIMLLNNKTIVIPCKQYNRNKKNYVKIRIRPPTLMQNNWYFQRKFSDIPILQTMSTLCSLDRMYTSATAISTTIGFYTLDILYWQNHQFTQQPTSGYFPKQDAIIFGLENGDIDISNEKLENLIFLGNTDDYTLGTPAKHVPEDTKSPQLTNTLQKKLSKMRQDKQYWGNPFITDYFNGHRTMLTTNMNWNTLIQYAKDNTTCGNKFQKLSSPYFEVRYNPYKDKGIGNKIYMLPIYTSENQYNWTSTIADKESIAQDLPLWVLFHGYLDFHRKWAQIQSIDTKHIVVIYSTYMQPTDKHYFVPLDWDFINGTSPYRPEHERTPSDTHFWHPKTSFQLQSINNIVQSGPATIKLPKDISAECKIKYKFSFKFGGSPAPMATIKDPDDQPQFITPSNILQTTSLQNPTQPLQYYLSSFDERRGMLTKKAAKRISEYKETETSVIPITETSCSPWGPPYQETQTPDTSDTEEEETPQEAIKRLRKEQHLLRHRINKLLNQLAQ

SEQ ID NO: 2475 - protein, 102 aa, Betatorquevirus sp.
MTTRYKPAKCSPRQTTLKWMNMICAVHDNFCECPHPVEHTSILLFQQEPEQKFSPIEKDIIKKCLGGEVTATENTDQDGDVLGDGDLDALFATDFGDPEDKG

SEQ ID NO: 2476 - protein, 123 aa, Betatorquevirus sp.
LQPMGTTLPRNTDTGHIGHGRRGNTTRGNQATQKRAAPPPTPNQQAPQPTSSIKIHKCTFNVKLFDDDPPKNRRMTAWEFKEELEDAAFWHRAPRMFIKDRPTYPWVPQDTPFTVNFDLNAPK

SEQ ID NO: 2477 - DNA, 2929 bp, Betatorquevirus sp.
cgggagccgaaggtgagtgaaaccaccgtagtctaggggcaatttagtctaggggcaattcgggctagatcagtctggcggaacgggcaagaaacttaatatatatttctttacagatgagcaaactctttaatccagcaaaactaacagaaaaaagaacaattctacaaaatgtaaacgcctttgtagccatccacgatcttacctgcgactgcgagaaaccacttaaatgcatcatacaacaaatctacactcaagaaccaacacttcattttgaaccaaaggaattacaaaaatggcttactactaccgtaaccgcaggcgcccatggtggagaagaagaaaaagattttactggagaagaaatcgacgcccttttcgaaaatatcgaagaagacgcctcagggtaagaaaaaaacttaaattcttacctttaaaacaatggcaaccaagccacataagaaaactaactgtcaaaggcatgtactgtttatttgagtgtaaccacaaacttttaacacataattacactcaataccatgaatctatctcacctgaaggaatacctctaggaggaggcttttcattaaacagattcactttaaactgcttattcaatgaacacttaaaagctagaaatatatggacaacatcaaacaaaaactttcctttaataagatacaccggctgcgaattcaaaatctacaggccaaaactagtggatgcagtcataaacttccaaaactgctttccaatggaggcctcagaactaacatatcacagcacacaaccatacattgctatgatgacaaaaggaagcaaaaaaattagaagactagatgatacaaaaaataaaaaaccatacaaaaaattcaaattccctcctccacaacaaatgacaaatagatggtttttttctgcagacatcagcaacacaggtctaattatgcttgcatcctctgccgctagctttcctaacatatatatatctccatacgcagaaacaaacaacataacactaaaattattaaactgtataatattccaaaatagacactttaaccaattaacaacttcagggtatcatcctaaagacggaatgtggctatatgccacagcaaacggagaagacgaccctgaaataggagatataatatttttaggcaattgtattcaatacaacagaggcacaccactcatagacctaccaggtatagacaaagacaaaagaaaaacattaagagacgcaatgaaaatatacactaactcaaaatactggggtaatccatttcacgaagaccatttaaatcaaaaaacaagatactactttacacaaaacagtccacaaataactttcggaacaggcacacatgcaacaaaaacattagctacaaaaatatcagaactacccctcacacgactacatcaagaattctacttcacaggaagatacaacccaaatagagacagagcagaagataatttaatatatttcttaaaaacaacagcagaagccacaggatgggatcctgatccagaaaaagacacattactaacaccccacctaccactatgggcaggagtatggggcctactagactaccatgaaaaactaaaagatatgcaacacatggacacagactacataacagttatacaaacaaaatcaattgaaccacaagacataaacctaaaatactatgtaatattagaccctcaattcacacatggagacagtgaatggcatgacgggcacgacagaactgaatgggacaacatacactggcaccccatgctacactaccaacacagatctatagaaactctaggccaatcaggacccgcaacagcaaaactaggcccttacaaaacagaagaattacattgtgaatataaatttcactttaaggttgggggatgcgcaccaccaatggattctatcacagatccatcagaacaaactacttacccagtaccaactaacatcattgaccaacattcgttacagagtccagaacaaccaattgaaacctacctatactcatttgacgaaagacaccaacaaattacaaaaacagctgcacaaagaatccttaaagactttaaacctacaacacctttgttcacagatccaacaacaactggaacacaagtcccactcctcaaaaaaatcgagacacaagagacggacagcgagacggaaaccgaagaaacgacattactcgagcaactcatccagcagcgaaaacagcaactccgaatccagcagcgaatcaagcaattaatcaaacaattaacaactacaacataacatgcgtacataaagttcacttatttccacctaaaccaaaacaaagaagattcaccccctgggaaagacaacaagaagcagaagacgccagaatttggggcagaccacaaagatatttcttttatgataaacccttttatccagagtgtggaccagaacccctagtaaactttgaccttggttggagacataaataaagaaataaagggctaggccccataaattcacagctcggtgtctgtttctttaaatgtgaacttatttaaaccaactccgcctccctaatttcaggcgccaaaagggggctccgcccccttacacccccaagggggctccgccccctttaacccccaagggggctacgcccccttacaccccctaataaatattcaacagaaaaaccacctaattagaattgccgaccacaaaccgtcactaacttccccaatttccaacaacttccttttttactcattattattcattacattaattaataatcaccgtaattccggggagtgacctattatctatataaccaactatacttccgaatggctgagtttatgccgccagacggaggacggatcactttactgactccggactgatcttggg

SEQ ID NO: 2478 - protein, 671 aa, Betatorquevirus sp.
MAYYYRNRRRPWWRRRKRFYWRRNRRPFRKYRRRRLRVRKKLKFLPLKQWQPSHIRKLTVKGMYCLFECNHKLLTHNYTQYHESISPEGIPLGGGFSLNRFTLNCLFNEHLKARNIWTTSNKNFPLIRYTGCEFKIYRPKLVDAVINFQNCFPMEASELTYHSTQPYIAMMTKGSKKIRRLDDTKNKKPYKKFKFPPPQQMTNRWFFSADISNTGLIMLASSAASFPNIYISPYAETNNITLKLLNCIIFQNRHFNQLTTSGYHPKDGMWLYATANGEDDPEIGDIIFLGNCIQYNRGTPLIDLPGIDKDKRKTLRDAMKIYTNSKYWGNPFHEDHLNQKTRYYFTQNSPQITFGTGTHATKTLATKISELPLTRLHQEFYFTGRYNPNRDRAEDNLIYFLKTTAEATGWDPDPEKDTLLTPHLPLWAGVWGLLDYHEKLKDMQHMDTDYITVIQTKSIEPQDINLKYYVILDPQFTHGDSEWHDGHDRTEWDNIHWHPMLHYQHRSIETLGQSGPATAKLGPYKTEELHCEYKFHFKVGGCAPPMDSITDPSEQTTYPVPTNIIDQHSLQSPEQPIETYLYSFDERHQQITKTAAQRILKDFKPTTPLFTDPTTTGTQVPLLKKIETQETDSETETEETTLLEQLIQQRKQQLRIQQRIKQLIKQLTTTT

SEQ ID NO: 2479 - protein, 111 aa, Betatorquevirus sp.
LAERARNLIYISLQMSKLFNPAKLTEKRTILQNVNAFVAIHDLTCDCEKPLKCIIQQIYTQEPTLHFEPKELQKWLTTTVTAGAHGGEEEKDFTGEEIDALFENIEEDASG

SEQ ID NO: 2480 - DNA, 2928 bp, Alphatorquevirus sp.
cgggtgccggaggtgagtttacacaccgcagtcaaggggcaattcgggcacgggactggccgggctatgggcaaggctcttaaaaaagctacccccaaaactatgttttttggcaggccataccgccacaagaaaaggaaactgctactgctttctgtgccgcctacacagaaagcaccttccatgagccagtggagaagacccgctcacgatgctgcgggcatcgagaggcagtggtacgaaagcgtttggcgtagccatgctgcttgctgtggttgtggcgattttattagtcatattaacaatttggcgactcgtcttggacgtcctggtgctccacaacccccggtacctcccagagcaccccaagtgagacccctcccggcattgccggcgcctgaaacatggcctggagaggacacaggcgctggcgccggtggaggaggcgccgccggccttggtggaggagacgccgccggtggagacgtcgcagacgaagacctgctagacgccgtcgatttcgcagagtaaggagaaggcgcagggggtggtcgcgcgcgtatagacgatggaaaagacgcagggggcgacgcagacgcaaaaaacttttactgactcaatggcaaccctctatggtgaggagatgccgcatagtgggctacgaccccataattatatgtggccacaacagaaccagcacaaactttagcagccacattgatgactttacttttaacaatgacgcctacggagggggaatatgcactcacaaatacactctaaggaccttatacgatgactttttactacacagaaactactggacagcttcaaacaaagacctagacctgtccagatacttaggatgcagtatcatattttttagacatcccacagtagactttatagccagaataagaaccatgcccccatttgaagacactgacgccacagccatgacactacacccaggaatgatgatgctagctaaaaagaaaatactaatccctagtcttaaaacaagaccaagcagaaaacactacattaaagtaagagtaggggcccccaagctatttgaagacaagtggtacccacaaagtcagttatgtgatgtaactttgctaaccatacaagcaaccgcagcggatctgcaatatccgttcggctcaccactaacgaacaccatatgtagcaacttccagattttagacagtaactatgatgacagcttaaccgtccttcacggcacagaaaaagcagcaaagagagaccagacatataaagacatgttggacattataacagtatacaatagcacacaaacactagcacaactcaaaggttacctaccaacagcaaacactaatcctttaacaagcaccaatgctacaacagctactattgaagtcaacaaacacaacactttaggcacaaaaactaatacctacagtaactggacttcaaagaacacacacaacaatactctatatggagggtctgcctggagaacaaaaaaagaaaattcaacacaagacaaaattgcacctgatcaaatgaaagaagcaaacaaagcatatatacaagcagcaaaagtaaacttacctaactggaatattccaacaacctataacacagtaccttacccatttgaatactacacaggcatgtttagcagcatatttttagctagcggcagatccaactgggaaataccagggtgctacatagacataagctacaacccccttacagacaaaggtataggaaacatgatatggctagatgttataacaaagtcagattccaaatatgaagaaggaaagtcaaaatgtttaatggcaaactaccccatgtggtgcatgctgtatggctaccttgactactgtgacaaagtattagaacatataaatatagactttgaatacagacttgtaataagatgtccctacactcaccccatgctaaccagagcatcagacccactgtggggctttgttccatacagtgaaaactttggcaaaggcaaaatgccaggaggaaaccctgtaccctctctgtggaacagaacacactggtacgttagtgtagcccaccagagagaggtagcagaatcaatagttcaaacaggcccctttgcatacaagagcgatgagcaaaagtctgtacttacaattaagtacaacttcagatggaaatggggaggcaatcctatattccaacaggttgttagagacccctgcaaacacccatcaggacccagtccccatcgacagcctcgtgaactacaaatcgctgacccgaaatatcaaacaccagaaatcatctggcacgcgtgggactttagacacggactctttagcaagacaggtattaaaagagtgtcacaacaaccgctttatgatgagttttctacagacaggagcaagagacccaagaaagacacaggggtccagcaaagccaagagcaagaaagagactcgcgttcccaccagcgagtcctccagccctggatcaactcctcccaggaggagcaagaagagtcgcaaagcgaccaagaagagacgtcgctcaaagaacaactccaaaaacaactcgtccagcagcgagtcctgggagacaagctcagactcgtctgtggacagatctgcaacctccaagcgggatacgggatacacccacttcttcaatcccatgtataaataaagtgtacatgtttaatccccctatgcctcctaccagtcaagactggaaggaggagtatgaggcttgtaaagcctgggatagaccccccagaaatgatcttaaaaagctgcctttttacccctggatgcctcctacacacaaggtgtgttttaagcttaactttcaataaatgttggccgtgggagtttcacttgtcggtgtctacctctataagtcactcgaggg

SEQ ID NO: 2481 - protein, 764 aa, Alphatorquevirus sp.; identical to SEQ ID NO: 1686

SEQ ID NO: 2482 - protein, 154 aa, Alphatorquevirus sp.; identical to SEQ ID NO: 1687

SEQ ID NO: 2483 - protein, 121 aa, Alphatorquevirus sp.; identical to SEQ ID NO: 1688

SEQ ID NO: 2484 - DNA, 2928 bp, Betatorquevirus sp.
cgggtgccgaaggtgagtgaaaccaccgtagtcaaggggcaattaccaccgtagtcaaggggcaattcgggctagctcagtctggcggaacgggcaagattcttaaatatattttattttacagaatgtctacaagatataagccagcaaaatgctctttaagacaacaaaaattaaaatggatgaatagtcttgttcacacacacgatattatgtgtgactgccctcatccactggaacataccgcgactttaattttcgaacaagaaccaaaattaaaatttacaccaccagaacaagatctaattaaaaaatgccttactacaaatactggggatatcgtcgcagacgaccacgacaacgacgcttttggagaaggagatttagaggaccttttcaaagaagattttggagaagacgacaaagacaccgctgggtaagaaaaagaaaattaaaaactttaaaacttaaagaatggcaaccacaatatataaaaaagacagttgtaaaaggttactaccctttgtttatgagtacttcggaaagactctcaaataatttaaactgttacttagagagcattgcacctgaattttggcctggaggggggggattttctatttgtaacttttctctaaatactctgtatcaagaacaccttgtactacataactggtggactaaatctaatgaaaacatgcctttaataagatttacaggatgtaaaattactttatatagacaagaaacacaagattacttattttgctataatagaacctatccaatgcaagcaaatgccttaacttatactagcactcatcctcaagctatgctattaaacaaacaaactgttgtagtaacttgtaagcaaagatctagaaatagaaaaaactacaaaattgtaagaattaaacctcctgttcaaatgcaaaacaaatggtattttcaaaaagatttagcatttttaccactattacaaactatgacaacagcctgctcgttagaccgcatgtttctaaatagctcagccgttagttccacaattggctttacatcactagatacagttggctttagaaaccacaattttacaaaattttcaagcacaggttactacccaatacatgaagaaaaactatttggatgctataatggacaagacatagacaaattaaaaatatcacaattatgctacctaggaaacccacaagacaatacagaaggaacaccaataggagaaataccactaactgcagtaggtacagaaacaaaattacaacagcaaatagacaaagccagaacacaatggggataccaaggaaacccatttaatgctcactatttttatggagaaaagagagtactagtaaccacactcacttggaacgaacttaaaaacaaatatggaaaaaaccccgaaccaaacttagaaaaaaatgattttaaattaaaaactcaaaaatgggtgcactgcagatacaatccatttaaagacaaaggcaaaggtaacaaaatatatttactaaaaacagacagcacacaacacccagacgaatggacaccaccaccagaagaagacatagttatatcagacataccactttggctagcaacctggggttatctagactatcaaagaaagtgtggattacaatcccaaatagacacaaccacagtttttgttatatactcaacatatatagatcctccttcacttaaattttatgttccactagacaaaccatttttaaacggtcacagtccatacacaaaagaactataccctagtgaccaatttaattggcatccaaaagttagataccaagtacaatcaataaacaacatagcaatatgcggtccaacagtagctaaattaccagaacaaatatcatgcgaaggtcatatgaaatatcaattttactttaaggttggaggacagccaccacctatgtcaactcttatcgacccagacaaacaaccaaaatataatatacccagtaacctcctcaaaacaacttcgttgcagagtccaacaactccctttgaatatctcctctacaactttgacgaaagaaggggacaacttactaaaaaagctgcaaaaagaatcaaaacagaccaggaaactgaaacaaattttctctcaattacagaaacaaacaacagctgtccagtactgccctactcaaaaatacagacaccggaatcatcggaggaggaagaaacacaggagacatcgatcgaggagcaactcctcctccagcgaagagagcaaaaactcctcagacggagaatcaaccagctcctcaacaaattaacaattttagaataaaaactggacctataaaagtacaattatttcccacagaaacaaaaaacagacgtatgacactgtgggaatatgaacaagagatagaagactctattatatggcacagagtgccaagatcttttattaaagataaaccaacctacccatgggtcccccaagactccccatttactgtcaactttgatttaaatgcgccgaaataaaattcaaggccagcaacaattcactctcggtgtccatttattaaacttaaacttatataaacatccaccacactcccaaatacgcaggcgcacaagggggctccgcccccttaaacccccaggggggggggcaaagccccccctaaaacccccccataaatattcataaaggaaaccacaaaattagaattgccgaccacaaacagccatatgctaattaacttctgctattttacttaacttctccaaaaattaattaataatcaccatcacacctacgtaaaacaggcgtggctacttatctatataactaactacacttccgaatggctgagtttatgccgccagacggtggacggaacacaacagtgactccggactgagcttggg

SEQ ID NO: 2485 - protein, 673 aa, Betatorquevirus sp.
MPYYKYWGYRRRRPRQRRFWRRRFRGPFQRRFWRRRQRHRWVRKRKLKTLKLKEWQPQYIKKTVVKGYYPLFMSTSERLSNNLNCYLESIAPEFWPGGGGFSICNFSLNTLYQEHLVLHNWWTKSNENMPLIRFTGCKITLYRQETQDYLFCYNRTYPMQANALTYTSTHPQAMLLNKQTVVVTCKQRSRNRKNYKIVRIKPPVQMQNKWYFQKDLAFLPLLQTMTTACSLDRMFLNSSAVSSTIGFTSLDTVGFRNHNFTKFSSTGYYPIHEEKLFGCYNGQDIDKLKISQLCYLGNPQDNTEGTPIGEIPLTAVGTETKLQQQIDKARTQWGYQGNPFNAHYFYGEKRVLVTTLTWNELKNKYGKNPEPNLEKNDFKLKTQKWVHCRYNPFKDKGKGNKIYLLKTDSTQHPDEWTPPPEEDIVISDIPLWLATWGYLDYQRKCGLQSQIDTTTVFVIYSTYIDPPSLKFYVPLDKPFLNGHSPYTKELYPSDQFNWHPKVRYQVQSINNIAICGPTVAKLPEQISCEGHMKYQFYFKVGGQPPPMSTLIDPDKQPKYNIPSNLLKTTSLQSPTTPFEYLLYNFDERRGQLTKKAAKRIKTDQETETNFLSITETNNSCPVLPYSKIQTPESSEEEETQETSIEEQLLLQRREQKLLRRRINQLLNKLTILE

SEQ ID NO: 2486 - protein, 104 aa, Betatorquevirus sp.; identical to SEQ ID NO: 2155

SEQ ID NO: 2487 - protein, 122 aa, Betatorquevirus sp.; identical to SEQ ID NO: 2156

SEQ ID NO: 2488 - DNA, 2928 bp, Alphatorquevirus sp.
ctacgccttcggctgcgcgcggcacctcagacccaggggcaattcgggctcgggactggccgggctatgggcaaggctcttaaaaaagctatgtttcttggtcgcgtttacagaaagaaaaggcgcctgtcactgtccccactgcagtctccacaaacgtttggcaaactactaaaaggtatgtggaggccccctactcaaaatgtatcaggacaggagagaaactggtacgactcagtggtttattcgcatgctgccttttgtggctgtggggactgtgttggccatcttagctatctggctactcacctgggccgaccacctagtgcacaacccccgccacaactccagccacctgtcataagacgcctgcctgctctcccggcacccccaaacccctccggtgatcgagcggcatggcctactggtggtggagacgccgcagaagacggccctggagaaggaggcgccgctggaggcttcgcagacctcgcagacgaagagctacttaccgccgccgtcgaggccgccgaagagtaagaaagaggagggggaggtggagacggacttacagacgctggcgtagaaagagggggcgacgcaaacacagacctaaaataatccttaaacagtggcaaccaaactttattagaaactgctacatagtgggttttatgccactgatattttgtggtgagaacactgtaagccaaaactatgccacccactctgatgacttagtggctaagggaccctacgggggaggcatgaccaccacaaaattcactctcagaatcttgtttgacgaacacctaagatggatgaactactggactgttagtaacgaagacttagatctctgtagatatgtaggagccaggttttacttttacagacaccccactgtagattttatggtgcaaattcacacacaggcccccttcttagacacagaactaacaggccccagcatacacccaggcatgatgattcttaacaagaaaaagatatttgtacccagtctcaaaaccaggcctaacagaaagcacaaagtaaaagttagagtaggggccccccgcttgtttgaagacaagtggtacccccagtcagaactctgtgacaccaccctagtggccatctatgcaacggcctgtgacttgcaatttccgttcggctcaccactaactgacaacccttgcgtcaacttccaggttttaggttccgcttacaaacagcaccttagtattctaagcacagaaaccgcaaagaacaaaatgcactatgatgaagctctttacaaaaaaataccatactataatacattccaaactatagcacaccttagagaaacaggcaaacaagacgcagcaaatcctacatggggccaatgcctaaataccaccacactaacattcagtggcaacaatcaaacaacatgtaatgacacctggtactatggcaacgcatacacaccccacatagcagagctatgtaaaaaaaccaaagaaaaatactttaatgccaccaagcaagcctttcctgcttatgctacacttgtagatgacctgtatgagtaccacggaggcatctactcctccatattcctatcggcaggcagatcctactttgaaactctaggtgcttactctgacattatatataatccctttgtggacaaaggcataggcaatatagtgtggatagactacctctcaaagtcagacgctgtctggaaaccccctcaaagtaaatgcaccattaaagaccaacccctatgggcagcctttaatggatacagtgaattctgtgccaaaagcacaggagacggagcagttaacataaactgcagagtagttgtgaggtgcccctacacatctcccatgctaatagacaacaaaaacccagagcaaggctttgtcccctactccaaaaactttggcaatgcaaaaatgaaaggtggctctgcagacgtgcccctcagctggagggttaagtggtatgtcaatatgtaccaccaacaagaatttatggaagaaatagtacagagcggaccgtgggcctacaagggcgacgaaaagagtgcgacactaaacatgaaatatgtattcaaatggaaatggggcggtaaccctatatctggacaggttgtcagaaacccctgcaagacctccagttccagtcgagagcctcgttcaatacaagcagttgacccgaagagagtcgcaccgccactcgtattccactcgtgggactaccgacgagggtactttggccacgcaagtattaaaagaatgtcagaagaatcagaacctcctacgctttttacaggaccatcaggcaagcgcccccgcaaagacaccaacgtacagcaagaagaaccgcaaaaagaaagctcgactttcagagtccagcgacagctccagccgtggatccagtccagtcaagaaacgcaaagcagccaagaagagatccaggcgcaggggtcgatacaagaacaactcctccagcagctcggagaacagcgagccctccgaaagcagctggagctcctcgccggacaagtcctcaaagtccaagcaggccaccacctacacccccttttatcttcccaagcataaacaaagtctttatgtttgagcccaaaggcccaaaacccataaaaggttatgaggcctggctagatgagtaccagacagcaggtgtctgggataggccagtgagaaactaccacacagacacccccttctacccctggatgcctaaaccccccgaccaattccgtgtcagctttaaacttggctttcaataaaatttcaaggcagtacactgttcacctgtcggtgtctacctctataagtcactaagcactccgagcgtcagcgaggagtgcgaccctagggggggactcaacgccttcggagccgcgcg

SEQ ID NO: 2489 - protein, 733 aa, Alphatorquevirus sp.
MAYWWWRRRRRRPWRRRRRWRLRRPRRRRATYRRRRGRRRVRKRRGRWRRTYRRWRRKRGRRKHRPKIILKQWQPNFIRNCYIVGFMPLIFCGENTVSQNYATHSDDLVAKGPYGGGMTTTKFTLRILFDEHLRWMNYWTVSNEDLDLCRYVGARFYFYRHPTVDFMVQIHTQAPFLDTELTGPSIHPGMMILNKKKIFVPSLKTRPNRKHKVKVRVGAPRLFEDKWYPQSELCDTTLVAIYATACDLQFPFGSPLTDNPCVNFQVLGSAYKQHLSILSTETAKNKMHYDEALYKKIPYYNTFQTIAHLRETGKQDAANPTWGQCLNTTTLTFSGNNQTTCNDTWYYGNAYTPHIAELCKKTKEKYFNATKQAFPAYATLVDDLYEYHGGIYSSIFLSAGRSYFETLGAYSDIIYNPFVDKGIGNIVWIDYLSKSDAVWKPPQSKCTIKDQPLWAAFNGYSEFCAKSTGDGAVNINCRVVVRCPYTSPMLIDNKNPEQGFVPYSKNFGNAKMKGGSADVPLSWRVKWYVNMYHQQEFMEEIVQSGPWAYKGDEKSATLNMKYVFKWKWGGNPISGQVVRNPCKTSSSSREPRSIQAVDPKRVAPPLVFHSWDYRRGYFGHASIKRMSEESEPPTLFTGPSGKRPRKDTNVQQEEPQKESSTFRVQRQLQPWIQSSQETQSSQEEIQAQGSIQEQLLQQLGEQRALRKQLELLAGQVLKVQAGHHLHPLLSSQA

SEQ ID NO: 2490 - protein, 175 aa, Alphatorquevirus sp.
LRAAPQTQGQFGLGTGRAMGKALKKAMFLGRVYRKKRRLSLSPLQSPQTFGKLLKGMWRPPTQNVSGQERNWYDSVVYSHAAFCGCGDCVGHLSYLATHLGRPPSAQPPPQLQPPVIRRLPALPAPPNPSGDRAAWPTGGGDAAEDGPGEGGAAGGFADLADEELLTAAVEAAEE

SEQ ID NO: 2491 - protein, 59 aa, Alphatorquevirus sp.
MFEPKGPKPIKGYEAWLDEYQTAGVWDRPVRNYHTDTPFYPWMPKPPDQFRVSFKLGFQ

SEQ ID NO: 2492 - DNA, 2928 bp, Alphatorquevirus sp.
aggtcactaagcactccgagcgtcagcgaagtcaaggggcaattcgggctcgggactggccgggctatgggcaaggctcttaaaaaagccatgtttctcggtcggccttacagaaagaaaagggcactgtcactgctacgcgtgcgagctccaaaggcgaaaccacctgctatgagctggagacccccggtgcacaaccccaatgggatcgagagaaacctgtgggaggcattctttcgcatgcatgcttcagcttgtggttgtggcgatcttgttggccatcttactgtactggctggtcggtatggtgctcctcctcgtcccccggcccccggggctcccagaccaccgctgaaccggcagctggcccttccggcgccccccgctgatccccagcaggccaacccgagatggcctggtggggacggtggagaagatggcgctggaggccccgccgctggcggcgccgtcgcagacgccgagtaccaagaagacgagctcaacgccctgttcgacgccgtcgagcaagaagagtaaggaggaggcgatgggggaggcggaggtggagacgggggtacagacgcagacttagactgagacgcagacgcagacgaaagaaaataagactgactcagtggaacccagctaaagtcaggagatgtactattaagggtgtcctgcccatgatactgtgcggagcaggacgctcagggtttaactatggactgcacagcgacgactgcaccatacagaaaccccttggccagaacccccacgggggcggcatgagcacagtaacttttagcctacaggtgctatatgaccagtaccagaggtttatgaacaagtggtcgtactccaacgaccagctagacctagccagatactttggctgcaccttctggttttacagacacccagaagtagactttgtcgctcagtttgacaacgttcccccaatgaaaatggacgagaacacagcccctaacactcacccgtcgttcctactgcaaaacaaacacagggttaaaatccccagctttaaaaccaagccttttggcagaaaaaaagttagagttacagtggggccccccaaactgtttgaagacaagtggtacagccagcatgacttgtgtaaggtgcccctagtcagttggcggttaaccgcagctgacttcagatttccgttctgctcaccacaaactgacaacccttgctacaccttccaggtattgcatgaagagtattacccagtaataggcactgctgctatagaacaaggaacaaattacaatccaacaggcatacaaactttagaaaattttttatatggcagatgtactcactatcaaacatttgccacagacacaagactaaaccctcaaagacccatatcattaagcaatagaaaaacatataatcccagtggtgctgaggaagacataatatggagtacaaacgattttaacgaatttaaaaaacacacagacagcaattatggctactgcacctactgccctactgaaaccttaattaagaaaattaaaaactacagagacaaaagattcgaatggctaactcaaatgccacaaacaaacacctgccatataaatgccacctacgctcgaggaaaaattaaggagtgggaatatcacctaggatggtactcaaatatatttataggcaacctcagacacaacctggcattccggacagcatacatagacattacctacaatcctataacagacaaaggagaaggcaacatagtgtggttccaatatgccacgaaacccaacacacagtacatagagtcacaggcaaaatgcaccattacaaacatacccctatatgctgctttttatggctacgaagactatatccaaagaacactaggcccctatcaagatgtagagaccctaggcataatatgtgttaaatgtccctacacagatcccccactagttcacaaagacaagaataagtcagactggggctatgtattctacgacgttcactttggcaacggaaagaccccggagggcctgggccaagtgcacccttactggatgcagagatggagaccctatgtacagttccagaaagacactatgaacaaaatagccagaacgggaccgttcagctacagagacgagacgccttccatcaccttgactgccgggtacaagtttcgttttaactgggggggcgactctatatttccacagattattaaaaacccctgcccagacagcggggtacgaccttcaaccagtagagagcgtcgctcagtacaagtcgttagcccgctcacaatggggccagagtacatattccaccggtgggactggcgacgggggttctttaatacaaaaactctcaaaagaatgcttgaaaaatcaattaatgatgaagaatattcaacaggcccaaaggtccctcgatggtttcccccactcgacaaccaagagcaagaaggcgtctcagatacagagacgacaacctcgcagtcctcgcaagaagaagccgctcaagaagccctccaagaagtccaagaggcgtcgctacagcagcacctcctccagcagtaccgagagcagcgaagaatcggaaagcaactccaactcgtcatgctccaactcaccaagacgcagagcaacttgcacataaatccccgtgtccttggccatgcataaataaagtgtacatgtttcccccggaaaaacccatgcccatacacgggtaccacgggtggcagacagagtatgaggcctgcaaagcctttgacaggccccctagaaactacctgtcagacaaacccatctatccctggcttccccgctcccaaccagaatttaaagtcagttttaaacttggttttcaataaacaaggccgtgggaatttcacttgtcggtgtctacctctta

SEQ ID NO: 2493 - protein, 761 aa, Alphatorquevirus sp.
MAWWGRWRRWRWRPRRWRRRRRRRVPRRRAQRPVRRRRARRVRRRRWGRRRWRRGYRRRLRLRRRRRRKKIRLTQWNPAKVRRCTIKGVLPMILCGAGRSGFNYGLHSDDCTIQKPLGQNPHGGGMSTVTFSLQVLYDQYQRFMNKWSYSNDQLDLARYFGCTFWFYRHPEVDFVAQFDNVPPMKMDENTAPNTHPSFLLQNKHRVKIPSFKTKPFGRKKVRVTVGPPKLFEDKWYSQHDLCKVPLVSWRLTAADFRFPFCSPQTDNPCYTFQVLHEEYYPVIGTAAIEQGTNYNPTGIQTLENFLYGRCTHYQTFATDTRLNPQRPISLSNRKTYNPSGAEEDIIWSTNDFNEFKKHTDSNYGYCTYCPTETLIKKIKNYRDKRFEWLTQMPQTNTCHINATYARGKIKEWEYHLGWYSNIFIGNLRHNLAFRTAYIDITYNPITDKGEGNIVWFQYATKPNTQYIESQAKCTITNIPLYAAFYGYEDYIQRTLGPYQDVETLGIICVKCPYTDPPLVHKDKNKSDWGYVFYDVHFGNGKTPEGLGQVHPYWMQRWRPYVQFQKDTMNKIARTGPFSYRDETPSITLTAGYKFRFNWGGDSIFPQIIKNPCPDSGVRPSTSRERRSVQVVSPLTMGPEYIFHRWDWRRGFFNTKTLKRMLEKSINDEEYSTGPKVPRWFPPLDNQEQEGVSDTETTTSQSSQEEAAQEALQEVQEASLQQHLLQQYREQRRIGKQLQLVMLQLTKTQSNLHINPRVLGHA

SEQ ID NO: 2494 - protein, 156 aa, Alphatorquevirus sp.; identical to SEQ ID NO: 624

SEQ ID NO: 2495 - protein, 147 aa, Alphatorquevirus sp.; identical to SEQ ID NO: 597

SEQ ID NO: 2496 - DNA, 2928 bp, Betatorquevirus sp.
cgggtgccgaaggtgagtgaaaccaccgtagtcaaggggcaattcgggcaaggttagtctggcggaacgggcaagtaactaaattttattttacagatgagcaaattctacacaccagcaaaatacaacagaaaacaaaaaaatttacaagaagtgaatttacacgttgcaattcatgatctaaactgcggctgcagtaatccactaaaacacattatatatcaatttctggaacaagaacccactatcaactttactaaacaagaactacaacaactacaaaaatgccatggtactggaaccgctggagacatcgaccatggagacgacgacacaggctttggacccggagatttagaacaactcttcgcagaagaaaaagaagaagaccccgccgggtaagaaaaaaactgaaatttttaaaactaatacaatggcaaccacaatccataagacgctgtactataaaaggactttactgcttatttcaatgtaaccataagagactaaactataactttgcacaatatgaaactgaaataagaccaaaaaatattccgggagggggaggctacagtttactaagatttactttaaatgctttatttgaacaaaaccaacttgtaagaaatgtatggacccggggaaacaaaaattacccatttgtaagatacttaggatgtgaatttcgtgtatatagaccagaaaatgttgatgtatgtatcaaatttcaaaactgttaccctatgacagcatccccatttttatacatggcaacacaaccatcaatactaatgcaaagtagaaacagcagaaaaataccctgtaaaagaacctccaaaagacaaaaaccatacataaaatttaaatttccaccaccacaaaacatgacaaacaaatggttttttagccatgatataagtaacataggtctcatacttgtagcaacatcagcatgcagctttgaccaatattatatatcaaaatatgcagaaaacacaacaatagaatttcaagtactaaacactaaaatctttcaaaacagacaatttagaaatacaacaacaacaggatattatccaaaggaaaacttttacatgttctcttccaatggagacgaaccaaaaccaacatggttacaactacaatacttagggaacacaatagaataccaatacggagaaacaatagcaacacatgacacaacagaaacaaactatcctgttagacttcaacaatacttatcaaacagaaaatactggggaaacccttttcacagctacaattttgacaaaaaacacagattatggtttagtaattcaccaccatcacaaataataccaagaacatacacaaaagcaaaaacaccaattaccttaacagaaataacacaagaaatgtactttactataagatacaacccaatgcaagacacaggacaagacgtacaactatacctactaaaaaattgggcagaagaaacaggttggaatccaccacaaaatgaaaaactaatagtttctggattccctttatggttaatagtatggggctatcatgactatcaaaaaaaactagcagaagtaacagacatagaacaccactacatactaacatttaaacacccaaaactagaaccaaaattagatgcatatataccactaaactacagctttacacaaggtactagtgaatattacccacaagatgaaagaaccacacaagacaatttaaattggtatcctatgctacattaccaattaggagcaatagaaaatatagcagcaggaggcccaggaactgcaaaactgggagaatttaaaaatgctgaatgtcattgtgaatacaaatttaaatttaagtttggcagctgccaagcaccaatggaaaaaacaacagatccagaaaaacaaccaacttttccaatgccaaataacttcaatgaaacaaattcgttacagagtccagaagaaccaatacagtcctacttatacaactttgacgaaagatggggacaaattacaaaaacagctgcagacagaatccttaaagaccaaccaactaaatcaactttatttacagattcaacaacaattggaacagacgtcccactccaccaaacactccaggaagaaatgtactcatcggaggaggaggaaaccaaaaaagagacattattcgagcagctccaacaccagcgaaacaagcaaaaacaactcagacacagaatcaagcagctcctaatagaattacaaaatacacaataaaaaatactaaaattagaataaacctatttggtgaccaaccaaaccgtagattaaatagtagagaaagggctgaagataaaatagaagcaaaaatatggggtagagcagaaaaacactttttaaaagatattcccttttactatggctgtgttcctgaaccccgtgtaaactttgaattaaactatcaataaacaaggcccattgattcactcctcggtgtccatttattaaagttaaacttaaataaacatccaccacatctcccaatcacaaggcctaaaaaggggggctccgcccccttacacccccaagggggctccgccccctttaacccaaggcctaaaaagggggctccgcccccttacacccccaagggggctccgccccctttaacccccaagggggttccgcccccttacacccccaataaatattcaacaggaaaaccacctaatttgaattgccgaccacaaaccgtcacttacttcccgtttttccataacttccttttttactcatgaatattaattaaattaattagtaaacaccgtcaaacacgggcggagccacacaactataaaaccaactacacttccgaatggctgagtttatgccgccagacggagactgcaccagacactgactgcaggctaacctaggg

SEQ ID NO: 2497 - protein, 660 aa, Betatorquevirus sp.
MPWYWNRWRHRPWRRRHRLWTRRFRTTLRRRKRRRPRRVRKKLKFLKLIQWQPQSIRRCTIKGLYCLFQCNHKRLNYNFAQYETEIRPKNIPGGGGYSLLRFTLNALFEQNQLVRNVWTRGNKNYPFVRYLGCEFRVYRPENVDVCIKFQNCYPMTASPFLYMATQPSILMQSRNSRKIPCKRTSKRQKPYIKFKFPPPQNMTNKWFFSHDISNIGLILVATSACSFDQYYISKYAENTTIEFQVLNTKIFQNRQFRNTTTTGYYPKENFYMFSSNGDEPKPTWLQLQYLGNTIEYQYGETIATHDTTETNYPVRLQQYLSNRKYWGNPFHSYNFDKKHRLWFSNSPPSQIIPRTYTKAKTPITLTEITQEMYFTIRYNPMQDTGQDVQLYLLKNWAEETGWNPPQNEKLIVSGFPLWLIVWGYHDYQKKLAEVTDIEHHYILTFKHPKLEPKLDAYIPLNYSFTQGTSEYYPQDERTTQDNLNWYPMLHYQLGAIENIAAGGPGTAKLGEFKNAECHCEYKFKFKFGSCQAPMEKTTDPEKQPTFPMPNNFNETNSLQSPEEPIQSYLYNFDERWGQITKTAADRILKDQPTKSTLFTDSTTIGTDVPLHQTLQEEMYSSEEEETKKETLFEQLQHQRNKQKQLRHRIKQLLIELQNTQ

SEQ ID NO: 2498 - protein, 101 aa, Betatorquevirus sp.
MSKFYTPAKYNRKQKNLQEVNLHVAIHDLNCGCSNPLKHIIYQFLEQEPTINFTKQELQQLQKCHGTGTAGDIDHGDDDTGFGPGDLEQLFAEEKEEDPAG

SEQ ID NO: 2499 - DNA, 2928 bp, Alphatorquevirus sp.
cacgcgctacgccttcggctgcgcgcggcacctaaggggcaattcgggctcgggactggccgggctatgggcaaggctcttaaaaaagccatgtttctcggtcgcatttacagaaagaaaaggcgcctgttactgtccccactgcactctccacaaaaagttcgcaaactactgaaaggtatgtggaggccccctactcaaaatgtatcaggacaggagaaacactggtacgactctgtgttttattcgcatgctgccttttgtggctgtggggactgtgttggccatcttagctatctggctactcacctgggccgaccacctagtgcacaacccccaccgcaacagcagccacctgttataagacgcctgcctgctctcccggcacccccaaacccctccggtgatcgagcggcatggcctactggtggtggagacgccggagaagacggccctggagaaggaggcgccgctggaggcttcgcagacctcgcagacgaagacctacttaccgccgccgtcgaggccgccgaagagtaagaaagaggagggggaggtggagacgaacttacagacgctggcgtagaaagagggggcgacgcaaacacagacctaaaataattcttaaacagtggcaaccaaactttattagaaactgttttattgtgggttatatgccactgatcttttgtggtgaaaacactgtaagccaaaactatgccacccactctgatgacctggtggctaagggaccctacgggggtggcatgaccaccacaaaattcactctgagaattctctttgacgaacaccttagatggatgaactactggactgttagtaacgaggacttagatctctgcagatatgtaggagcccgcctttacttttacagacaccccacagtagattttatggtgcaaatacacacacaggccccctttctagacacagaactcacaggccccagcatacacccaggcatgatgattctaaataagaggaaaatatttgtgcccagtttaaaaaccaggcctaacagaaagcacaaagtaagggttaaagtaggggccccccgcttgtttgaagacaagtggtacccccagtcagaactttgtgacaccaccctagtggccatctatgcaacggcctgtgacttgcaatttccgttcggctcaccactaactgacaacccttgcgtcaacttccaggttttaggttccgcttacaaacagcaccttagtatcctacccacagaaactgaaaacaatagagtacactataaacaagctctttttaacaaggtagcatactacaatacattccagacaatagcacaccttagagaaacaggcaaacaagaaaaggccagccctcagtggaacacatgtgtaaattctgaaacacttaaatttgatggcgctaaccaaaccacatgtaatgacacctggtactatggcaatgcatacacccagtcaatagaaaccctgtgtgaaaaaaccaggcaaaaatactttaaagcaaccaaaagcgcttttcctgcttatgctacacttgtagatgacctctatgaataccacggaggtatatactcctctatatttctctctgcaggcagatcctactttgaaactctaggtgcttactctgacattatatataacccctttgtagacaaaggcctaggtaacatagtatggatagactacctctcaaaatcagacgcagtctggaaaccccctcaaagtagatgcaccattaaagaccagcccctatgggcagcctttaacggctacagtgaattctgtgccaaaagcacaggagacggagcagtaaacataaactgcagagtagttgttaggtgcccctacacaactcccatgttaatagacaacaaggaccccaatcaaggctttgtaccctactccaaaaactttggcaatgcaaaaatgaaaggcggctcagcagacgtacccctcagctggagggtaaagtggtatgttatgatgtaccaccaacaagaatttatggaagaaatagtacagagcggaccgtgggcctacaagggcgacgaaaagagtgctgcacttaacatgaagtatgtctttaaatggaaatggggcggtaaccctatatctggacaggttgtcagaaacccgtgcaagacctccagttccagtcgagaacctcgttcaatacaagcagttgacccgaagagagtcgcaccaccgctcgtattccacagctgggactaccgacgagggttctttggccacgcaagtattaaaagaatgtcagaagaatcagaacctcctacgctttttacaggaccatcaggcaaacgcccccgcagggacaccaacgttcagcagccggaagaagaacagcaaaaagaaagctcgagtttcagactccagcggcagctccagccgtggatcaactccagtcaagaaacgcaaagcagccaagaagagatccaggcgcaggggtcgatacaagaccaactcctccagcagctcggagaacagcgagccctccgaaagcagctggagctcctcgccggacaagtcctcaaagtccaagcaggccaccacctacaccccctattatcttcccaagcataaacaaagtgtttatgtttgagcccaaaggccccaaacccatacagggttatgaggcctggttagatgagtaccaaacagcaggtatctggaataggccagtcagaaactaccacacagacacccccttctacccctggatacctaagccccccaaccaattccgtgtcagctttaaacttggctttcaataaaatttcaaggcagtacactgttcacctgtcggtgtctacctctataagtcactaagcactccgagcgtcagcgaggagtgcgaccctagggggggactcaacgccttcggagc

SEQ ID NO: 2500 - protein, 735 aa, Alphatorquevirus sp.
MAYWWWRRRRRRPWRRRRRWRLRRPRRRRPTYRRRRGRRRVRKRRGRWRRTYRRWRRKRGRRKHRPKIILKQWQPNFIRNCFIVGYMPLIFCGENTVSQNYATHSDDLVAKGPYGGGMTTTKFTLRILFDEHLRWMNYWTVSNEDLDLCRYVGARLYFYRHPTVDFMVQIHTQAPFLDTELTGPSIHPGMMILNKRKIFVPSLKTRPNRKHKVRVKVGAPRLFEDKWYPQSELCDTTLVAIYATACDLQFPFGSPLTDNPCVNFQVLGSAYKQHLSILPTETENNRVHYKQALFNKVAYYNTFQTIAHLRETGKQEKASPQWNTCVNSETLKFDGANQTTCNDTWYYGNAYTQSIETLCEKTRQKYFKATKSAFPAYATLVDDLYEYHGGIYSSIFLSAGRSYFETLGAYSDIIYNPFVDKGLGNIVWIDYLSKSDAVWKPPQSRCTIKDQPLWAAFNGYSEFCAKSTGDGAVNINCRVVVRCPYTTPMLIDNKDPNQGFVPYSKNFGNAKMKGGSADVPLSWRVKWYVMMYHQQEFMEEIVQSGPWAYKGDEKSAALNMKYVFKWKWGGNPISGQVVRNPCKTSSSSREPRSIQAVDPKRVAPPLVFHSWDYRRGFFGHASIKRMSEESEPPTLFTGPSGKRPRRDTNVQQPEEEQQKESSSFRLQRQLQPWINSSQETQSSQEEIQAQGSIQDQLLQQLGEQRALRKQLELLAGQVLKVQAGHHLHPLLSSQA

SEQ ID NO: 2501 - protein, 173 aa, Alphatorquevirus sp.
LRAAPKGQFGLGTGRAMGKALKKAMFLGRIYRKKRRLLLSPLHSPQKVRKLLKGMWRPPTQNVSGQEKHWYDSVFYSHAAFCGCGDCVGHLSYLATHLGRPPSAQPPPQQQPPVIRRLPALPAPPNPSGDRAAWPTGGGDAGEDGPGEGGAAGGFADLADEDLLTAAVEAAEE

SEQ ID NO: 2502 - protein, 59 aa, Alphatorquevirus sp.; identical to SEQ ID NO: 758

SEQ ID NO: 2503 - DNA, 2928 bp, Betatorquevirus sp.
cgggtgctgaaggtgagtgaaaccaccgaaatcaaggggcaattcgggctgtttcagtctagcggaacgggcaagtaacttaatattattttttttagatgagcaaatttctacaagaaccattatatcaaggaaaagccttagaagatcaatggattaacagcatttacagcacccacgatttgttttgcggatgcaacgacgtactcactcacctaattggaatttttaacagaaaaggaaaatctccaaaaccaaaaaaggaaattaaaaatatactatgccttattactggagaaggcaaagaaaacgcagatattatagaagaccacttcgaacctggagagttagacaaactcttccaagaagatggaggactcgaagaagaatccgtcgcaaacccagacgggtaagacgacgacgtttcaatagaaaactaaaaactataaaaataacacaatttcaaccagatgttattagaaaatgtactattttaggaaatatttgcttatttcaaggtagccctgaaagagcaagccataactatgtacaatatatctattcttatgtacctgtcggggcaccgggagggggaggatggacattaatgatagaaagcctatcaagcttatgggaagactggcaacatttaaaaaacatatggactaatagtaatgcaggactacctttagtaagatacctaggagcaacattttacttttttcaaagcccatacaccgactacattgtaaatgttatccgatgctatccaatgacagatactgaacatatgcatgcagactctgctcctagtagaatgctgctaaaaagaaaagcagtaagagtaccaagcctagaaacacgtaaaaagaaaaaaccatacaaaaaagttagagttagaccaccagcacaaatgcaaaaccaatggtattttcaaaaagacatatgtaatattccattagtaatgatacaagccacagcagtagattttagatatcctttcgctcctagctcagcacaaagcaacaatgtcacattaacttgcttaaatatagcactttttcaaaattcaaactttgacgaccccagcgttacacatgggtactttcccaaaccaaacgtatacctatacagcactaacactcgaagtataaccacagatgtaaaaaacttaccttttactcaaatagtatacctaggaaacacaaaagacagacaactaggaaaagacagtaatgacacatttgcaaactggggaaacccatttatgcctgaatatatacatggagaaaaaccagtctttacaaacacagttaaactcacaagagaaaactatgaagcaaacaaaaaaaacaacacaaacttacaagaagattactttttcacagttagatataacccagaaaaagacacaggagcagcaaacacaatatttattcaaaacaactttcaacaaacaagttggcatagaccacaaaatcctgacttaatattagaaggcttccccttatatgacatgctatggggatatttagactggcagaaaaaacttcaaacaacacaagacataagcaacaaatacatagcagtaatacaaacagaccaatttgatgacaaaaaaaactactatatagtagtagatcctaaatttctagacggacataacccttatgattcaccactaacaaactataataaaagccactggaacatatgtactagagtacaagaaaaacctttaaatgatatctgtttaagtggaccaggtgcacctagaccagcctttggtaactatatgcaagccaaaatgcaatacaaatttcacttcaaatggggaggctgtccaaagcaattagaaaaaccctatgatccttgttcacagccttcctggaatatcccccgtaacttcgattcaggaattcaaatccagaatcctaacacaccaccagaaacagaactgcaaaagtgggactggagaagagactatattacgagcaaagctatccaaagaattaaacaatacgaaacaactgatgaaactttacaactctttacaggatgctccaaagacccaccaatactgcaaaaaacaaaaacaccggagatcagctcagaggaggaagaagaggaaacaccatcactccaaaaccagatcaacaagctcaagcgacaccaacagcacctacagcagcgaatcctccagcgaatgcgactaactacaaaataaaagcttctaaagtcaaagtagaactatttcctacaaaaaataagtttaaaaatcgtagatttactgactccgaaagagaactagaaaaattagtagccgcagcatttaaaagaccacaaagacactttttttatgatcccccaacatatccttgggttcctcctgaaccacttgttaactttgatcttggaaataaattttaaggccaacaatattcacttagtggtgtctgtttattaagtttaaacttaaataaaccaactccgcctccctacaggtggtgtctgtttattaagtttaaacttaaataaaccaactccgcctccctacagtagggcgccaaaaaggggctccgccccttaaaccccaagggggctccgcccccttaaaccccaaagggggctccgccccctaaaacccccaagggggctccgccccctataacccccaggaaaaccacataattagcatggctaaccacaaactgaaaaaggaaaccacaaaatttgcattgccgaccacaaacgaatatttaaattaacttccctaaatgaaacaacacttccctaaaaattaattaataaacatcgtcacaaggggaggagacaccacactataaaactaacatacatgacgaatggctgagtttacgccgctagacggaggacacttcacgttagtgacagtggactgaaaccggg

SEQ ID NO: 2504 - protein, 648 aa, Betatorquevirus sp.
MPYYWRRQRKRRYYRRPLRTWRVRQTLPRRWRTRRRIRRKPRRVRRRRFNRKLKTIKITQFQPDVIRKCTILGNICLFQGSPERASHNYVQYIYSYVPVGAPGGGGWTLMIESLSSLWEDWQHLKNIWTNSNAGLPLVRYLGATFYFFQSPYTDYIVNVIRCYPMTDTEHMHADSAPSRMLLKRKAVRVPSLETRKKKKPYKKVRVRPPAQMQNQWYFQKDICNIPLVMIQATAVDFRYPFAPSSAQSNNVTLTCLNIALFQNSNFDDPSVTHGYFPKPNVYLYSTNTRSITTDVKNLPFTQIVYLGNTKDRQLGKDSNDTFANWGNPFMPEYIHGEKPVFTNTVKLTRENYEANKKNNTNLQEDYFFTVRYNPEKDTGAANTIFIQNNFQQTSWHRPQNPDLILEGFPLYDMLWGYLDWQKKLQTTQDISNKYIAVIQTDQFDDKKNYYIVVDPKFLDGHNPYDSPLTNYNKSHWNICTRVQEKPLNDICLSGPGAPRPAFGNYMQAKMQYKFHFKWGGCPKQLEKPYDPCSQPSWNIPRNFDSGIQIQNPNTPPETELQKWDWRRDYITSKAIQRIKQYETTDETLQLFTGCSKDPPILQKTKTPEISSEEEEEETPSLQNQINKLKRHQQHLQQRILQRMRLTTK

SEQ ID NO: 2505 - protein, 104 aa, Betatorquevirus sp.
MSKFLQEPLYQGKALEDQWINSIYSTHDLFCGCNDVLTHLIGIFNRKGKSPKPKKEIKNILCLITGEGKENADIIEDHFEPGELDKLFQEDGGLEEESVANPDG

SEQ ID NO: 2506 - protein, 123 aa, Betatorquevirus sp.
MLQRPTNTAKNKNTGDQLRGGRRGNTITPKPDQQAQATPTAPTAANPPANATNYKIKASKVKVELFPTKNKFKNRRFTDSERELEKLVAAAFKRPQRHFFYDPPTYPWVPPEPLVNFDLGNKF

SEQ ID NO: 2507 - DNA, 2928 bp, Betatorquevirus sp.
cgggtgctgaaggtgagtgaaaccaccgaaatcaaggggcaattcgggctgtttcagtctagcggaacgggcaagtaacttaatattattttttttagatgagcaaatttctacaagaaccattatatcaaggaaaagccttagaagatcaatggattaacagcatttacagcacccacgatttgttttgcggatgcaacgacgtactcactcacctaattggaatttttaacagaaaaggaaaatctccaaaaccaaaaaaggaaattaaaaatatactatgccttattactggagaaggcaaagaaaacaaaaaaggaaattaaaaatatactatgccttattactggagaaggcaaagaaaacgcagatattatagaagaccacttcgaacctggagagttagacaaactcttccaagaagatggaggactcgaagaagaatccgtcgcaaacccagacgggtaagacgacgacgtttcaatagaaaactaaaaactataaaaataacacaatttcaaccagatgttattagaaaatgtactattttaggaaatatttgcttatttcaaggtagccctgaaagagcaagccataactatgtacaatatatctattcttatgtacctgtcggggcaccgggagggggaggatggacattaatgatagaaagcctatcaagcttatgggaagactggcaacatttaaaaaacatatggactaatagtaatgcaggactacctttagtaagatacctaggagcaacattttacttttttcaaagcccatacaccgactacattgtaaatgttatccgatgctatccaatgacagatactgaacatatgcatgcagactctgctcctagtagaatgctgctaaaaagaaaagcagtaagagtaccaagcctagaaacacgtaaaaagaaaaaaccatacaaaaaagttagagttagaccaccagcacaaatgcaaaaccaatggtattttcaaaaagacatatgtaatattccattagtaatgatacaagccacagcagtagattttagatatcctttcgctcctagctcagcacaaagcaacaatgtcacattaacttgcttaaatatagcactttttcaaaattcaaactttgacgaacccagcgttacacatgggtacttccccaaaccaaacgtatacctatacagcactaacactcgaagtataaccacagatgtaaaaaagttatcttttgaacaaataatatacctaggaaacacaaaagacagacaactaggaaaagacagtaatgacacatttgcaaactggggaaacccatttatgcctgaatatatacatggagaaaaaccaatctttacaaactcagttaaactcacaagagacaactatgaaacaaacaaaagaaacaacgcaaacttagaagaagattactttttcacagttagatataacccagaaaaagacacaggagcagcaaacacaatatttattcaaaacaactttcaacaaacaacttggcatagaccacaaaatcctgacttaatattagaaggcttccccttatatgacatgctatggggatatttagactggcagaaaaaacttcaaacaacacaagacataagcaacaaatacatagcagtaatacaaacagaccaatttgatgacaaaaaaaactactatatagtagtagatcctaaatttctagacggacataacccttatgattcaccactaacaaactataataaaagccactggaacatatgtactagagtacaagaaaaacctttaaatgatatctgtttaagtggaccaggtgcacctagaccagcctttggtaactatatgcaagccaaaatgcaatacaaatttcacttcaaatggggaggctgtccaaagcaattagaaaaaccctatgatccttgttcacagccttcctggaatatcccccgtaacttcgattcaggaattcaaatccagaatcctaacacaccaccagaaacagaactgcaaaagtgggactggagaagagactatattacgagcaaagctatccaaagaattaaacaatacgaaacaactgatgaaactttacaactctttacaggatgctccaaagacccaccaatactgcaaaaaacaaaaacaccggagatcagctcagaggaggaagaagaggaaacaccatcactccaaaaccagatcaacaagctcaagcgacaccaacagcacctacagcagcgaatcctccagcgaatgcgactaactacaaaataaaagcttgtaaagtcaaagtagaactatttcctacaaaaaataagtttaaaaatcgtagatttactgactccgaaagagaactagaaaaattagtagccgcagcatttaaaagaccacaaagacactttttttatgatcccccaacatatccttgggttcctcctgaaccacttgttaactttgatcttggaaataaattttaaggccaacaatattcacttagtggtgtctgtttattaagtttaaacttaaataaaccaactccgcctccctacagtaggacgccaaaaaggggctccgccccttaaaccccaagggggctccgcccccttaaaccccaaagggggctccgccccctaaaacccccaagggggctccgccccctataacccccaggaaaaccacataattagcatggctaaccacaaactgaaaaaggaaaccacaaaatttgcattgccgaccacaaacgaatatttaaattaacttccctaaatgaaacaacacttccctaaaaattaattaataaacatcgtcacaaggggaggagacaccacactataaaactaacatacatgacgaatggctgagtttacgccgctagacggaggacacttcacgttagtgacagtggactgaaaccggg

SEQ ID NO: 2508 - protein, 648 aa, Betatorquevirus sp.
MPYYWRRQRKRRYYRRPLRTWRVRQTLPRRWRTRRRIRRKPRRVRRRRFNRKLKTIKITQFQPDVIRKCTILGNICLFQGSPERASHNYVQYIYSYVPVGAPGGGGWTLMIESLSSLWEDWQHLKNIWTNSNAGLPLVRYLGATFYFFQSPYTDYIVNVIRCYPMTDTEHMHADSAPSRMLLKRKAVRVPSLETRKKKKPYKKVRVRPPAQMQNQWYFQKDICNIPLVMIQATAVDFRYPFAPSSAQSNNVTLTCLNIALFQNSNFDEPSVTHGYFPKPNVYLYSTNTRSITTDVKKLSFEQIIYLGNTKDRQLGKDSNDTFANWGNPFMPEYIHGEKPIFTNSVKLTRDNYETNKRNNANLEEDYFFTVRYNPEKDTGAANTIFIQNNFQQTTWHRPQNPDLILEGFPLYDMLWGYLDWQKKLQTTQDISNKYIAVIQTDQFDDKKNYYIVVDPKFLDGHNPYDSPLTNYNKSHWNICTRVQEKPLNDICLSGPGAPRPAFGNYMQAKMQYKFHFKWGGCPKQLEKPYDPCSQPSWNIPRNFDSGIQIQNPNTPPETELQKWDWRRDYITSKAIQRIKQYETTDETLQLFTGCSKDPPILQKTKTPEISSEEEEEETPSLQNQINKLKRHQQHLQQRILQRMRLTTK

SEQ ID NO: 2509 - DNA, 2928 bp, Alphatorquevirus sp.
ctgactcaacttcttcggagccgcgcgctactcaaggggcaattcgggctcgggactggccgggctatgggcaaggctcttaaaaaagcatgtttctcggtaaaatttacagaaagaaaaggaaagtgctactgtacggcctgccagctccaaagaagaaactacctactgctatgagccactggagcacacccgtccaccatgcaacggggatcgagcacctctggtaccagtctgttattaacagccattctgctagctgcggttgtggcgatcctgtacgccactttacttatcttgctgagaggtatggctttgccccaactccccgcgccccgccagtagccccgacgcccaccatccgtagagccaggcccgcgcctgccgctccggagccccgtgccctaccatggcatggggatggtggagaagaaaacgcaagtggtggtggagacgccggtttgcccgagggagacttcgcagacgacggattagacgccctcgtcgccgcactcgacgaagaacagtaaggaggcgcagacaatggaggagggggcgacccagacgcagactgtttaagcgaaagagacgctttaggagacgcagacgaaaagctaagataaaaataacacagtggcagcccagtagaacaaagagatgctttattataggctactttccagcacttatatgtggtcagggaagatggtcagagaactttaccagccacatagaagacaaaacccctaagggaccctttggaggggggcacagcacagccaggctatctttaaaagtactatacgaagaaaaccagaagcatcacaacttctggacagccagtaacaaagagctagagctagccaggttttttggcagtacctggacactgtacagacacgaagaagtagactacatatgcacctttaacagaaaaagccccctgggaggcaacctgctaacagcacccagtctgcacccgggggccgccatgctatctaaacataaaatactaatacccagttttaagaccagaccgggcggaaaacccactgtaaaattcaggataaaaccccccacaacactaatagacaaatggtactttcaaaaagatatttgtgacactacactgctcaacatcaactttgttgcatgtgacttgcggtttccgttctgctcaccacaaactgacaacgtttgtgtaacatttcaagtcctttccgcggtttataacgacttcctctctataaccaacagcaagttacaagcaacaaattgggaaaacgaatacacaaattttttaaacaaagcatttccatcagacagaagcattaataaattaaacacatttacaacagaaggagcctttagtcaccctaaaatagaaaaatataaaccacaaattccactacctaatggaaagtactttcaagataaagatggccaatggggagacccaatacacattacagatcagcaaagtagacaacaaattataaaaaaaatagttgaaaatgcaaaaaactacctaaaaaaatacacagaagagtttaaacaatttccaaacattgcccagttccaccacggattttttacacagtggacaggcatatacagtgctgcttttttaaactaccacagaatatctccagaagtaccaggcctatacacagataccatctacaacccacttgtagacaaaggcataggaaaccacatatggatagactacctcagcaaaccagaccctaacttagatccagtaaaaagtaaatgccacatagcagacctgccaatgtggatggcaacctttggcctagtagactggtgcaaaaaagacacaggcaactggggcatacccgcgtgggccagagtactaatgatatgtccctatacgtttccacctatgtatgaccaaaacaacccaaacagaggatttataccgataggttacaacttctcacaaggactaatgccagacggcagcaaatacattccaatgcaaatgagagctaagtggtaccccaacctgttaaaccaacaagcagtacttgaagacataagtgagtcaggaccctttgcatttagagaaaaaaaacctagcgccagcataacagtaaaatacaaatttagatggcactttgggggcaaccctgtgtccgaacaggttattgcagacccatgccaacaaccaacctttgaaatgcccggagccggttcgctgcctcgcagactacaagtcacggacccgaaactcctcgggccacactacacattccacagctgggactggagacgtgactactttaacagaaagactcttaaaagaatgtcagaacaacaagaaacttctgagtttttattcccaggcccaaaaaaacccagagtggatctcggggtcgtccaagctgtcgaaaaagtctcttccccgaggaaaagagaacagaaaccgtgggaagacagcgagcagcaatcagagacagaagccctctcggaagaagaagaagagggctcgatacagcagcagctccagcagcagctgcaacagcaaaagcagctcaggagaggaatcaactgcctcttcgagcagctagtaaaaacccagcagggagtccacctagatccttccctcttgtaggccccaggcagtggctgtttccagagagaaagccggcccctgcccctagctcgggagactgggccacagagtatttagcagccagagtgtttgacagacccccgagaagcaacctgaaggatacaccctactatccctacattaaaaaccaatacaatgtgtactttgacctaacctttgaataaagtgcagctttcaacttgcaaggccgtgggagtttcactggtcggtgtctacctctaaaggtcactaagcactccgagcgtcagcgaggagtgcgacccttcccc

SEQ ID NO: 2510 - protein, 742 aa, Alphatorquevirus sp.
MAWGWWRRKRKWWWRRRFARGRLRRRRIRRPRRRTRRRTVRRRRQWRRGRPRRRLFKRKRRFRRRRRKAKIKITQWQPSRTKRCFIIGYFPALICGQGRWSENFTSHIEDKTPKGPFGGGHSTARLSLKVLYEENQKHHNFWTASNKELELARFFGSTWTLYRHEEVDYICTFNRKSPLGGNLLTAPSLHPGAAMLSKHKILIPSFKTRPGGKPTVKFRIKPPTTLIDKWYFQKDICDTTLLNINFVACDLRFPFCSPQTDNVCVTFQVLSAVYNDFLSITNSKLQATNWENEYTNFLNKAFPSDRSINKLNTFTTEGAFSHPKIEKYKPQIPLPNGKYFQDKDGQWGDPIHITDQQSRQQIIKKIVENAKNYLKKYTEEFKQFPNIAQFHHGFFTQWTGIYSAAFLNYHRISPEVPGLYTDTIYNPLVDKGIGNHIWIDYLSKPDPNLDPVKSKCHIADLPMWMATFGLVDWCKKDTGNWGIPAWARVLMICPYTFPPMYDQNNPNRGFIPIGYNFSQGLMPDGSKYIPMQMRAKWYPNLLNQQAVLEDISESGPFAFREKKPSASITVKYKFRWHFGGNPVSEQVIADPCQQPTFEMPGAGSLPRRLQVTDPKLLGPHYTFHSWDWRRDYFNRKTLKRMSEQQETSEFLFPGPKKPRVDLGVVQAVEKVSSPRKREQKPWEDSEQQSETEALSEEEEEGSIQQQLQQQLQQQKQLRRGINCLFEQLVKTQQGVHLDPSLL

SEQ ID NO: 2511 - protein, 146 aa, Alphatorquevirus sp.; identical to SEQ ID NO: 65

SEQ ID NO: 2512 - protein, 82 aa, Alphatorquevirus sp.; identical to SEQ ID NO: 66

SEQ ID NO: 2513 - DNA, 2928 bp, Betatorquevirus sp.
cgggagccgaaggtgagtgaaaccaccgtagtctaggggcaattcgggctagatcagtctggtggaacgggcaagaaacttaaaataatatgttttttacagatgaacattgaacctacaaaatggaccccaagacaacaaaaaaaagaatggcttaacttcattgtccacgttcacgactaccactgcaactgcgacaaaccactggagcatacagtttttaatatttttgaacaagaaaaacaattaagatttaacgctgaatcaacagccttaattaaaaaatgcctttctacagatggagaaggccttggagacgcagaagatggcgccgacgctttagatggtggtaccctcgaagaacttttcgccgaagattttccagaagaaactgggtaagaaaaaaaagaaaactatctaaaattaaaataagcgaatggcaacccacaaaaattataaaaagtactgtaaaaggaatatatccagcctttctctgtaatcacaaaagactaagcaataactttgtacaagctatagatgctacaactacccacttaatgccaggcggaggaggctttggaataattcaattttctttaaatgctttatatgaactatttactaaaggacaaaactggtggacaaagtcaaactgtgggttacctcttgtaagatttaatggtacaaccttaaaattttacagagctgaaaaatatgactaccttgttaacatacaaagatgttatccaatgtgttgtactgatatcatgtatatgagttgccaaccttttgtaatgatgatgactaaaggaacaatatttataccttgtttacaaagaaaacccagaggtagaccttacaaaaaaatatttgtaaaaccaccatcacaaatgaaaacagaatggtattttcaatcacaattagcaaaaactggccttattatagtaagaactgccgcatgctctttagatagaatatacacaggctcacaatcatcatctacaacaataggccttactagcctacatacaacaacatttcaattccataactggaaaaactatccaccaaccacaggatataaaccacaaaattcactgtatttttatggcacacttaatggacaatcagacccaactgcagaaccagttaaaaacttaatatttcttggtagaacaggcccacttacacaaggaaaccccataaatactaaaagcaacttaacaacttacttttctaaaaacacagaatggggaaacatatttcaccctcattatctatctggacctagtcaaatttttgttacaaacaaagacaacaacacaataaaaactacattagaacaaaatgacaacttaaacaaaaccataaaagagttaagtatttttacaccacgtacacttccacttttagtgaactgcagatacaatcccttagcagacaaaggaaaaggaaacaaaatatacttaatatcaataacatcagatgtagagacatggcacgaaccaaaaaaccaaaaactaatgagaaaagacctaccactatggattttaacatggggatggtttgactggcaattgaaattagctgaagttcacagactagaaacagaataccttacagtaattgaatccccatatataacacctactctaaaatactatgtattcttagactccagctttacaaattggccaccaagcagtccttatggaactgacttaaatgaatcagacagtcaaaactttttccctaaaaactcataccaattagaatcaattaatgaaatagcttcatgtggcccaggggtaatgaaattaggtagagaccaatcaggtgaagcacattttaactatagacttcattttaagtttggaggttgtccagcacccatggaaacaatttgtaatcccatcgaagaagaggtataccccatacccaatagtaaatgccaaacaacttcgttgcagagtccaacaacaccactctcaacctacttgtacgactttgatgaaaggagacaacaaattactgaaagagctgcaaaacgaatcaaaaaagacacggaaactgaacctgatattttccaaattacaggaacagcaatggacctcccaacatcccaccaaaaaacacaggaggagacaacatcggacgaggaagaaagcgaaacagagatacagcagcagctcctccagctcaggagaaagcagctcaaactcaagcgacgaatattaaccctactacaaatgcaagatatagaataacaaaatgtactactactataaatttgtttaatgatcctataccacctaaaaaccgccgcttaaatccccaagagttagaaacagaaataatgttagctagctggatgaaaagacctgtaagatcttttacaaatgaccctcctttttacccttggctgcccattgcaccaaaagtaccttttgtaaattttgacttgggatttaaataaacaaggcctgcaaactttcactagaggtgtccatttatataagttaaacttaaaggaacatccaccgcctccctaatacgcaggcgcacaagggggctccgcccccttaaacccccaagggggctccgcccccttacacccccaagggggctctgcccccttacaccccctaataaatattcaacaggaaaaccacataattagaattgcccctaataaatattcaacaggaaaaccacataattagaattgccgaccacaaactgtcacttacttctgcttttttacaatacttccctttttcctcattattattcattacattaattaataatcactgtaattccggggaggagacaaaccactatataactaactacagtgacgaatggctgagtttacgccgccagacggagacgggatcactacagtgactccaggctgatcttggg

SEQ ID NO: 2514 - protein, 660 aa, Betatorquevirus sp.; identical to SEQ ID NO: 1295

SEQ ID NO: 2515 - protein, 98 aa, Betatorquevirus sp.; identical to SEQ ID NO: 1296

SEQ ID NO: 2516 - protein, 61 aa, Betatorquevirus sp.; identical to SEQ ID NO: 1297

SEQ ID NO: 2517 - DNA, 2928 bp, Betatorquevirus sp.
cgggtaccgaaggtgagtgaaaccaccgaagttaaggggcttaatgggcaaaagcagtcttggcagaacgggctagtaacttaaatattttacagatgagtaaatattttactccaactttttcatcaaaaagacggctggaaacacaatggctgaatcttaatattcacatccatgatatgttctgctcctgcgactctgtactcgaccacctacaagatatcataaacagagacaaatgccgccatttcgcagacgccgctactattacagaaactggtggggcgccagaagacgacgggcttggtatcgacgccggagacctagaacacttgttttccgacgcaaacgacgtcaaagaagggtaagaaaacgcttttttaaaagacataaaaaactcaaaaaacttaaaattaatcaatggcaaccaacttctataagaaaatgtagaattgaaggatacttatgcttatttcaagcgggatatggacgctactcaagtaactatgcactgtggaaagaatcaatttttccacctcattacccaggaggagggggctggagcatacaacaattatctttgggaaatttatatactcaacataaagaacaaatgaactactggactaaatctaatactagactccctatgtgcagatatttaggatgttatgttacattgtttagacaaccatttactgactatgtttttagctactttgaaaacttacctaaaaacgtatccaaatacttttactcgtcgcaacatcccctcagacaactaaactacaaaagaaaaagagttatagcaagctataatacacaaccacacagaaaaaaaccatacaaaaaagtatttataccacctccaaaaacaatgaaaaaccaatggttttttcaacaacaattctcagattacccattattaacatttgtagcaactgcatgtagcttaacaggaatgtttggtagtaactcctggaaaaataataatgttgaactctggtgcatagacacaacattttttagaaccccacattttcaatacagaacagcaaccacaccacaatggggttatagaaaaacagaccaacaatacttatggggaatccaaaatggcttagaagactttaaaaaaaacaaatggtcacaagctatatacctaggaaacacaatgcatgagcaaacaggagaagcaatagacaacatacctcaaaatgacatacaaactaaatatccatttgcaaattggggaaacccatttcactggacatacatgacaggttctagcagagtatttttaagtaccaaatctccagctgacttaaaagatacagaaaaaaacaacccaataggaactacagcaacacttaaagacaatttatacacatttacagtaagatataatccctttaaagacaaaggttacggaaacaaactttatcttgtacccaactatgataacgacataaaaaaatgggaccctacagacgaccctgatttactatttgaaggattcccactatggataatgacatggggattagaagatatattaactagaatgggaaaatgcagaaacttatatgatgactggactgttgtaatacaaactaaatatatgtcaggctcagaaaagtattatgtacctgtaagctatgaatttgtacatggtcaaggaccatatgataccccaaacaatgaaatatctggtaatgatttcagacactggtatcctaaatttggctttcaaaaacaagccttagaaaacatagcaatgtcaggacctgcagtagccagaggtgacaatgtaaaaaacatacaagcaacaatgaaatatgatttcttttttaagtggggaggaaactcaccaccacaggaatctatctgggatccttctgaacaacccgtcactccctaccccaataacatcgacatcacaaatgaaatccttgatccgacaacaagcctccttacagaaatctacacaggggactttagacgggacttacttacagaaacagctcaaaaaagaattacacaaagcatcactaatgaacaacctttgttcacagatggaagaaagacttcaacggacctccaactcttcccacaagaagcacaaacgaaagagaccccgcaaacacaagaagagacactgctcctccagctcatccagctccaacaattcaacaatcaactccagcaccgactcagaaagttaaaggaaatttgttcggacccgtaaataaagcttatctttttcaaccaaaaattaaaaatagaagattaaagccatatgaaaaagaatgggaaatatggcaagcaaaagcatttcatagaccacccagagaaatgcttttagataccccattttacccttggatacccccaacacctataatacccaaagtaaactttgacattgtaaccaaatataataaaggcctgcattaattcacttagtggtgtctgtttattaaatataaacttatataagctaacaccacctcccaaatacgcatgcgcacaaaggggctccgcccccttaaaccccccgggggggggggggggggggggggggggggggggggggggggggggggtccctaatacgcaggcgcacaagggggctccgcccccttaaacccccgggggggtaaaccccccctaagccccccctactcattaatattcaacaggaaaaccacctaattagaattgccgaccacaaacggccaccgttaacccacaacttctgcttttgaaaagcacttctgctttttaacagacacacctccaaattaattattaaacaccatcattaccggggaggagctaaaacactataaaactaactacacttccgaatggctgagtttatgctgccagacggagcggagataaaatatctacgctgcttttggg

SEQ ID NO: 2518 - protein, 687 aa, Betatorquevirus sp.
LLLRLCTRPPTRYHKQRQMPPFRRRRYYYRNWWGARRRRAWYRRRRPRTLVFRRKRRQRRVRKRFFKRHKKLKKLKINQWQPTSIRKCRIEGYLCLFQAGYGRYSSNYALWKESIFPPHYPGGGGWSIQQLSLGNLYTQHKEQMNYWTKSNTRLPMCRYLGCYVTLFRQPFTDYVFSYFENLPKNVSKYFYSSQHPLRQLNYKRKRVIASYNTQPHRKKPYKKVFIPPPKTMKNQWFFQQQFSDYPLLTFVATACSLTGMFGSNSWKNNNVELWCIDTTFFRTPHFQYRTATTPQWGYRKTDQQYLWGIQNGLEDFKKNKWSQAIYLGNTMHEQTGEAIDNIPQNDIQTKYPFANWGNPFHWTYMTGSSRVFLSTKSPADLKDTEKNNPIGTTATLKDNLYTFTVRYNPFKDKGYGNKLYLVPNYDNDIKKWDPTDDPDLLFEGFPLWIMTWGLEDILTRMGKCRNLYDDWTVVIQTKYMSGSEKYYVPVSYEFVHGQGPYDTPNNEISGNDFRHWYPKFGFQKQALENIAMSGPAVARGDNVKNIQATMKYDFFFKWGGNSPPQESIWDPSEQPVTPYPNNIDITNEILDPTTSLLTEIYTGDFRRDLLTETAQKRITQSITNEQPLFTDGRKTSTDLQLFPQEAQTKETPQTQEETLLLQLIQLQQFNNQLQHRLRKLKEICSDP

SEQ ID NO: 2519 - protein, 102 aa, Betatorquevirus sp.
LAERASNLNILQMSKYFTPTFSSKRRLETQWLNLNIHIHDMFCSCDSVLDHLQDIINRDKCRHFADAATITETGGAPEDDGLGIDAGDLEHLFSDANDVKEG

SEQ ID NO: 2520 - protein, 74 aa, Betatorquevirus sp.
LFGPVNKAYLFQPKIKNRRLKPYEKEWEIWQAKAFHRPPREMLLDTPFYPWIPPTPIIPKVNFDIVTKYNKGLH

SEQ ID NO: 2521 - DNA, 2927 bp, Betatorquevirus sp.
cgggagccgaaggtgagtgaaaccaccgtagtctaggggcaattcgggctagatcagtctagcggaacgggcaagaaactaaatataattttattttttaggtatgagttctatctggaaacaaccaacatcatcactgagacagaaagaattagcatggagaaacattatgtttcaaacccatgatacctggtgccactgcgataatgtcgaccttcacatgctaatttgtatgaataaattcagcggattccaaaaaccagaaattgacataaggaatatacaatgcctccttaccggtcctactggcaaagaagatactggcaaagacgaagaaacagacgcggctggttttctaaatggagagctagaagatttattcaaagaagaagataccaaagaagaagaagacgtagaccctacaaggtaaaaaaacgaaaacttaaactaaaaaagactaaactaattttgaaacaattccaaccacagactattaacagatgtaaaattgttggttataaatgtttgtttcaaggtagcccagacagatctagcaaaaattatattcaatatatatacagtattgtacctcctttttggccgggagggggaggttggagcttgcttgtatttagccttgaaagcctttttgaagactataaccatttacaaaatatatggactagaagtaatgctggactaccacttgttagatttttaggatctcgttttaaattttatcaatcagcagacacagactatattgtatcttatgacagatgctggcccatggtagacacacaacacacacacgcagactcctgtccttctcgaatgatacaaaaaagacataaaatagtaattccatcactaaaaactaaacgcagacgtagaccatacaaatcaaaatttataaaaccacctactcaaatgcaaaacaaatggtactttcaaagagacatttgtaaaataccattattaatgttaacaagtactgcagtagacttaagatatcctttttgtgcacctgaagcaaaaagcaactgtataaccattagatgcttaagcacctttctttttcaaaatcctgactttgcccactatccacaaactacaggatactggccaaaaaaaggaaacgaaaatgaaaaactatatctatatgcatccccagaaagaagatcaacctttacacaaagtgacataagagctttaatacctttatttaatactaaaaattaccaaccaggtacacctataggaaacacagattatgcagacaatgaacagcattggggaaaccctttttactatgcctacattaatgatactaaaacagattcaacatatttcttatatttatcaaaagaccatagttccacaataaaaacacagaattataacccagataagttaactttcactgaagttacaggcccaacaatatatgacgttagatacaatccagaaaaagacactggagaaaaaaataaaatatacttagtaagcaatggctctactgaaactatagcaccaccagaaaacccaaattattactttgacggctttccattatatatactactatggagctggacagactggataaaaaaactaaaagacacaccagacatagacaaataccaaatattagttatagatactgatcaatttgacactactctaccacattacataccaatagacatagactttactgaaggttttgatccatacacaccaaataaagacaacccacaagtaccacatcatccaaacatttataactcactcaattggcacccaaaactactattccaacagcaaatgatagaaaaaatatgtagaagtggacctgcatgtactagaccagactataatcactatttacaagcatactgtaaatatgagttctactttaaatggggtggctgcccaaaacaattacaaaaagcatatgatccttgcttacagtccaaatggaccacagccgataacttgtctacaagacttgaaattacgaatcctcaaagaccaccagaactcgaactatactcctttgactgggaaaaagactatgttgaacaaaaagctattgaacgaatacaatactacacagaaattgatgaaacaaatatctcatctacaggaaacaagagcaacccaccacccctcaaaaaaatccaagaaaaagacacatcagcggaaaaagaagagaaaacactgtacaagcagctctgccagctcagacagcgaagactcctcctcgagctccagctccagcaactaacaaatacacaataaaaaactgtacaataaaagttaaactcttcgaagacaaaaaaccaaaaaatagactattcacaccatgggaagctcaagaagaaaaagaaatatcacaaatatttcttagaccccaaagaaaatatttctatgactttcctacctatcctatctttccaccaacccctaaaataccaaaagttaactttgacttaatgtttaaagaataaaaaataaaggccgacaaatttcacttagtggtgtcagtttatttaagttaaaactttaataaacatccgtcacctccctatcaatagggcgccaaaattcaaagggggctccgccccctttaacccccaagggggctccgccccctacaacccccaagggggctccgccccctacaacccccaagttcaacaggaaaaccacctaattagaattgccgaccacaaaccgtcacttacttccccattataacaaacttccttttttacttataaatatttataacattaattagtaatctccgtaaatccggggaggtgcttataaactatataactaactacacttccgaatggctgagtttatgccgctagacggagactgaaacacgacagtgtcttcaggctgatcttggg

SEQ ID NO: 2522 - protein, 672 aa, Betatorquevirus sp.
MPPYRSYWQRRYWQRRRNRRGWFSKWRARRFIQRRRYQRRRRRRPYKVKKRKLKLKKTKLILKQFQPQTINRCKIVGYKCLFQGSPDRSSKNYIQYIYSIVPPFWPGGGGWSLLVFSLESLFEDYNHLQNIWTRSNAGLPLVRFLGSRFKFYQSADTDYIVSYDRCWPMVDTQHTHADSCPSRMIQKRHKIVIPSLKTKRRRRPYKSKFIKPPTQMQNKWYFQRDICKIPLLMLTSTAVDLRYPFCAPEAKSNCITIRCLSTFLFQNPDFAHYPQTTGYWPKKGNENEKLYLYASPERRSTFTQSDIRALIPLFNTKNYQPGTPIGNTDYADNEQHWGNPFYYAYINDTKTDSTYFLYLSKDHSSTIKTQNYNPDKLTFTEVTGPTIYDVRYNPEKDTGEKNKIYLVSNGSTETIAPPENPNYYFDGFPLYILLWSWTDWIKKLKDTPDIDKYQILVIDTDQFDTTLPHYIPIDIDFTEGFDPYTPNKDNPQVPHHPNIYNSLNWHPKLLFQQQMIEKICRSGPACTRPDYNHYLQAYCKYEFYFKWGGCPKQLQKAYDPCLQSKWTTADNLSTRLEITNPQRPPELELYSFDWEKDYVEQKAIERIQYYTEIDETNISSTGNKSNPPPLKKIQEKDTSAEKEEKTLYKQLCQLRQRRLLLELQLQQLTNTQ

SEQ ID NO: 2523 - DNA, 2927 bp, Alphatorquevirus sp.
cagcgaggagtgcgacccttccccctggtgcaacaggggcaattcgggctcgggactggccgggccctgggcaaggctcttaaaaaagctatgtttctcggtaaactttacagaaagaagagggcactgtcactgcgcggcctgcgagctccagaggcgaaaccacctgctatgagttggaggcccccggtacacaaccccaatgggatcgagaaaaacctatgggaagcattctttcgcatgcatgcttcagcttgtggttgcggcgatcttgttggccatattactgtactggctcgacgctatggtgctcctccttgtcccccggcccccggggctcccagaccatcgctaaatcgccagctggcccttcctgcgccccccgctgatccgcaacaggccaacctacaatggcctggtggggacggtggagaagatggcgctggaggccccgccgctggcggcgccgtcgcagacgccgagtaccaagacgacgagctaaacgccctcttcaacgccgtggaagaagagtaaggaggaggcgatgggggaggcggaggtggagacgggggtacagacgcagactgagactgagacgcagacgcagacgcagaaaaaaaatagtactgactcagtggaaccccgccaaggtcagaaaatgtactataaggggcgtcctgcccatgatcctggccggcgcgggtcgctttgctttcaactacggactgcacagcgacgacataactgtccaaaaaccccttaaccagaacccccacgggggcggcatgagcactgtaacttttagcctgcaggtgctgtacgaccagcaccaaagattcctaaaccagtggtcgtaccccaacgaccaactagacctagccagatacaagggctgctcctttagcttttacagacacccagaagtagactttatagctcagtttgacaacgttccccccatgaaaatggacgaactgacagctcccaacactcaccccgctctgctgctacagagtaagaaaaaagttaaaatatatagctggaaaactagaccttggggcaaaaagaaaattactgttagaatagggccccccaagctgtttgaggacaagtggtacagccagcacgagctgtgcaaagtgccccttgtcagttggcggttaaccgcagctgacatgcggtttccgttctgctcaccacaaactgacaacccttgctacaccttccaagtattacatgaacagtactatactgtaataggcacttccgcattagacacccccacaaacagcgactactctgaatttgaaacatggctatatggcaaatgcacccactatcagacctttgccacagacacacgactggcccctcaaactacatctaaatatgcccctaatggcacatcattaggaacatctgacattaaatgggaccaaagtacatttaacacttttaaaacaaaggcagacagcaactatggctactgtacttacaaccccagtcctgatgcagttgcaaaaattaaacagtacagaaaccagagattttcctggctaacaaattacactggaaacaatcacatcaattccacatttgcaaagggcaaatacaaagaatacgagtaccacctaggctggtactcaaacatatttttaggcaacctcagacacaacctagccttcaggcctgcgtacttagatataacctacaaccccatagtagacaaaggccaaggaaacaaagtatggtttcagtacttaacaaaacccaccacagaatttaaaccagaacaggccaaatgtgtcatagaaaaccttccactttactgcgccttttttggctacgaggactacctacaaagaaccctgggaccataccaggacgtagagacagtgggcatagtgtgctttatatgcccctacacggagcccgcctgcgtcaacaaaaacgaaggcaaatctaactggggctacgtgttctacgatgttaactttggaaatggcaaaacaccagagggcctaggacaagtacacccgtactggatgcagagatggagggtgtactctcagtttcaaaaagaaaccatgaacagaatatgcagaaccggaccgttcagttacagagacgaacaccctagcataaccctgaccgccagctacaagttccactttaactgggggggcgactctatatttccacagattatcaaaaacccctgcccaagctcagccgttggccccggtccccgtagacagcctcgcgacgtacaagtcgttagcccgctcacaatgggaccggaattcatattccactcctgggactggcgacggggcttctataattcaaaaactctcaaacgaatgcttgaaaaatcaattgatgatgcagaatatccaacaggcccaaaagtgcctcgatggctacctcccgtcgacaaccaaggccgagaagaaggctacacttcggagagacagagctcggagtcctcggaagaagaagcagatcaagaagccctcaaagagatccaggaggcgccggtccagcagttcctcctccaacagtaccgacagcagcgaaaactcggaaaacagctccagttcgtcatgctacaactcaccaaaacgcagagcaatctgcacgtaaatccccggttccttggccatgcataaataaagtatacatgtttcccccagagaaaccaatgcccatacacgggtaccacgggtgggagacagagtatcaggcctgcaaagcctttaacagaccccctagaaactacctatcagacaaacccatctatccctggctgccccgctcccaacctcagtttaaagtcagttttaagcttggttttcaataaacaaggccgtgggaatttcacttgtcggtgtctacctcttaaagtcactaagcactccgagcgt

SEQ ID NO: 2524 - protein, 753 aa, Alphatorquevirus sp.
MAWWGRWRRWRWRPRRWRRRRRRRVPRRRAKRPLQRRGRRVRRRRWGRRRWRRGYRRRLRLRRRRRRRKKIVLTQWNPAKVRKCTIRGVLPMILAGAGRFAFNYGLHSDDITVQKPLNQNPHGGGMSTVTFSLQVLYDQHQRFLNQWSYPNDQLDLARYKGCSFSFYRHPEVDFIAQFDNVPPMKMDELTAPNTHPALLLQSKKKVKIYSWKTRPWGKKKITVRIGPPKLFEDKWYSQHELCKVPLVSWRLTAADMRFPFCSPQTDNPCYTFQVLHEQYYTVIGTSALDTPTNSDYSEFETWLYGKCTHYQTFATDTRLAPQTTSKYAPNGTSLGTSDIKWDQSTFNTFKTKADSNYGYCTYNPSPDAVAKIKQYRNQRFSWLTNYTGNNHINSTFAKGKYKEYEYHLGWYSNIFLGNLRHNLAFRPAYLDITYNPIVDKGQGNKVWFQYLTKPTTEFKPEQAKCVIENLPLYCAFFGYEDYLQRTLGPYQDVETVGIVCFICPYTEPACVNKNEGKSNWGYVFYDVNFGNGKTPEGLGQVHPYWMQRWRVYSQFQKETMNRICRTGPFSYRDEHPSITLTASYKFHFNWGGDSIFPQIIKNPCPSSAVGPGPRRQPRDVQVVSPLTMGPEFIFHSWDWRRGFYNSKTLKRMLEKSIDDAEYPTGPKVPRWLPPVDNQGREEGYTSERQSSESSEEEADQEALKEIQEAPVQQFLLQQYRQQRKLGKQLQFVMLQLTKTQSNLHVNPRFLGHA

SEQ ID NO: 2525 - protein, 169 aa, Alphatorquevirus sp.
LVQQGQFGLGTGRALGKALKKAMFLGKLYRKKRALSLRGLRAPEAKPPAMSWRPPVHNPNGIEKNLWEAFFRMHASACGCGDLVGHITVLARRYGAPPCPPAPGAPRPSLNRQLALPAPPADPQQANLQWPGGDGGEDGAGGPAAGGAVADAEYQDDELNALFNAVEEE

SEQ ID NO: 2526 - protein, 147 aa, Alphatorquevirus sp.
MATSRRQPRPRRRLHFGETELGVLGRRSRSRSPQRDPGGAGPAVPPPTVPTAAKTRKTAPVRHATTHQNAEQSARKSPVPWPCINKVYMFPPEKPMPIHGYHGWETEYQACKAFNRPPRNYLSDKPIYPWLPRSQPQFKVSFKLGFQ

SEQ ID NO: 2527 - DNA, 2927 bp, Betatorquevirus sp.
cgggtgctgaaggtgagtgaaaccaccgaaatcaaggggcaattcgggctagctcagtctggtggaacgggcaagacacttaaaatacattctttttacagatgagcaaacttctaaatccaaccaaactaactgaaaaacaacaaattctacaaaatgtgaacctgtttgtttccattcacgatttatcctgcaaatgcaacaacccactgaagtgcattattctacaaatctataaccaagaaaaaggattaaaatttaaaacagaagaaatacaacaatggcttactactaccgaagatggagaaacaactactggaaaagacgacgatatccttggagaagacttagacgcccttttcgcagacgacgctggcacaagcgctgggtaagaaaaagaaaactttcttaccttaaactaaaacaatggcaacctaaagtaataagaaaaatgtgtgtaaaaggaatgtactgtttatttcaagcaaaccataatttacttactagaaattatactcaatatatggactccataccgccagaaggcataccaagcggaggaggcttttcattaaatagatttactttagactgtttatttaatgaacatgaaaaagcaagaaatgtatggactaaaggaaacaaaaacttacctttaattagatacacaggatgtgaatttaaaatatacagacctaaaaacacagatgctgttgtaaaattccaaaattgctatcctatgacagccacacaactaacctacacttcaactcaaccatacattatgatgatgtctaaaggatcttctaaaataagcagactagacaacacttttaagaaaaaaccatacaaaaaatttaaatttccacctccacaagaaatgacaaacaaatggtttttttccgcagacttagctaacaaaggcttaatacttatagcagcaacagcagcaaactttgaaaacatgtatataagtccctattcagaaagcgacacaatatcagttagatttttaaacactttactttttaaaaacagacattttaataaacttccaacacacggatatcatccaaaagacaacttttggctatgggcatcagtaaatggttccactccaccaaaactaacagaaatggttttcttaggtaacacagtaacttatcaagaaggaaaagagataggcaaaatacaagcaacaggaaaaatatcaatgttactacctaaattcacaaacatagcagactggggaaacccatttcatgaaaaatacatggacaaaaaagtacaaatatactacacaacatcagcacccgctatacacttaaatgcacatggtgacaaagatgtaacaacagcaataaccaatttaggatttacaaccttagatcaagaatttttcttttatggtagatataaccccaacagagacaaaggtgaaaatacctcaatttactttttaaaaaactatcaagaagagtcaggctgggacccaccacaaaacaaaaacctaatactaacaggctttccattatggctaatagtatggggatttttagactaccatttaaaattagcagaaatcccacatatagacgaagactacataatatgtgttaaatcaacagctatagaaccacaaataccacgacaagaagcatttatatttttagacaaagaattcacacacggtagcagtgaatggcatgatgaagagggcagaacaggatgggacaacaaccactggtttcctatgtcacattaccaacacagaactatagaaaacataggaaaatcgggaccagcagtagcaaaactcggaaaatttattaatgctgaactacattgtgaatataaattttattttaaggtgggaggatgtgtaccaccaatggacaaaattacaaacccaagcttacaaccaacttatcccataccaactaacatcgctgacccaaattcgttacagagtccaagagaaccaattgaatcattcttatactgctttgatgaaaggagagggcaaattacggaaacagctgcagaacgaatcacaaaagactttaaaccttcaaaaactttgttcacagattcaattacaactggaacagacgtcccagtcctccaaacattcaaagaaacacaagactcggaggaggaggaggaaaccaaagaagcgacattgttccagcagctccagcagcagcgaatcaaacagcacaacatccgcagacgaatacaacagttattaactcaactacaacaactatcatgaaatgtgtaaaatatgttaaactgtttgaggacaaaccaaaaatacgtagactaaatacctgggaattacaagaggaaaaggaagacgccaaacactggtgtcgtcctatgcgtactttttggggggacaaacctacatatccctggtgcccacctgaaccttatgtcaactttgaacttaactatccctttaaataaacaaggcctattaattcacttgacgtgtctgcttctttaagtttaaacttaaacaaacatccatcacctccctaccaataggcgtagcaagggggctccgcccccttaaacccctagggggctccgccccctaaaacccccaagggggctccgcccccttacacccccttattaatattcaacaggaaaaccacctaattagaattgccgaccacaaaccgtcacttacttcccttttttattaaacttcctttttttataatgaatattcattaaattaattagtaatcaccgtaattccggggaggagcaaaaaaactataaaagtaactacacagacgaatggctgagtttatgccgccagacggagacggtaaaggcaacttcaccggctgagcttgggcgggtgctgaaggtgagtgaaaccaccgaaatcaaggggcaattcgggcggg

SEQ ID NO: 2528 - protein, 664 aa, Betatorquevirus sp.; identical to SEQ ID NO: 2470

SEQ ID NO: 2529 - protein, 96 aa, Betatorquevirus sp.; identical to SEQ ID NO: 2471

SEQ ID NO: 2530 - protein, 66 aa, Betatorquevirus sp.; identical to SEQ ID NO: 2472

SEQ ID NO: 2531 - DNA, 2927 bp, Alphatorquevirus sp.
cgggagccggaggtgagtttacacaccgcagtctaggggcaactcgggcacgggtctggccgggctatgggcaagattcttaaaaaattcccccgttctatatgccgccaggacaccaagtcatgccgtggtctccgccaacagctaacctccaaggcagagaaagtaactggctcaagtcagtttttctctcgcatgctactttctgcggctgtcctgaccctgttgggcatcttcatcgcgtttatactcgccagcagagcggcggaccgagtccccctggtacttccaccggggcaccggctctaccggcgcccccatcaccgaacccgccaccacggcctggtggagaactagaaggagaccgtggagacggtggaggagaaggcgctggggcctaccgagaagaagatttagaagaacttttcgcggcctcaagagacgacgatatgtgagtagaggccggcgccgccgatacaggcgcagacgaactcgggggcgacggagaaggggacgcagacgcaggcgcagaaagactcttatactcagacagtggaacccagatgttataaaaagatgctttatcacaggatggatgccactcattatctgtggcaccggacacacacaatacaactttataacacacatggacgatatcccccctaagaactactcctacgggggcaatttcaccaatgtgactttctcactagccagcctatatgaggagtacatgcaccacagaaacaagtggtcccgctcaaactatgacctagaactagtgagatacattagcaccaccataaaattctacagacactccaaagtagactacatagtaagctacaccaccacaggaccctttgaaacaaatgaactctcctacatgatgacacacccactaatgatgctcaccagcaaaaagcacataatagtgcccagcctagagaccaaacccagaggcagacgctccataaaaattaaaataaagcctccaaaacttatgctaaacaagtggtactttgcacatgacttttgtaaaataggcctctttcagatgtgggccacagccttaaacctacaaaacccctggctcagatcaggcactaacagcccagtcataggattctatgtacttaaaaaccaggtataccaaaacgccttctcaaacctagcagactcagacccactagaaaaaagaaaaacagcataccaagagttaactaaaaaaggaacaccatcatccaacacatggtataactggcaatacacatacctgaaaccaatgaaacaaatatactaccaagcagcagctgatgccacaaacaaacatgaaatgcaaggaaaaacatacaattgggaaaactacaaaaagttctttaataacgtacaagcaaagtgggaaacaatccaagaaagtacatatgagctagttaaaaacgaatatcaaaacatatacaccaccagtgtaacatacccacctgaatggacaaagagacaatacctagaacatgactgtggcatattcagtccatactttttatcaccagataactacacaccagagtggcacacagcatacacctatatcagatacaacccactactagacagaggaataggtaacagaatctgcgtgcagtggtgtagtgaaaagagcagtgactatgacccagtaaagagcaagtgcatgctacaagacatgccactttacatactctgctatggctacctagactttgtagtaaaacagctaggagtaaagtcagcatggacagacatgagagtggccattagaagcccctacacagagccaaaactaataggcagctcagacaaaactatgtatatccctatagggttaaattttatgaaaggagacatgccctgggacatgaactatatcccaatcaagtggtggtttaagtggtaccccatgtgcacacaccaggcttccgttttagaagcaatagtttcctgtagtccgtttatggttagagatcaggaagccaacagttgggacataaccataggctacaaagcaacattcttatggggcggttccccattacctccacagcccatcgacgacccctgccaaaaaaccacacacgaactacccgaccccgataaacaccctccaagaatacaaatatcagacccgcaagttctcggaccggcgacgctcttccactcgtgggacctcagacgtggcttcattaacacacgctctattaaacgagtgtcagaatacgcagacactaatgagtatttttcaacaggcgtcgagttcaaaagaccccgcctggacactccccaccacgggcagctatcaaaccaagaagaagacgccttatctatcctccgacaactccaggaggagcaggaagagagcagcacatcagaagaagaacaagcaccccaaaaagaagcgcagcaaaaagaaaagctactacaacagctcagagtccagcggcagcaccagcgagtcctcagacagggaatcaaacagctcatgggagacgtgctcagactccggaaaggagtccactggaaccccagcctataattctgcctccagaaccaataccagatcttttattccccaatactaaaaaaaaaaagaagttttccgtcttcgaatggcagacagaagctcaattagcagcctggttaaacaggcctatgagactgtatcctggggacaccccgttctacccgtggctaccccccaagcaaagtatcccccctacatgtagagtatgcttcaaaataaagcttgatgattaattttcaaggccgtgggagtttcacttgtcggtgtctacctctaaaagtcactaagcactccgagcgaagcgaggagtgcgacccccctgcccggtagcaacttcctcggggtccggcgctaagcgacccgtggg

SEQ ID NO: 2532 - protein, 658 aa, Alphatorquevirus sp.
MPLIICGTGHTQYNFITHMDDIPPKNYSYGGNFTNVTFSLASLYEEYMHHRNKWSRSNYDLELVRYISTTIKFYRHSKVDYIVSYTTTGPFETNELSYMMTHPLMMLTSKKHIIVPSLETKPRGRRSIKIKIKPPKLMLNKWYFAHDFCKIGLFQMWATALNLQNPWLRSGTNSPVIGFYVLKNQVYQNAFSNLADSDPLEKRKTAYQELTKKGTPSSNTWYNWQYTYLKPMKQIYYQAAADATNKHEMQGKTYNWENYKKFFNNVQAKWETIQESTYELVKNEYQNIYTTSVTYPPEWTKRQYLEHDCGIFSPYFLSPDNYTPEWHTAYTYIRYNPLLDRGIGNRICVQWCSEKSSDYDPVKSKCMLQDMPLYILCYGYLDFVVKQLGVKSAWTDMRVAIRSPYTEPKLIGSSDKTMYIPIGLNFMKGDMPWDMNYIPIKWWFKWYPMCTHQASVLEAIVSCSPFMVRDQEANSWDITIGYKATFLWGGSPLPPQPIDDPCQKTTHELPDPDKHPPRIQISDPQVLGPATLFHSWDLRRGFINTRSIKRVSEYADTNEYFSTGVEFKRPRLDTPHHGQLSNQEEDALSILRQLQEEQEESSTSEEEQAPQKEAQQKEKLLQQLRVQRQHQRVLRQGIKQLMGDVLRLRKGVHWNPSL

SEQ ID NO: 2533 - DNA, 2927 bp, Betatorquevirus sp.
cgggagccgaaggtgagtgcaaccaccgtagtctaggggcaattcgggcatgatcagtctggcggaatgggcaagtaacttaattttttttacagatgaactttgaaacaccgggatacaacaaaaatgaactccgtttacaacttgtaaatgccttcgttcacgttcatgatatgatctgcaaatgcaaaactcctctggaacactgcgtagcatctatttttgaacaagaaaaccatctccgcttcaacaaagaaaccaaacaacttatccaaaaatgccttggtactacagaagaccataccggtggcgccgcagacgactttatagacgccggggatttagaaacccttttcgcagaagattttggagaagaagacacagggtaaggagaaactataaaagaaaacttgctaaaattcctataaaacaatggcaaccatctaaaattcacaaaagcaaagtaaaaggactatactgtctctttaactctactagccaaagactaacaaacaattggatacaatacatggagacagtaacaccgcctcactggccagggggaggaggattttctataatgcaattttctatactggccctatttgaacaatttctaaaaagccaaaactggtggacaaaatcaaactgtaatttaccacttgtaagatatctaggttgtacttttaaattttaccgcgccgaaagctatgactaccttgtaactgttgaaagatgtttgccatttgaagctactgatttaatgtatacttcttctcacccctctattatgatgatgactaaaggtgtgatatttgtaccatgtagaaaaaacacattttacaaaaaaccttataaaaaagtacatataaaaccaccatcacaaatgctaacaaaatggcacttccaaaaagacctagctaaatttcctttagtagtaataagatccacagcagcctcatttgacagaatatatacatctagcgctgcaacaaacacaacaataggcttcacatcacttaatttatacagtttccaaaatcacaattggaatacaccacccacatcaggataccaacctcaagacacccaatggctttatggcataaaacaacctagcaccaccacagatcccttacagaacccaattactacacttatatacttaggcggaacaaaaaaaaaacaactaggacaagaaataactaacgaaaatatacagacatacttttccactccagatctctggggaaatatattttgtccagaatatttaaaaggaccatacccagtacttgtaaccacatctgctcctgccacagtaatgcagaaactaacatccttactaccacattcagataaaaaaataagcgatgcaggcatatttacagtaaaaacaactccaaacctaataaattgtagatacaatccatttaatgataaaggagtaggaaatatgatatatttactaagcaacagagacaaccaccgctgggaagttccagacgacccaaaactaacaagacaaaatttaccactatggctgctaccattcgggttcttagattggcaaaaaaaacaaaaatttgtgagctccatagatgtatcttacctgacagttattgtatgccctactatagaacctccaaactctaaacatatttacctgcctcttgatgacacatttctaaatggcacaagcccatacacaaaagacttatttgataacgatctacaatactggtatccaaaagtaagatttcaggtagattccattaacacaataggcacttgcggaccagccattataaaactaccaaaacaacaaagttgtgaagctcactttcaatataattttcagtttaaatttggcggctgtccaccacccatggaaaccatttgcaatccaacagaagaggctaaatatcccgtgcccgatactaaatatgaaacaacttcgttgcagaatccagaaaccccaatccacacatatttatacaacttcgatgaaagaaggggtctccttacaaacaaagctgcaaaaagaatcaaaaaagactcggactctgaaacaactgctttcccgtttacaggagcagccacagacctcccagcaccccaccaagaaatggagatcagcgaggaaagcacatcggaagaagaggaggagaacctacacctccagctccgacacctccgaagaaaacaaaagttactccgacgacgaatcctccagctgttagacacacaaaatttagaataacaaaatctgatgttaaaattgatttatttggagactctgtaactaaaaacagacgcatgactcctgatgaatactcctttgaattatttttagcacgcatgtttaacagacctccttgtcagtttgtaaaagacagacctttttacccttatgtgcctactcctcctaacaaatatatggtaaactttgacttaaaccccccagaataaatttcaaggccagcaaattttcactctcggtgtccatttatttaagtaaaaacttatataaacatccaccactctcccaaatacgcaggcgcagcaagggggctccgcccccttacacccccgaagggggctccgcccccttaaacccccaaagggggctccgcccccttacacccccgacaggaaaccacaaaatttgcattgccgaccacaaaccgtctcttacttccccattctataatacttccctttttgcttatgaatattcattaaattaattattaaacaccgtcacaacaaggaggagcttaccaactataaaactaagtacacttccgaatggctgagtttatgccgccagacggagatataaaactaagtacacttccgaatggctgagtttatgccgccagacggagacggcaacaggtcactgactgccggctgatcaaggg

SEQ ID NO: 2534 - protein, 661 aa, Betatorquevirus sp.
MPWYYRRPYRWRRRRLYRRRGFRNPFRRRFWRRRHRVRRNYKRKLAKIPIKQWQPSKIHKSKVKGLYCLFNSTSQRLTNNWIQYMETVTPPHWPGGGGFSIMQFSILALFEQFLKSQNWWTKSNCNLPLVRYLGCTFKFYRAESYDYLVTVERCLPFEATDLMYTSSHPSIMMMTKGVIFVPCRKNTFYKKPYKKVHIKPPSQMLTKWHFQKDLAKFPLVVIRSTAASFDRIYTSSAATNTTIGFTSLNLYSFQNHNWNTPPTSGYQPQDTQWLYGIKQPSTTTDPLQNPITTLIYLGGTKKKQLGQEITNENIQTYFSTPDLWGNIFCPEYLKGPYPVLVTTSAPATVMQKLTSLLPHSDKKISDAGIFTVKTTPNLINCRYNPFNDKGVGNMIYLLSNRDNHRWEVPDDPKLTRQNLPLWLLPFGFLDWQKKQKFVSSIDVSYLTVIVCPTIEPPNSKHIYLPLDDTFLNGTSPYTKDLFDNDLQYWYPKVRFQVDSINTIGTCGPAIIKLPKQQSCEAHFQYNFQFKFGGCPPPMETICNPTEEAKYPVPDTKYETTSLQNPETPIHTYLYNFDERRGLLTNKAAKRIKKDSDSETTAFPFTGAATDLPAPHQEMEISEESTSEEEEENLHLQLRHLRRKQKLLRRRILQLLDTQNLE

SEQ ID NO: 2535 - protein, 97 aa, Betatorquevirus sp.
MNFETPGYNKNELRLQLVNAFVHVHDMICKCKTPLEHCVASIFEQENHLRFNKETKQLIQKCLGTTEDHTGGAADDFIDAGDLETLFAEDFGEEDTG

SEQ ID NO: 2536 - protein, 50 aa, Betatorquevirus sp.
MTPDEYSFELFLARMFNRPPCQFVKDRPFYPYVPTPPNKYMVNFDLNPPE

SEQ ID NO: 2537 - DNA, 2926 bp, Gammatorquevirus sp.
cgggtgcccgaggtgagtgaaaccaccgaggtcaaggggcaattcgggctagggcagtctagcggaacgggcaagaaacttaaattattttattttacagatgcaaaacatctccagctctgacttttttatgccaacaccatacaaccaagagacgaaaacacaaatatggatgtctcaaattgctgactctcatgataatatctgccattgctgtcatccatttgctcaccttattgcttccatttttcctcctggccacaaagacagggagcttactattaatcaaatactcgcaagggattacacagataaatgcctttctggtggaaaagaagacgccgcccctggtttgggcgctaccggtaccggaggaggtttcaaaccaaaagaagaaaatacagaagaagaaaatttaccagaagaagaaatagaagggctcctcgccgccgccgccgcacaagacgccacaaggtaagaagaaaactcaaaaaaattaaaatacagcagtggcaaccagatagcataagaaaatgcaaaataaagggattaagtactattgtgcttggggcatcaggaaggcaatctagatgctacacaaacacatatggagaatatgttcaaccaaaagccccagcaggaggcggttttggcagtgaacttattactcttaaatggctatacaatgaatacctagctcacaggaatatttggacaacttctaatgaatacaaagacttacttagatacacaggagctacaataaccctttttagacataaatacgtagactttataattacctatgaattacaaccaccttttgacttaaacaaatacacatatgctgaactgcaaccccacaacatgctacttagacgcagaaaaaaaatactactcagccaagaatcaaatccaaaaggcaaacttaaagttaaactaaaaattaaacctcctaaacaaatgataactaaatggttttttgctaaagacttttgtccctttggcttagtaaaaatatcagcttcagcagctaattttaactacccaaatttaccacctggaggacaaagcaacatactaacattatacagcctaaacacttttttttaccacaacagtgactgggcaaaaacacaacaggacggatacaaaaacataacaacacaaaaatatccacttttttttaaatacaaagacaaaacaggcaataaattctataaatatgaaccagacgatgcaaacatacttagaaaatacaataatgacaaatatttaagaagcattagctatgaagatggcatgtttaatccaaaaattttactagcatttgaagtatgggcaggaggtactcaaactggcactgaagaccctaaaggaagtgaaaagctagccacactaccaatactaccacttagatataatccagaagtggactcaggctttgacaatatagtttatttaacaagcatttttaaaggctcatttgacaaacctacagttacacctgactatattttcacaggtataccactatggatggttttttttggatatgcagacttcttactgcaaaaatccaatgacaaaggcttattaacaacacatatgtttgttgtaaaaagcccagcacttcaccctatctcacaaaacacagaacaaaaataccatccaataattaacttagactttgcatttggcaaactaccatatgatgaatacatatcacaacaaataaaagctaaatggtatcctacagcagaacaacaagacacaattataaatgacatagtaaccacaggaccatatgtgccaaaattttacacaaatcaaccagtaactacatgggaacttgactatagatattccttttattttaagtggggaggcccagaagttacagatccaaaaattgaagacccctgcacaagacctacataccctgtgcccgataagctgttcaaaacagtacaaattaaaaacccagagaaacttgacacaaacaccattttccatgagtgggactacagaaggggcattattacacagtcagctcttaaaagaatgtcagcgcacctcgaaattgatacagacttcgaaaatgatattacagaaacaccaagaaaaagacagaaagtcacaaaagagatcccatgcatcgagaacaagcaaaaagaaatccaaacatgtctccaggaactctgcagcgaaaattccttccaagaaacaccagaggacctacagcagtacatccagcaacagcagcagcaacagcacaagctcaaaagaaacctcatcttactcctcactcacctgaaaaaagaacagagatgcctacagctacaaacaggaatgctagattaactccttttcaaaaaggctttgaaatggacacagaacatgagttagcacaagcatttaaaagaccccctagaatgtttaaagaagacacccccttctatccatggcttcctaaacttgaaccccttgtaaactttcaccttaattttaagttctaggccgacactgttcacttagcggagtctgtttatataagtttgcaccccaaaaaaattgtaaaataaaaaaaaaaaaaaaaaataaaaaattgcaaaaattcggcgctcgcgcgcgctgcgcgcgccccacaccccccgcggggggggcagagcccccccccgcaccccccctacgtcacaggccacgcccccgacgccatcttgggtgcggcagggcgggggctaaaatggcgggacccaatcattttatacttttactttccaattaaaacctgccacgtcacaaaaaaggggtggagactttaaaactatataacaaactgaggtgacgaatggctgagtttaccccgctagacggtgcagggaccggatcgagcgcagcgaggaggtccccggctgcccatggg

SEQ ID NO: 2538 - protein, 682 aa, Gammatorquevirus sp.
MPFWWKRRRRPWFGRYRYRRRFQTKRRKYRRRKFTRRRNRRAPRRRRRTRRHKVRRKLKKIKIQQWQPDSIRKCKIKGLSTIVLGASGRQSRCYTNTYGEYVQPKAPAGGGFGSELITLKWLYNEYLAHRNIWTTSNEYKDLLRYTGATITLFRHKYVDFIITYELQPPFDLNKYTYAELQPHNMLLRRRKKILLSQESNPKGKLKVKLKIKPPKQMITKWFFAKDFCPFGLVKISASAANFNYPNLPPGGQSNILTLYSLNTFFYHNSDWAKTQQDGYKNITTQKYPLFFKYKDKTGNKFYKYEPDDANILRKYNNDKYLRSISYEDGMFNPKILLAFEVWAGGTQTGTEDPKGSEKLATLPILPLRYNPEVDSGFDNIVYLTSIFKGSFDKPTVTPDYIFTGIPLWMVFFGYADFLLQKSNDKGLLTTHMFVVKSPALHPISQNTEQKYHPIINLDFAFGKLPYDEYISQQIKAKWYPTAEQQDTIINDIVTTGPYVPKFYTNQPVTTWELDYRYSFYFKWGGPEVTDPKIEDPCTRPTYPVPDKLFKTVQIKNPEKLDTNTIFHEWDYRRGIITQSALKRMSAHLEIDTDFENDITETPRKRQKVTKEIPCIENKQKEIQTCLQELCSENSFQETPEDLQQYIQQQQQQQHKLKRNLILLLTHLKKEQRCLQLQTGMLD

SEQ ID NO: 2539 - protein, 125 aa, Gammatorquevirus sp.; identical to SEQ ID NO: 2438

SEQ ID NO: 2540 - protein, 121 aa, Gammatorquevirus sp.; identical to SEQ ID NO: 2439

SEQ ID NO: 2541 - DNA, 2926 bp, Betatorquevirus sp.
cgggtgctgaaggtgagtgaaaccaccgaaatcaaggggcaattcgggctagctcagtctggtggaacgggcaagaaacttaaactattattttttacagatgagcaaacttctaaatcctgccaaactaacagaaaaacaacaaattctacaaaatgtaaacgcttgggtcgccattcacgacctgtcctgcaaatgcaataacccactaaagtgcattatacttcaaatttaccaccaagaaaaaggattacaatttaaacaagaagaaattcaacaatggcttactactaccgccgctggagaaataactactggaaacgaagacaatttcgatggagaagacctagacgctcttttcgcagacgacgctggcacaagcgctgggtaagaaaaaaaaaactttcttatttaaaactaaaacaatggcaaccaaaagttataagaaaactttgtataaaaggaatgtactgtttatttcaagctaaccataacctccttacaagaaactatactcaatatatggactcaattccaccagaaggaataccgtccggaggaggcttttctttaaatagatttacattagactgtttatacaatgaacatgaaaaagccagaaatgtatggactaaaggaaacaaaaacctacctttaataagatatactggctgtgaatttaaaatatatagacctaaaaatacagacgctgtagtaaaattccaaaactgctaccctatgactgcaacacaattaacttatacatccacacaaccatacataatgatgatgtcaaaaggctcttctaaaataagcagacttgacaataccttcaaaaaaaaaccatataaaaaatttaaatttcccccaccacaagaaatgacaaacaaatggtttttctcacaagacctagcaaacaaaggactaatacttatagcagcaacagcagcaaactttgaaaacatgtatataagcccatatgcagaaagcgacaccattactgtaagatttttaaatactttactatttaaaaacagacactttaataaactccctacaaatggctaccatccaaaagacaacttttggctatgggcaaccgtaaacggtgaaacacaacctaaattaacagacatggtttttctaggaaacacagttacatatcaagaaggcaaagatataggcaaaatacatccccagggaaacatttctgaattacttcctaaattcacaaacatatcagactggggaaacccctttcatgaaaaatacatggacaaaaaagtaagaatatactatactacagcaccaccagcaattcacttaaattcacataaaaacaaaccagtaacaaccttaattaaagagataggatttaatacattagatcaagaattttttttttatggaagatataacccaaatagagacaaaggagaagacacatcaatatactttctaaaaaactaccaagaagaatcaggttggaaaccacctactaacaaaaatctaatattaacaggatttccactttggctaatagtatggggatttttagattaccacctaaaactagcagaaattccacacatagatgaagactacataatatgtattcaatcaaaagcaatagaaccacaaataccaccacaagaagcctacatacttttagataaagaattcacacatggagatagtgaatggcatgacggggaaggtagaacacaatgggacaacaatcactggcttcccatgtcacactatcaacacagaactatagaaaatattggtaaatgtggaccagcaacagcaaaattaggaaaatttgtaaatgcagaattacattgtgaatataaattttattttaaggtgggcggatgtgtaccaccaatggacaaaattacaaacccaagcttccaaccaacttatcccataccaactaacatcgctgacccaaattcgttacagagtccaagagaaccaattgaaacattcctctactgctttgatgaaaggagagggcaaattactgaaacagctgcacaacgaatcacaaaagacattaaacctacaaaaactttgttcacagattcaattacaactggaacagacgtcccagtcctccaaacattccaagaaacacaagactcggaggaggaggaggaaaccaaagaagcgacattgttccagcagctccagcagcagcgaatcaaacagcacaatatccgcagacgaatacaacagttattaactcaactacaacaactatcatgaaatgtgtaaaacatgttaaactttttgatgataaacccaaagtccgcagactaaacaattgggaacttcaagaagaaaaagaggacgctaaacactggtgcagaccaatgcgtaccttttggggagacccccctatttacccatggtgcccccctgaaccatatgtaaactttaaactaaactatcccttttaataaacaaggcccattaattcacttctggtgtccgtttatttaagtttaaacttatacaaacatccatcacctcccaatcaataggcgtagcaagggggctccgcccccttaaacccccagggggctccgccccctataacccccaagggggctccgcccccttaaaccccctaataaatattcaacaggaaaaccacctaattagaattgccgaccacaaaccgtcacttattcaacaggaaaaccacctaattagaattgccgaccacaaaccgtcacttacttctgctttttataacacttccttttttgctcataaatattcattaaattaattattaatcaccgtaaatccggggaggagcatatactgtatataactaagtacacttccgaatggctgagtttatgccgccagacggagacggtacagaacaactgaaccggctgagcttggg

SEQ ID NO: 2542 - protein, 664 aa, Betatorquevirus sp.
MAYYYRRWRNNYWKRRQFRWRRPRRSFRRRRWHKRWVRKKKLSYLKLKQWQPKVIRKLCIKGMYCLFQANHNLLTRNYTQYMDSIPPEGIPSGGGFSLNRFTLDCLYNEHEKARNVWTKGNKNLPLIRYTGCEFKIYRPKNTDAVVKFQNCYPMTATQLTYTSTQPYIMMMSKGSSKISRLDNTFKKKPYKKFKFPPPQEMTNKWFFSQDLANKGLILIAATAANFENMYISPYAESDTITVRFLNTLLFKNRHFNKLPTNGYHPKDNFWLWATVNGETQPKLTDMVFLGNTVTYQEGKDIGKIHPQGNISELLPKFTNISDWGNPFHEKYMDKKVRIYYTTAPPAIHLNSHKNKPVTTLIKEIGFNTLDQEFFFYGRYNPNRDKGEDTSIYFLKNYQEESGWKPPTNKNLILTGFPLWLIVWGFLDYHLKLAEIPHIDEDYIICIQSKAIEPQIPPQEAYILLDKEFTHGDSEWHDGEGRTQWDNNHWLPMSHYQHRTIENIGKCGPATAKLGKFVNAELHCEYKFYFKVGGCVPPMDKITNPSFQPTYPIPTNIADPNSLQSPREPIETFLYCFDERRGQITETAAQRITKDIKPTKTLFTDSITTGTDVPVLQTFQETQDSEEEEETKEATLFQQLQQQRIKQHNIRRRIQQLLTQLQQLS

SEQ ID NO: 2543 - protein, 110 aa, Betatorquevirus sp.
LVERARNLNYYFLQMSKLLNPAKLTEKQQILQNVNAWVAIHDLSCKCNNPLKCIILQIYHQEKGLQFKQEEIQQWLTTTAAGEITTGNEDNFDGEDLDALFADDAGTSAG

SEQ ID NO: 2544 - protein, 65 aa, Betatorquevirus sp.
MKCVKHVKLFDDKPKVRRLNNWELQEEKEDAKHWCRPMRTFWGDPPIYPWCPPEPYVNFKLNYPF

SEQ ID NO: 2545 - DNA, 2926 bp, Alphatorquevirus sp.
tcgggactggccgggctatgggcaaggctcttaaaaaagcatgtttctcggcagggtttggagaaagaaaaggtcgctgccactgcccgagctgcgaactcctgcgaaaaaaccatctctaatgagctggtcccagcctctgcacaatgtcaccacccgcgagggcttcttttacgcggggtgtaagcagcttcataactgcttttgtggttgtgatgattttattaatcatcttcttcgcatccagacccagcagggtccctctccctcgcggcccttcactcctccgtcaacaccacgccctgtaatccgtagagccctgccggcaccggcggctccggacgcaccggcgccatggcgtggagctggtggtggacccgccgccgacgcagaccgtggacccggaggagatggaggagactacgcacccggagacctcgacgacctgtacgccgccgtcgacgccgaaaacgcagagtaaggaggagacggtggggaaggagacgagggcgacgaacattttacaaacgcaggtttagaaagagacgcaggcgacgaaaaaagctagttcttactcagtggaaccctcagactattagagcatgttctataaggggcacagtatgcctagtaatgtgtggacacacaaaagccagcagaaactatgctctgcactcagaagactatgtgccacaactgcatgctatgggagggtcttttagtactactacctggagcctaaaagccctatatgatgagcaccagaaattccacaacaggtggtcctaccccaacactcagctagacctagccagatacagggggtgtcgctggtggttttacagagaccccaaggtagactacatagtcacctactacacagtacctccatttaaaataaacaaatacactagtccaatgctacacccaggcatgatgatgcagtacaaaaagaaaatattagtacccagctatcaaacaaaacctaaaggcaaatccaaaattagtatttttattaagcccccagttctttttgaagacaagtggtacactcagcaagacttgtgtcccgttaatcttatgtcacttgcggttagcgcagcttcctttatacatccgttctgcccaccagaaagtgacaacatgtgtattacattccaagttttgaaacaattttattacacacaaatgagtgtaaccgcaatgaacggcacaaaagccacagacgaagacgaagccattctttcaaaactttactcaactgccagtttttggcagtctttacacacacagtctttaatttctactactcaaaaaactgctgtattttctgaccacgataagtttccaaacgtatcaaactggttaacaaaagacatagatgcaacaacatttaaaactggaaacaatagcatatatggccaagtaaattacagaccaaatacagaaaagatgacacaaatactacaatggtactttaaacaagaatcactaccaaacgatcctcacgggcaatacggaaaaccagtatattatccagccagctatcacataggaaagtacagtcccatatttttaagcccatacagaaccaatctccaatttgaaacagcataccaagacaccacatacaaccccaacacagacaaaggtttaggaaacaaaatgtggatacaatcagtaactaaaaaaaacacaaacctagactcacaatgcaaatgtttacttgaagacatacctttgtgggccatggctacaggctatggagaattttgtgagtctgaacttaactctgaagtgtggaacctatacattgtttgcattatatgtccctacaccaagcctcaactatattcaaaaacaaacccaacacagggctgggtattctatgatacactatttggagatggcaaaatgcccaccgggtcaggcctagtacccgtgtggctacaaagcaggtggtaccccagactagtgttccaacaacaagtactacacgatatttacctcacaggaccctttagttacaaagatgacctaaagagctttactataaatgccaggtacaaattcaaattcttatggggcggcactataatccccgaacaggttattaaaaacccgtgcaaagagcaagactcgccattcacctttaccggtagacagcctcgcgacctacaaattgctgacccacaaaccatgggcccacaatgggttttccacacctgggactggcgacgaggactatttggtgaaaatgctctcaaaagagtgtcagaacaaccaagcaatgatgcagactattatgctccaccaaaaaaacctagactattccctccaacagacctccaagagcaagaaagaggctcagatttcacactgcaggaactcaggatcctctcggagagggcgccgtcgcaaacaagcgaagaagaggacccgcaagaggagcaccagctccagcagcaagagctccagctccgactccagcagcagttcagaatcaggcagcaactgcagcacctattcgtacaagtcctcaaaacccaagcaggtctccatataaacccattatttttaaaccctgcataaaccaggtgtacatgtttcctcctaacacccctaaacccattaccactgcacaagattggaaagaggagtatgaatgctgtaaatactgggatagaccccccagaaagtaccttacagaccgccccttctacccctggatgcccaaggagccccctcagtgtcgtgtcagctttaaacttggcttccaataaaatttcaaggcctttcaaatttcacttgtcggtgtttacctctataagtcactaagcactccgagcgtaagcgaggagtgcgaccctttcccctgactcaacttcttcggagccgcgcgctacgccttcggctgcgcgcggca

SEQ ID NO: 2546 - protein, 745 aa, Alphatorquevirus sp.
MAWSWWWTRRRRRPWTRRRWRRLRTRRPRRPVRRRRRRKRRVRRRRWGRRRGRRTFYKRRFRKRRRRRKKLVLTQWNPQTIRACSIRGTVCLVMCGHTKASRNYALHSEDYVPQLHAMGGSFSTTTWSLKALYDEHQKFHNRWSYPNTQLDLARYRGCRWWFYRDPKVDYIVTYYTVPPFKINKYTSPMLHPGMMMQYKKKILVPSYQTKPKGKSKISIFIKPPVLFEDKWYTQQDLCPVNLMSLAVSAASFIHPFCPPESDNMCITFQVLKQFYYTQMSVTAMNGTKATDEDEAILSKLYSTASFWQSLHTQSLISTTQKTAVFSDHDKFPNVSNWLTKDIDATTFKTGNNSIYGQVNYRPNTEKMTQILQWYFKQESLPNDPHGQYGKPVYYPASYHIGKYSPIFLSPYRTNLQFETAYQDTTYNPNTDKGLGNKMWIQSVTKKNTNLDSQCKCLLEDIPLWAMATGYGEFCESELNSEVWNLYIVCIICPYTKPQLYSKTNPTQGWVFYDTLFGDGKMPTGSGLVPVWLQSRWYPRLVFQQQVLHDIYLTGPFSYKDDLKSFTINARYKFKFLWGGTIIPEQVIKNPCKEQDSPFTFTGRQPRDLQIADPQTMGPQWVFHTWDWRRGLFGENALKRVSEQPSNDADYYAPPKKPRLFPPTDLQEQERGSDFTLQELRILSERAPSQTSEEEDPQEEHQLQQQELQLRLQQQFRIRQQLQHLFVQVLKTQAGLHINPLFLNPA

SEQ ID NO: 2547 - protein, 146 aa, Alphatorquevirus sp.; identical to SEQ ID NO: 834

SEQ ID NO: 2548 - protein, 59 aa, Alphatorquevirus sp.
MFPPNTPKPITTAQDWKEEYECCKYWDRPPRKYLTDRPFYPWMPKEPPQCRVSFKLGFQ

SEQ ID NO: 2549 - DNA, 2926 bp, Betatorquevirus sp.
ggcgggtgctgaggtgagtgaaaccaccgaatcaaggggcaattcgggctagagcagtctagcggaacgggcaagtaacttaaattattttacaaatgtccgactatgtggatccaaaatactctcctagacaacttaacttacaaatagttaattgctacgttggaatccatgatactcactgccactgcaaagagcctctgaaacatattattaaacaaatagaacaacaagaaccttctatcaaacaatggcgagatacttctaccgccgctactggaaaccaagatggagaagacgcactagacgcttttggacctggagaactagaaaagcttttcgcacaagacgacgaagaaaacgcagggtaagaagaaaactttctactttacatttaaaacaatggcaaccaagccatattagaaaactaactataaaaggcattttttgcttatttcaaatgcacaaagcccgctacaaccataactataaccaatatgaaactgtgactccaccacaaggactaccaaatgaaggaggctttactattttaagatttaacttaatgtcactgtatgaacaacatgaaaaagctcataatgtatggactataagcaatagtaactttccactgtttagatatacaggctgtaaaataagagtatacagaccagaatatactgatttagtcttaaaatttcaaacatgctatcctatgtgttgttctaaactaatgtacactggaacacaaccaagtataatgatgatgacacacggggctaaaagaattagatgcaaaaaaaatgcacctaattgtaaaccatacagaacatacaaactaaaacccccacaacaaatgacaaacagatggtattttcaacatgatcaatcacaaacaggtttcctattaatacaagcagcagcagcaagctttgaccaatactatgcatcaataaatgcagacagctcctcaataacattaagaacacttaatacaaaaatattccacaacctaaactttgcaaactttcctttaaaagaaggctacagccctaacccaaaaatgcacttatgggctacaaacggatcaataccagcacaaatagaagaccttatatggttaggacaatctaaaaaatataattggggaaaacaactaaaacaatttaaaacaggaagttcaacaaactatatagaaaacgcatacaaaaaatacatgtcagacccaaataactggggaaacatctttcacaaaagtcacttaaataaatcaaacacaatctggtttactcaaaaaccaccatcacaaatatttacagaagaaatactaaaaaaaacacaatttaatcaaaaattaagtgaatttaaaatagacaaccaattagtgtttcatgaacttacacaagaacttttctttgacataagatacaatccttttaaagacaaaggatacaataacaatatatacataaaacccaattggcaagacaacgaagatttagacccactaccagacacagacttagaaaatccaggctttccaaactggttaagctgcttcggatttgaagactacttaaaaaaattaggtactaaatcacaattaaacacacactatatgatggttcacaaaagcgaatacttcgaaccaaaacttgactactacatatttttagactccttcttctttaagggagacagtgatgattacgaaggcagaatagaatgggaaaatcaaaactggtatcctatgataacacatcaacaagaaatgctaaatgtattagcactaagtggacctggtacacctaaaatgggagacattaaactggcagaagcaaaaatagactattcattcttttttaagattggaggatgtgcaccaccagttcaaaaggttaaggaccctacaacacaaccaacttatgttacaccaaataacatccttgacacaaattcgttacagaatccagaacaaccaattgagagcttcttgtaccaattcgattggagacgagaccaaattactgaaacagctgcaaaacgaatcacaaaagacttctcaactgaaaaatatctattttcagatgcagcaacaactggaacagcagtcccactcatccaaacacaagaaaaagaactgctctcgtcggaggaggaggaaaccaaaacggagacactgctccagcagctcctcgtccacagaaacaagcaaaaacagctccgactccgaatcaagcaactaatgcaacaacttcaaacatcagaataagataccaaaaaattaaaataaacctatttggtgaaaataaacaacaaaaccgccgcatgactccaaaagaaaagcaagaagaaatacaagaagctagcatatggggacattatgttagagactatatcttagataggcctttttacaaagatatgcctataaccccaattgtaccccgcctttgctttgacttaaactataaagaataaggcctgcaaactttccttgtcggtgtccatttattataattaaaacttaaataaacatccaccactctcccaaatacgcaggcgcactagggggctccgccccctaaaacccccaagggggctccgccccctttaacccccaagggggctacgcccccttacaccccctaataaatattcaacaggaaaaccacataattagaattcccctaataaatattcaacaggaaaaccacataattagaattgccgaccacaaacggtcacttacttctgctttttaacaacacttcctcttttactcatgaatatttaacaaattaattaataaacaccgtatatcctgggtggagctaataacctataaaactaactacacttccgaatggctgagtttatgccgctagacggaggacgcacaggacactgctgcgaactgctcttg

SEQ ID NO: 2550 - protein, 673 aa, Betatorquevirus sp.
MARYFYRRYWKPRWRRRTRRFWTWRTRKAFRTRRRRKRRVRRKLSTLHLKQWQPSHIRKLTIKGIFCLFQMHKARYNHNYNQYETVTPPQGLPNEGGFTILRFNLMSLYEQHEKAHNVWTISNSNFPLFRYTGCKIRVYRPEYTDLVLKFQTCYPMCCSKLMYTGTQPSIMMMTHGAKRIRCKKNAPNCKPYRTYKLKPPQQMTNRWYFQHDQSQTGFLLIQAAAASFDQYYASINADSSSITLRTLNTKIFHNLNFANFPLKEGYSPNPKMHLWATNGSIPAQIEDLIWLGQSKKYNWGKQLKQFKTGSSTNYIENAYKKYMSDPNNWGNIFHKSHLNKSNTIWFTQKPPSQIFTEEILKKTQFNQKLSEFKIDNQLVFHELTQELFFDIRYNPFKDKGYNNNIYIKPNWQDNEDLDPLPDTDLENPGFPNWLSCFGFEDYLKKLGTKSQLNTHYMMVHKSEYFEPKLDYYIFLDSFFFKGDSDDYEGRIEWENQNWYPMITHQQEMLNVLALSGPGTPKMGDIKLAEAKIDYSFFFKIGGCAPPVQKVKDPTTQPTYVTPNNILDTNSLQNPEQPIESFLYQFDWRRDQITETAAKRITKDFSTEKYLFSDAATTGTAVPLIQTQEKELLSSEEEETKTETLLQQLLVHRNKQKQLRLRIKQLMQQLQTSE

SEQ ID NO: 2551 - protein, 91 aa, Betatorquevirus sp.
MSDYVDPKYSPRQLNLQIVNCYVGIHDTHCHCKEPLKHIIKQIEQQEPSIKQWRDTSTAATGNQDGEDALDAFGPGELEKLFAQDDEENAG

SEQ ID NO: 2552 - DNA, 2926 bp, Betatorquevirus sp.
ggcgggtgctgaggtgagtgaaaccaccgaatcaaggggcaattcgggctagagcagtctagcggaacgggcaagtaacttaaattattttacagatgtccgactatgtggatccaaaatactctcctagacaacttaacttacaaatagttaattgctacgttggaatccatgatactcactgccactgcaaagagcctctgaaacatattattaaacaaatagaacaacaagaaccttctatcaaacaatggcgagatacttctaccgccgctactggaaaccaagatggagaagacgcactagacgcttttggacctggagaactagaaaagcttttcgcacaagacgacgaagaaaacgcagggtaagaagaaaactttctactttacatttaaaacaatggcaaccaagccatattagaaaactaactataaaaggcattttttgcttatttcaaatgcacaaagcccgctacaaccataactataaccaatatgaaactgtgactccaccacaaggactaccaaatggaggaggctttactattttaagatttaacttaatgtcactgtatgaacaacatgaaaaagctcataatgtatggactataagcaatagtaactttccactgtttagatatacaggctgtaaaataagagtatacagaccagaatatactgatttagtcttaaaatttcaaacatgctatcctatgtgttgttctaaactaatgtacactggaacacaaccaagtataatgatgatgacacacggggctaaaagaattagatgcaaaaaaaatgcacctaattgtaaaccatacagaacatacaaactaaaacccccacaacaaatgacaaacagatggtattttcaacatgatcaatcacaaacaggtttcctattaatacaagcagcagcagcaagctttgaccaatactatgcatcaataaatgcagacagctcctcaataacattaagaacacttaatacaaaaatattccacaacctaaactttgcaaactttcctttaaaagaaggctacagccctaacccaaaaatgcacttatgggctacaaacggatcaataccagcacaaatagaagaccttatatggttaggacaatctaaaaaatataattggggaaaacaactaaaacaatttaaaacaggaagttcaacaaactatatagaaaacgcatacaaaaaatacatgtcagacccaaataactggggaaacatctttcacaaaagtcacttaaataaatcaaacacaatctggtttactcaaaaaccaccatcacaaatatttacagaagaaatactaaaaaaaacacaatttaatcaaaaattaagtgaatttaaaatagacaaccaattagtgtttcatgaacttacacaagaacttttctttgacataagatacaatccttttaaagacaaaggatacaataacaatatatacataaaacccaattggcaagacaacgaagatttagacccactaccagacacagacttagaaaatccaggctttccaaactggttaagctgcttcggatttaaagactacttaaaaaaattaggtactaaatcacaattaaacacacactatatgatggttcacaaaagcgaatacttcgaaccaaaacttgactactacatatttttagactccttcttctttaagggagacagtgatgattacgaaggcagaatagaatgggaaaatcaaaactggtatcctatgataacacatcaacaagaaatgctaaatgtattagcactaagtggacctggtacacctaaaatgggagacattaaactggcagaagcaaaaatagactattcattcttttttaagattggaggatgtgcaccaccagttcaaaaggttaaggaccctacaacacaaccaacttatgttacaccaaataacatccttgacacaaattcgttacagaatccagaacaaccaattgagagcttcttgtaccaattcgattggagacgagaccaaattactgaaacagctgcaaaacgaatcacaaaagacttctcaactgaaaaatatctattttcagatgcagcaacaactggaacagcagtcccactcatccaaacacaagaaaaagaactgctctcgtcggaggaggaggaaaccaaaacggagacactgctccagcagctcctcgtccacagaaacaagcaaaaacagctccgactccgaatcaagcaactaatgcaacaacttcaaacatcagaataagataccaaaaaattaaaataaacctatttggtgaaaataaacaacaaaaccgccgcatgactccaaaagaaaagcaagaagaaatacaagaagctagcatatggggacattatgttagagactatatcttagataggcctttttacaaagatatgcctataaccccaattgtaccccgcctttgctttgacttaaactataaagaataaggcctgcaaactttccttgtcggtgtccatttattataattaaaacttaaataaacatccaccactctcccaaatacgcaggcgcactagggggctccgccccctaaaacccccaagggggctccgccccctttaacccccaagggggctacgcccccttacaccccctaataaatattcaacaggaaaaccacataattagaattcccctaataaatattcaacaggaaaaccacataattagaattgccgaccacaaacggtcacttacttctgctttttaacaacacttcctcttttactcatgaatatttaacaaattaattaataaacaccgtatatcctgggtggagctaataacctataaaactaactacacttccgaatggctgagtttatgccgctagacggaggacgcacaggacactgctgcgaactgctcttg

SEQ ID NO: 2553 - protein, 673 aa, Betatorquevirus sp.
MARYFYRRYWKPRWRRRTRRFWTWRTRKAFRTRRRRKRRVRRKLSTLHLKQWQPSHIRKLTIKGIFCLFQMHKARYNHNYNQYETVTPPQGLPNGGGFTILRFNLMSLYEQHEKAHNVWTISNSNFPLFRYTGCKIRVYRPEYTDLVLKFQTCYPMCCSKLMYTGTQPSIMMMTHGAKRIRCKKNAPNCKPYRTYKLKPPQQMTNRWYFQHDQSQTGFLLIQAAAASFDQYYASINADSSSITLRTLNTKIFHNLNFANFPLKEGYSPNPKMHLWATNGSIPAQIEDLIWLGQSKKYNWGKQLKQFKTGSSTNYIENAYKKYMSDPNNWGNIFHKSHLNKSNTIWFTQKPPSQIFTEEILKKTQFNQKLSEFKIDNQLVFHELTQELFFDIRYNPFKDKGYNNNIYIKPNWQDNEDLDPLPDTDLENPGFPNWLSCFGFKDYLKKLGTKSQLNTHYMMVHKSEYFEPKLDYYIFLDSFFFKGDSDDYEGRIEWENQNWYPMITHQQEMLNVLALSGPGTPKMGDIKLAEAKIDYSFFFKIGGCAPPVQKVKDPTTQPTYVTPNNILDTNSLQNPEQPIESFLYQFDWRRDQITETAAKRITKDFSTEKYLFSDAATTGTAVPLIQTQEKELLSSEEEETKTETLLQQLLVHRNKQKQLRLRIKQLMQQLQTSE

SEQ ID NO: 2554 - protein, 91 aa, Betatorquevirus sp.; identical to SEQ ID NO: 2551

SEQ ID NO: 2555 - DNA, 2926 bp, Alphatorquevirus sp.
tcgggactggccgggctatgggcaaggctcttaaaaaagcatgtttctcggcagggtttggagaaagaaaaggtcgctgccactgcccgagctgcgaactcctgcgaaaaaaccatctctaatgagctggtcccagcctctgcacaatgtcaccacccgcgagggcttcttttacgcggggtgtaagcagcttcataactgcttttgtggttgtgatgattttattaatcatcttcttcgcatccagacccagcagggtccctctccctcgcggcccttcactcctccgtcaacaccacgccctgtaatccgtagagccctgccggcaccggcggctccggacgcaccggcgccatggcgtggagctggtggtggacccgccgccgacgcagaccgtggacccggaggagatggaggagactacgcacccggagacctcgacgacctgtacgccgccgtcgacgccgaaaacgcagagtaaggaggagacggtggggaaggagacgagggcgacgaacattttacaaacgcaggtttagaaagagacgcaggcgacgaaaaaagctagttcttactcagtggaaccctcagactattagagcatgttctataaggggcacagtatgcctagtaatgtgtggacacacaaaagccagcagaaactatgctctgcactcagaagactatgtgccacaactgcatgctatgggagggtcttttagtactactacctggagcctaaaagccctatatgatgagcaccagaaattccacaacaggtggtcctaccccaacactcagctagacctagccagatacagggggtgtcgctggtggttttacagagaccccaaggtagactacatagtcacctactacacagtacctccatttaaaataaacaaatacactagtccaatgctacacccaggcatgatgatgcagtacaaaaagaaaatattagtacccagctatcaaacaaaacctaaaggcaaatccaaaattagtatttttattaagcccccagttctttttgaagacaagtggtacactcagcaagacttgtgtcccgttaatcttatgtcacttgcggttagcgcagcttcctttatacatccgttctgcccaccagaaagtgacaacatgtgtattacattccaagttttgaaacaattttattacacacaaatgagtgtaaccgcaatgaacggcacaaaagccacagacgaagacgaagccattctttcaaaactttactcaactgccagtttttggcagtctttacacacacagtctttaatttctactactcaaaaaactgctgtattttctgaccacgataagtttccaaacgtatcaaactggttaacaaaagacatagatgcaacaacatttaaaactggaaacaatagcatatatggccaagtaaattacagaccaaatacagaaaagatgacacaaatactacaatggtactttaaacaagaatcactaccaaacgatcctcacgggcaatacggaaaaccagtatattatccagccagctatcacataggaaagtacagtcccatatttttaagcccatacagaaccaatctccaatttgaaacagcataccaagacaccacatacaaccccaacacagacaaaggtttaggaaacaaaatgtggatacaatcagtaactaaaaaaaacacaaacctagactcacaatgcaaatgtttacttgaagacatacctttgtgggccatggctacaggctatggagaattttgtgagtctgaacttaactctgaagtgtggaacctatacattgtttgcattatatgtccctacaccaagcctcaactatattcaaaaacaaacccaacacagggctgggtattctatgatacactatttggagatggcaaaatgcccaccgggtcaggcctagtacccgtgtggctacaaagcaggtggtaccccagactagtgttccaacaacaagtactacacgatatttacctcacaggaccctttagttacaaagatgacctaaagagctttactataaatgccaggtacaaattcaaattcttatggggcggcactataatccccgaacaggttattaaaaacccgtgcaaagagcaagactcgccattcacctttaccggtagacagcctcgcgacctacaaattgctgacccacaaaccatgggcccacaatgggttttccacacctgggactggcgacgaggactatttggtgaaaatgctctcaaaagagtgtcagaacaaccaagcaatgatgcagactattatgctccaccaaaaaaacctagactattccctccaacagacctccaagagcaagaaagaggctcagatttcacactgcaggaactcaggatcctctcggagagggcgccgtcgcaaacaagcgaagaagaggacccgcaagaggagcaccagctccagcagcaagagctccagctccgactccagcagcagttcagaatcaggcagcaactgcagcacctattcgtacaagtcctcaaaacccaagcaggtctccatataaacccattatttttaaaccctgcataaaccaggtgtacatgtttcctcctgacacccctaaacccattaccactgcacaagattggaaagaggagtatgaatgctgtaaatactgggatagaccccccagaaagtaccttacagaccgccccttctacccctggatgcccaaggagccccctcagtgtcgtgtcagctttaaacttggcttccaataaaatttcaaggcctttcaaatttcacttgtcggtgtttacctctataagtcactaagcactccgagcgtaagcgaggagtgcgaccctttcccctgactcaacttcttcggagccgcgcgctacgccttcggctgcgcgcggca

SEQ ID NO: 2556 - protein, 745 aa, Alphatorquevirus sp.; identical to SEQ ID NO: 2546

SEQ ID NO: 2557 - protein, 146 aa, Alphatorquevirus sp.; identical to SEQ ID NO: 834

SEQ ID NO: 2558 - protein, 59 aa, Alphatorquevirus sp.; identical to SEQ ID NO: 835

SEQ ID NO: 2559 - DNA, 2926 bp, Gammatorquevirus sp.
agcccccccacaccccccgcggggggggaggtctaggggcaattcgggctagggcagtctagcggaacgggcaagaaacttaatatattttttattttagatgtctgtattcttcaacaaaacttcatacaacaaagaaaccttaaaccagctatggatgagtatcattgctgattctcatgatatttgctgtaaatgtgaacaaccctttgctcacctacttgacagcatttttccagacggccacaaagacagacagctaactattgaacaaattattaaaagagattttgcagcatgccattctggtggtacagaagaagaaaaccttggtttggtagatggtctagaaagaagagaaatacctggcggcgcagaaaaccaagaagaagaatatataaaagacgcagaactagaacaactcgtcgccgccgcagaagacgccactacaaggtaagaagaaaacaaaaaaaaataactgttaaacaatggcaaccagaaagtattaaaaaatgcaaaattaaaggactaggacccttagtactaggagctgaaggatgccaatacagatgcttcactgtatacaaatatgaatggacaaatcctaaaactccagggggtggtgggtttggctgtgaactgtttactctacaatacttatataatgaatatttagcaaagcataatatatggactgcatctaatctctacaaagactttggtagatatacaggctgtcaatttacattctatagacatgaacacacagactttattataaaatatgacattcacccaccctttactgttaacaaatatacatacatgatgctacacccctttaacatgctacaaagcaggcataaaaaaatactactaagcaaagacacaaaacccaatgggagactaacaaaaaaactaaaaataaaaccacctaaacttatgtcaaccaaatggttttttcaagaagaactaagtaaatatggactagttacccttgcagcttctgcatgtaactttagatttccatggatgggatgctgcaatgaaaacctaattataaccctagactacctacagccaggattttataaacattctgaatgggctcaagctactactcatgcctataaccctggaggccatacacaccctgtatcaacaaccatgtattactattattatgatgacaggggtgtagaacaaacctggcaaatgaaagactttactggtacaaatccatacactcactccctcgcctatgacgatggatggttcaacaccaaagtactaagagcacacttagtttccacaaacccaagcaaaaaaagccctatatctttaacaccatgtggaacactaagatacaatcccatactagacactggtgaaaaaaacaaagtttgggtggtatctacattagtatatgactggcaagttccaaaagatgaagacctaataatacaaggctatcctctttggatggtattctatggctttacttcttatttaaaacaagtaaagtcaaaaaccactccatttaaaggtagcatgatatgtgttcaatctccagctctatacagagttagaggtgaagacccaacagctttctatccacttatagacagatcttttattaaaggcaaaggcactggtaacacagacccaattaaattttctggaaatgaatggtttccaagcatattcagccaaagagatagtatatcacaaatagtaaattgtggaccctatatacctaaatacaatgaaacaagagaaagtacatggcaactaaattatttttacaaattttattttaagtggggaggcagctttccaccagaccaagcagctgagaatccacaaacaaaaggtacctatgacatacccgataaaaacaaagaaacacttgaaattgctaacccaattagccaacaataccactcagtatttaagccctgggactacaggagaggagaaattacaaaaaaagcttttaaaagaatgctccaacacatcgaagttactgactctatatcaacagattcaagcgactgctcctctcccaagaaaaagagaaggccaccactcctccaagacccaaaaaaagaaaatcagaaaatccaagcatgtctcctctcactctgcgaagagcctacatgcccagaccaaaaagaagagaatctccacctcctcatccagcagcagcacgagcagcagcagcaaatcaagttcaacctcttgcacctcatctcagacctgaaatccaaacaaagaacactgctacacaacacagggctactaaactaacaagatttaaacaaggctttgaatgggaaacagaactacagctttcaagagcctttcaaagacccccaagattgtttaaagaagacacacccttttacccttggttaccaaaattcacaccccttgtaaactttcacttaaattttaaaggctaggcctacactgttcacttagtggtgtatgtttaataaagtttcacccccaaaaaaattataaaataaaaaaaaaaaaaaaaaaataaaaaattgcaaaaattcggcgctcgcgcgcgctgcgcgcgcgcgagcgccgtcacgcgccggcgctcgcgcgccgcgcgtatgtgctaacacaccacgcacctagattggggtgcgcgcgctagcgcgcgcaccccaatgcgccccgccctcgttccgacccgcttgcgcgggtcggaccacttcgggctcgggggggcgcgcctgcggcgctaatttactaaacagactccgagttgccatttggccccccctaagctccgcccccctcatgaatattcataaaggaaaccacaaaattagaattgccgaccacaaactgccatatgctaattagttccccttttacacagtaaaaaggggaagtgggggggcag

SEQ ID NO: 2560 - protein, 670 aa, Gammatorquevirus sp.; identical to SEQ ID NO: 1349

SEQ ID NO: 2561 - protein, 118 aa, Gammatorquevirus sp.; identical to SEQ ID NO: 1350

SEQ ID NO: 2562 - protein, 136 aa, Gammatorquevirus sp.; identical to SEQ ID NO: 1351

SEQ ID NO: 2563 - DNA, 2926 bp, Betatorquevirus sp.
cgggtgccgaaggtgagtgaaaccaccgtagtcaaggggcaattaccaccgtagtcaaggggcaattcgggctagctcagtctggcggaacgggcaagattcttaaatatattttattttacagaatgtctacaagatataagccagcaaaatgctctttaagacaacaaaaattaaaatggatgaatagtcttgttcacacacacgatattatgtgtgactgccctcatccactggaacataccgcgactttaattttcgaacaagaaccaaaattaaaatttacaccaccagaacaagatctaattaaaaaatgccttactacaaatactggggatatcgtcgcagacgaccacgacaacgacgcttttggagaaggagatttagaggaccttttcaaagaagattttggagaagacgacaaagacaccgctgggtaagaaaaagaaaattaaaaactttaaaacttaaagaatggcaaccacaatatataaaaaagacagttgtaaaaggttactaccctttgtttatgagtacttcggaaagactctcaaataatttaaactgttacttagagagcattgcacctgaattttggcctggaggggggggattttctatttgtaacttttctctaaatactctgtatcaagaacaccttgtactacataactggtggactaaatctaatgaaaacatgcctttaataagatttacaggatgtaaaattactttatatagacaagaaacacaagattacttattttgctataatagaacctatccaatgcaagcaaatgccttaacttatactagcactcatcctcaagctatgctattaaacaaacaaactgttgtagtaacttgtaagcaaagatctagaaatagaaaaaactacaaaattgtaagaattaaacctcctgttcaaatgcaaaacaaatggtattttcaaaaagatttagcatttttaccactattacaaactatgacaacagcctgctcgttagaccgcatgtttctaaatagctcagccgttagttccacaattggctttacatcactagatacagttggctttagaaaccacaattttacaaaattttcaagcacaggttactacccaatacatgaagaaaaactatttggatgctataatggacaagacatagacaaattaaaaatatcacaattatgctacctaggaaacccacaagacaatacagaaggaacaccaataggagaaataccactaactgcagtaggtacagaaacaaaattacaacagcaaatagacaaagccagaacacaatggggataccaaggaaacccatttaatgctcactatttttatggagaaaagagagtactagtaaccacactcacttggaacgaacttaaaaacaaatatggaaaaaaccccgaaccaaacttagaaaaaaatgattttaaattaaaaactcaaaaatgggtgcactgcagatacaatccatttaaagacaaaggcaaaggtaacaaaatatatttactaaaaacagacagcacacaacacccagacgaatggacaccaccaccagaagaagacatagttatatcagacataccactttggctagcaacctggggttatctagactatcaaagaaagtgtggattacaatcccaaatagacacaaccacagtttttgttatatactcaacatatatagatcctccttcacttaaattttatgttccactagacaaaccatttttaaacggtcacagtccatacacaaaagaactataccctagtgaccaatttaattggcatccaaaagttagataccaagtacaatcaataaacaacatagcaatatgcggtccaacagtagctaaattaccagaacaaatatcatgcgaaggtcatatgaaatatcaattttactttaaggttggaggacagccaccacctatgtcaactcttatcgacccagacaaacaaccaaaatataatatacccagtaacctcctcaaaacaacttcgttgcagagtccaacaactccctttgaatatctcctctacaactttgacgaaagaaggggacaacttactaaaaaagctgcaaaaagaatcaaaacagaccaggaaactgaaacaaattttctctcaattacagaaacaaacaacagctgtccagtactgccctactcaaaaatacagacaccggaatcatcggaggaggaagaaacacaggagacatcgatcgaggagcaactcctcctccagcgaagagagcaaaaactcctcagacggagaatcaaccagctcctcaacaaattaacaattttagaataaaaactggacctataaaagtacaattatttcccacagaaacaaaaaacagacgtatgacactgtgggaatatgaacaagagatagaagactctattatatggcacagagtgccaagatcttttattaaagataaaccaacctacccatgggtcccccaagactccccatttactgtcaactttgatttaaatgcgccgaaataaaattcaaggccagcaacaattcactctcggtgtccatttattaaacttaaacttatataaacatccaccacactcccaaatacgcaggcgcacaagggggctccgcccccttaaacccccaggggggggcaaagccccccctaaaacccccccataaatattcataaaggaaaccacaaaattagaattgccgaccacaaacagccatatgctaattaacttctgctattttacttaacttctccaaaaattaattaataatcaccatcacacctacgtaaaacaggcgtggctacttatctatataactaactacacttccgaatggctgagtttatgccgccagacggtggacggaacacaacagtgactccggactgagcttggg

SEQ ID NO: 2564 - protein, 673 aa, Betatorquevirus sp.; identical to SEQ ID NO: 2485

SEQ ID NO: 2565 - protein, 104 aa, Betatorquevirus sp.; identical to SEQ ID NO: 2155

SEQ ID NO: 2566 - protein, 122 aa, Betatorquevirus sp.; identical to SEQ ID NO: 2156

SEQ ID NO: 2567 - DNA, 2926 bp, Alphatorquevirus sp.
tctacctcttaagtgagtttacacaccgcagtcaaggggcaattcgggctcgggactggccgggccctgggcaaggctcttaaaaaagccatgtttctcggtaaactttacagaaagaagagggcactgtcactgcgcggcctgcgaactccagaggcgaaaccacctgctatgagttggaggcccccggtgcacaaccccaatgggatcgagagaaacctgtgggaggcattctttcgcatgcatgctgcagcttgtggttgtggcgatcttgttggccatcttactgtactggctggtcggtatggtgctcctcctcgtcccccggcccccggggctcccagaccaccgctgatacgccagctggcccttccggcgccccccgccgatcctcaacaggctaacccacaatggcctggtggggacggtggagaagatggcgctggaggccccgccgctggcggcgccgccgcagacgccgactaccaagacgaagagctcaacgccctgttcgacgccgtcgagcaagaagagtaaggaggaggcgatgggggaggcggaggtggagacgggggtacagacgcagactaagactgagacgcagacgcagacgaaaaaaaataagactgactcagtggaacccagccaaagtcaggagatgtactattaagggggtgctgcccatgattttgtgcggggccggccgctcggggtttaactatggactgcacagcgacgactacacggtgcagaaacccttgggacagaacccccacgggggcggtatgagcacagtgacttttagcctacaagtactatttgaccagtatcagaggtttatgaaccggtggtcgtactccaacgaccagctagacctcgccaggtactttggctgcaccttcttcttttacagacaccctgaaattgactttgtagctcagtatgacaacgtaccccccatgaaaatggacgagaacacggctcctaacactcacccctctttcttactacaaaacaaacgcaaagttaaaattcccagctttaaaaccaagccatttggcagaaaaaaagtaaaagttacagtggggccccccaaactgtttgaagataagtggtacagccagcatgacttgtgtaaggtgcccctagtcagttggcggttaaccgcatgtgacttcaggtttccgttctgctcaccacaaactgacaacccttgctacaccttccaggtattgcatgaaaactattacccagtaataggcacttcctctttagaaaacggtacaaactacaatgcagagtctataactaagttagagacatggctatatggaagttgcacacactatcaaacatttgccacagacacaagacttaatccacagagacccgctgcaaatgatcaaacaaaagcttataatcccagtggcacattagaaccgataatttggggacaatcagactggcaaaacttcaaaaagcagacagacagcaactatgggtactgtacatactgcccctcaaatagcactaacggaacagtagaaaaaattaaaaagtacagagaccagaaatttaaatggcttacagaaatgccagtaagtaacacctgtcacataaatgccaccttcgcccgaggaactattaaatactgggagtaccaccttggctggtactcaaacatttttataggcaacctcagacacaacttagccttcagaccagcctacatagacattacctacaatccgatcactgacaaaggagagggcaacattatctggttccagtacctcactaagcccaccacagaatacatagaaacccaggccaaatgcagcattactaacattcccctttatgctgctttctatggctatgaagactacctccagagaacactaggcccctaccaagatgtagaaaccctaggcataatctgtgttaaatgtccctacacagatccccctctagttcacaaagagaaaactaagagcaactggggctacgtattctacgacgcccactttggcaacggaaagaccccagagggactaggccaaatacacccttactggatgcagagatggagaccctatgtacagtttcaaaaagacaccatgcacaagatatccaggacaggacccttcagctacagagacgagacgccttccatcaccctgactgccgcatacaagtttcgttttaactgggggggcgactctatatttccacagattattaaaaacccctgcccagacaccggggttcgaccttcgaccggtagagaccgtcgctcagtacaagtcgttagcccgctcacaatgggaccccagtttatattccactcatgggactggagacgggggttctttaatcaaaaaactctcaaaagaatgcttgaaaaaccagttaatgatggagaatatccaacaggcgcaaaggtgcctcgatggtttcccgcactcgacaaccaagagcaagaaggcgtctcagatacagagacgacaacctcgcagtcctcgcaagaagaagccgctcaagaagccctccaagaagtccaagaggcgtcgctacagcagcacctcctccagcagtaccgagagcagcgaagaatcggaaagcaactccaactcgtcatgctccaactcaccaagacgcagagcaacctgcacataaatccccgtgtccttggccatgcataaataaagtgtacatgtttccccccgaaaaaccactgcccatacacgggtaccacgggtgggaaacagagtatcaggcctgcaaggcctttgacaggccccctagaaactacctgtcagacaaacccatttatccctggcttccccgctcccaaccagaatttaaagtgagttttaagcttggttttcaataaacaaggccgtgggaatttcacttgtcggtg

SEQ ID NO: 2568 - protein, 764 aa, Alphatorquevirus sp.
MAWWGRWRRWRWRPRRWRRRRRRRLPRRRAQRPVRRRRARRVRRRRWGRRRWRRGYRRRLRLRRRRRRKKIRLTQWNPAKVRRCTIKGVLPMILCGAGRSGFNYGLHSDDYTVQKPLGQNPHGGGMSTVTFSLQVLFDQYQRFMNRWSYSNDQLDLARYFGCTFFFYRHPEIDFVAQYDNVPPMKMDENTAPNTHPSFLLQNKRKVKIPSFKTKPFGRKKVKVTVGPPKLFEDKWYSQHDLCKVPLVSWRLTACDFRFPFCSPQTDNPCYTFQVLHENYYPVIGTSSLENGTNYNAESITKLETWLYGSCTHYQTFATDTRLNPQRPAANDQTKAYNPSGTLEPIIWGQSDWQNFKKQTDSNYGYCTYCPSNSTNGTVEKIKKYRDQKFKWLTEMPVSNTCHINATFARGTIKYWEYHLGWYSNIFIGNLRHNLAFRPAYIDITYNPITDKGEGNIIWFQYLTKPTTEYIETQAKCSITNIPLYAAFYGYEDYLQRTLGPYQDVETLGIICVKCPYTDPPLVHKEKTKSNWGYVFYDAHFGNGKTPEGLGQIHPYWMQRWRPYVQFQKDTMHKISRTGPFSYRDETPSITLTAAYKFRFNWGGDSIFPQIIKNPCPDTGVRPSTGRDRRSVQVVSPLTMGPQFIFHSWDWRRGFFNQKTLKRMLEKPVNDGEYPTGAKVPRWFPALDNQEQEGVSDTETTTSQSSQEEAAQEALQEVQEASLQQHLLQQYREQRRIGKQLQLVMLQLTKTQSNLHINPRVLGHA

SEQ ID NO: 2569 - protein, 156 aa, Alphatorquevirus sp.
LGKALKKAMFLGKLYRKKRALSLRGLRTPEAKPPAMSWRPPVHNPNGIERNLWEAFFRMHAAACGCGDLVGHLTVLAGRYGAPPRPPAPGAPRPPLIRQLALPAPPADPQQANPQWPGGDGGEDGAGGPAAGGAAADADYQDEELNALFDAVEQEE

SEQ ID NO: 2570 - protein, 147 aa, Alphatorquevirus sp.
MVSRTRQPRARRRLRYRDDNLAVLARRSRSRSPPRSPRGVATAAPPPAVPRAAKNRKATPTRHAPTHQDAEQPAHKSPCPWPCINKVYMFPPEKPLPIHGYHGWETEYQACKAFDRPPRNYLSDKPIYPWLPRSQPEFKVSFKLGFQ

SEQ ID NO: 2571 - DNA, 2926 bp, Alphatorquevirus sp.
tctacctcttaagtgagtttacacaccgcagtcaaggggcaattcgggctcgggactggccgggccctgggcaaggctcttaaaaaagccatgtttctcggtaaactttacagaaagaagagggcactgtcactgcgcggcctgcgaactccagaggcgaaaccacctgctatgagttggaggcccccggtgcacaaccccaatgggatcgagagaaacctgtgggaggcattctttcgcatgcatgctgcagcttgtggttgtggcgatcttgttggccatcttactgtactggctggtcggtatggtgctcctcctcgtcccccggcccccggggctcccagaccaccgctgatacgccagctggcccttccggcgccccccgccgatcctcaacaggctaacccacaatggcctggtggggacggtggagaagatggcgctggaggccccgccgctggcggcgccgccgcagacgccgactaccaagacgaagagctcaacgccctgttcgacgccgtcgagcaagaagagtaaggaggaggcgatgggggaggcggaggtggagacgggggtacagacgcagactaagactgagacgcagacgcagacgaaaaaaaataagactgactcagtggaacccagccaaagtcaggagatgtactattaagggggtgctgcccatgattttgtgcggggccggccgctcggggtttaactatggactgcacagcgacgactacacggtgcagaaacccttgggacagaacccccacgggggcggtatgagcacagtgacttttagcctacaagtactatttgaccagtatcagaggtttatgaaccggtggtcgtactccaacgaccagctagacctcgccaggtactttggctgcacctggtacttttacagacaccctgaaattgactttgtagctcagtatgacaacgtaccccccatgaaaatggacgagaacacggctcctaacactcacccctctttcttactacaaaacaaacgcaaagttaaaattcccagctttaaaaccaagccatttggcagaaaaaaagtaaaagttacagtggggccccccaaactgtttgaagataagtggtacagccagcatgacttgtgtaaggtgcccctagtcagttggcggttaaccgcatgtgacttcaggtttccgttctgctcaccacaaactgacaacccttgctacaccttccaggtattgcatgaaaactattacccagtaataggcacttcctctttagaaaacggtacaaactacaatgcagactctataactaagttagagacatggctatatggaagttgcacacactatcaaacatttgccacagacacaagacttaatccacagagacccgctgcaaatgatcaaacaaaagcttataatcccagtggcacattagaacagataatttggggacaatcagagtggcaaaacttcaaaaagcacacagacagcaactatgggtactgtacatactgcccctcaaatagcactaaaacaacaatacaaaaaattaaagactacagagaccagaaatttaaatggcttacagaaatgccagtaagtaacacctgtcacataaatgccaccttcgcccgaggaactattaaatactgggagtaccaccttggctggtactcaaacatttttataggcaacctcagacacaacttagccttcagaccagcctacatagacattacctacaatccgatcactgacaaaggagagggcaacattatctggttccagtacctcactaagcccaccacagaatacatagaaacccaggccaaatgcagcattactaacattcccctttatgctgctttctatggctatgaagactacctccagagaacactaggcccctaccaagatgtagaaaccctaggcataatctgtgttaaatgtccctacacagatccccctctagttcacaaagagaaaactaagagcaactggggctacgtattctacgacgcccactttggcaacggaaagaccccagagggactaggccaaatacacccttactggatgcagagatggagaccctatgtacagtttcaaaaagacaccatgcacaagatatccaggacaggacccttcagctacagagacgagacgccttccatcaccctgactgccgcatacaagtttcgttttaactgggggggcgactctatatttccacagattattaaaaacccctgcccagacaccggggttcgaccttcgaccggtagagaccgtcgctcagtacaagtcgttagcccgctcacaatgggaccccagtttatattccactcatgggactggagacgggggttctttaatcaaaaaactctcaaaagaatgcttgaaaaaccagttaatgatggagaatatccaacaggcgcaaaggtgcctcgatggtttcccgcactcgacaaccaagagcaagaaggcgtctcagatacagagacgacaacctcgcagtcctcgcaagaagaagccgctcaagaagccctccaagaagtccaagaggcgtcgctacagcagcacctcctccagcagtaccgagagcagcgaagaatcggaaagcaactccaactcgtcatgctccaactcaccaagacgcagagcaacctgcacataaatccccgtgtccttggccatgcataaataaagtgtacatgtttccccccgaaaaaccactgcccatacacgggtaccacgggtgggaaacagagtatcaggcctgcaaggcctttgacaggccccctagaaactacctgtcagacaaacccatttatccctggcttccccgctcccaaccagaatttaaagtgagttttaagcttggttttcaataaacaaggccgtgggaatttcacttgtcggtg

SEQ ID NO: 2572 - protein, 764 aa, Alphatorquevirus sp.
MAWWGRWRRWRWRPRRWRRRRRRRLPRRRAQRPVRRRRARRVRRRRWGRRRWRRGYRRRLRLRRRRRRKKIRLTQWNPAKVRRCTIKGVLPMILCGAGRSGFNYGLHSDDYTVQKPLGQNPHGGGMSTVTFSLQVLFDQYQRFMNRWSYSNDQLDLARYFGCTWYFYRHPEIDFVAQYDNVPPMKMDENTAPNTHPSFLLQNKRKVKIPSFKTKPFGRKKVKVTVGPPKLFEDKWYSQHDLCKVPLVSWRLTACDFRFPFCSPQTDNPCYTFQVLHENYYPVIGTSSLENGTNYNADSITKLETWLYGSCTHYQTFATDTRLNPQRPAANDQTKAYNPSGTLEQIIWGQSEWQNFKKHTDSNYGYCTYCPSNSTKTTIQKIKDYRDQKFKWLTEMPVSNTCHINATFARGTIKYWEYHLGWYSNIFIGNLRHNLAFRPAYIDITYNPITDKGEGNIIWFQYLTKPTTEYIETQAKCSITNIPLYAAFYGYEDYLQRTLGPYQDVETLGIICVKCPYTDPPLVHKEKTKSNWGYVFYDAHFGNGKTPEGLGQIHPYWMQRWRPYVQFQKDTMHKISRTGPFSYRDETPSITLTAAYKFRFNWGGDSIFPQIIKNPCPDTGVRPSTGRDRRSVQVVSPLTMGPQFIFHSWDWRRGFFNQKTLKRMLEKPVNDGEYPTGAKVPRWFPALDNQEQEGVSDTETTTSQSSQEEAAQEALQEVQEASLQQHLLQQYREQRRIGKQLQLVMLQLTKTQSNLHINPRVLGHA

SEQ ID NO: 2573 - protein, 156 aa, Alphatorquevirus sp.; identical to SEQ ID NO: 2569

SEQ ID NO: 2574 - protein, 147 aa, Alphatorquevirus sp.; identical to SEQ ID NO: 2570

SEQ ID NO: 2575 - DNA, 2925 bp, Betatorquevirus sp.
cgggtgctgaaggtgagtgaaaccaccgaaatcaaggggcaattcgggctgtttcagtctagcggaacgggcaagtaacttaatattattttttttagatgagcaaatttctaaaagaaccattatatgaaggaaaagccttattttttttagatgagcaaatttctaaaagaaccattatatgaaggaaaagccttagaagatcaatggattaacagcatttacaccaaccacgatttgttttgcggctgcaacgacgtacttactcacctaattggaatttttaacagaaaaggaaaatctccaaaaccaaaaaaggatattaaaaatataatatgccttataactggagaaggcaaagaagacggagatattatagaagacgaattccaacctggagaattagacaaacttttccaagaagatggaggattcgaagaagaatccgtcgcaaacccagacgggtaagacgacgacgtttcaatagaaaactaaaaactataaaactaacacaatttcaaccagatgttattagaaaatgtactattataggaaatatttgcttatttcaaggtagccctgaaagagcaagccataactatgtacaatatatatattcttatgtacctgttggggcgccgggagggggaggatggacattaatgatagaaagcctatcaagtttatgggaagactggcaacatttaaaaaatgtatggacaaatagtaatgcaggactacctttagtaagatacctaggagcaacattttacttttttcaaagcccatacacagactacattgttaatgttatccgatgctatccaatgacagatactgaacatatgcatgcagactctgctcctagtagaatgctactaaaaagaaaagcagtaagagtaccaagcctagaaacacgtagaaagagaaaaccatacaaaaaagttagagtgagaccaccagcacaaatgcaaaaccaatggtattttcaaaaagacatatgtaatattccattagtaatgatacaagccacagcagtagactttagatatccttttgctcctagctcagcacaaagcaacaatgtaaccttaacatgcttaaatatagcactttttcaaaattcaaactttgacgaccccagcattacacatggttactttcctaaacctaacttatacctatacagcagtacaaatcgactaataacagatccaaaacactataagtttaacgatataatatacctaggaaacacaaaggacagacaactaggaaaagacagtgggaacacatttgctaactggggaaacccatttatgcctgaatacatacatggagaaaaacctgtatttacaaacacagtgaaactcacatcagacaactatgaacaattcaaacaacacaacgcaatcttacaagaagattacttctttacagttagatataacccagaaaatgacacagggtctgcaaacacaatatttattcaaaacaactttcaacaaacatcttggcatagaccacaaaatcctgatttaatattagaaggctttcccttatatgacatgctatggggatatttagactggcaaaaaaaacttcaaaaaacacaagacataagcaacaaatacatagcagtaatacaaacagaccaatttgatgacaaaaaaaactactatgtagtaatagatcctaaatttctagacggacataacccttatgattcaccactaacaaactataataaaagccactggaacatatgtactagaatacaagaaaaacctttaaatgacatctgtttaagtggaccaggtgcacctagaccagcctttggaaactatatgcaagccaaaatgcaatacagatttcactttaaatggggaggctgtccaaaggtattagaaaaaccttatgatccttgttcacagccttcctggaatatcccccgtaacttcgattcaggaattcaaatccagaatcctaacacaccaccagaaacagaactgcaaaagtgggactggagaagagactatattacgagcaaagctatccaaagaattaaacaatacgaaacaactgatgaaactttacaactctttacaggatgctccaaagacccaccaatactccaacaaacaaagacaccggagatcagctcagaggaggaagaagaggaaacaccatcactccaaaaccagatcaacaagctcaagcgacaccaacacaagctacagcagcgaatcctcaagcgaatgcgactaactacaaaataaaaggctgtaaaatacgagtacaactatttcctacaaaaactgagtttaaaaatcgtagatttactgagtctgaaagagaactagaaaaattagtagcaagagcatttaaaagacctcaaagacactttttctatgatcccccaacatatccttggcttcctcctgaaccacttgttaactttgatcttggaaataaattttaaggccaacaatattcacttagtggtgtctatttattaagtataaacttaaataaaccaactccgcctccctacagtagggcgccaaaaaggggctccgccccttaaaccccaagggggctccgcccccttaaaccccaaagggggctccgccccctaaaacccccaagggggctccgccccctattacccccaggaaaaccacataattagcatggctaaccacaaactgaaaaaggaaaccacaaaatttgcattgccgaccacaaacgaatatttaaattaacttccctaaatgaaacaacacttccctaaaaattaattaataaacatcgtcacaaggggaggagacaccacactataaaactaacatacatgacgaatggctgagtttatgccgctagacggaggacacttcacgttagtgacagtggactgaaaccggg

SEQ ID NO: 2576 - protein, 647 aa, Betatorquevirus sp.
MPYNWRRQRRRRYYRRRIPTWRIRQTFPRRWRIRRRIRRKPRRVRRRRFNRKLKTIKLTQFQPDVIRKCTIIGNICLFQGSPERASHNYVQYIYSYVPVGAPGGGGWTLMIESLSSLWEDWQHLKNVWTNSNAGLPLVRYLGATFYFFQSPYTDYIVNVIRCYPMTDTEHMHADSAPSRMLLKRKAVRVPSLETRRKRKPYKKVRVRPPAQMQNQWYFQKDICNIPLVMIQATAVDFRYPFAPSSAQSNNVTLTCLNIALFQNSNFDDPSITHGYFPKPNLYLYSSTNRLITDPKHYKFNDIIYLGNTKDRQLGKDSGNTFANWGNPFMPEYIHGEKPVFTNTVKLTSDNYEQFKQHNAILQEDYFFTVRYNPENDTGSANTIFIQNNFQQTSWHRPQNPDLILEGFPLYDMLWGYLDWQKKLQKTQDISNKYIAVIQTDQFDDKKNYYVVIDPKFLDGHNPYDSPLTNYNKSHWNICTRIQEKPLNDICLSGPGAPRPAFGNYMQAKMQYRFHFKWGGCPKVLEKPYDPCSQPSWNIPRNFDSGIQIQNPNTPPETELQKWDWRRDYITSKAIQRIKQYETTDETLQLFTGCSKDPPILQQTKTPEISSEEEEEETPSLQNQINKLKRHQHKLQQRILKRMRLTTK

SEQ ID NO: 2577 - protein, 104 aa, Betatorquevirus sp.
MSKFLKEPLYEGKALEDQWINSIYTNHDLFCGCNDVLTHLIGIFNRKGKSPKPKKDIKNIICLITGEGKEDGDIIEDEFQPGELDKLFQEDGGFEEESVANPDG

SEQ ID NO: 2578 - protein, 123 aa, Betatorquevirus sp.
MLQRPTNTPTNKDTGDQLRGGRRGNTITPKPDQQAQATPTQATAANPQANATNYKIKGCKIRVQLFPTKTEFKNRRFTESERELEKLVARAFKRPQRHFFYDPPTYPWLPPEPLVNFDLGNKF

SEQ ID NO: 2579 - DNA, 2925 bp, Betatorquevirus sp.
cgggtgctgaaggtgagtgaaaccaccgaaatcaaggggcaattcgggctgtttcagtctagcgaaggtgagtgaaaccaccgaaatcaaggggcaattcgggctgtttcagtctagcggaacgggcaagtaacttaatattattttttttagatgagcaaatttctaaaagaaccattatatgaaggaaaagccttagaagatcaatggattaacagcatttacaccaaccacgatttgttctgcggctgcaacgacgtacttactcacctaattggaatttttaacagaaaaggaaaatctccaaaaccaaaaaaggatattaaaaatataatatgccttataactggagaaggcaaagaagacggagatattatagaagacgaattccaacctggagaattagacaaacttttccaagaagatggaggattcgaagaagaatccgtcgcaaacccagacgggtaagacgacgacgtttcaatagaaaactaaaaactataaaactaacacaatttcaaccagatgttattagaaaatgtactattataggaaatatttgcttatttcaaggtagccctgaaagagcaagccataactatgtacaatatatatattcttatgtacctgttggggcgccgggagggggaggatggacattaatgatagaaagcctatcaagtttatgggaagactggcaacatttaaaaaatgtatggacaaatagtaatgcaggactacctttagtaagatacctaggagcaacattttacttttttcaaagcccatacacagactatattgttaatgttatccgatgctatccaatgacagatactgaacatatgcatgcagactctgctcctagtagaatgctactaaaaagaaaagcagtaagagtaccaagcctagaaacacgtagaaagagaaaaccatacaaaaaagttagagtaagaccaccagcacaaatgcaaaaccaatggtattttcaaaaagacatatgtaatattccattagtaatgatacaagccacagcagtagactttagatatccttttgctcctagctcagcacaaagcaacaatgtaaccttaacatgcttaaatatagcactttttcaaaattcaaactttgacgaccccagcattacacatggttactttcctaaacctaacttatacctatacagcagtaacaatcgactaataacagacccaacaaaatatgagtttaaggatataatatacctaggaaacacaaaggacagacaactaggaaaaaacagtgaaaacacatttgctgaatggggaaacccatttatgcctgaatatatacatggagaaaaacctgtatttacaaactcagttaaactcacaagccaaaactatgcaacacacaaaacccaaaacgcaattttacaagaagattacttctttacagttagatataacccagaaaatgacacagggtctgcaaacacaatatttattcaaaacaactttcaacaaacatcttggcatagaccacaaaatcctgatttaatattagaaggctttcccttatatgacatgctatggggatatttagactggcaaaaaaaacttcaaaaaacacaagacataagcaacaaatacatagcagtaatacaaacagaccaatttgatgacaaaaaaaactactatgtagtaatagatcctaaatttctagacggacataacccttatgattcaccactaacaaactataataaaagccactggaacatatgtactagaatacaagaaaaacctttaaatgacatttgtttaagtggaccaggtgcacctagaccagcctttggaaactatatgcaagccaaaatgcaatacagatttcactttaaatggggaggctgtccaaaggtattagaaaaaccttatgatccttgttcacagccttcctggaatatcccccgtaacttcgattcaggaattcaaatccagaatcctaacacaccaccagaaacagaactgcaaaagtgggactggagaagagactatattacgagcaaagctatccaaagaattaaacaatacgaaacaactgatgaaactttacaactctttacaggatgctccaaagacccaccaatactccaacaaacaaagacaccggagatcagctcagaggaggaagaagaggaaacaccatcactccaaaaccagatcaacaagctcaagcgacaccaacacaagctacagcagcgaatcctcaagcgaatgcgactaactacaaaataaaaggctgtaaaatacgagtacaactatttcctacaaaaactgagtttaaaaatcgtagatttactgagtctgaaagagaactagaaaaattagtagcaagagcatttaaaagacctcaaagacactttttctatgatcccccaacatatccttggcttcctcctgaaccacttgttaactttgatcttggaaataaattttaaggccaacaatattcacttagtggtgtctatttattaagtataaacttaaataaaccaactccgcctccctacagtagggcgccaaaaaggggctccgccccttaaaccccaagggggctccgcccccttaaaccccaaagggggctccgccccctaaaacccccaagggggctccgccccctattacccccaggaaaaccacataattagcatggctaaccacaaactgaaaaaggaaaccacaaaatttgcattgccgaccacaaacgaatatttaaattaacttccctaaatgaaacaacacttccctaaaaattaattaataaacatcgtcacaaggggaggagacaccacactataaaactaacatacatgacgaatggctgagtttatgccgctagacggaggacacttcacgttagtgacagtggactgaaaccggg

SEQ ID NO: 2580 - protein, 647 aa, Betatorquevirus sp.
MPYNWRRQRRRRYYRRRIPTWRIRQTFPRRWRIRRRIRRKPRRVRRRRFNRKLKTIKLTQFQPDVIRKCTIIGNICLFQGSPERASHNYVQYIYSYVPVGAPGGGGWTLMIESLSSLWEDWQHLKNVWTNSNAGLPLVRYLGATFYFFQSPYTDYIVNVIRCYPMTDTEHMHADSAPSRMLLKRKAVRVPSLETRRKRKPYKKVRVRPPAQMQNQWYFQKDICNIPLVMIQATAVDFRYPFAPSSAQSNNVTLTCLNIALFQNSNFDDPSITHGYFPKPNLYLYSSNNRLITDPTKYEFKDIIYLGNTKDRQLGKNSENTFAEWGNPFMPEYIHGEKPVFTNSVKLTSQNYATHKTQNAILQEDYFFTVRYNPENDTGSANTIFIQNNFQQTSWHRPQNPDLILEGFPLYDMLWGYLDWQKKLQKTQDISNKYIAVIQTDQFDDKKNYYVVIDPKFLDGHNPYDSPLTNYNKSHWNICTRIQEKPLNDICLSGPGAPRPAFGNYMQAKMQYRFHFKWGGCPKVLEKPYDPCSQPSWNIPRNFDSGIQIQNPNTPPETELQKWDWRRDYITSKAIQRIKQYETTDETLQLFTGCSKDPPILQQTKTPEISSEEEEEETPSLQNQINKLKRHQHKLQQRILKRMRLTTK

SEQ ID NO: 2581 - protein, 104 aa, Betatorquevirus sp.; identical to SEQ ID NO: 2577

SEQ ID NO: 2582 - protein, 123 aa, Betatorquevirus sp.; identical to SEQ ID NO: 2578

SEQ ID NO: 2583 - DNA, 2925 bp, Gammatorquevirus sp.
cgggagcccgaggtgagtgaaaccaccgaggtctaggggcaattcgggctagggcagtctagcggaacgggcaagaaatttaaaactatactgttttttagaatgaacaaccttactgcaacagacttctacaaacctacaccatacaatccagaaaccctgaatcaaatatggatgtctgagataagtgattcccatgacatttggtgcgactgcaaaagtccttttgctcacctgcttgcttctatttttcctcctggtcataaggaccgccatcttacagttgatcaaattattaaaagagactaccaagaagcatgccattctggtggaaccggcgccgcaaaccttggtttggcagatggaaaagatacagaccaaggtataaaaagagaagatggcccagaagaagacgcagaagagctccttttcgccgccgccgccgccgccgcagaagaaaaggaaaggtaagaagaaaaagacaaaaaataactgttaaacaatggcagcctgactctatagttaaatgcaaaataataggctttggatgtttagttgctggtgctgaaggcagacaatctttctgctacacaaacgaagtagctgaatatcctcaacctaaagcacctggaggtggtgggtttggagctgaactatattctttacaatacttatatgaacaatggattggtagaaaaaatatatggactaaatctaatgactataaagatttagtaagatatttatggtgtactataaaactatacagacacccaacaacagactttgtagttgcttacaatagacaaccaccatttttaattgaaaaagactactacaatgatattcaccctttaatgcttatgctagccaaacatcataaagtagtacctagtcttaaaagaaaaccctatggaaagccttatgttaaaatgaaaattaaaccacctaaacaaatgctaactaaatggttttttcaacaagactttgctaaacaaggcttatttacaatacaagcttcagcttgcaatttaggatgggcttactatggacctaacagtcaaagtagatgtattacaggatattctttaaacatacaattttaccaaatacaacaatgggcagccacgttaggcactcaaccatacctaccatactctgcatacccacatacaaaaccactaaaatactggacaaaaaatgacaaaggtcaaacatcatccacaacagtaaaaatagataattataacacaagtgtaaactacacaacaggattttttcaacctggagttttgcaagcaattaaaattacagccggtgagacatccagatttgaggatgcatcagcacaaagcaatttacctataacagcctttagatacaacccagacatagatgatggccatggaaatgcagtatggttagtaagcacactttcaggccaccactgggaaaaaccaggtgactctaacctaattatatcaggaaaaccactttggttagcattttatggtttctacaactttatacaaaaaactaaaaaagacaaaggctggctactaacaggatttttttgtgtgcaaagccctgctataaaattactaacaccacacaaacaaactatatttcctatattagatttagattttatacaaggaaaactaccttatggagaaacaattacaacagcaaaaaaaaatttatggtatcccaatgtagaaaatcaagttattacaataactaactttgtacaaacaggcccatacatacctaaatatgcatacctaaaagaaagcacatgggaactaacttataaatacatttttcattttaagtggggaggcccatatgtctctgatcaaccagtacaaaatccaaaagaccaaggaaaatatgatgtacccgatacaatcacacaaacagtacaagttagcgacccgctcaaacaaacctgtcaaacaatgcttagagactgggactacagaaggggcattgttacaacaacagctcttaaaagaatgtcagaacacctccaaattgattcatctctccaatctgatggctcagaaactccaaaaaagaaaaggaaaatcacagcagaaataccacaccatcaagaaaaagcacaagaaatgcaagcctgtctcctctcactcttcgaagaaagtacatgccaagacccccaagacctccaccagctcatccagttccagcagcagcagcagcacaagctcaagatcaacctcgtcaaactcctaatggacctaaaacaccaacaaagaattctacaacaccacacaggaatagattaaccaggtttaaacctggatttgaatgggaaactgaaaaacagttagcacaagcatttaacagaccacccagactctttaaagaagatacccccttttacccctggctacccaaatttacacctattgttaactttcaccttaactttaaaggctaggcctacactgatcacttagcggtgtttgtttatataagtttcacccccaaaaaaattgtaaaataaaaaaaaaaaaaaaaataaaaaattgcaaaaattcggcgctcgcgcgcgcatatgctaattagttccccttttacacagtaaaaaggggaagtggggggggcatagccccccccacaccccccgcggggggggcatagcccccccccgcaccccccctacgtcacaagccacgcccccgccgccattttgggtgcggcaaggcgggggctaaaatggcgggacccaatcattttatactttcactttccaattaaaacccgccacgtcacaacaaaggggtggaaacttcaacactataaaaccaagtaaggtgacgaatggctgagtttaccccgctagacggtgcagggaccggatcgagcgcagcgaggaggtccccggctgcccgtggg

SEQ ID NO: 2584 - protein, 664 aa, Gammatorquevirus sp.
MPFWWNRRRKPWFGRWKRYRPRYKKRRWPRRRRRRAPFRRRRRRRRRKGKVRRKRQKITVKQWQPDSIVKCKIIGFGCLVAGAEGRQSFCYTNEVAEYPQPKAPGGGGFGAELYSLQYLYEQWIGRKNIWTKSNDYKDLVRYLWCTIKLYRHPTTDFVVAYNRQPPFLIEKDYYNDIHPLMLMLAKHHKVVPSLKRKPYGKPYVKMKIKPPKQMLTKWFFQQDFAKQGLFTIQASACNLGWAYYGPNSQSRCITGYSLNIQFYQIQQWAATLGTQPYLPYSAYPHTKPLKYWTKNDKGQTSSTTVKIDNYNTSVNYTTGFFQPGVLQAIKITAGETSRFEDASAQSNLPITAFRYNPDIDDGHGNAVWLVSTLSGHHWEKPGDSNLIISGKPLWLAFYGFYNFIQKTKKDKGWLLTGFFCVQSPAIKLLTPHKQTIFPILDLDFIQGKLPYGETITTAKKNLWYPNVENQVITITNFVQTGPYIPKYAYLKESTWELTYKYIFHFKWGGPYVSDQPVQNPKDQGKYDVPDTITQTVQVSDPLKQTCQTMLRDWDYRRGIVTTTALKRMSEHLQIDSSLQSDGSETPKKKRKITAEIPHHQEKAQEMQACLLSLFEESTCQDPQDLHQLIQFQQQQQHKLKINLVKLLMDLKHQQRILQHHTGID

SEQ ID NO: 2585 - protein, 126 aa, Gammatorquevirus sp.
LFFRMNNLTATDFYKPTPYNPETLNQIWMSEISDSHDIWCDCKSPFAHLLASIFPPGHKDRHLTVDQIIKRDYQEACHSGGTGAANLGLADGKDTDQGIKREDGPEEDAEELLFAAAAAAAEEKER

SEQ ID NO: 2586 - protein, 108 aa, Gammatorquevirus sp.
LSPLTLRRKYMPRPPRPPPAHPVPAAAAAQAQDQPRQTPNGPKTPTKNSTTPHRNRLTRFKPGFEWETEKQLAQAFNRPPRLFKEDTPFYPWLPKFTPIVNFHLNFKG

SEQ ID NO: 2587 - DNA, 2925 bp, Alphatorquevirus sp.
ttaaggtcactaagcactccgagcgttagcgagaaggggcaattcgggctcgggactggccgggctatgggcaaggctcttaaaaaagacatgtttctcggtaaactttacagaaagaaaaggacactgtcactgcgcggcctgcgaactccagaggcgaaaccacctgctatgagttggaggcccccggtgcacaaccccaatgggatcgagagaaacctgtgggaggcattctttcgcatgcatgcttcagcttgtggttgtggcgatcttgttggccatcttactgtactggctggtcggtatggtgctcctcctcgtcccccggcccccggggctcccagaccaccgctgatacgccagctggcccttccggcgccccccactgatcctcagcaggccaacccacaatggcctggtggggacggtggagaagatggcgctggaagccccgccgctggcggcgccgtcgcagacgccgaataccaagaagacgagctcaacgccctgttcgacgccgtcgagcaagaagagtaaggaggaggagatgggggaggcggaggtggagacgggggtacagacgcagactgagactcagacgcagacgcagacgaaaaaaaataagactcactcagtggaacccagctaaagtcaggagatgtactattaagggggtcctgcccatgatcttgtgcggggccgggcgctcggggtttaactatggactgcacagcgacgactacactatacagaaaccccttggccagaacccccacgggggcggcatgagcacagtgacttttagcctgcaggtgctatatgaccagtaccagaggttcatgaacaagtggtcgtactccaacgaccagctagacctagccaggtactttggctgcaccttctggttctacagacacccagaagtggactttgtagctcagtttgacaacgttccccccatgaaaatggacgaaaacacggcccctaacactcacccctcatttctactacagaacaaacacagggttaaaattcccagctttaaaaccaagcctttcggcagaaaaaaagttaaagtaaaagtagggccccccaaactatttgaagacaagtggtacagccagcatgacttgtgtaaggtgcccctagtcagttggcggttaaccgcagctgacttcaggtttccgttctgctcaccacaaactgacaacccttgctacaccttccaggtattgcatgaagagtattacccagtaataggcacttctgctttagaacagggaactaattacaattcaacaggcatatccgcattagaaaattttttatatggcaaatgtacccactatcaaacatttgccacagacacaagactaaaccctcagagacccatatcagcaaacaataaaagcacatataatcccagtggagccactgaaacaatggtatggactcaaactgactttaactcatttaaaaagcacacagacagcaactatggctactgcacctactgtcctactaatgaattaattaacaaaattaaaaaatacagagacaaaagattccagtggctaactgaaacgccacagacaaacacctgtcacataaatgccacctacgcccgaggaaaaattaaagagtgggaatatcacctaggctggtactcaaatatatttataggcaacctcagacacaacctagcattccgaacagcatacattgacattacctacaaccccattacagacaaaggagaaggtaacatagtgtggttccaatatgccaccaaacctaacacacagtacatagagagccaggcaaaatgcactatcaaagacatacccctatatgctgctttttatggctacgaagactacatccaaagaacactaggcccctaccaagatgtagaaacactaggtataatatgtgttaaatgtccctacacagatccccctctaactcacaagtcagcagataaaaaagactggggctacgtgttttacgacgttcactttggcaacggaaagaccccagaaggactgggccaggtgcacccctactggatgcagaggtggagaccctacgtacagtttcaaaaagacactatgaacaaaatagccaggacgggaccgttcagctacagagacgagacgccttccatcactctcaccgccgggtacaagtttaattttaactgggggggcgactctatatttccacagattattaaaaacccctgtccagacagcggggtacgaccttcatccagtagagagcgtcgctcagtacaagtcgttagcccgctcacaatggggccagaatacatattccaccggtgggactggcgacgggggttctttaatcaaaaagctctcaaaagaatgcttgaaaaatcagttaatgatggagagtatccaacaggcccaaaggtccctcgatggtttcccccactcgacaaccaagagcaagaaggcgcctcagattcagaagagacaacctcgcagtcctcgcaagaagaagccgctcaagaagccctccaagaagtccaagaggcgtcgctacagcagcacctcctccagcagtaccgagagcagcgacgaatcggaaagcaactccaactcgtcatgctccaactcaccaagacgcagagcaacctgcacataaatccccgtgtccttggccatgcataaataaagtgtacatgtttcccccggaaaaacccatgcccatacacggttaccacgggtgggagacggagtatcaggcctgcaaagcctttgacaggccccctagaaactacctgtcagacaaacccatctatccctggcttccccgctcccaaccagaatttaaagtaagttttaagcttggttttcaataaacaaggccgtgggaatttcacttgtcggtgtctacctc

SEQ ID NO: 2588 - protein, 761 aa, Alphatorquevirus sp.
MAWWGRWRRWRWKPRRWRRRRRRRIPRRRAQRPVRRRRARRVRRRRWGRRRWRRGYRRRLRLRRRRRRKKIRLTQWNPAKVRRCTIKGVLPMILCGAGRSGFNYGLHSDDYTIQKPLGQNPHGGGMSTVTFSLQVLYDQYQRFMNKWSYSNDQLDLARYFGCTFWFYRHPEVDFVAQFDNVPPMKMDENTAPNTHPSFLLQNKHRVKIPSFKTKPFGRKKVKVKVGPPKLFEDKWYSQHDLCKVPLVSWRLTAADFRFPFCSPQTDNPCYTFQVLHEEYYPVIGTSALEQGTNYNSTGISALENFLYGKCTHYQTFATDTRLNPQRPISANNKSTYNPSGATETMVWTQTDFNSFKKHTDSNYGYCTYCPTNELINKIKKYRDKRFQWLTETPQTNTCHINATYARGKIKEWEYHLGWYSNIFIGNLRHNLAFRTAYIDITYNPITDKGEGNIVWFQYATKPNTQYIESQAKCTIKDIPLYAAFYGYEDYIQRTLGPYQDVETLGIICVKCPYTDPPLTHKSADKKDWGYVFYDVHFGNGKTPEGLGQVHPYWMQRWRPYVQFQKDTMNKIARTGPFSYRDETPSITLTAGYKFNFNWGGDSIFPQIIKNPCPDSGVRPSSSRERRSVQVVSPLTMGPEYIFHRWDWRRGFFNQKALKRMLEKSVNDGEYPTGPKVPRWFPPLDNQEQEGASDSEETTSQSSQEEAAQEALQEVQEASLQQHLLQQYREQRRIGKQLQLVMLQLTKTQSNLHINPRVLGHA

SEQ ID NO: 2589 - protein, 156 aa, Alphatorquevirus sp.
MGKALKKDMFLGKLYRKKRTLSLRGLRTPEAKPPAMSWRPPVHNPNGIERNLWEAFFRMHASACGCGDLVGHLTVLAGRYGAPPRPPAPGAPRPPLIRQLALPAPPTDPQQANPQWPGGDGGEDGAGSPAAGGAVADAEYQEDELNALFDAVEQEE

SEQ ID NO: 2590 - protein, 147 aa, Alphatorquevirus sp.
MVSPTRQPRARRRLRFRRDNLAVLARRSRSRSPPRSPRGVATAAPPPAVPRAATNRKATPTRHAPTHQDAEQPAHKSPCPWPCINKVYMFPPEKPMPIHGYHGWETEYQACKAFDRPPRNYLSDKPIYPWLPRSQPEFKVSFKLGFQ

SEQ ID NO: 2591 - DNA, 2924 bp, Alphatorquevirus sp.
gctacgccttcggctgcgccacacaccgcagtctaggggcaattcgggcacgggtctggccgggctatgggcaaggctcttaaaaaattaccccggtgtgttctccgccaggacaacaagtcatgccgtggcgaccgccggtgcataacatcccgggtagagaaaatcaatggtttgcaagcttctttcacgggcatgcttctttttgcggttgtggtgaccctgttgggcatcttaacggcattgctcatcgctttcctcacgccgctccaccgagaccacctccagggctagagcagccaaacctcggagggccggaaggtcccggaggtcccccggcacccctgccagctctgcctgccccggcagagcccgacccggcaccacgccgtggtggtggggccgatggaggcggcgccgctggggccgccgccgccgcagaccatggaggatacgacgaaggagatctagaagatcttttcgccgccgcggccgaagacgatatgtgagtaggcgggggcgccgccgcagattctggcgcagacgcagacggggcagacgcagggggcgacgaaagacacacaaacccactattgtactcagacagtggcaacctgacgtagtgagaccctgcaaaataacaggatggatgccccttattatctgtgggtcaggaagcacccagttcaacttcataacccacatggatgactttccccccatgggctacacctacgggggcaattttacaaatgtaaccttctcattagaggccatatatgaacaatttctttaccacagaaacagatggagctcctccaaccatgacctagaccttgccaggtaccagggaaccaccctaaaactatacagacacgaatacctagactacatagtcagctacaacagaacaggcccttttcagatcagcgacatgacctacctcagcactcaccctgctatgatgctacttcaaaaacatagaatagtagtacccagctttaaaacaaagccaagggggcgcaggtccataaaaattagaataaagcccccaaaactaatgctaaacaagtggtacttcacaaaagacatttgcagcatgggactcttccaactacaggccacagcatgcaccttaaacaacccctggctcagagacaccaccaagagccctgtcataggctttagagtccttaaaaactcctactactcagacctttctaacttagcagatgaagagtctgagaacagaaggcgaggaattattaaccacctccacccacaaacactaacaggctcaccaccaaatgccaaaggatgggaaatcacttacacaagactaatgggacccacatactacaaatcagtaccaagcagcacatacaattggctaaattatcaaacacactatgctacagtttataatgcgtttgcaaaagaaaaaagcgcaaaattagacacaataaacaaggaataccattaccactaccccacatatgcaataaaagactttaaaacaaattcaacacttacacatgactatggcatatacagtccctactacttaacaccaaccagaataagcttagactggcaaacaccatggacatatataagatacaacccactagcagacaaaggcctaggaaacatagtatacgctcagtggtgctcagaaaaaacacccaatgtcagcacaactaaaagcaaatgcataatgaaagacctaccactatggtgcatattctatggctacatagactgggtaattaaaagcaccggagtaagctccgctgctacagacatgagaataatgataataagtccttacactgacccagcacttatagggtcaactccagaccaaggctttctgccagtaagtgacaccttttgcaatggagacatgccgtttcttgcaccatatgtgccaatcaagtggtgggttaactggtacccttgcattgcacaccaaaaggaagtgtttgaggcaattgttaactgtggaccgttcgtcccacgagaccagacgaaaccctcttgggaaattaccttaggttacaaaatgaactggaaatggggtggctctcccctgccttcacaggcaatcgacgacccctgccagaagcccacccatgagcttcccgaccccgatagacaccctcgcatgctacaagtctcagacccgacaaagctcggaccgaagacagtgttccacaagtgggactggagacgtgggatgcttagcaaaagaagtattaaaagagtccaagaagactcaagcgatgatgaatatgttgcagggcctctatcacgaaaaagaaacaagctcgacaccaggaccggaggtcttcaaacccccgaaaaagaaagttacactttactccaagccctccaagactcggcggaagagagcccctcgagccaagaacaagcaccccaagaagaaaaccaaaaagaggcgctcctacagcagctcgagctccaaaagcagcaccagcgagtcctcaaacgaggcctcaaactcctcctgggagacatcctccgactccgccgaggagtccactgggaccccctcctgtcctaattcagggtccttctatcccagacctgcttttccctaacacacaaaaaaaaaaactattttccaactacgactgggtgtgcgagtacgagctggccaaatggatggatcgccccttgcggcactacccatcagacccccctcactacccctggctaccaaaaaagcctgctacccctcctacatgtagagtaagtttcaaattaaagctcgatgcctaaaattcaaggccgtgggtgtttcacttcatcggtgtctacctctaaaagtcactaagcactccgagcgtaagcgaggagtgcgacccccctgcccggtagcaacttcctcggggtccggc

SEQ ID NO: 2592 - protein, 645 aa, Alphatorquevirus sp.
MPLIICGSGSTQFNFITHMDDFPPMGYTYGGNFTNVTFSLEAIYEQFLYHRNRWSSSNHDLDLARYQGTTLKLYRHEYLDYIVSYNRTGPFQISDMTYLSTHPAMMLLQKHRIVVPSFKTKPRGRRSIKIRIKPPKLMLNKWYFTKDICSMGLFQLQATACTLNNPWLRDTTKSPVIGFRVLKNSYYSDLSNLADEESENRRRGIINHLHPQTLTGSPPNAKGWEITYTRLMGPTYYKSVPSSTYNWLNYQTHYATVYNAFAKEKSAKLDTINKEYHYHYPTYAIKDFKTNSTLTHDYGIYSPYYLTPTRISLDWQTPWTYIRYNPLADKGLGNIVYAQWCSEKTPNVSTTKSKCIMKDLPLWCIFYGYIDWVIKSTGVSSAATDMRIMIISPYTDPALIGSTPDQGFLPVSDTFCNGDMPFLAPYVPIKWWVNWYPCIAHQKEVFEAIVNCGPFVPRDQTKPSWEITLGYKMNWKWGGSPLPSQAIDDPCQKPTHELPDPDRHPRMLQVSDPTKLGPKTVFHKWDWRRGMLSKRSIKRVQEDSSDDEYVAGPLSRKRNKLDTRTGGLQTPEKESYTLLQALQDSAEESPSSQEQAPQEENQKEALLQQLELQKQHQRVLKRGLKLLLGDILRLRRGVHWDPLLS

SEQ ID NO: 2593 - DNA, 2924 bp, Gammatorquevirus sp.
cgggagcccgaggtgagtgaaaccaccgaggtctaggggcaattcgggctagggcagtctagcggaacgggcaagaaatttaaaactatactgttttttagaatgaacaaccttactgcaacagacttctacaaacctacaccatacaatccagaaaccctgaatcaaatatggatgtctgagataagtgattcccatgacatttggtgcgactgcaaaagtccttttgctcacctgcttgcttctatttttcctcctggtcataaggaccgccatcttacagttgatcaaattattaaaagagactaccaagaagcatgccattctggtggaaccggcgccgcaaaccttggtttggcagatggaaaagatacagaccaaggtataaaaagagaagatggcccagaagaagacgcagaagagctccttttcgccgccgccgccgccgccgcagaagaaaaggaaaggtaagaagaaaaagacaaaaaataactgttaaacaatggcagcctgactctatagttaaatgcaaaataataggctttggatgtttagttgctggtgctgaaggcagacaatctttctgctacacaaacgaagtagctgaatatcctcaacctaaagcacctggaggtggtgggtttggagctgaactatattctttacaatacttatatgaacaatggattggtagaaaaaatatatggactaaatctaatgactataaagatttagtaagatatttatggtgtactataaaactatacagacacccaacaacagactttgtagttgcttacaatagacaaccaccatttttaattgaaaaagactactacaatgatattcaccctttaatgcttatgctagccaaacatcataaagtagtacctagtcttaaaagaaaaccctatggaaagccttatgttaaaatgaaaattaaaccacctaaacaaatgctaactaaatggttttttcaacaagactttgctaaacaaggcttatttacaatacaagcttcagcttgcaatttaggatgggcttactatggacctaacagtcaaagtagatgtattacaggatattctttaaacatacaattttaccaaatacaacaatgggcagccacgttaggcactcaaccatacctaccatactctgcatacccacatacaaaagaactaaaatactggacaaaaaatgacaaaggtcaaacatcatccacaacagtaaaaatagataattataacacaagtgtaaactacacaacaggattttttcaacctggagttttgcaagcaattaaaattacagccggtgagacatccagatttgaggatgcatcagcacaaagcaatttacctataacagcctttagatacaacccagacatagatgatggccatggaaatgcagtatggttagtaagcacactttcaggccaccactgggaaaaaccaggtgactctaacctaattatatcaggaaaaccactttggttagcattttatggtttctacaactttatacaaaaaactaaaaaagacaaaggctggctactaacaggatttttttgtgtgcaaagccctgctataaaattactaacaccacacaaacaaactatatttcctatattagatttagattttatacaaggaaaactaccttatggagaaacaattacagcagcaaaaaaaaatttatggtatcccagtgtagaaaatcaagttattacaataactaactttgtacaaacaggcccatacatacctaaatatgcatacctaaaagaaagcacatgggaactaacttataaatacatttttcattttaagtggggaggcccatatgtctctgatcaaccagtacaaaatccaaaagaccaaggaaaatatgatgtacccgatacaatcacacaaacagtacaagttagcgacccgctcaaacaaacctgtcaaacaatgcttagagactgggactacagaaggggcattgttacaacaacagctcttaaaagaatgtcagaacacctccaaattgattcatctctccaatctgatggctcagaaactccaaaaaagaaaaggaaaatcacagcagaaataccacaccatcaagaaaaagcacaagaaatgcaagcctgtctcctctcactcttcgaagaaagtacatgccaagacccccaagacctccaccagctcatccagttccagcagcagcagcagcacaagctcaagatcaacctcgtcaaactcctaatggacctaaaacaccaacaaagaattctacaacaccacacaggaatagattaaccaggtttaaacctggatttgaatgggaaactgaaaaacagttagcacaagcatttaacagaccacccagactctttaaagaagatacccccttttacccctggctacccaaatttacacctattgttaactttcaccttaactttaaaggctaggcctacactgatcacttagcggtgtttgtttatataagtttcacccccaaaaaaattgtaaaataaaaaaaaaaaaaaaaataaaaaattgcaaaaattcggcgctcgcgcgcgatatgctaattagttccccttttacacagtaaaaaggggaagtgggggggggcatagcccccccacaccccccgcgggggggggcatagccccccccgcaccccccctacgtcacaagccacgcccccgccgccattttgggtgcggcaaggcgggggctaaaatggcgggacccaatcattttatactttcactttccaattaaaacccgccacgtcacaacaaaggggtggaaacttcaacactataaaaccaagtaaggtgacgaatggctgagtttaccccgctagacggtgcagggaccggatcgagcgcagcgaggaggtccccggctgcccgtggg

SEQ ID NO: 2594 - protein, 664 aa, Gammatorquevirus sp.
MPFWWNRRRKPWFGRWKRYRPRYKKRRWPRRRRRRAPFRRRRRRRRRKGKVRRKRQKITVKQWQPDSIVKCKIIGFGCLVAGAEGRQSFCYTNEVAEYPQPKAPGGGGFGAELYSLQYLYEQWIGRKNIWTKSNDYKDLVRYLWCTIKLYRHPTTDFVVAYNRQPPFLIEKDYYNDIHPLMLMLAKHHKVVPSLKRKPYGKPYVKMKIKPPKQMLTKWFFQQDFAKQGLFTIQASACNLGWAYYGPNSQSRCITGYSLNIQFYQIQQWAATLGTQPYLPYSAYPHTKELKYWTKNDKGQTSSTTVKIDNYNTSVNYTTGFFQPGVLQAIKITAGETSRFEDASAQSNLPITAFRYNPDIDDGHGNAVWLVSTLSGHHWEKPGDSNLIISGKPLWLAFYGFYNFIQKTKKDKGWLLTGFFCVQSPAIKLLTPHKQTIFPILDLDFIQGKLPYGETITAAKKNLWYPSVENQVITITNFVQTGPYIPKYAYLKESTWELTYKYIFHFKWGGPYVSDQPVQNPKDQGKYDVPDTITQTVQVSDPLKQTCQTMLRDWDYRRGIVTTTALKRMSEHLQIDSSLQSDGSETPKKKRKITAEIPHHQEKAQEMQACLLSLFEESTCQDPQDLHQLIQFQQQQQHKLKINLVKLLMDLKHQQRILQHHTGID

SEQ ID NO: 2595 - protein, 126 aa, Gammatorquevirus sp.; identical to SEQ ID NO: 2585

SEQ ID NO: 2596 - protein, 108 aa, Gammatorquevirus sp.; identical to SEQ ID NO: 2586

SEQ ID NO: 2597 - DNA, 2923 bp, Betatorquevirus sp.
cgggagccgaaggtgagtgaaaccaccgtagtctaggggaccaccgtagtctaggggcaattcgggctagatcagtctggcggaacgggcaagtaacttaaatttatattttacagaatgacaactcgcataataccaacaaaagattctattaaacaaaagaatctaaaatggatgaatcttctggtacacagccatgatattttctgcgactgcccaaacccactgcaacacacaattatactaatttgccaacaagaaccagaaattgatttaaaaccaattgaaaaggatatagttaaaaaatgccttattggagaaactacggataccgctggaaccgccgtcgacgatggcgtagaagaaggcgatttggaaggccttttcaaagaagactttggagacgaagacaccgcagggtaagaaaaagaaaacttaaatctattaaactgaaacagtggcaaccacaattcataaaaagactaaaaattgttggaactgagccactatttataacaacttcagaaagactttcaaatgaatttacttcttacaaagacagtattgcgccgcatcttgtacctgggggagggggcttttcaataatgaactttactttaaatgcattgtataaaaaacatttagtactagaaaactggtggacagcaagcaatgaaaatatgccacttattagattactaggtattacaatgtacttttacagacaatcagaatttgactacttaacacaatatataagacaatatccaatgactgcatcacacctaaaatacactagcacacacccacaagtgatgctattacataaaaacacattaaaaattacatgcaaaagaaacaatagaaacaaaaaaccatacaaaaaaattaaaataaaaccacctacacaaatgcaaaaccgttggtatttccaaaaagatcttgcagacataccactattacaactaataaccacagcaacatcgttagaccgcatgtttgttagctcaacatcagttagctctactataggtttcacaagtctagattacttaggattttataaccacaattacacaaaagaaggaacacaaggatatgtagcaaaaccaggccaactgctttttgcagtacaacaaagctcttataatataaaaactataaaagcaactcaattaatatatatgggcaacgctatggacttaacagaaggcacaccagcaggacaaataaaacaacaacaatacacccaatacactcaatatagtaacactatacaaaaacaactaaaatacatacaaatgcacccagacacttggggaaatccatttaatgatgaatttcacagaaccggagctttaataactacaagtttagattgggaacaaataataaagaaatttacagacgtaaacctaaacctaacagacgaattcacttggaaaacaacattcacatttccagtcagatataacccatttgcagacaaaggcacaggaaacaaactatatttaataaaatggaaagaccctgcacatgaaacagactgggacataccagcagcaaccacactttatgaaaacatgcctttatggttaatgctatggggctacttagacttttatagaaaatcaggagaactatcatcaatagatacaacacacttactaataataaaaacaacatacacacaaccaaaagataaaacattactaatacctctagaccaagactttttagaaggtagaagtccttatatgggacaacaagaaacaacagcaagtgacagacaaaactggcaccctaaaataagatttcagataagatcaataaatactatagcctcatgtggtcctgcaaccataaaacttccacctgaacaatcagcagaagctcatgtaaaatatgtatttcattttaagattggaggaacaccaccaccaatggcaacacttacagaacctgacaaacaaccaaaatataccactcccgataacatcctctcgtcaacttcgttgcagagtccaacatctccctttgaatacatgctctacaactttgacgaaagacgaggccaaattacaaaaagagctgcagaaagaatctctaaatacaaagaaactgaacaaactgttctcccatttacagagtcagctctatccagctttacaacaccccaagaaaaaacaccgacaccagaaacatcggacgaggaaaaagaagaaatgtcgctcgaggaacagctccacctccagcgaaagcagcaaaaactcctccgaaacagaatcaacaaactcctccagcgactagcacttttagaatagaaaaatgtaaaattcaagttcaattatttccacctgatgtaaccccaaatcgtagaatgactaaatgggaatatgaacaagaattagaagatgctaaatggtggtgtagagtacctagaacctttataaaagataaacctacttatccttgggtgccacaagacacaccatactgtgtaaactttgatttaaatgcgccgcaataaatacacaaggcctgcaaactttcaatctcggtgtccatttatataagtataaacttaaataaacatccaccacactccctaacacgcaggcgcacaagggggctccgccccctaacccccagggggggctaacgccccccctataaccccccctaattaccatattcaacaggaaaaccacctaatttaaattgccgaccacaaactgtcaccaacttccctaattcctcttacttcctcttacactaataaatattcattacattaattaataatcaccgtaaatccggggaggagttaccactctatataactaactacagtgacgaatggctgagtttacgccgccagacgaagactgcacaactacagtgtctgcaggctgatcttggg

SEQ ID NO: 2598 - protein, 672 aa, Betatorquevirus sp.
MPYWRNYGYRWNRRRRWRRRRRFGRPFQRRLWRRRHRRVRKRKLKSIKLKQWQPQFIKRLKIVGTEPLFITTSERLSNEFTSYKDSIAPHLVPGGGGFSIMNFTLNALYKKHLVLENWWTASNENMPLIRLLGITMYFYRQSEFDYLTQYIRQYPMTASHLKYTSTHPQVMLLHKNTLKITCKRNNRNKKPYKKIKIKPPTQMQNRWYFQKDLADIPLLQLITTATSLDRMFVSSTSVSSTIGFTSLDYLGFYNHNYTKEGTQGYVAKPGQLLFAVQQSSYNIKTIKATQLIYMGNAMDLTEGTPAGQIKQQQYTQYTQYSNTIQKQLKYIQMHPDTWGNPFNDEFHRTGALITTSLDWEQIIKKFTDVNLNLTDEFTWKTTFTFPVRYNPFADKGTGNKLYLIKWKDPAHETDWDIPAATTLYENMPLWLMLWGYLDFYRKSGELSSIDTTHLLIIKTTYTQPKDKTLLIPLDQDFLEGRSPYMGQQETTASDRQNWHPKIRFQIRSINTIASCGPATIKLPPEQSAEAHVKYVFHFKIGGTPPPMATLTEPDKQPKYTTPDNILSSTSLQSPTSPFEYMLYNFDERRGQITKRAAERISKYKETEQTVLPFTESALSSFTTPQEKTPTPETSDEEKEEMSLEEQLHLQRKQQKLLRNRINKLLQRLALLE

SEQ ID NO: 2599 - protein, 101 aa, Betatorquevirus sp.
MTTRIIPTKDSIKQKNLKWMNLLVHSHDIFCDCPNPLQHTIILICQQEPEIDLKPIEKDIVKKCLIGETTDTAGTAVDDGVEEGDLEGLFKEDFGDEDTAG

SEQ ID NO: 2600 - DNA, 2923 bp, Betatorquevirus sp.
cgggagccgaaggtgagtgaaaccaccgtagtctaggggaccaccgtagtctaggggcaattcgggctagatcagtctggcggaacgggcaagtaacttaaatttatattttacagaatgacaactcgcataataccaacaaaagattctattaaacaaaagaatctaaaatggatgaatcttctggtacacagccatgatattttctgcgactgcccaaacccactgcaacacacaattatactaatttgccaacaagaaccagaaattgatttaaaaccaattgaaaaggatatagttaaaaaatgccttattggagaaactacggataccgctggaaccgccgtcgacgatggcgtagaagaaggcgatttggaaggccttttcaaagaagactttggagacgaagacaccgcagggtaagaaaaagaaaacttaaatctattaaactgaaacagtggcaaccacaattcataaaaagactaaaaattgttggaactgagccactatttataacaacttcagaaagactttcaaatgaatttacttcttacaaagacagtattgcgccgcatcttgtacctgggggagggggcttttcaataatgaactttactttaaatgcattgtataaaaaacatttagtactagaaaactggtggacagcaagcaatgaaaatatgccacttattagattactaggtattacaatgtacttttacagacaatcagaatttgactacttaacacaatatataagacaatatccaatgactgcatcacacctaaaatacactagcacacacccacaagtgatgctattacataaaaacacattaaaaattacatgcaaaagaaacaatagaaacaaaaaaccatacaaaaaaattaaaataaaaccacctacacaaatgcaaaaccgttggtatttccaaaaagatcttgcagacataccactattacaactaataaccacagcaacatcgttagaccgcatgtttgttagctcaacatcagttagctctactataggtttcacaagtctagattacttaggattttataaccacaattacacaaaagaaggaacacaaggatatgtagcaaaaccaggccaactgctttttgcagtacaacaaagctcttataatataaaaagtataaaagcaactcaattaatatatatgggcaacgctatggacttaacagaaggcacaccagcaggacaaataaaacaacaacaatacacccaatacactcaatatagtaacactatacaaaaacaactaaaatacatacaaatgcacccagacacttggggaaatccatttaatgatgaatttcacagaaccggagctttaataactacaagtttagattgggaacaaataataaagaaatttacagacgtaaacctaaacctaacagacgaattcacttggaaaacaacattcacatttccagtcagatataacccatttgcagacaaaggcacaggaaacaaactatatttaataaaatggaaagaccctgcacatgaaacagactgggacataccagcagcaaccacactttatgaaaacatgcctttatggttaatgctatggggctacttagacttttatagaaaatcaggagaactatcatcaatagatacaacacacttactaataataaaaacaacatacacacaaccaaaagataaaacattactaatacctctagaccaagactttttagaaggtagaagtccttatatgggacaacaagaaacaacagcaagtgacagacaaaactggcaccctaaaataagatttcagataagatcaataaatactatagcctcatgtggtcctgcaaccataaaacttccacctgaacaatcagcagaagctcatgtaaaatatgtatttcattttaagattggaggaacaccaccaccaatggcaacacttacagaacctgacaaacaaccaaaatataccactcccgataacatcctctcgtcaacttcgttgcagagtccaacatctccctttgaatacatgctctacaactttgacgaaagacgaggccaaattacaaaaagagctgcagaaagaatctctaaatacaaagaaactgaacaaactgttctcccatttacagagtcagctctatccagctttacaacaccccaagaaaaaacaccgacaccagaaacatcggacgaggaaaaagaagaaatgtcgctcgaggaacagctccacctccagcgaaagcagcaaaaactcctccgaaacagaatcaacaaactcctccagcgactagcacttttagaatagaaaaatgtaaaattcaagttcaattatttccacctgatgtaaccccaaatcgtagaatgactaaatgggaatatgaacaagaattagaagatgctaaatggtggtgtagagtacctagaacctttataaaagataaacctacttatccttgggtgccacaagacacaccatactgtgtaaactttgatttaaatgcgccgcaataaatacacaaggcctgcaaactttcaatctcggtgtccatttatataagtataaacttaaataaacatccaccacactccctaacacgcaggcgcacaagggggctccgccccctaacccccagggggggctaacgccccccctataaccccccctaattaccatattcaacaggaaaaccacctaatttaaattgccgaccacaaactgtcaccaacttccctaattcctcttacttcctcttacactaataaatattcattacattaattaataatcaccgtaaatccggggaggagttaccactctatataactaactacagtgacgaatggctgagtttacgccgccagacgaagactgcacaactacagtgtctgcaggctgatcttggg

SEQ ID NO: 2601 - protein, 672 aa, Betatorquevirus sp.
MPYWRNYGYRWNRRRRWRRRRRFGRPFQRRLWRRRHRRVRKRKLKSIKLKQWQPQFIKRLKIVGTEPLFITTSERLSNEFTSYKDSIAPHLVPGGGGFSIMNFTLNALYKKHLVLENWWTASNENMPLIRLLGITMYFYRQSEFDYLTQYIRQYPMTASHLKYTSTHPQVMLLHKNTLKITCKRNNRNKKPYKKIKIKPPTQMQNRWYFQKDLADIPLLQLITTATSLDRMFVSSTSVSSTIGFTSLDYLGFYNHNYTKEGTQGYVAKPGQLLFAVQQSSYNIKSIKATQLIYMGNAMDLTEGTPAGQIKQQQYTQYTQYSNTIQKQLKYIQMHPDTWGNPFNDEFHRTGALITTSLDWEQIIKKFTDVNLNLTDEFTWKTTFTFPVRYNPFADKGTGNKLYLIKWKDPAHETDWDIPAATTLYENMPLWLMLWGYLDFYRKSGELSSIDTTHLLIIKTTYTQPKDKTLLIPLDQDFLEGRSPYMGQQETTASDRQNWHPKIRFQIRSINTIASCGPATIKLPPEQSAEAHVKYVFHFKIGGTPPPMATLTEPDKQPKYTTPDNILSSTSLQSPTSPFEYMLYNFDERRGQITKRAAERISKYKETEQTVLPFTESALSSFTTPQEKTPTPETSDEEKEEMSLEEQLHLQRKQQKLLRNRINKLLQRLALLE

SEQ ID NO: 2602 - protein, 101 aa, Betatorquevirus sp.; identical to SEQ ID NO: 2599

SEQ ID NO: 2603 - DNA, 2923 bp, Betatorquevirus sp.
cgggagccgaaggtgagtgaaaccaccgtagtctaggggcaattcgggctagatcagtctggcggaacgggcaagaaacttaaaatatatttattttatagatatgtcatctatttggaagaaaccaaatgtgacaccgagatatctagaacttggatggatgaatttagtacaccaaagccatgatcaaatttgccactgtgaagacgccgacctacactttatgattttaatcaacaaattcggaggagccaaaaaaccagaaccagaaataagaaacataaaatgcctccttaccggagatactaccaaagctactactacagaaaccgcagaagaagatatcggaatagattcaggagacctagaaaaacttttcgaagaagatattggagaaccaaataccgcagaagacgtccaaaggtaaaaaaattcagaaaaagaaaactaaaaaaactaatacttaaagtatttcaacctaaatctattaaaaaatgtaaaattaaaggaatgaaatgcctctttcaaggagccattgaaagagcaaacaataactatatacaatacatttatgatactgttaatgacagaagaccagggggtggaggatggagtttacaagtgtttagcctagaatcattatttgaagaatatgaacatttgttaaatgtatggactactagcaacgccgctttaccccttgttagatatagaggttgtaaatttcgattttatcaaagtaatgatactgattatgttgtaaagtatgacaactgttggcctatggtagacacaaaatacacacacgcagacagcgcaccacaaagaatgctaagagcacaacataaaatagtagtacctagcagaaaatcacaaactagaaaaaaaccatataaaacagcattcataagacctccatcacaaatgacaaataactggtatttccaaagagacatttgcaaaacacctttagcaatgctaaccacaacagccgttgacttaagaaacccttttgcagcaccagaagcccgcagcaataatgttacattatactcattaaacacttttcaatttaaaaataccaactttcaacaaccagatccacaaaaaggataccactataaaacagaaggaacagaaaaatactacttatatgcagctcatacacacagtactacttgggcagaactaataccactaacaaacaccaaagacaaccaaccaggaaaacaacttaaagtacttattaatgataataataaaaacaacaaactatcaaactggggaaatccatttcaccacacatacacaccagatgattttaaattctactttatgacaaaatcacctacagaaatcaaaaaatcagaattaaccaaccttttaacacaaacaggtataacagaatttacaagctatttatattaccaattaagatacaatccagaaaaagacaccggagacacaaacaaagtatacttagtatctaacttacatgaaacaaactggaatgaaccagaaaacccaaatttaattttagaaggctttccacttagtatactactttggggatgggtagactggcaaaaaaaattaaaacaagtatcaaacataaataaccaatacattgtagtaattaaaacaaaaatgttttcagaaaacttaaaccactacgtactgctagacaaagactttatagatggatttgaaccatactccccacacgatacaaacgacataatacctataacaccacaaaatcaacaacactggtacccaaaattttcatttcaagaacaatctattaacacactttgcctatcaggttcaggatgcccacgaccaccatggaatcactatctacaggccttatgtacatatacattctatttttcctttggaggatgtccaaaacaattaaaaaaagtttatgatccttgtttacagtcaaaatggcccacagccgataacatcccttcaacaactgaaatcaagaatcctaacaccgcaccacaaacagaacttttctcctgggactgggaaggtgactttgttaaaacaacagctatacaacgaattaaagaatacacgccatcttatgaatcaatattctcatctacaggaacaaagtcagatgcaataccactcaaagaagcccaagaaagccaaacacaagcccaagaagaggaaaaggagttattcgtccagctccagcagctccgacacaagcggaaaatcctccagtaccaactaaacgaattattattaagaagcacaccacaacagtagaactatttccaaaaccaaaaaagaacagaacttttacaccttcagaaagagaattagaaagacaagtagctatagcattttgcagaccccaaagacaatacttttatgatacccctatatacccatggctaccacctgcaccaataatgccaaaagtaaactttgatataaactatgtaaataaataaaaaattcaaggccaacaaatttcacttgtcggagtccatttatttaagttaaactttaataaacatccaccactctcccaaaattgttggcgtagcaaagggggctctgcccccttacacccccaagggggctccgcccccttacacccccaagggggctccgcccccttacacccccacaagggggctccgcccccttacaccccctaataaatattcaacaggaaaaccacctaatttaaattgccgaccacaaaccgtctactacttctcctttttacacttacttcctcttttactaattattattcattacattaattattaaacaccgtaattccggggaggagactattaactatataactaactacacttccgaatggctgagtttatgccgccagacgaaggaggcatcaccttagtgactgcagactgatcttggg

SEQ ID NO: 2604 - protein, 667 aa, Betatorquevirus sp.
MPPYRRYYQSYYYRNRRRRYRNRFRRPRKTFRRRYWRTKYRRRRPKVKKFRKRKLKKLILKVFQPKSIKKCKIKGMKCLFQGAIERANNNYIQYIYDTVNDRRPGGGGWSLQVFSLESLFEEYEHLLNVWTTSNAALPLVRYRGCKFRFYQSNDTDYVVKYDNCWPMVDTKYTHADSAPQRMLRAQHKIVVPSRKSQTRKKPYKTAFIRPPSQMTNNWYFQRDICKTPLAMLTTTAVDLRNPFAAPEARSNNVTLYSLNTFQFKNTNFQQPDPQKGYHYKTEGTEKYYLYAAHTHSTTWAELIPLTNTKDNQPGKQLKVLINDNNKNNKLSNWGNPFHHTYTPDDFKFYFMTKSPTEIKKSELTNLLTQTGITEFTSYLYYQLRYNPEKDTGDTNKVYLVSNLHETNWNEPENPNLILEGFPLSILLWGWVDWQKKLKQVSNINNQYIVVIKTKMFSENLNHYVLLDKDFIDGFEPYSPHDTNDIIPITPQNQQHWYPKFSFQEQSINTLCLSGSGCPRPPWNHYLQALCTYTFYFSFGGCPKQLKKVYDPCLQSKWPTADNIPSTTEIKNPNTAPQTELFSWDWEGDFVKTTAIQRIKEYTPSYESIFSSTGTKSDAIPLKEAQESQTQAQEEEKELFVQLQQLRHKRKILQYQLNELLLRSTPQQ

SEQ ID NO: 2605 - protein, 122 aa, Betatorquevirus sp.
LAERARNLKYIYFIDMSSIWKKPNVTPRYLELGWMNLVHQSHDQICHCEDADLHFMILINKFGGAKKPEPEIRNIKCLLTGDTTKATTTETAEEDIGIDSGDLEKLFEEDIGEPNTAEDVQR

SEQ ID NO: 2606 - DNA, 2923 bp, Betatorquevirus sp.
cgggtgccgaaggtgagtgaaaccaccgaagtcaaggggcaattcgggctaggtcagtctagcggaacgggcaagaaacttaaaataatatttttattttacagaatgagcaccagatacaagccagcaaaatgctctctaagacagcaaaaactaaaatggatgaatagcattgttcacacccacgacattttttgcgactgcccacatccactggaacatacagcttttttgatatttgaacaagaaccagaattaaaatttacaccaccagaacaagacaccattaaaaaatgccttactactacaactggtatggatatcgtcgcagacgaccacgacaacgacggttttggagaaggagatttagaagaccttttcaaagaagattttggagaagaaaacatcgacgggtaagaaaaaaacttaaaaaaattaagatttcagaatggcaacctcaatatataaagagactaactgttaaaggatactatccacttttcatggcaacttcagaaagactatctaataacttaccatgctatttggaaagcatagcacctgaattttggccgggaggcgggggattttctatatataactttagcttaaatactttgtatgaagaaaactctgtacttcataactggtggactactagcaatgataacatgccattaataagatttatgggagtaaaaataattctgtatagacaagacactgttgattacctatttagctacaatagaaactacccaatgcaagccagcatgctaacatacacaagcacacatccacaagccatgctactaaacaaacacactataaaagttacatgcaaacaaagatcacgctcaagaaaaaactataaagtagttaaaataaaacctcctgtacaaatgatgtccaaatggtactttcaaaaagacttagcatttttaccgttattacaaactatgaccacaagctgcagtttagaccgcatgtttcttaacagctctgcagttagttccacaataggttttgtaagccttgacacagaagggttcagaaaccacaactttacaaaatttagcacaacaggatactacccagtacatgaagaaaaactatttggctgcccaaacggccaagaaataaataaattaaatataggacaacttagatatttaggtaatccacaagacaatcaagaaggtacacaaataaacttaataccaataacagccacaggcacacaaacaaaactacaacaacaaatagacagagtaaaaggagaatggggatttcaaggaaacccattttattctcactactttcatggagatttaagagtactagtaacaacactagactggaacacaataaaaaacacatacggaaactcagacactcatccacccacactaaacaaagaccactttaaactaaaaacccaaaaatttgtaaactgcagatacaatccattcaaagacaaaggcaaaggaaacaaaatatacttactaaaaacagactccacacaacatcccgatgaatggacacctccaccaacagaagatgtaatattacaagacttaccactatggctagccacatggggatatctagactaccaaagaaagtgcggagcacaacaacaaatagacaccaactctgtgtttgtaatatttagtaaatatattgacccaccaacacttaaatactatgttccactagattttccctttttacatggacacagtccatacacagaagacttatatcccagtgacagactaaactggcatcctaaagttagatatcaagtacaaactgtaaatagaattgcatgtagtggacctactgtaaccaaattaccagaacaaatttcatgtgaaggacatatgcaatatcaattttattttaaggttggaggacaaccagctccaatgtccacaattattgacccagacaaacaaccaaaatataatatacccggtaatgtcctccaaacaacttcgttgcagagtccaacaactccgttcgaatacatcttatacaacttcgaccaaagacgaggggaaattactaaaaaagctgcaaaaagaatcacaacagacagacaaactgaaacagatcttttatcagttacagaaacaagcctcgcatgcccagtgctgtccaccaaagtccaaacgacatcggactcatcgtcggaggaagaaacaaaagaaacatcgatcgaggagcagctcaagctccagcgaagagagcaaaagcttctccggagaggaatccagcaactcctcaacagattaacaaatatagaataaaaactggacctgttactgttcaattatttcctactgatccccctaatcgtagattaaccacatgggaatgggaacaagagttagaggacagtaaaatttggtgcagagtacctagaaactttataaaagacagacctacatacccatgggttccccaagactctccttatactgtaaactttgatttaaatgcgccgcaataaatttctaagcctgcaaactttcactctcggtgtccatttatattagttttaacttaaataaacatccaccacactccctaatacgcaggcgcaaagggggctccgcccccttggcgcaaagggggctccgcccccttaaacccccagggggggcaaagccccccctattacccccccccataaatattcatacaggaaaccacaaaatttgcattgccgaccacaaacagacaaatgcaaattaacttcctgaaactacacttaacttccctaaaaattaattagtaatcagaatcacaataggcggagcatattaactataaaactaagtacacattcgaatggctgagtttacgccgctagacggagacgggatcacttcagtgactccaggctaaccaaggg

SEQ ID NO: 2607 - protein, 673 aa, Betatorquevirus sp.
MPYYYNWYGYRRRRPRQRRFWRRRFRRPFQRRFWRRKHRRVRKKLKKIKISEWQPQYIKRLTVKGYYPLFMATSERLSNNLPCYLESIAPEFWPGGGGFSIYNFSLNTLYEENSVLHNWWTTSNDNMPLIRFMGVKIILYRQDTVDYLFSYNRNYPMQASMLTYTSTHPQAMLLNKHTIKVTCKQRSRSRKNYKVVKIKPPVQMMSKWYFQKDLAFLPLLQTMTTSCSLDRMFLNSSAVSSTIGFVSLDTEGFRNHNFTKFSTTGYYPVHEEKLFGCPNGQEINKLNIGQLRYLGNPQDNQEGTQINLIPITATGTQTKLQQQIDRVKGEWGFQGNPFYSHYFHGDLRVLVTTLDWNTIKNTYGNSDTHPPTLNKDHFKLKTQKFVNCRYNPFKDKGKGNKIYLLKTDSTQHPDEWTPPPTEDVILQDLPLWLATWGYLDYQRKCGAQQQIDTNSVFVIFSKYIDPPTLKYYVPLDFPFLHGHSPYTEDLYPSDRLNWHPKVRYQVQTVNRIACSGPTVTKLPEQISCEGHMQYQFYFKVGGQPAPMSTIIDPDKQPKYNIPGNVLQTTSLQSPTTPFEYILYNFDQRRGEITKKAAKRITTDRQTETDLLSVTETSLACPVLSTKVQTTSDSSSEEETKETSIEEQLKLQRREQKLLRRGIQQLLNRLTNIE

SEQ ID NO: 2608 - protein, 103 aa, Betatorquevirus sp.
MSTRYKPAKCSLRQQKLKWMNSIVHTHDIFCDCPHPLEHTAFLIFEQEPELKFTPPEQDTIKKCLTTTTGMDIVADDHDNDGFGEGDLEDLFKEDFGEENIDG

SEQ ID NO: 2609 - protein, 122 aa, Betatorquevirus sp.
MPSAVHQSPNDIGLIVGGRNKRNIDRGAAQAPAKRAKASPERNPATPQQINKYRIKTGPVTVQLFPTDPPNRRLTTWEWEQELEDSKIWCRVPRNFIKDRPTYPWVPQDSPYTVNFDLNAPQ

SEQ ID NO: 2610 - DNA, 2923 bp, Alphatorquevirus sp.
tcttaaggtcactaagcactccgagcgttagcgaaggggcaattcgggctcgggactggccgggctatgggcaaggctcttaaaaaagacatgtttctcggtaaactttacagaaagaaaaggacactgtcactgcgcggcctgcgaactccagaggcgaaaccacctgctatgagttggaggcccccggtgcacaaccccaatgggatcgagagaaacctgtgggaggcattctttcgcatgcatgcttcagcttgtggttgtggcgatcttgttggccatcttactgtactggctggtcggtatggtgctcctcctcgtcccccggcccccggggctcccagaccaccgctgatacgccagctggcccttccggcgccccccactgatcctcagcaggccaacccacaatggcctggtggggacggtggagaagatggcgctggaagccccgccgctggcggcgccgtcgcagacgccgaataccaagaagacgagctcaacgccctgttcgacgccgtcgagcaagaagagtaaggaggaggagatgggggaggcggaggtggagacgggggtacagacgcagactgagactcagacgcagacgcagacgaaaaaaaataagactcactcagtggaacccagctaaagtcaggagatgtactattaagggggtcctgcccatgatcttgtgcggggccgggcgctcggggtttaactatggactgcacagcgacgactacactatacagaaaccccttggccagaacccccacgggggcggcatgagcacagtgacttttagcctgcaggtgctatatgaccagtaccagaggttcatgaacaagtggtcgtactccaacgaccagctagacctagccaggtactttggctgcaccttctggttctacagacacccagaagtggactttgtagctcagtttgacaacgttccccccatgaaaatggacgaaaacacggcccctaacactcacccctcatttctactacagaacaaacacagggttaaaattcccagctttaaaaccaagcctttcggcagaaaaaaagttaaagtaaaagtagggccccccaaactatttgaagacaagtggtacagccagcatgacttgtgtaaggtgcccctagtcagttggcggttaaccgcagctgacttcaggtttccgttctgctcaccacaaactgacaacccttgctacaccttccaggtattgcatgaagagtattacccagtaataggcacttctgctttagaacagggaactaattacaattcaacaggcatatcctcattagaaaattttttatatggcaaatgtacccactatcaaacatttgccacagacacaagactaaaccctcagagacccatatcaggaaacaatgaaagcacatataatcccagtggagccactgaaacaatggtatggactcaaactgactttaacttatttaaaaagcacacagacagcaactatggctactgcacctactgtcctactactgaattaattaacaaaattaaaaaatacagagacaaaagattccagtggctaactgaaacgccacagacaaacacctgtcacataaatgccacctacgcccgaggaaaaattaaacagtgggaatatcacctaggctggtactcaaatatatttataggcaacctcagacacaacctagcattccgaacagcatacattgacattacctacaaccccattacagacaaaggagaaggtaacatagtgtggttccaatatgccaccaaacctaacacacagtacatagagagccaggcaaaatgcactatcaaagacatacccctatatgctgctttttatggctacgaagactacatccaaagaacactaggcccctaccaagatgtagaaacactaggtataatatgtgttaaatgtccctacacagatccccctctaactcacaagtcagcagataaaaaagactggggctacgtgttttacgacgttcactttggcaacggaaagaccccagaaggactgggccaggtgcacccctactggatgcagaggtggagaccctacgtacagtttcaaaaagacactatgaacaaaatagccaggacgggaccgttcagctacagagacgagacgccttccatcactctcaccgccgggtacaagtttaattttaactgggggggcgactctatatttccacagattattaaaaacccctgtccagacagcggggtacgaccttcatccagtagagagcgtcgctcagtacaagtcgttagcccgctcacaatggggccagaatacatattccaccggtgggactggcgacgggggttctttaatcaaaaagctctcaaaagaatgcttgaaaaatcagttaatgatggagagtatccaacaggcccaaaggtccctcgatggtttcccccactcgacaaccaagagcaagaaggcgcctcagattcagaagagacaacctcgcagtcctcgcaagaagaagccgctcaagaagccctccaagaagtccaagaggcgtcgctacagcagcacctcctccagcagtaccgagagcagcgacgaatcggaaagcaactccaactcgtcatgctccaactcaccaagacgcagagcaacctgcacataaatccccgtgtccttggccatgcataaataaagtgtacatgtttcccccggaaaaacccatgcccatacacggttaccacgggtgggagacggagtatcaggcctgcaaagcctttgacaggccccctagaaactacctgtcagacaaacccatctatccctggcttccccgctcccaaccagaatttaaagtaagttttaagcttggttttcaataaacaaggccgtgggaatttcacttgtcggtgtctacc

SEQ ID NO: 2611 - protein, 761 aa, Alphatorquevirus sp.
MAWWGRWRRWRWKPRRWRRRRRRRIPRRRAQRPVRRRRARRVRRRRWGRRRWRRGYRRRLRLRRRRRRKKIRLTQWNPAKVRRCTIKGVLPMILCGAGRSGFNYGLHSDDYTIQKPLGQNPHGGGMSTVTFSLQVLYDQYQRFMNKWSYSNDQLDLARYFGCTFWFYRHPEVDFVAQFDNVPPMKMDENTAPNTHPSFLLQNKHRVKIPSFKTKPFGRKKVKVKVGPPKLFEDKWYSQHDLCKVPLVSWRLTAADFRFPFCSPQTDNPCYTFQVLHEEYYPVIGTSALEQGTNYNSTGISSLENFLYGKCTHYQTFATDTRLNPQRPISGNNESTYNPSGATETMVWTQTDFNLFKKHTDSNYGYCTYCPTTELINKIKKYRDKRFQWLTETPQTNTCHINATYARGKIKQWEYHLGWYSNIFIGNLRHNLAFRTAYIDITYNPITDKGEGNIVWFQYATKPNTQYIESQAKCTIKDIPLYAAFYGYEDYIQRTLGPYQDVETLGIICVKCPYTDPPLTHKSADKKDWGYVFYDVHFGNGKTPEGLGQVHPYWMQRWRPYVQFQKDTMNKIARTGPFSYRDETPSITLTAGYKFNFNWGGDSIFPQIIKNPCPDSGVRPSSSRERRSVQVVSPLTMGPEYIFHRWDWRRGFFNQKALKRMLEKSVNDGEYPTGPKVPRWFPPLDNQEQEGASDSEETTSQSSQEEAAQEALQEVQEASLQQHLLQQYREQRRIGKQLQLVMLQLTKTQSNLHINPRVLGHA

SEQ ID NO: 2612 - protein, 156 aa, Alphatorquevirus sp.; identical to SEQ ID NO: 2589

SEQ ID NO: 2613 - protein, 147 aa, Alphatorquevirus sp.; identical to SEQ ID NO: 2590

SEQ ID NO: 2614 - DNA, 2922 bp, Alphatorquevirus sp.
cgcgcttcgcgggtgagtttacacaccgcagtcaaggggcaattcgggcacgggactggccgggctatgggcaagattcttaaaaaattttcccgatccgtctgtcgccaggacataaaaacatgccgtggagaccgccggtgcatagtgtccaggggcgagaggatcagtggttcgcaagtttttttcacagccacgcttcattttgcggttgcggtgaccctgttggccatcttaatagcattgctcatcgctttcctcgtgccggtccaccaaggccccttccggggctagaccagcctaaccccccggagcagggcccggccgggcccggagggccgcccgccatcttggccctgccggctccgcccgcggagcctgacgacccgcagccacgccgtggtggtggggacgctggcgccgccgctggcgccgcaggcgaccgtggagaccgagactacgacgaagaagagctagacgagcttttccgcgccgccgccgaagacgatttgtaagtaggagatggcgccggccttacaggcgcaggaggagacgcgggcgacgcagacgcagacgcagacgcagacataagcccaccttagtactcagacagtggcaacccgacgttatcagacactgtaagataacaggatggatgcccctcattatctgcggaaaggggtccacccagtttaactacatcacccacgcggacgatatcactcccaggggagcctcctacgggggcaacttcacaaacttgactttctcccttgaggccatatatgaacagtttttgtaccacagaaacaggtggtctgcctccaaccacgacctagaactctgcagatacaagggtaccaccataaagctatacaggcacccagacgttgactacatagtcacctacagcagaacaggccccttcgagatcagccacatgacctacctcagcactcaccccctactaatgctgctaaacaaacaccacatagtggtgcccagcctaaagactaagcccagaggcagaaaggccataaaagtcagaataagacccccaaaactaatgaataacaagtggtactttaccagagacttctgtaacataggcctcttccagctgtgggcaacaggcttagaactcagaaacccctggctcagaatgagcaccctgagcccctgcataggcttcaatgtcctgaaaaacagcatctacaccaacctaagcaacctgccacaacacaaaaacgccagactagatatcataaacaacacacttcacccagatcaaattacaggggcaaacaacaaaaagtggcagtacacatacacaaaactcatggcccctatttactattcagcaaacagggccagcacctatgactgggaaaattacagcaaagaaagtaactaccataacacatatcaaaagttttaccaaaaaagagaagaaaaattagcaaaaatcagaaaagaatggcagatgttatatccacaacaacctactgcactgccagattcctatgacctcctacaggagtatggcctatacagcccatactacctaaaccccacaaggataaacctagactggatgaccccctacacacacgtaaggtacaaccctctcgtagacaaaggctttggaaacagaatatacattcagtggtgctcagaggcagatgtcagctacaacagaacaaagtccaagtgtctcttacaagacatgcccctgtttttcatggcctatggctacatagactgggcaataaaaaacacaggggtgtcctcactagtcaaagacgccagaatctgcatcaggtgcccctacacagagccacagctcgtggggtccacagaagacataggctttgtacccatctcagagaccttcatgaggggcgacatgccggtacttgcaccatacataccgttaagctggttttgcaagtggtatcccaacatagctcaccagaaggaagtccttgaggcaatcatttcctgcagccccttcatgccccgtgaccaagacatgaacggttgggatatcacaatcggttacaaaatggacttcttatggggcggttcccctctcccctcacagccaatcgacgacccctgccagcagggaacccacccgattcccgaccccgataaacaccctcgcctcctacaagtctcgaacccgaaactactcggaccgaggacagtgttccacaagtgggacatcagacgtgggcagtttagcaaaagaagtattaagagagtgtcacaatactcaagcgatgatgaatctcttgcgccaggtctcccatcaaagcgaaacaagctcgactcggcgttcagaggagaaaatcgagagcaaaaagaatgctattccctcctcaaagcgctcgaggaagaagagaccccagaagaagaagaaccagcaccccaagaaaaagcccagaaagaggagctactccaccagctccagctccagagacgccaccagcgagtcctcagacgagggctcaagctcgtctttacagacatcctccgactccgccagggagtccactggaatcccgagctcacatagagcccccaccttacatcccagacctgctttttcccaatactggtaaaaaaaaaaaattctctcccttcgactgggaaacagaggcccagctggcggggtggatgcatcggcctatgcgcttctatccctcagacaccccttactacccgtggctaccccccgagcgagatatcccgaaaatatgtaacataaacttcaaaataaagcttcaagagtgagtaattcgaggccctcctctgttcacttagcggtgtctacctcttaaggtcaccaagcactccgagcgccagcgaggagtgcgaccctccaccaaggggcaacttcctcggggtccggcgcta

SEQ ID NO: 2615 - protein, 641 aa, Alphatorquevirus sp.; identical to SEQ ID NO: 2234

SEQ ID NO: 2616 - DNA, 2922 bp, Betatorquevirus sp.
cgggtgccgaaggtgagtgaaaccaccgaagtcaaggggcaattcgggctaggtcagtctagcggaacgggcaagaaacttaaaataatatttttattttacagaatgagcaccagatacaagccagcaaaatgctctctaagacagcaaaaactaaaatggatgaatagcattgttcacacccacgacattttttgcgactgcccacatccactggaacatacagcttttttgatatttgaacaagaaccagaattaaaatttacaccaccagaacaagacaccattaaaaaatgccttactactacaactggtatggatatcgtcgcagacgaccacgacaacgacggttttggagaaggagatttagaagaccttttcaaagaagattttggagaagaaaacatcgacgggtaagaaaaaaacttaaaaaaattaagatttcagaatggcaacctcaatatataaagagactaactgttaaaggatactatccacttttcatggcaacttcagaaagactatctaataacttaccatgctatttggaaagcatagcacctgaattttggccgggaggcgggggattttctatatataactttagcttaaatactttgtatgaagaaaactctgtacttcataactggtggactactagcaatgataacatgccattaataagatttatgggagtaaaaataattctgtatagacaagacactgttgattacctatttagctacaatagaaactacccaatgcaagccagcatgctaacatacacaagcacacatccacaagccatgctactaaacaaacacactataaaagttacatgcaaacaaagatcacgctcaagaaaaaactataaagtagttaaaataaaacctcctgtacaaatgatgtccaaatggtactttcaaaaagacttagcatttttaccgttattacaaactatgaccacaagctgcagtttagaccgcatgtttcttaacagctctgcagttagttccacaataggttttgtaagccttgacacagaagggttcagaaaccacaactttacaaaatttagcacaacaggatactacccagtacatgaagaaaaactatttggctgcccaaacggccaagaaataaataaattaaatataggacaacttaaatatttaggtaatccacaagacaatcaagaaggtacacaaataaacttaataccaataacagccacaggcacacaaacaaaactacaacaacaaatagacagagtaaaaggagaatggggatttcaaggaaacccattttatgctcactactttcatggagatttaagagtactagtaacaacactagactggaactcaataaaaaccatatacggaaactcagacagtaatccaaccacactaaacaaagaccactttaaactaaaaacccaaaaatttgtaaactgcagatacaatccattcaaagacaaaggcaaaggaaacaaaatatacttactaaaaacagactccacacaacatcccgatgaatggacacctccaccaacagaagatgtaatattacaagacttaccactatggctagccacatggggatatctagactaccaaagaaagtgcggagcacaacaacaaatagacaccaactctgtgtttgtaatatatagtaaatatattgacccaccaacacttaaatactatgttccactagattttccctttttacatggacacagtccatacacagaagacttatatcccagtgacagactaaactggcatcctaaagttagatatcaagtacaaactgtaaatagaattgcatgtagtggacctactgtaaccaaattaccagaacaaatttcatgtgaaggacatatgcaatatcaattttattttaaggttggaggacaaccagctccaatgtccacaattattgacccagacaaacaaccaaaatataatatacccggtaatgtcctccaaacaacttcgttgcagagtccaacaactccgttcgagtacatcttatacaacttcgaccaaagacgaggggaaattactaaaaaagctgcaaaaagaatcacaacagacagacaaactgaaacagatcttttatcagttacagaaacaagcctcgcatgcccagtgctgtccaccaaagtccaaacgacatcggactcatcgtcggaggaagaaacaaaagaaacatcgatcgaggagcagctcaagctccagcgaagagagcaaaagcttctccggagaggaatccagcaactcctcaacagattaacaaatatagaataaaaactggacctgttactgttcaattatttcctactgatccccctaatcgtagattaaccacatgggaatgggaacaagagttagaggacagtaaaatttggtgcagagtacctagaaactttataaaagacagacctacatacccatgggttccccaagactctccttatactgtaaactttgatttaaatgcgccgcaataaatttctaagcctgcaaactttcactctcggtgtccatttatattagttttaacttaaataaacatccaccacactccctaatacgcaggcgcaaagggggctccgcccccttggcgcaaagggggctccgcccccttaaacccccagggggggcaaagccccccctattaccccccccataaatattcatacaggaaaccacaaaatttgcattgccgaccacaaacagacaaatgcaaattaacttcctgaaactacacttaacttccctaaaaattaattagtaatcagaatcacaataggcggagcatattaactataaaactaagtacacattcgaatggctgagtttacgccgctagacggagacgggatcacttcagtgactccaggctgaccaaggg

SEQ ID NO: 2617 - protein, 673 aa, Betatorquevirus sp.
MPYYYNWYGYRRRRPRQRRFWRRRFRRPFQRRFWRRKHRRVRKKLKKIKISEWQPQYIKRLTVKGYYPLFMATSERLSNNLPCYLESIAPEFWPGGGGFSIYNFSLNTLYEENSVLHNWWTTSNDNMPLIRFMGVKIILYRQDTVDYLFSYNRNYPMQASMLTYTSTHPQAMLLNKHTIKVTCKQRSRSRKNYKVVKIKPPVQMMSKWYFQKDLAFLPLLQTMTTSCSLDRMFLNSSAVSSTIGFVSLDTEGFRNHNFTKFSTTGYYPVHEEKLFGCPNGQEINKLNIGQLKYLGNPQDNQEGTQINLIPITATGTQTKLQQQIDRVKGEWGFQGNPFYAHYFHGDLRVLVTTLDWNSIKTIYGNSDSNPTTLNKDHFKLKTQKFVNCRYNPFKDKGKGNKIYLLKTDSTQHPDEWTPPPTEDVILQDLPLWLATWGYLDYQRKCGAQQQIDTNSVFVIYSKYIDPPTLKYYVPLDFPFLHGHSPYTEDLYPSDRLNWHPKVRYQVQTVNRIACSGPTVTKLPEQISCEGHMQYQFYFKVGGQPAPMSTIIDPDKQPKYNIPGNVLQTTSLQSPTTPFEYILYNFDQRRGEITKKAAKRITTDRQTETDLLSVTETSLACPVLSTKVQTTSDSSSEEETKETSIEEQLKLQRREQKLLRRGIQQLLNRLTNIE

SEQ ID NO: 2618 - protein, 103 aa, Betatorquevirus sp.; identical to SEQ ID NO: 2608

SEQ ID NO: 2619 - protein, 122 aa, Betatorquevirus sp.; identical to SEQ ID NO: 2609

SEQ ID NO: 2620 - DNA, 2922 bp, Alphatorquevirus sp.
acgccttcggctgcgcgcggcacctcagaccccaaggggcaattcgggctcgggactggccgggctatgggcaaggctcttaaaaaaagctatgtttcttggtaaactttacagacagaagaggcgcctgccactgtccccactgcacactccacaaaaaactcgcaagcttctgactgctatgtggagaccccccgtgcacaatgtccgcgggcaggagagacagtggtacgagtcctgctttcggtctcacgcttgcttttgtggctgtggtgattttattcggcatatttgtgatctggcgaatgattttggacgtcctcctaccgtccctcgacccccggcaccaccacctccagtaaggccactgccagctctcccggcaccccccaacccccccggtagcagagcggcatggcctactggtggtggagacggagaagaagagccccgtggaggaggagacggcgctggaggactcgcagaactcgcagacgaagagctgctttccgccgtcgtggacgccgccgaagagtaagaaagaggagggggaggtggaggaggacttatagaaaatggcggaggggcagaaagagacgcaggcacaaaagacgcttaatactgactcagtggcaacccgcctttataagacgctgctatatagtgggctacctgccccttttaatatgcggagaaaacacctccggcagaaactttgccacccactcagacgacctcatatccaacggaccttacgggggaggcatgaccactaccaagttcaccctcagaatactgtatgacgaacacctaagacaccttaactactggactgttagtaacgaggacttagacttgtgcagatacctcggggggaccttctacgcatacagacaccccactgtagactttattgtacaaatccacaccagtccccctttcctagacactgccctgacgggtcccagcatacacccaggcatgctgatgctgacaaaaaacaaagtactaatacccagcttaaaaaccagacctaacaaaaagcacaaagtaaaaattagattcaggcctcctaaactattccaagacaagtggtacccccagtcagagctctgtgacacaacactactaaccgtctttgcaaccgcatgtgacctgcaatttccgttcggctcaccactaacgaacaacccttgcgtcaacttccaggtgctaggttccgtttacaaacggcacctcagtatacttcctgaaaaactattagcagctaaacaacactttgaaaataatttattttcaatattacaatactacgatacattccaaactatagcacaaataaaacccagcgctacacagtcagactttactccatcatggtcaaacatacaaaacaaaacagcattagactcagcaggtacaaaccaaactttagctaatgacacctggtacctaggaaaagcctacacaacacaagtgatcactgcagcacaaaaagtcagacaaaaatacctaaaggcaaccagacaagcccttccagcactagcaacagtaggagacgaaatgttagaataccacgcaggcatttacagctctatattcctatctgcaggcagatcttactttgaaaccctaggggcctacacagatgtagtttacaacccactagtagacaaaggcataggtaacaaactatggctagaccccttatcaaaagaagacgcaatattaaacagaaaacaagcaaaagtacttatagaagacatgcccctatgggcagccctatttggctacacagaatttgcagccaagtacacaggagactctgccataacagccaactacagactaacaatacggtgcccctacacagaccccatgctagtagacaaaagcaacgaagaccagggcttcgtaccctactccaagaactttggcaacggaaaaatgcccggaggcagcgccaatgttccactgactatgagaataagatggtaccccatactattccatcagctagaatggctagaagaaatgattcagtctggaccgtttgcataccggggcgacgagaaaagttgtgtgttagccataaagtacattttcagatggaaatggggaggtaaccctgtgtctcaccagattgtgcgaaatccctgcaaaggagggtccggttcccgtcgagagcctcgctcaatacaagcagctgacccgaaatacatcacaccgagactatccttccactcgtgggacttcagacgagggctttttggctcggcaagtattaaaagaatgtcagaagaatcaacagctcctgtctatcctacaggcccaccaagaaaaagaccaagaaaagacacggacccgtacgagtcggggcaagaagaaaactcactttcaagacacctccagctccagccctgggtccactccagccaagaagcccaaagcgaagaagaaacgcaagtctcgacgaacctacaggaacaactcctccagcagctccgagaccaacagcagctccgacagcacctgcagtccctcgcctcacaagtcctcaaaatcagggcgggatacggcatacaccccctattatcttcccaagcctaaacaaggtctttatgtttgagcctaaaggccccaaacccatacagggctatcaggcctggttagatgagtaccaaacagcaggtatctgggataggccggtaagaacataccacacagacacccccttctacccctgggcacccaaaccccccgaacaattccgtgtcagcttcaaacttggctttcaataaaatttcaaggcctttgactgttcacttgtcggtgtctacctctataagtcactaagcactccgagcgttagcgaggagtgcgaccctagggggggactcaacgccttcggagccgcgcgct

SEQ ID NO: 2621 - protein, 731 aa, Alphatorquevirus sp.
MAYWWWRRRRRAPWRRRRRWRTRRTRRRRAAFRRRGRRRRVRKRRGRWRRTYRKWRRGRKRRRHKRRLILTQWQPAFIRRCYIVGYLPLLICGENTSGRNFATHSDDLISNGPYGGGMTTTKFTLRILYDEHLRHLNYWTVSNEDLDLCRYLGGTFYAYRHPTVDFIVQIHTSPPFLDTALTGPSIHPGMLMLTKNKVLIPSLKTRPNKKHKVKIRFRPPKLFQDKWYPQSELCDTTLLTVFATACDLQFPFGSPLTNNPCVNFQVLGSVYKRHLSILPEKLLAAKQHFENNLFSILQYYDTFQTIAQIKPSATQSDFTPSWSNIQNKTALDSAGTNQTLANDTWYLGKAYTTQVITAAQKVRQKYLKATRQALPALATVGDEMLEYHAGIYSSIFLSAGRSYFETLGAYTDVVYNPLVDKGIGNKLWLDPLSKEDAILNRKQAKVLIEDMPLWAALFGYTEFAAKYTGDSAITANYRLTIRCPYTDPMLVDKSNEDQGFVPYSKNFGNGKMPGGSANVPLTMRIRWYPILFHQLEWLEEMIQSGPFAYRGDEKSCVLAIKYIFRWKWGGNPVSHQIVRNPCKGGSGSRREPRSIQAADPKYITPRLSFHSWDFRRGLFGSASIKRMSEESTAPVYPTGPPRKRPRKDTDPYESGQEENSLSRHLQLQPWVHSSQEAQSEEETQVSTNLQEQLLQQLRDQQQLRQHLQSLASQVLKIRAGYGIHPLLSSQA

SEQ ID NO: 2622 - protein, 175 aa, Alphatorquevirus sp.
LRAAPQTPRGNSGSGLAGLWARLLKKAMFLGKLYRQKRRLPLSPLHTPQKTRKLLTAMWRPPVHNVRGQERQWYESCFRSHACFCGCGDFIRHICDLANDFGRPPTVPRPPAPPPPVRPLPALPAPPNPPGSRAAWPTGGGDGEEEPRGGGDGAGGLAELADEELLSAVVDAAEE

SEQ ID NO: 2623 - protein, 126 aa, Alphatorquevirus sp.
LGPLQPRSPKRRRNASLDEPTGTTPPAAPRPTAAPTAPAVPRLTSPQNQGGIRHTPPIIFPSLNKVFMFEPKGPKPIQGYQAWLDEYQTAGIWDRPVRTYHTDTPFYPWAPKPPEQFRVSFKLGFQ

SEQ ID NO: 2624 - DNA, 2921 bp, Betatorquevirus sp.
cgggtgccgaaggtgagtgaaaccaccgtagtcaaggggcttaatgggcagaatcagtcttggcggaacgggcaactaacttaaatatatttgttttagaatgactacaagatacaaaccagcaaaatgctcacccagacaaacaactttaaaatggatgaatatgatctgcgccgttcatgacaacttctgcgaatgcccacatccagtagaacacacttctatacttcttttccaacaagaacctgaacaaaagttttcaccaatagaaaaagatataattaaaaaatgccttggtggagaagttaccgctacagaaaatacagaccaagatggagacgttcttggagacggagatttagacgcccttttcgctacagattttggagacccagaagacaaagggtaagaaaaagaaaacttaaaactttaaaacttaaagtatggcaaccgcactatataagacgctgtaaaatcataggattttatccaatggctttagcaacaacagaaagaacttctaataatttgaacttatacttagaaactgccgcttctcactatttacctggaggaggttcatttagtattgacaattttagcttagaatctctatataaagaacatatgatattaagaaatgtatggacttctagtaatgacaatttaccacttgtaagatacatgggatgcacaatgtacctatatagaaatgcaaccgctgactggttattcttttacaataatcaatatcctatgaaagcagatttaacaatgtatcaaagctgtcaaccttatataatgttactaaacaacaaaactattgttataccatgtaaacaatataatagaaacaaaaaaaactatgtaaaaataagaataagaccaccaacattaatgcaaaacaactggtattttcaaagaaaattttcagatattcctatattacaaactatgtctacactatgctcgttagaccgcatgtacacatcagccaccgctatttcaacaacaataggtttctacactttagacatactatactggcaaaaccaccaatttacacaacaaccgacatcaggctacttcccaaaacaagatgctataatatttggcttagaaaacggagacatagatatatctaacgaaaaattagagaatttaatatttttaggaaacacagacgactacacactaggaacacctgctaaacacgtaccagaagacaccaaaagccctcaattaactaacactttacaaaaaaaattatctaaaatgagacaagataaacaatactggggaaatccatttataacagactattttaatggacacagaaccatgctcactactaacatgaattggaataccttaatacaatatgcaaaagacaataccacatgtggaaacaaatttcaaaaactatcaagtccatactttgaagttagatacaatccttacaaagacaaaggaataggcaacaaaatatacatgctaccaatatacacatcagaaaatcaatacaactggacatctacaatagcagacaaagaatctatagcacaagacttacccctttgggtattatttcatggatacctagatttccacagaaaatgggcacaaatacaatcaatagacacaaaacatatagtagtaatatacagcacttatatgcaaccaacagacaaacattactttgtacctttagactgggactttataaatggaacatcaccatacagaccagaacacgaaagaacaccatcagatacacacttttggcacccaaaaacatcattccaactacaatcaataaataatattgtacaatcaggaccagcaaccataaaactccctaaagatatatcagcagaatgtaagataaaatataaattttcttttaagttcggaggatcaccagcacccatggccaccattaaagacccagatgatcaaccacaatttattacacccagtaacatcttacaaacaacttcgttacagaatccaacacaaccactccaatactatctcagcagcttcgatgaaagacgaggaatgcttactaaaaaagctgcaaaaagaatcagtgaatacaaagaaactgaaacaagtgttattccaattacagaaacaagctgcagcccatggggaccaccctaccaagaaacacagacaccggacacatcggacacggaagaagaggaaacaccacaagaggcaatcaagcgactcagaaaagagcagcacctcctccgacaccgaatcaacaagctcctcaaccaactagctcaataaaaatacataaatgtacatttaatgtaaagctatttgatgatgatcccccaaaaaatcgtagaatgaccgcatgggaatttaaagaagaattagaggacgctgccttttggcatagagcgcctagaatgtttattaaagatagacctacatatccctgggtaccccaagacactccattcactgtaaactttgatcttaatgcgccgaaataaaaattcaaggcctgcaaacattccttctcggtgtccatttatataagttcaacttaaataaacatccaccactctcccaaatacgcaggcgcactagggggctccgccccctaaaacccccagggggggtaaaccccccctaaaaccccccctaataaatattcataaaggaaacccccctaataaatattcataaaggaaaccacaaaattagaattgccgaccacaaacagacatatgcaaattacttccccaaattttcacttaacttccctaaaaattaattaataatcagagtcacagtgggcggagacaacacactatatattcaactacacttccgaatggctgagtttatgccgccagacgaagagagcatcacaacagtgactgcgcgctgattctggg

SEQ ID NO: 2625 - protein, 670 aa, Betatorquevirus sp.; identical to SEQ ID NO: 2474

SEQ ID NO: 2626 - protein, 102 aa, Betatorquevirus sp.; identical to SEQ ID NO: 2475

SEQ ID NO: 2627 - protein, 123 aa, Betatorquevirus sp.; identical to SEQ ID NO: 2476

SEQ ID NO: 2628 - DNA, 2920 bp, Betatorquevirus sp.
cgggtgccgaaggtgagtgaaaccaccgtagtcaaggggcaattcgggcaaggttagtctggcgaaccgggcaagtaacttaattttattttacagatgagcaaattctacacaccaacaaaatacaccagaaaacaaaaaaatttacaagaaattaatttacacgttgcaattcatgatctaaactgcggctgtgataatccactaaaacacattatatatcaatttctggaacaagaaccctctatcaactttactaaacaagaactacagaaactacaaaaatgccatggtactggaaccgctggagacgccgaccatggagaagacgacacaggctttggaccaggagatttagaacaactgttcgcagaagaaaaagaagaagaccccgcagggtaagaaaaaaactgaaatttctaaaactaatacaatggcaaccacaatccataagacgctgtactataaaaggactttactgcttattccaatgtaaccataaaagactaaattataactttgcacaatatgaaactgaaataagaccaaaaaatattccgggagggggaggctacagtttactaagatttactttaaatgctctctttgaacaaaaccaacttgtaagaaatgtatggaccagaggaaacaaaaattacccatttgtaagatacttaggatgtgaatttcgtgtatatagacctgaaaatgttgatgtatgtatcaaatttcaaaactgttatcctatgacagcatccccatttttatacatggccacacaaccctcaatactaatgcaaagtagaaacagtagaaaaataccctgtaagaaaacctccaaaagacaaaaaccatatataaaatttaaatttccaccaccacaaaacatgacaaacaaatggttttttagccatgatataagtaacgtaggtcttatactagtagcaacatcagcatgcagctttgaccaatattatatatcaaaatatgcagaaaacacaacactagaatttcaagtactaaatacaaaaatttttcaaaacagacagttcagaaatacaacaactacaggatattttccaaaggaaaacttttacatgttctcttctaatggagacgatccaacaccaacatggttacaactagaatatttaggaaacacaatagaatatcaatacggagagacaataggacaacataacacaacggccgacaattatccagaaagactaaaaacatacttatcaaacagaaaatactggggaaacccttttcacagctacaattttgacaaaaaacacagattatggtttagtaattcaccaccatcacaagtaataccacgaaattacgccgacgcaaaaaaaaccattaaattaacagaaataacacaagaaatgtactttactgtaagatacaaccctatgcaagacacaggtgaagatgtacaactatacctactaaaaaattgggcagaagaaacaggatggaatccaccacaaaatgaaaaactaatagtttctggattccctctatggttaatagtatggggctatcatgactatcaaaaaaaactagcagaagtaacagacatagaacaccactacatactaacatttaaacacccaaaactagagccaaaattagatgcatacatacccctaaactacagctttacacaaggaaacagtgaatattacccacaagatgaaagaacagcacaagacaatttaaattggtaccctatgctacattaccaattaggagcaatagaaaatatagcagcgggagggccaggaactgcaaaactaggtgaatttaaaaatgcagaatgtcattgtgaatacaaatttaaatttaagtttggcagctgccaagcaccaatggaaaaaacaacagatccagaaaaacaaccaacttttccaatgccaaataacttcaatgaaacaaattcgttacagagtccagaagaaccaatacaatcctacttatacaactttgacgaaagatggggacaaattacaaaaacagctacagacagaatccttaaagaccaaccaactaaatcaactctatttacagattcaacaacaattggaacagacgtcccactccaccaaacactccaagaagaaatctactcatcggaggaggaggaaaccaaaaaagagacattattcgagcagctccaacaccagcgaaacaagcaaagacaactcagacacagaatcaagcagctcctaatacaattacaaaatacacaataaaaaatactaaaattagaataaacctgtttggtgaccaaccaaaccgtagattaaatagtagagaaagggctgaggataaaatagaagcaaaaatatggggtagagcagaaaaacactttttaaaagatattcccttttactatggctgtgtacctgaaccccgtgtaaactttgaattaaactatcaataaacaaggcccattgattcacttctcggtgtccatttattaaatttaaacttaaataaacatccaccacatctcccaatcaccaggcctagaaagggggctccgcccccttacacccccaagggggctccgccccctttaacccccaagggggctccgcccccttacaccccctataaatattcaacaggaaaaccacctaatttgaattgccgaccacaaaccgtcactcacttcccttttttcactaacttcctctttaacttataaatattcattaaattaattagtaaacactgtcaaacatgggaggagccacataactataaaaccaactacacttccgaatggctgagtttatgccgccagacggagactgcaacagacactgactgcaggctaacctagggcgggtgccgaaggtgagtgaaaccaccgtagtcaaggggcaattcgggcctaggg

SEQ ID NO: 2629 - protein, 660 aa, Betatorquevirus sp.
MPWYWNRWRRRPWRRRHRLWTRRFRTTVRRRKRRRPRRVRKKLKFLKLIQWQPQSIRRCTIKGLYCLFQCNHKRLNYNFAQYETEIRPKNIPGGGGYSLLRFTLNALFEQNQLVRNVWTRGNKNYPFVRYLGCEFRVYRPENVDVCIKFQNCYPMTASPFLYMATQPSILMQSRNSRKIPCKKTSKRQKPYIKFKFPPPQNMTNKWFFSHDISNVGLILVATSACSFDQYYISKYAENTTLEFQVLNTKIFQNRQFRNTTTTGYFPKENFYMFSSNGDDPTPTWLQLEYLGNTIEYQYGETIGQHNTTADNYPERLKTYLSNRKYWGNPFHSYNFDKKHRLWFSNSPPSQVIPRNYADAKKTIKLTEITQEMYFTVRYNPMQDTGEDVQLYLLKNWAEETGWNPPQNEKLIVSGFPLWLIVWGYHDYQKKLAEVTDIEHHYILTFKHPKLEPKLDAYIPLNYSFTQGNSEYYPQDERTAQDNLNWYPMLHYQLGAIENIAAGGPGTAKLGEFKNAECHCEYKFKFKFGSCQAPMEKTTDPEKQPTFPMPNNFNETNSLQSPEEPIQSYLYNFDERWGQITKTATDRILKDQPTKSTLFTDSTTIGTDVPLHQTLQEEIYSSEEEETKKETLFEQLQHQRNKQRQLRHRIKQLLIQLQNTQ

SEQ ID NO: 2630 - protein, 101 aa, Betatorquevirus sp.
MSKFYTPTKYTRKQKNLQEINLHVAIHDLNCGCDNPLKHIIYQFLEQEPSINFTKQELQKLQKCHGTGTAGDADHGEDDTGFGPGDLEQLFAEEKEEDPAG

SEQ ID NO: 2631 - protein, 55 aa, Betatorquevirus sp.
LFGDQPNRRLNSRERAEDKIEAKIWGRAEKHFLKDIPFYYGCVPEPRVNFELNYQ

SEQ ID NO: 2632 - DNA, 2920 bp, Betatorquevirus sp.
cgggtgccgaaggtgagtgaaaccaccgtagtcaaggggcaattcgggcaaggttagtctggcgaaccgggcaagtaacttaattttattttacagatgagcaaattctacacaccaacaaaatacaccagaaaacaaaaaaatttacaagaaattaatttacacgttgcaattcatgatctaaactgcggctgtgataatccactaaaacacattatatatcaatttctggaacaagaaccctctatcaactttactaaacaagaactacagaaactacaaaaatgccatggtactggaaccgctggagacgccgaccatggagaagacgacacaggctttggaccaggagatttagaacaactgttcgcagaagaaaaagaagaagaccccgcagggtaagaaaaaaactgaaatttctaaaactaatacaatggcaaccacaatccataagacgctgtactataaaaggactttactgcttattccaatgtaaccataaaagactaaattataactttgcacaatatgaaactgaaataagaccaaaaaatattccgggagggggaggctacagtttactaagatttactttaaatgctctctttgaacaaaaccaacttgtaagaaatgtatggaccagaggaaacaaaaattacccatttgtaagatacttaggatgtgaatttcgtgtatatagacctgaaaatgttgatgtatgtatcaaatttcaaaactgttatcctatgacagcatccccatttttatacatggccacacaaccctcaatactaatgcaaagtagaaacagtagaaaaataccctctaagaaaacctccaaaagacaaaaaccatatataaaatttaaatttccaccaccacaaaacatgacaaacaaatggttttttagccatgatataagtaacgtaggtcttatactagtagcaacatcagcatgcagctttgaccaatattatatatcaaaatatgcagaaaacacaacactagaatttcaagtactaaatacaaaaatttttcaaaacagacagttcagaaatacaacaactacaggatattttccaaaggaaaacttttacatgttctcttctaatggagacgatccaacaccaacatggttacaactagaatatttaggaaacacaatagaatatcaatacggagagacaataggacaacataacacaacggccgacaattatccagaaagactaaaaacatacttatcaaacagaaaatactggggaaacccttttcacagctacaattttgacaaaaaacacagattatggtttagtaattcaccaccatcacaagtaataccacgaaattacgccgacgcaaaaaaaaccattaaattaacagaaataacacaagaaatgtactttactgtaagatacaaccctatgcaagacacaggtgaagatgtacaactatacctactaaaaaattgggcagaagaaacaggatggaatccaccacaaaatgaaaaactaatagtttctggattccctctatggttaatagtatggggctatcatgactatcaaaaaaaactagcagaagtaacagacatagaacaccactacatactaacatttaaacacccaaaactagagccaaaattagatgcatacatacccctaaactacagctttacacaaggaaacagtgaatattacccacaagatgaaagaacagcacaagacaatttaaattggtaccctatgctacattaccaattaggagcaatagaaaatatagcagcgggagggccaggaactgcaaaactaggtgaatttaaaaatgcagaatgtcattgtgaatacaaatttaaatttaagtttggcagctgccaagcaccaatggaaaaaacaacagatccagaaaaacaaccaacttttccaatgccaaataacttcaatgaaacaaattcgttacagagtccagaagaaccaatacaatcctacttatacaactttgacgaaagatggggacaaattacaaaaacagctacagacagaatccttaaagaccaaccaactaaatcaactctatttacagattcaacaacaattggaacagacgtcccactccaccaaacactccaagaagaaatctactcatcggaggaggaggaaaccaaaaaagagacattattcgagcagctccaacaccagcgaaacaagcaaagacaactcagacacagaatcaagcagctcctaatacaattacaaaatacacaataaaaaatactaaaattagaataaacctgtttggtgaccaaccaaaccgtagattaaatagtagagaaagggctgaggataaaatagaagcaaaaatatggggtagagcagaaaaacactttttaaaagatattcccttttactatggctgtgtacctgaaccccgtgtaaactttgaattaaactatcaataaacaaggcccattgattcacttctcggtgtccatttattaaatttaaacttaaataaacatccaccacatctcccaatcaccaggcctagaaagggggctccgcccccttacacccccaagggggctccgccccctttaacccccaagggggctccgcccccttacaccccctataaatattcaacaggaaaaccacctaatttgaattgccgaccacaaaccgtcactcacttcccttttttcactaacttcctctttaacttataaatattcattaaattaattagtaaacactgtcaaacatgggaggagccacataactataaaaccaactacacttccgaatggctgagtttatgccgccagacggagactgcaacagacactgactgcaggctaacctagggcgggtgccgaaggtgagtgaaaccaccgtagtcaaggggcaattcgggcctaggg

SEQ ID NO: 2633 - protein, 660 aa, Betatorquevirus sp.
MPWYWNRWRRRPWRRRHRLWTRRFRTTVRRRKRRRPRRVRKKLKFLKLIQWQPQSIRRCTIKGLYCLFQCNHKRLNYNFAQYETEIRPKNIPGGGGYSLLRFTLNALFEQNQLVRNVWTRGNKNYPFVRYLGCEFRVYRPENVDVCIKFQNCYPMTASPFLYMATQPSILMQSRNSRKIPSKKTSKRQKPYIKFKFPPPQNMTNKWFFSHDISNVGLILVATSACSFDQYYISKYAENTTLEFQVLNTKIFQNRQFRNTTTTGYFPKENFYMFSSNGDDPTPTWLQLEYLGNTIEYQYGETIGQHNTTADNYPERLKTYLSNRKYWGNPFHSYNFDKKHRLWFSNSPPSQVIPRNYADAKKTIKLTEITQEMYFTVRYNPMQDTGEDVQLYLLKNWAEETGWNPPQNEKLIVSGFPLWLIVWGYHDYQKKLAEVTDIEHHYILTFKHPKLEPKLDAYIPLNYSFTQGNSEYYPQDERTAQDNLNWYPMLHYQLGAIENIAAGGPGTAKLGEFKNAECHCEYKFKFKFGSCQAPMEKTTDPEKQPTFPMPNNFNETNSLQSPEEPIQSYLYNFDERWGQITKTATDRILKDQPTKSTLFTDSTTIGTDVPLHQTLQEEIYSSEEEETKKETLFEQLQHQRNKQRQLRHRIKQLLIQLQNTQ

SEQ ID NO: 2634 - protein, 101 aa, Betatorquevirus sp.; identical to SEQ ID NO: 2630

SEQ ID NO: 2635 - protein, 55 aa, Betatorquevirus sp.; identical to SEQ ID NO: 2631

SEQ ID NO: 2636 - DNA, 2920 bp, Betatorquevirus sp.
cgggtgccgaaggtgagtgaaaccaccgtagtcaaggggcaattcgggcaaggttagtctggcggaacgggcaagtaactaaattttattttacagatgagcaaattctacacaccagcaaaatacaacagaaaacaaaaaaatttacaagaagtgaatttacacgttgcaattcatgatctaaactgcggctgcagtaatccactaaaacacattatatatcaatttctggaacaagaacccactatcaactttactaaacaagaactacaacaactacaaaaatgccatggtactggaaccgctggagacatcgaccatggagacgacgacacaggctttggacccggagatttagaacaactcttcgcagaagaaaaagaagaagaccccgccgggtaagaaaaaaactgaaatttttaaaactaatacaatggcaaccacaatccataagacgctgtactataaaaggactttactgcttatttcaatgtaaccataagagactaaactataactttgcacaatatgaaactgaaataagaccaaaaaatattccgggagggggaggctacagtttactaagatttactttaaatgctttatttgaacaaaaccaacttgtaagaaatgtatggacccggggaaacaaaaattacccatttgtaagatacttaggatgtgaatttcgtgtatatagaccagaaaatgttgatgtatgtatcaaatttcaaaactgttaccctatgacagcatccccatttttatacatggcaacacaaccatcaatactaatgcaaagtagaaacagcagaaaaataccctgtaaaagaacctccaaaagacaaaaaccatacataaaatttaaatttccaccaccacaaaacatgacaaacaaatggttttttagccatgatataagtaacataggtctcatacttgtagcaacatcagcatgcagctttgaccaatattatatatcaaaatatgcagaaaacacaacaatagaatttcaagtactaaacactaaaatctttcaaaacagacaatttagaaatacaacaacaacaggatattatccaaaggaaaacttttacatgttctcttccaatggagacgaaccaaaaccaacatggttacaactacaatacttagggaacacaatagaataccaatacggagaaacaatagcaacacatgacacaacagaaacaaactatcctgttagacttcaacaatacttatcaaacagaaaatactggggaaacccttttcacagctacaattttgacaaaaaacacagattatggtttagtaattcaccaccatcacaaataataccaagaacatacacaaaagcaaaaacaccaattaccttaacagaaataacacaagaaatgtactttactataagatacaacccaatgcaagacacaggacaagacgtacaactatacctactaaaaaattgggcagaagaaacaggttggaatccaccacaaaatgaaaaactaatagtttctggattccctttatggttaatagtatggggctatcatgactatcaaaaaaaactagcagaagtaacagacatagaacaccactacatactaacatttaaacacccaaaactagaaccaaaattagatgcatatataccactaaactacagctttacacaaggtactagtgaatattacccacaagatgaaagaaccacacaagacaatttaaattggtatcctatgctacattaccaattaggagcaatagaaaatatagcagcaggaggcccaggaactgcaaaactgggagaatttaaaaatgctgaatgtcattgtgaatacaaatttaaatttaagtttggcagctgccaagcaccaatggaaaaaacaacagatccagaaaaacaaccaacttttccaatgccaaataacttcaatgaaacaaattcgttacagagtccagaagaaccaatacagtcctacttatacaactttgacgaaagatggggacaaattacaaaaacagctgcagacagaatccttaaagaccaaccaactaaatcaactttatttacagattcaacaacaattggaacagacgtcccactccaccaaacactccaggaagaaatgtactcatcggaggaggaggaaaccaaaaaagagacattattcgagcagctccaacaccagcgaaacaagcaaaaacaactcagacacagaatcaagcagctcctaatagaattacaaaatacacaataaaaaatactaaaattagaataaacctatttggtgaccaaccaaaccgtagattaaatagtagagaaagggctgaagataaaatagaagcaaaaatatggggtagagcagaaaaacactttttaaaagatattcccttttactatggctgtgttcctgaaccccgtgtaaactttgaattaaactatcaataaacaaggcccattgattcactcctcggtgtccatttattaaagttaaacttaaataaacatccaccacatctcccaatcacaaggcctaaaaagggggctccgcccccttacacccccaagggggctccgccccctttaacccccaagggggctccgcccccttacacccccaataaatattcaacaggaaaaccacctaatttgaattgccgaccacaaaccgtcacttacttcccgtttttccataacttccttttttactcatgaatattaattaaattaattagtaaacaccgtcaaacacgggcggagccacacaactataaaaccaactacacttccgaatggctgagtttatgccgccagacggagactgcaccagacactgactgcaggctaacctagggcgggtgccgaaggtgagtgaaaccaccgtagtcaaggggcaattcggacctaggg

SEQ ID NO: 2637 - protein, 660 aa, Betatorquevirus sp.; identical to SEQ ID NO: 2497

SEQ ID NO: 2638 - protein, 101 aa, Betatorquevirus sp.; identical to SEQ ID NO: 2498

SEQ ID NO: 2639 - DNA, 2919 bp, Betatorquevirus sp.
cgggtaccgaaggtgagtgaaaccaccggagttaaggggcaatatgggcagtagcagtctagcggaccgggcaagaaactaaattatatttgttttttagaatgagcaagtttctgaaagaaccatcatactccaaaaaagcccttgaaacacaatggattaacttttgctttggagcccacgacctaatttgtggctgcaacaaagtaattcaacattttaaccatcttactaacaacaaaccatggcgccatttcgaagaacatactactggagaaactggagatggccacgaagaagaagaaaccggttttacaaaaggagatttagaagcactattcaacgaagaaaacgacgacgcagaagggtaagaagaaaacgcttttttaaaaacaaatttaaaaaattaaagcgtatacatatagatcaatggcaaccaagtactgtaaaaaaatgccaaataaaaggctatttatgcttatttcaaagcggtaaaggacgcttttggaacaattactgtttatctaaagaaagctacgtacccccacacactccaggtggagggggttggagttttcaacaactaagcctcggaaacttatatactcaaaagtgtgaatttatgaacatatggacccgttcaaaccgctctttaaatttgtgtagatattacggtacaaaagtaactttgtatagagaacaaaatgttgattatgtatttacttggtttaaagaaactcctagaactgtagaaaaatattttttctgctcacatcatccattaagactactaacacataacagaagagtaatagtacccagttttcaaacacaacctcataaaagaaaaccatttaaaacaatattcataccaccaccaccactactaaaaaaccaatggttttttcaacaacatttagcaccatttccactagtaacatttttagcatcagcagttagcttaacaggaatgtttggatctagaaactctataaataacaatgcattaatttggaatttagacactattttctttaaaaaaccaaattttcaatacgttagaacaacagaaccacaatttggataccaaccagatccacaatattatttgtgggcacttccagcaggaaaagaacaatttaaccaaaataaaatagcagactctatttacctaggaaactctcatttaaatcaagcaggagatcatataccatcaacagccgccagtatacaaaactataataaaggttcctggggaaatccattctggtggcaatacacaaccttacaagtaagacttttccaaaccccagcatcaacccaaacacaaggacacgacttaaacaattggcttacaaaaaaaaatcaaaatttaaacgacagctgggaattaacaaaaccatacataaacactataagatataacccatataaagacaaaggagacggaaatgaagtatactttattccaaattatgaccctaaacaaacagattggaatccaacaaacgatccgtcaatacactttagtggctttcccttatggatgatgctatggggaatagaagacatacttaacaaaatgggtaaatgcccaaaattagacgaagactggatatgtgttattagaactaaatacatgtttccaccagaaaaacaatatgtattgctatcttacaattttgtacacggcacaggaccatatgacacggaaagagaaaacatagcacccctagatgaagtcacatggtatccaaaatttaaatttcaacgagaggccttagatgctataatacaaacaggccctgcagtatgtagagcagatgatgtgaaaaatattcaagctaaaataaaatacaaatctttttttaagtttggtggaaacccaccaccaaacgaaatacccacagatcccacaactcaaccaattactcctacccccggtggattcgacatacaaaatgaaatcattaatccagcaacctccatccaatccatgctctaccagtgggactttagaagggactatattacaccaaaagctgcagaaagaattaaaacaagcgaaacttatgagcaatctatgttcacagatggagtacaaacttcaacagacgtccacctctacaaagcaccagaaacacaaacggaagagaccccggaaacacaagaaacgacattactcctccagctccagcagctccagcaatacaacttacaactccaacacagattcagacagctaaaacaatcattaatggacctataaaaagagctttactatttcctgaacaagaaaaaccaaaacctaaaagatttaaaggtagagactgggaaactgagttagaacttagtaaatggatgcatagaccaatgagacaatttacaaccgatccccctttttatccctggttgccccctacaccgcttgtaccatctgttaactttgatcttatgtctgcttacaataaaggcctgcattaattcacttaacaagcctgtttatttaagtaaaaacttatataaacatccaccgcctccctaatacgcctgcgcacaagggggctccgcccccttaaacccccgggggggctccctaatacgcctgcgcacaagggggctccgcccccttaaacccccggggggggtaaaccccccctaagccccccctactaattaatattcaacaggaaaaccacctaatttgaattgccgaccacaaacggtcaaccgttaactatacttccctaaaatgtacataacttccccaaatcacaacacacacctactaattaattagtaataaacatcatatccggggagtaactaaacctctataaaagtaacataccagacgaatggctgagtttatgccgctagacggagataacatcgcatcgattgttagctgctactggg

SEQ ID NO: 2640 - protein, 674 aa, Betatorquevirus sp.
MAPFRRTYYWRNWRWPRRRRNRFYKRRFRSTIQRRKRRRRRVRRKRFFKNKFKKLKRIHIDQWQPSTVKKCQIKGYLCLFQSGKGRFWNNYCLSKESYVPPHTPGGGGWSFQQLSLGNLYTQKCEFMNIWTRSNRSLNLCRYYGTKVTLYREQNVDYVFTWFKETPRTVEKYFFCSHHPLRLLTHNRRVIVPSFQTQPHKRKPFKTIFIPPPPLLKNQWFFQQHLAPFPLVTFLASAVSLTGMFGSRNSINNNALIWNLDTIFFKKPNFQYVRTTEPQFGYQPDPQYYLWALPAGKEQFNQNKIADSIYLGNSHLNQAGDHIPSTAASIQNYNKGSWGNPFWWQYTTLQVRLFQTPASTQTQGHDLNNWLTKKNQNLNDSWELTKPYINTIRYNPYKDKGDGNEVYFIPNYDPKQTDWNPTNDPSIHFSGFPLWMMLWGIEDILNKMGKCPKLDEDWICVIRTKYMFPPEKQYVLLSYNFVHGTGPYDTERENIAPLDEVTWYPKFKFQREALDAIIQTGPAVCRADDVKNIQAKIKYKSFFKFGGNPPPNEIPTDPTTQPITPTPGGFDIQNEIINPATSIQSMLYQWDFRRDYITPKAAERIKTSETYEQSMFTDGVQTSTDVHLYKAPETQTEETPETQETTLLLQLQQLQQYNLQLQHRFRQLKQSLMDL

SEQ ID NO: 2641 - protein, 93 aa, Betatorquevirus sp.
LFFRMSKFLKEPSYSKKALETQWINFCFGAHDLICGCNKVIQHFNHLTNNKPWRHFEEHTTGETGDGHEEEETGFTKGDLEALFNEENDDAEG

SEQ ID NO: 2642 - DNA, 2919 bp, Betatorquevirus sp.
cgggtgctgaaggtgagtgaaaccaccgaaatcaaggggcaaatcaaggggcaattcgggctatggcagtctagcggaacgggcaagtaacttaaatttacttttttagatgagtattaaaccaccaagatatggaccccgaggattagaactacaacttttaaactccatttttcaaaaccacgatttatgctgtggatgtgacgaccctctataccatatcctttcaataattaatacacataacaaagcaaacctttccgataccaaactcaaagaaataaaatgcctccttactggagaagatacagacaaagaagaccacgcagatggcaccgccggcgttttggacgctatagacgatggagatttagacgccctcttcgaagtttccgacgatatggacgcaccaactgggtaagaagaaaatttaaactatcatccataaaactaaaacaatatcaacctagatctataagaaactgtgtaattaaaggaatgaaatgtctttttcaaggaagtgctatgagaaaatcaaataactactggcaatacccacatactattattccagaaaaatttccgggagggggaggatggggtctacaagtaattagtcttagttcattatacgaagattaccaacacttagcaaattatttttcacaaagcaatgcaggcttaccattagtaagatttaaaggcatgaaactaatattctaccaaaaccaaaatacagactatgttgtagaaatagaaaactgctggccaatggttgacacaccattaaaacatgctaactctcaacctcagagaatgttaatgagtaaaaaaaaaattatagtacctagcatagcaacaaaaagactaagaaaaggaaagaaaaaaacctttgtaaaaccacctgcacaaatgcttaaccaatggtattttcaaaaagatgtatgtaatacaaaactagcaatgataacagccactgcatgttcactaacagactattatttaccatacaaatcagaatctaacaatatttctctaaatgcattaaataccaacatatttaaaaatgcagactttcaacaaccacctcaaacaacaggatatagccccagaaataactactacttatatgcacaaacaaacggagcctatgaaatacccaagcaagccacacaattaatatacttaggagacagcaaaaactatataaaaggacgacagtccacaaatgaagaacttaaaacctctggttttaaaaaagaaaactggggaaatccattttttgaacattacatatcaggagacataccaatgttcacatcatcaaaagggccaacagacactgtttggaaagaaaatgcaacatctccaactgacccacacaaatacatagacaaatacttagtgccactacataacaaaccatacacaagagttagatataatccagacaaagacactggagaaggcaacgtaatatactttgtaagcaactataacagagcaggtgacaatagctttgatccaccagaagacccaaacaaaaaaattacaggctttccactatggattgcactttggggatggccagactggattaaaaaattaggactattaccaagagtagacaaagaccacatactagtaatacagtcatcattttttgaccaaaaatttccatactatgtatttttagatgacagttttaccacagccttaggaccctttgacacacaaaaaacagctgaagatgaatttaactggtacccaaaattttggtatcaacaaaaatccattgaaaccatttgtgcatgtggtccgggagtaagtagagctagagatgacgaatccttacaagctaaaatggaatataaagtgtatgttaaatggggaggatgtccatcaaccttagaaaaggtatatgatccatgttcacagccaaaatggcccacaaccagtgacatccaacaaacagtttcgatcacgaatccagaatacgaaccaagcaactacttctacacttgggacactagaagggactttcttacagacacagctctcaaaagacttaaaaaaaaccaagaaattgatgagactgtttcaattaaaacaggatcaaaaagcagcccaagcgccgatctccaaatcctccaaacactccaagaaagctcagacgaagcatcgacaccggaaaaaaagaaagagacactgcagcacaagctcctcagactcagacgcaaccacaagcagcttcagcagcaactcatcaaatacctaaaatcaccataatacataaacctgtaaaaataaacttatttaatgatcctcaacctgtaaaaaacaggcgctttacacccagtgaatgggaaacagaaaaatttatagcctcatggcttaaaagaccacaaagaaagtttttttatgaccctcctatataccctctttttcctccaacacccttagcaaattttgacttaaactttaaagaataaaggcctacaattttcacttagtggtgtctgtttatttaagttataacctatataaacgtccaccgcctcccaaactcgtaggcgccaaaatttaaaacaaggggctccgccccttaaaccccagggggctccgccccctaaaacccccagggggctccgccccctataacccccaagggggctccgccccctaaaaccccctactaaatatttataaaggaaaccacaaaattagaattgccgaccacaaacgaatatgctaattaacttccctaaaatacacttatacttccctaaaaattaattaataatcagcatcacacaaggcggagtcaaaccactataaaactaactacacttccgaatggctgagtttatgccgctagacggagtgagcatcagacactgactgcgaactgccatcggg

SEQ ID NO: 2643 - protein, 667 aa, Betatorquevirus sp.
MPPYWRRYRQRRPRRWHRRRFGRYRRWRFRRPLRSFRRYGRTNWVRRKFKLSSIKLKQYQPRSIRNCVIKGMKCLFQGSAMRKSNNYWQYPHTIIPEKFPGGGGWGLQVISLSSLYEDYQHLANYFSQSNAGLPLVRFKGMKLIFYQNQNTDYVVEIENCWPMVDTPLKHANSQPQRMLMSKKKIIVPSIATKRLRKGKKKTFVKPPAQMLNQWYFQKDVCNTKLAMITATACSLTDYYLPYKSESNNISLNALNTNIFKNADFQQPPQTTGYSPRNNYYLYAQTNGAYEIPKQATQLIYLGDSKNYIKGRQSTNEELKTSGFKKENWGNPFFEHYISGDIPMFTSSKGPTDTVWKENATSPTDPHKYIDKYLVPLHNKPYTRVRYNPDKDTGEGNVIYFVSNYNRAGDNSFDPPEDPNKKITGFPLWIALWGWPDWIKKLGLLPRVDKDHILVIQSSFFDQKFPYYVFLDDSFTTALGPFDTQKTAEDEFNWYPKFWYQQKSIETICACGPGVSRARDDESLQAKMEYKVYVKWGGCPSTLEKVYDPCSQPKWPTTSDIQQTVSITNPEYEPSNYFYTWDTRRDFLTDTALKRLKKNQEIDETVSIKTGSKSSPSADLQILQTLQESSDEASTPEKKKETLQHKLLRLRRNHKQLQQQLIKYLKSP

SEQ ID NO: 2644 - protein, 103 aa, Betatorquevirus sp.
MSIKPPRYGPRGLELQLLNSIFQNHDLCCGCDDPLYHILSIINTHNKANLSDTKLKEIKCLLTGEDTDKEDHADGTAGVLDAIDDGDLDALFEVSDDMDAPTG

SEQ ID NO: 2645 - DNA, 2919 bp, Betatorquevirus sp.
cgggtgccgaaggtgagtgaaaccaccgtagtcaaggggcaattcgggctagatcagtctggcggaacgggcaagaaacttaaaatatatattaattttacagatatgagctctatgtggaagaaaccatggtactcacccagacaacaagaacaaaattggcttaatggtatttggcaaacccacgacaatttttgcagctgcggagacacttggcttcatcttttatactgcattaacaaagattctccattcagaaagcccctaaaggatattaaaaatatacaatgcctacttattggaaaagaagacgtgccaactacttcaaaagaagaagacgaccctggttttctacctggagagctagacgcacttttcgacgaaagttctacaaaaagagataccgaagacgccgatacaaggtaaaaaaaaagaaacattatcgtaaaagacaaaaaataattataaaacaatttaatcctaaatgtatgagaaaatgcaaaataattggaactaaatgcactattcaaggtagccctttaagatgccaccacaactttatacaatactataacagtaaagtacctgaaaaatatccaggaggaggtggatggagtcaactaatatttacactagattctttatatgatgactttgaaaaaatgcaaaatatatggactgcttcaaactgtactttacctcttgctaaatataaaggttgtactatgaaattttatcaaacaaattatattgattacattgttatatatgatacttgttggcctatggtagacacatacttatcacacccagatgccgcaccatctatgatgcacttaaaaaaaaataaaatatgtatacctagcagacaaacacaactaagaaaaaaaccatacaaaaaggtttttatacaacctccttcacaaatgtacaataaatggtattttcaaaaagaaatatgtaaaacaccattactaatgattacaacaacagcaacatcatttacatttccatactgctcaccaaaagcagaaaacaataacatatccattcactttatagacccaacaacctttagaaacttaaactttcaaaaatacccaataacacaaggctattggtgtaaacaagcaaaacttgaacatgaagacagagaattacctatgtacttatatgccataagaaacccaaaaagcctaatacaacagtcaaaaataaaccaaaacaatgtagacaaattaggcataataccactatgtaacagtaacacatttcaactaggacaagaagtaatattaggaaccacacaaaacaatccagaacattggggaaacccattctatcactcaattattgatgaagacagttatactatatatatctcattaatgactccagcagaacttcacaatctaaatgcaacaccatcaaaagaatactatgtaacaaagctaacacaaccactagtacatacattaagatataaccctgaaacagacaaaggattaaaaaacaaagcatggatattaaaaacaaatgactacaataacacaaatgaaccagaaaacataaatttacaaatagaaggctttccactatatgtactcttttggggatggacagactgggttaaaaaaacaggtttaattaataatcttgatgataatggaattgttgtatttcaaacagaccaatttaatgaacagttaccactgtatattccaatagactttgactttttacatggctatgacccttatgttgaacatagttatgacggacaaccagcattaccttctagttacagtcaaaaacattggtaccctaaactaaaatttcaagaccaaagcatagaaaaaatttgtatgtccggtcctggttgtcctagactactaaataaagaatatatgcaagcatttgtaaaatacaaatttcactttacttggggaggctgtcctaaacaattagaaaaagcatgtaatccttgttcacagccaacatggaccacgcccgataacttccatggacgacttgaaatccagaacccaaacaccaatccacttacagaacttttcagctgggactgggacggtgactatgttacaacagaggctatcgaaagaatccagacatacacaaaaactgataaatcatcttttatctcaacagcaaacaaaaacaacaccaaagcagcaatacagaaggaacaaaaagcgacacaagaggaggaggagaagaaactcctcaaccagctccagctcctccaacaacagcgacaacaactccacagcctcctgctcaacagaataattacaaactaaaaggctgtaaaataaaagcatacctatttcctcctaaaaaaccaaaagttagaaaactaacacccagagaacaagaagaagaaaacctaatagccgctatatttcacagacctcctagaaaattttttggagatactcccatatatccatggttaccccctgaaccttatgtaaactttgaattaaactacaaaaaataaacaaggccaacaatattcacttagtggtgtcagtttatttaagtttaacttatataaacatccaccgcctccctaaaattcaggcgccaaaattcaaaagggggctccgcccccttacacccccaagggggctccgcgggctccgcccccttacaccccctaataaatattcaacaggaaaaccacctaattagaattgccgaccacaaaccgtcacttacttctcctttttacaatacttcctcttttactcattattattcattacattaattaataatcagcgtaattccggggagtggcttattaactatataaccaaacacacttccgaatggctgagtttatgccgccagacggagacaggatcacgttagtgactccaggctgatcttggg

SEQ ID NO: 2646 - protein, 677 aa, Betatorquevirus sp.
MPTYWKRRRANYFKRRRRPWFSTWRARRTFRRKFYKKRYRRRRYKVKKKKHYRKRQKIIIKQFNPKCMRKCKIIGTKCTIQGSPLRCHHNFIQYYNSKVPEKYPGGGGWSQLIFTLDSLYDDFEKMQNIWTASNCTLPLAKYKGCTMKFYQTNYIDYIVIYDTCWPMVDTYLSHPDAAPSMMHLKKNKICIPSRQTQLRKKPYKKVFIQPPSQMYNKWYFQKEICKTPLLMITTTATSFTFPYCSPKAENNNISIHFIDPTTFRNLNFQKYPITQGYWCKQAKLEHEDRELPMYLYAIRNPKSLIQQSKINQNNVDKLGIIPLCNSNTFQLGQEVILGTTQNNPEHWGNPFYHSIIDEDSYTIYISLMTPAELHNLNATPSKEYYVTKLTQPLVHTLRYNPETDKGLKNKAWILKTNDYNNTNEPENINLQIEGFPLYVLFWGWTDWVKKTGLINNLDDNGIVVFQTDQFNEQLPLYIPIDFDFLHGYDPYVEHSYDGQPALPSSYSQKHWYPKLKFQDQSIEKICMSGPGCPRLLNKEYMQAFVKYKFHFTWGGCPKQLEKACNPCSQPTWTTPDNFHGRLEIQNPNTNPLTELFSWDWDGDYVTTEAIERIQTYTKTDKSSFISTANKNNTKAAIQKEQKATQEEEEKKLLNQLQLLQQQRQQLHSLLLNRIITN

SEQ ID NO: 2647 - protein, 106 aa, Betatorquevirus sp.
MSSMWKKPWYSPRQQEQNWLNGIWQTHDNFCSCGDTWLHLLYCINKDSPFRKPLKDIKNIQCLLIGKEDVPTTSKEEDDPGFLPGELDALFDESSTKRDTEDADTR

SEQ ID NO: 2648 - DNA, 2919 bp, Betatorquevirus sp.
gggcaattcgggctagatcagtctggcggaacgggcaagaaacttaaaatatatatatattttacagatatgtcatctatttggagaccaccgacatcatcactaagacaacaagaattaaattggcttaacattgtacatcaatcccacgacgccttttgccactgtgaagacccagacctacattggatgattgcagttaacaaattcagcgcatttcaaaaaccagaaatcgacattaaaaatataaaatgcctccttaccggcgctaccaaagatggtacagaagaagaagaaactactggacaaaaagaagattttggaattctagaaggagaactagaccaacttttcaacgaagaaaacgaacctacagaaaataccgaccaaaggtaaaaagacgtttttttaaaagaaaaagaaaatacattaaaatcaaaatgtttcaacctaaaaatattgtaaaatgtaaaattaccggttacaaatgtttatttcaaggtagtccttttagaaagcaacataactggattcaatatatatacagctttgctaaacctaacatggttgctgggggaggttggagcttacttgtatttagtttagatagtatgtttgaagactataaacatttacaatgtacctggacaaaaggaaatgcaggattgccacttgtaagatacacaggagcaaaatttaaattttaccaaagtaaatttgatgattatattactgtctatgacaactgctggcccatggtagatactccacatacacacgcagactcatcacctagcagaatgtttcaaaaaatacacaaaacagtagtaccatctagacaaaccaaacaacgaagaaaaccttttaaaacagtacacattaaaccaccaccacaaatgacaaacaaatggtactttcaaagagacatttgcaaacaaccattagtaatgctaacaactacatcagtagacttacaacaaccatttcaatatagcaatgctaacaacaataacattactataaaatacttaaatccaaatatttttcaaaacaataactttcaaaactacccattaacagaaggatattcacccaaatcactaccaaaaagtacaacagataatacacctgaaaaatactttctttactcagaccactcaaatcaacctataaaaaaaaataaacaatggctaggccaactagtaccattattaaacacaaaacattactatgcaggagcaacgctatcactaatagtaacagatagcaatgacaaaccatctatgtggggaaacccattttatcacgaacacttagatccacaaacatctacaacatacctctgtaactacaacacatcaacatttaaaacacactggaatgaaataccagaaactggaaacgcaaacgacaaacaactaccaaattttaaaatattcaaagccaccgaaaacctaatatatgagactgtatataatcctgaaaatgacacaggagaaaccaacctaatttacttaattaataattcacaagaaacacattttgaacctctagaaaacaaagacttacaatttgaaggatttccattatacaacttattttggggatggacagattttattaaaaaactagaaacaaccacaaacttagacaacaactacacaatagtaatacaaacaaaaacattccatgaaaaagacaaattcttttgcatacttaatccatcatttatactaggatttgatccttttacaccacataaaacagaaagccacacaccatcatattataattcactaaattggtttccaaaattagcttttcaagaagaaactattgaagcaatttgtgaaactggtccaggtgtatcaaaatcaaaaaactacttacaagcaatttgtaaatataccttttattttaaatggggaggctgtccaaaaacattagaaaaagcatacaatccttgtttacagcccacctggactacacccaatacaatccctccaagacttgaaatacaggatcctaacctcccaccagaagccaacttgtactactgggactgggaaaaagactttgttacacatgaagctatccaaagaattagagactacacgttcactgatgaacaaatattcccaattacaggatcaaagtcatcagcaaaagcaacgacgccacaaacgacgacaaccgaggaagaaaaagaagaagagaaactactcctccagctcaacaagctccgaaagcaacgagtacagctccaactcctcatcagaatgaaagaacaaaacttactataataaacaaagttgaactgttcccaaaaacaaagaaaaatagacgatttacttcttgggaacaacaagaagaaaatcaacttgcagctatatttttaagacctcctagacattatatatatgaccctccattttatccttggttacccccagaaccatatgtaaactttgatcttaattaccctgctttaaaaaaataaaggccaacaaatttcacttagtggagtcagtttatataagttaaactttaataaacatccaccacctccctaaaaatgggcgccaaaattaaagggggctccgcccccttacacccccaagggggctccgccccctttaacccccaagggggctccgcccccttccacccccaagggggctccgcccccttaaaccccctaattaatatttaacaggaaaaccacctaatttgaattgccgaccacaaaccgtctcatacttcccttttttataacacttcctcttactctcattattattcattacattaattaatagtccgtgtaattccggggaggagtttattaactatataactaactaaacttccgaatggctgagtttatgccgccagacggagacgggatcacttcagtga

SEQ ID NO: 2649 - protein, 683 aa, Betatorquevirus sp.
MPPYRRYQRWYRRRRNYWTKRRFWNSRRRTRPTFQRRKRTYRKYRPKVKRRFFKRKRKYIKIKMFQPKNIVKCKITGYKCLFQGSPFRKQHNWIQYIYSFAKPNMVAGGGWSLLVFSLDSMFEDYKHLQCTWTKGNAGLPLVRYTGAKFKFYQSKFDDYITVYDNCWPMVDTPHTHADSSPSRMFQKIHKTVVPSRQTKQRRKPFKTVHIKPPPQMTNKWYFQRDICKQPLVMLTTTSVDLQQPFQYSNANNNNITIKYLNPNIFQNNNFQNYPLTEGYSPKSLPKSTTDNTPEKYFLYSDHSNQPIKKNKQWLGQLVPLLNTKHYYAGATLSLIVTDSNDKPSMWGNPFYHEHLDPQTSTTYLCNYNTSTFKTHWNEIPETGNANDKQLPNFKIFKATENLIYETVYNPENDTGETNLIYLINNSQETHFEPLENKDLQFEGFPLYNLFWGWTDFIKKLETTTNLDNNYTIVIQTKTFHEKDKFFCILNPSFILGFDPFTPHKTESHTPSYYNSLNWFPKLAFQEETIEAICETGPGVSKSKNYLQAICKYTFYFKWGGCPKTLEKAYNPCLQPTWTTPNTIPPRLEIQDPNLPPEANLYYWDWEKDFVTHEAIQRIRDYTFTDEQIFPITGSKSSAKATTPQTTTTEEEKEEEKLLLQLNKLRKQRVQLQLLIRMKEQNLL

SEQ ID NO: 2650 - protein, 108 aa, Betatorquevirus sp.
MSSIWRPPTSSLRQQELNWLNIVHQSHDAFCHCEDPDLHWMIAVNKFSAFQKPEIDIKNIKCLLTGATKDGTEEEETTGQKEDFGILEGELDQLFNEENEPTENTDQR

SEQ ID NO: 2651 - protein, 60 aa, Betatorquevirus sp.
LFPKTKKNRRFTSWEQQEENQLAAIFLRPPRHYIYDPPFYPWLPPEPYVNFDLNYPALKK

SEQ ID NO: 2652 - DNA, 2919 bp, Betatorquevirus sp.
cgggtgccgaaggtgagtgcaaccaccgtagtcaaggggcaattcgggctagatcagtctggtggaacgggcaagaaactaaaatatatattttttacagaatgtccaagtttttaaaaccaacaatatacaaaaatggagccctagaaacacagtggatgaactccatcttcacaacacacgacattgtctgcggctgccaagacaccattaaccacttaaaatttttaattgaaaaccaacaatgccattctattatcgaaggaaatggaacaacaactactttcgcagacgccgatatcgacgcaggggacctagaaagacttttcgcagaaaacgaagacaacgaagggtaagaagaaaacgctttaaaaaatatagactaagaaaacttaaaactataatacaaagacaataccaacctgaacaaataagaaaatgtaaaataagaggatttctagaacttatagaatgcggatatggcagactttcagataactgggcattatacaaagaaagctatgcacctgaacatgaaccaggagggggagggtggagcatacaacaactaactttgggaaatttatatatacaaagcaaatatgcaatgaactactggacacatacaaacagaggttacaatttagctagatacctaggagtaaacataagactctacagacaaccacaaacagactatatatttcattacaatttacaagacccacaaataataactaaatacacatatccatcatatcacccatacaaaatactacaataccatcaacgaattgtagttccaagcttacaaactgcaccacataaaaaaaaactatacaaacaaagatttattaaaccaccaaaaaaaatgaaaaatcaatggtactttcaagaacaactaacagacttcccactgttaacattttatacaacagcagtagacctacaatcaatgtttatttcccccaaagcacaaaacaataacataacattaaatgtattaaacacacaactttttcacaacccaaattttcaatttccaccagaaacatcaggatacaaaccagattcacaaaattacttatatggttatacaggaccacatatacattggccaaacgaaggcgttcccctaaaaaatttcatattattagcagacacaacaaacaataccccaggagaaccaatactaaataacagtatgccaccaaaaaaaaaatggggtaacccattttttcatgaattttttaatatggacgcagcaacaacattacaaagtataaaacccggggataaagcctttgctgaaaaaaatattaaagaaagtgacctaaaagtacaaccatactatgaacaagtgagatataacccaaacaaagatgacggagacggtaatgaggcatatataataaaaaattttacaagtgctcaacaaccaaattgggatccaccaaaagatgaagatctcatattaagaggacacccattatggctaatgctttggggtctacaaagttacatagaaaaaaagaaactatttaatgacttagacaaaaacggaatacttgtaataagaacaaaaaagtttagtgggccaccattacctgcatacgttatactaaatgatagcttttgtagaggacaaggcccatacgaccaaccaagagaagaaataactttatacaataacacacactggtatccacgctttaaatatcaaaaagaagcactagaacaaatattagaaacaggaccaggagtttacaaaactaacagaggaacatccatacagtctcacttacactatacttttctttttaagtggggaggcaacccatcaaagatggaaacaattgcagacccaacaacacaaccaacaggacctgaccccaataacctcctattctcaaatgaaatcaatagtccagaacaaacaatccttaactacatctacaagtgggatgtcagacgagacctccttacacaaaaagctacaaacagaattacagaactccaaattcctaaacaaactgtatttacagatggaaaagcaacttcaacagacatcccaatctggacacaaacaacaccacaaacgaaagagaccacggaagaagaaaaccaagagatacagcagcagctcgagctcgtccaactgtacaaccaacaactccagcagcgactcagacaactaatattatccaacaacccataaatataaaatgcattaaaaaagtatacctatttgatcctccaaaaccacgtaaaaatgaaagatttacagggtgggaatgggaaactgagttacaactatgtaaagcctttaaaagacctatgagaacctttaaaaatgatcccccttattacccatggttgcctccagaacccattgttaactttgatttaaactttaataaaggccagcattaattcacttaacaagtctgtttatttaagtataaacttaataaaccaacaccgcctccctaatacgcaggcgcaaagggggctccgcccccttaaacccccaggggggggtccctaatacgcaggcgcaaagggggctccgcccccttaaacccccaggggggggcaagcccccccaaaacccccccaaaaaaaccacaaaatttacatttaaaaccacaaacggtccggaaaccacaaaatttgcattgccgaccacaaacggtccggaaaccacaaaatttgcattgccgaccacaaacggtacatttttacaacacagttaacaacttccttaaaattatataaatattcatgaaattaattaataatcactgtcacacataggaggggccttaaacatatataactaactacacttccgaatggctgagtttatgccgccagacggagacagaaccacttcagtgacttctggctgatcttggg

SEQ ID NO: 2653 - protein, 657 aa, Betatorquevirus sp.
MPFYYRRKWNNNYFRRRRYRRRGPRKTFRRKRRQRRVRRKRFKKYRLRKLKTIIQRQYQPEQIRKCKIRGFLELIECGYGRLSDNWALYKESYAPEHEPGGGGWSIQQLTLGNLYIQSKYAMNYWTHTNRGYNLARYLGVNIRLYRQPQTDYIFHYNLQDPQIITKYTYPSYHPYKILQYHQRIVVPSLQTAPHKKKLYKQRFIKPPKKMKNQWYFQEQLTDFPLLTFYTTAVDLQSMFISPKAQNNNITLNVLNTQLFHNPNFQFPPETSGYKPDSQNYLYGYTGPHIHWPNEGVPLKNFILLADTTNNTPGEPILNNSMPPKKKWGNPFFHEFFNMDAATTLQSIKPGDKAFAEKNIKESDLKVQPYYEQVRYNPNKDDGDGNEAYIIKNFTSAQQPNWDPPKDEDLILRGHPLWLMLWGLQSYIEKKKLFNDLDKNGILVIRTKKFSGPPLPAYVILNDSFCRGQGPYDQPREEITLYNNTHWYPRFKYQKEALEQILETGPGVYKTNRGTSIQSHLHYTFLFKWGGNPSKMETIADPTTQPTGPDPNNLLFSNEINSPEQTILNYIYKWDVRRDLLTQKATNRITELQIPKQTVFTDGKATSTDIPIWTQTTPQTKETTEEENQEIQQQLELVQLYNQQLQQRLRQLILSNNP

SEQ ID NO: 2654 - protein, 84 aa, Betatorquevirus sp.
MSKFLKPTIYKNGALETQWMNSIFTTHDIVCGCQDTINHLKFLIENQQCHSIIEGNGTTTTFADADIDAGDLERLFAENEDNEG

SEQ ID NO: 2655 - protein, 118 aa, Betatorquevirus sp.
LDTNNTTNERDHGRRKPRDTAAARARPTVQPTTPAATQTTNIIQQPINIKCIKKVYLFDPPKPRKNERFTGWEWETELQLCKAFKRPMRTFKNDPPYYPWLPPEPIVNFDLNFNKGQH

SEQ ID NO: 2656 - DNA, 2919 bp, Betatorquevirus sp.
gggcaattcgggctagatcagtctggcggaacgggcaagaaacttaaaatatatatatattttacagatatgtcatctatttggagaccaccgacatcatcactaagacaacaagaattaaattggcttaacattgtacatcaatcccacgacgccttttgccactgtgaagacccagacctacattggatgattgcagttaacaaattcagcgcatttcaaaaaccagaaatcgacattaaaaatataaaatgcctccttaccggcgctaccaaagatggtacagaagaagaagaaactactggacaaaaagaagattttggaattctagaaggagaactagaccaacttttcaacgaagaaaacgaacctacagaaaataccgaccaaaggtaaaaagacgtttttttaaaagaaaaagaaaatacattaaaatcaaaatgtttcaacctaaaaatattgtaaaatgtaaaattaccggttacaaatgtttatttcaaggtagtccttttagaaagcaacataactggattcaatatatatacagctttgctaaacctaacatggttgctgggggaggttggagcttacttgtatttagtttagatagtatgtttgaagactataaacatttacaatgtacctggacaaaaggaaatgcaggattgccacttgtaagatacacaggagcaaaatttaaattttaccaaagtaaatttgatgattatattactgtctatgacaactgctggcccatggtagatactccacatacacacgcagactcatcacctagcagaatgtttcaaaaaatacacaaaacagtagtaccatctagacaaaccaaacaacgaagaaaaccttttaaaacagtacacattaaaccaccaccacaaatgacaaacaaatggtactttcaaagagacatttgcaaacaaccattagtaatgctaacaactacatcagtagacttacaacaaccatttcaatatagcaatgctaacaacaataacattactataaaatacttaaatccaaatatttttcaaaacaataactttcaaaactacccattaacagaaggatattcacccaaatcactaccaaaaagtacaacagataatacagctgaaaaatactttctttactcagaccactcaaatcaacctataaaaaaaaataaacaatggctaggccaactagtaccattattaaacacaaaacattactatgcaggagcaacgctatcactaatagtaacagatagcaatgacaaaccatctatgtggggaaacccattttatcacgaacacttagatccacaaacatctacaacatacctctgtaactacaacacatcaacatttaaaacacactggaacgaaataccagaaactggaaacgcaaacgacaatcaactaccaaattttaaaatattcaaagccaccgaaaacctaatatatgaaactgtatataatcctgaaaatgacacaggagaaaccaacctaatttacttaattaataattcacaagaaacacattttgaacctctaccaaacaaagacttacaatttgaaggatttccattatacaacttattttggggatggacagattttattaaaaaactagaaacaaccacaaacttagacaacaactacacaatagtaatacaaacaaaaacattccatgaaaaagacaaattcttttgcatacttgatccatcatttatactaggatttgatccttttacaccacatgaaacagaaagccacacaccatcatattataattcactaaattggtttccaaaattagcttttcaagaagaaactattgaagcaatttgtgaaactggtccaggtgtatcaaaatcaaaaaactacttacaagcaatttgtaaatataccttttattttaaatggggaggctgtccaaaaacattagaaaaagcatacaatccttgtttacagcccacctggactacacccaatacaatccctccaagacttgaaatacaggatcctaacctcccaccagaagccaacttgtactactgggactgggaaaaagactttgttacacatgaagctatccaaagaattagagactacacgttcactgatgaacaaatattcccaattacaggatcaaagtcatcagcaaaagcaacgacgccacaaacgacgacaaccgaggaagaaaaagaagaagagaaactactcctccagctcaacaagctccgaaagcaacgagtacagctccaactcctcatcagaatgaaagaacaaaacttactataataaacaaagttgaactgttcccaaaaacaaagaaaaatagacgatttacttcttgggaacaacaagaagaaaatcaacttgcagctatatttttaagacctcctagacattatatatatgaccctccattttatccttggttacccccagaaccatatgtaaactttgatcttaattaccctgctttaaaaaaataaaggccaacaaatttcacttagtggagtcagtttatataagttaaactttaataaacatccaccacctccctaaaaatgggcgccaaaattaaagggggctccgcccccttacacccccaagggggctccgccccctttaacccccaagggggctccgcccccttccacccccaagggggctccgcccccttaaaccccctaattaatatttaacaggaaaaccacctaatttgaattgccgaccacaaaccgtctcatacttcccttttttataacacttcctcttactctcattattattcattacattaattaatagtccgtgtaattccggggaggagtttattaactatataactaactaaacttccgaatggctgagtttatgccgccagacggagacgggatcacttcagtga

SEQ ID NO: 2657 - protein, 683 aa, Betatorquevirus sp.
MPPYRRYQRWYRRRRNYWTKRRFWNSRRRTRPTFQRRKRTYRKYRPKVKRRFFKRKRKYIKIKMFQPKNIVKCKITGYKCLFQGSPFRKQHNWIQYIYSFAKPNMVAGGGWSLLVFSLDSMFEDYKHLQCTWTKGNAGLPLVRYTGAKFKFYQSKFDDYITVYDNCWPMVDTPHTHADSSPSRMFQKIHKTVVPSRQTKQRRKPFKTVHIKPPPQMTNKWYFQRDICKQPLVMLTTTSVDLQQPFQYSNANNNNITIKYLNPNIFQNNNFQNYPLTEGYSPKSLPKSTTDNTAEKYFLYSDHSNQPIKKNKQWLGQLVPLLNTKHYYAGATLSLIVTDSNDKPSMWGNPFYHEHLDPQTSTTYLCNYNTSTFKTHWNEIPETGNANDNQLPNFKIFKATENLIYETVYNPENDTGETNLIYLINNSQETHFEPLPNKDLQFEGFPLYNLFWGWTDFIKKLETTTNLDNNYTIVIQTKTFHEKDKFFCILDPSFILGFDPFTPHETESHTPSYYNSLNWFPKLAFQEETIEAICETGPGVSKSKNYLQAICKYTFYFKWGGCPKTLEKAYNPCLQPTWTTPNTIPPRLEIQDPNLPPEANLYYWDWEKDFVTHEAIQRIRDYTFTDEQIFPITGSKSSAKATTPQTTTTEEEKEEEKLLLQLNKLRKQRVQLQLLIRMKEQNLL

SEQ ID NO: 2658 - protein, 108 aa, Betatorquevirus sp.; identical to SEQ ID NO: 2650

SEQ ID NO: 2659 - protein, 60 aa, Betatorquevirus sp.; identical to SEQ ID NO: 2651

SEQ ID NO: 2660 - DNA, 2919 bp, Betatorquevirus sp.
cgggtgccgaaggtgagtgaaaccaccgtagtcaaggggcaattcgggctaggccagtctggcagaacgggcaagaaacttaaaaatatattttttacagatgagcagtttatggaaacaaccacaatatggacctaaaggactagaaaactgctggcacaacctactctacggtacccacgactgcatttgcggctgcaacgacacaacccttcatcttttacaaattctatcaaaaaacaacccaaaaaaacaacgacacaacccttcatcttttacaaattctatcaaaaaacaacccaaaaaaaccaactacaaaacaacttaaggaaataaaatgcctccttactggagaagaagatactacagaagaaaatactggcgtagatggcctagaacctggagacctagaccttttgttcgccgcagacgacgcagacgataccgccgccgcaactactgggtaagaagaaaaaaacttttaaaaattaaacttaaacaatttcaaccatatactgtaagaaaatgtagagttaaaggactaaaatgcttatttcaaggaagcgcagacagattaatatataattactggcaatatccaacaagttttgttccagaaaaaacacccggaggaggaggctggggtttactggtatttagcctagcaagcttatttgaagactatgaaaaaatacaaaactattggacacaaagcaatgctggtttgccacttgtcagagtactaggagcaaaactaactttttaccaacatccaaccatggactacgttgtagaaatagacagatgttggcctatggttgatacaccattaaaacatgcaaactgccaccctcaaagaatgttaatgggtaaaaaatcattaattatacccagcacagaaacaaaaagactaaaacacggaaaaagaaaaatatttgttccaccaccagcacaaataagtaaccaatggtactttcaaaaagacctttgtaatacaaaactactaatgatagctgccactgcttgtgatttaaaaaactactacattgggcccaattgggaatcaaacaacattacattttacagcctaaacacatatcaatttaaaaatcacaattttcaacatccatcacaaccatttggatacacaccaaaaccaggtatgtatttatatagtttagcaaatggctctactgcttttccaaaagaacaaagtaaattaatatacttaggagactcagaagaatataaagcaggaaaaccaggacgcgtaggcacagcaagtatacccagaacagaatggggatgtccattttatacacattacatgcaagcagacataccagtatactatagctcacacgcaccaacagacacccaagcatttaaaacctcagaaagtattagacaaaacctaacagaaatacatggcaaattatatgtagaatgcagatacaatccagacagagacaccggcaaaggcaatattatatactttttaaataattactcaggtgttggagacaccgcctgggacgaaccacaagacgaaaacaacaaaattacaggcctgccattatgggtagcaatttggggatggtcagactggataaaaaaattaaactatttaccaagattagaggatgaccaaatattatgcataaaatcaccattcataacaccaccattaccatgctacgtgcccctagatgattcttttttacaaggcctagcaccctatgaccaaccactttcaggaaaatatgctctacattactacccacaattaaattggcaaagacaatcagaagaaaccataggagaatgtggcccaggtgtatgtagatttgataaatccaaagcagtgcaagcaaaaatgggataccaatttttatttaaatttggtggctgtccttctacactagaaaaaatttacgatccttgttcacagccaaagtggcccgttaccagtaacatcactgaaggatatgaaatccagaatccagggaccgatccctcaacaatcatcaacacctgggatgttagacgcgactttattacaaaaccagctatcaaaagacttaaaaaagacaaagaaactgatgaaactgtttcaatcccaacaggatcaaaatccagccccagtgcagtactcctccaaacacaccaaacaacagaggacagctcatcgtcagaggaagaagaaacgcaaacattacagtccaagctcctcagactccgagagcagcaacgccagctcaaccagcacctcctcaaattaatcaaaagtacaaaataactcatttaaaatgtaaaattaacctgtttaacgaccctattaaacgcccccctagacgctttacgcctgcagaaagacaaacagaaaaagagttagctgcttggatgcatagaccccaaagacacttttttgacgatcctccaacttatccctggctacctttgactccccttgcaaactttgacttaaacttcaaagaataaaggccaacaaatttcacttagtggtgtctgtttctttaagttaaaccttaataagcaaactccgcctcccaacactgttggcgcgcaaaagggggctccgcccccttacacccccaagggggctccgccccctaaaacccccaagggggctccgcccccttacacccccaagggggctccgcccccttacacccccttataaatatttatacaggaaaccacaaaattagaattgccgaccacaaactgacatgcaaattaacttccctaaatgtgcacttaacttcctcaaaaattaattaataatcaccgtcattatgggaggagcagcaaccctatataactaactgcacttccgaatggctgagtttatgctgccagacgtagagaagatagaatatcttcgctggactaggg

SEQ ID NO: 2661 - protein, 653 aa, Betatorquevirus sp.
MPPYWRRRYYRRKYWRRWPRTWRPRPFVRRRRRRRYRRRNYWVRRKKLLKIKLKQFQPYTVRKCRVKGLKCLFQGSADRLIYNYWQYPTSFVPEKTPGGGGWGLLVFSLASLFEDYEKIQNYWTQSNAGLPLVRVLGAKLTFYQHPTMDYVVEIDRCWPMVDTPLKHANCHPQRMLMGKKSLIIPSTETKRLKHGKRKIFVPPPAQISNQWYFQKDLCNTKLLMIAATACDLKNYYIGPNWESNNITFYSLNTYQFKNHNFQHPSQPFGYTPKPGMYLYSLANGSTAFPKEQSKLIYLGDSEEYKAGKPGRVGTASIPRTEWGCPFYTHYMQADIPVYYSSHAPTDTQAFKTSESIRQNLTEIHGKLYVECRYNPDRDTGKGNIIYFLNNYSGVGDTAWDEPQDENNKITGLPLWVAIWGWSDWIKKLNYLPRLEDDQILCIKSPFITPPLPCYVPLDDSFLQGLAPYDQPLSGKYALHYYPQLNWQRQSEETIGECGPGVCRFDKSKAVQAKMGYQFLFKFGGCPSTLEKIYDPCSQPKWPVTSNITEGYEIQNPGTDPSTIINTWDVRRDFITKPAIKRLKKDKETDETVSIPTGSKSSPSAVLLQTHQTTEDSSSSEEEETQTLQSKLLRLREQQRQLNQHLLKLIKSTK

SEQ ID NO: 2662 - DNA, 2919 bp, Betatorquevirus sp.
cgggtgccgaaggtgagtgaaaccaccgtagtcaaggggcaattcgggctaggccagtctggcagaacgggcaagaaacttaaaaatatattttttacagatgagcagtttatggaaacaaccacaatatggacctaaaggactagaaaactgctggcacaacctactctacggtacccacgactgcatttgcggctgcaacgacacaacccttcatcttttacaaattctatcaaaaaacaacccaaaaaaaccaactacaaaacaacttaaggaaataaaatgcctccttactggagaagaagatactacagaagaaaatactggcgtagatggcctagaacctggagacctagaccttttgttcgccgcagacgacgcagacgataccgccgccgcaactactgggtaagaagaaaaaaacttttaaaaattaaacttaaacaatttcaaccatatactataagaaaatgtagagttaaaggactaaaatgcttatttcaaggaagcgcagacagattaatatataattactggcaatatccaacaagttttgttccagaaaaaacacccggaggaggaggctggggtttactggtatttagcctagcaagcttatttgaagactatgaaaaaatacaaaactattggacacaaagcaatgctggtttgccacttgtcagagtactaggagcaaaactaactttttaccaacatccaaccatggactacgttgtagaaatagacagatgttggcctatggttgatacaccattaaaacatgcaaactgccaccctcaaagaatgttaatgggtaaaaaatcattaatcatacccagcacagaaacaaaaagactaaaacacggaaaaagaaaaatatttgttccaccaccagcacaaataagtaaccaatggtactttcaaaaagacctttgtaatacaaaactactaatgatagctgccactgcttgtgatttaaaaaactactacattgggcccaattgggaatcaaacaacattacattttacagcctaaacacataccaatttaaaaatcacaattttcaacatccatcacaaccatttggatacacaccaaaaccaggtatgtatttatatagtttagcaaatggctctactgcttttccaacagacaaaagtaaattaatatacttaggagactcagaagaatataaagcaggaacaccaggaaaagtaggcacaaaaactatatccagatcagaatggggatgtccattttatacacattacatgcaagcagacataccagtatactatagcacacactcaccaacagacaccgacgcatttaaaaacgcagagtctattagacaaaacctaacagaattacatggcaaattatatgtagaatgcagatacaatccagacagagacaccggcaaaggcaatattatatactttttaaataattactcaggtgttggagacaccgcctgggacgaaccacaagacgaaaacaacaaaattacaggcctgccattatgggtagcaatttggggatggtcagactggataaaaaaattaaactatttaccaagattagaggatgaccaaatattatgcataaaatcaccattcataacaccaccattaccatgctacgtgcccctagatgattcttttttacaaggcctagcaccctatgaccaaccactttcaggaaaatatgctctacattactacccacaattaaattggcaaagacaatcagaagaaacaataggagaatgtggcccaggtgtatgtagatttgataaatccaaagcagtgcaagcaaaaatgggataccaatttttatttaaatttggtggctgtccttctacactagaaaaaatttacgatccttgttcacagccaaagtggcccgttaccagtaacatcactgaaggatatgaaatccagaatccagggaccgatccctcaacaatcatcaacacctgggatgttagacgcgactttattacaaaaccagctatcaaaagacttaaaaaagacaaagaaactgatgaaactgtttcaatcccaacaggatcaaaatccagccccagtgcagtactcctccaaacacaccaaacaacagaggacagctcatcgtcagaggaagaagaaacgcaaacattacagtccaagctcctcagactccgagagcagcaacgccagctcaaccagcacctcctcaaattaatcaaaagtacaaaataactcatttaaaatgtaaaattaacctgtttaacgaccctattaaacgcccccctagacgctttacgcctgcagaaagacaaacagaaaaagagttagctgcttggatgcatagaccccaaagacacttttttgacgatcctccaacttatccctggctacctttgactccccttgcaaactttgacttaaacttcaaagaataaaggccaacaaatttcaattagtggtgtctgtttctttaagttaaaccttaataagcaaactccgcctcccaacagtgttggcgcgcaaaagggggctccgcccccttacacccccaagggggctccgccccctaaaacccccaagggggctccgcccccttacacccccaagggggctccgcccccttacacccccttataaatatttatacaggaaaccacaaaattagaattgccgaccacaaactgacatgcaaattaacttccctaaatgtgcacttaacttcctcaaaaattaattaataatcaccgtcattatgggaggagcagcaaccctatataactaactgcacttccgaatggctgagtttatgctgccagacgtagagaagatagaatatcttcgctggactagggcgggtgccgaagctgccagacgtagagaagatagaatatcttcgctggactaggg

SEQ ID NO: 2663 - protein, 653 aa, Betatorquevirus sp.
MPPYWRRRYYRRKYWRRWPRTWRPRPFVRRRRRRRYRRRNYWVRRKKLLKIKLKQFQPYTIRKCRVKGLKCLFQGSADRLIYNYWQYPTSFVPEKTPGGGGWGLLVFSLASLFEDYEKIQNYWTQSNAGLPLVRVLGAKLTFYQHPTMDYVVEIDRCWPMVDTPLKHANCHPQRMLMGKKSLIIPSTETKRLKHGKRKIFVPPPAQISNQWYFQKDLCNTKLLMIAATACDLKNYYIGPNWESNNITFYSLNTYQFKNHNFQHPSQPFGYTPKPGMYLYSLANGSTAFPTDKSKLIYLGDSEEYKAGTPGKVGTKTISRSEWGCPFYTHYMQADIPVYYSTHSPTDTDAFKNAESIRQNLTELHGKLYVECRYNPDRDTGKGNIIYFLNNYSGVGDTAWDEPQDENNKITGLPLWVAIWGWSDWIKKLNYLPRLEDDQILCIKSPFITPPLPCYVPLDDSFLQGLAPYDQPLSGKYALHYYPQLNWQRQSEETIGECGPGVCRFDKSKAVQAKMGYQFLFKFGGCPSTLEKIYDPCSQPKWPVTSNITEGYEIQNPGTDPSTIINTWDVRRDFITKPAIKRLKKDKETDETVSIPTGSKSSPSAVLLQTHQTTEDSSSSEEEETQTLQSKLLRLREQQRQLNQHLLKLIKSTK

SEQ ID NO: 2664 - DNA, 2919 bp, Betatorquevirus sp.
cgggtgccgaaggtgagtgaaaccaccgtagtcaaggggcaattcgggctaggccagtctggcagaacgggcaagaaacttaaaaatatattttttacagatgagcagtttatggaaacaaccacaatatggacctaaaggactagaaaactgctggcacaacctactctacggtacccacgactgcatttgcggctgcaacgacacaacccttcatcttttacaaattctatcaaaaaacaacccaaaaaaacaacgacacaacccttcatcttttacaaattctatcaaaaaacaacccaaaaaaaccaactacaaaacaacttaaggaaataaaatgcctccttactggagaagaagatactacagaagaaaatactggcgtagatggcctagaacctggagacctagaccttttgttcgccgcagacgacgcagacgataccgccgccgcaactactgggtaagaagaaaaaaacttttaaaaattaaacttaaacaatttcaaccatatactataagaaaatgtagagttaaaggactaaaatgcttatttcaaggaagcgcagacagattaatatataattactggcaatatccaacaagttttgttccagaaaaaacacccggaggaggaggctggggtttactggtatttagcctagcaagcttatttgaagactatgaaaaaatacaaaactattggacacaaagcaatgctggtttgccacttgtcagagtactaggagcaaaactaactttttaccaacatccaaccatggactacgttgtagaaatagacagatgttggcctatggttgatacaccattaaaacatgcaaactgccaccctcaaagaatgttaatgggtaaaaaatcattaatcatacccagcacagaaacaaaaagactaaaacacggaaaaagaaaaatatttgttccaccaccagcacaaataagtaaccaatggtactttcaaaaagacctttgtaatacaaaactactaatgatagctgccactgcttgtgatttaaaaaactactacattgggcccaattgggaatcaaacaacattacattttacagcctaaacacataccaatttaaaaatcacaattttcaacatccatcacaaccatttggatacacaccaaaaccaggtatgtatttatatagtttagcaaatggctctactgcttttccaacagacaaaagtaaattaatatacttaggagactcagaagaatataaagcaggaacaccaggaaaagtaggcacaaaaactatatccagatcagaatggggatgtccattttatacacattacatgcaagcagacataccagtatactatagcacacactcaccaacagacaccgacgcatttaaaaacgcagagtctattagacaaaacctaacagaattacatggcaaattatatgtagaatgcagatacaatccagacagagacaccggcaaaggcaatattatatactttttaaataattactcaggtgttggagacaccgcctgggacgaaccacaagacgaaaacaacaaaattacaggcctgccattatgggtagcaatttggggatggtcagactggataaaaaaattaaactatttaccaagattagaggatgaccaaatattatgcataaaatcaccattcataacaccaccattaccatgctacgtgcccctagatgattcttttttacaaggcctagcaccctatgaccaaccactttcaggaaaatatgctctacattactacccacaattaaattggcaaagacaatcagaagaaacaataggagaatgtggcccaggtgtatgtagatttgataaatccaaagcagtgcaagcaaaaatgggataccaatttttatttaaatttggtggctgtccttctacactagaaaaaatttacgatccttgttcacagccaaagtggcccgttaccagtaacatcactgaaggatatgaaatccagaatccagggaccgatccctcaacaatcatcaacacctgggatgttagacgcgactttattacaaaaccagctatcaaaagacttaaaaaagacaaagaaactgatgaaactgtttcaatcccaacaggatcaaaatccagccccagtgcagtactcctccaaacacaccaaacaacagaggacagctcatcgtcagaggaagaagaaacgcaaacattacagtccaagctcctcagactccgagagcagcaacgccagctcaaccagcacctcctcaaattaatcaaaagtacaaaataactcatttaaaatgtaaaattaacctgtttaacgaccctattaaacgcccccctagacgctttacgcctgcagaaagacaaacagaaaaagagttagctgcttggatgcatagaccccaaagacacttttttgacgatcctccaacttatccctggctacctttgactccccttgcaaactttgacttaaacttcaaagaataaaggccaacaaatttcaattagtggtgtctgtttctttaagttaaaccttaataagcaaactccgcctcccaacagtgttggcgcgcaaaagggggctccgcccccttacacccccaagggggctccgccccctaaaacccccaagggggctccgcccccttacacccccaagggggctccgcccccttacacccccttataaatatttatacaggaaaccacaaaattagaattgccgaccacaaactgacatgcaaattaacttccctaaatgtgcacttaacttcctcaaaaattaattaataatcaccgtcattatgggaggagcagcaaccctatataactaactgcacttccgaatggctgagtttatgctgccagacgtagagaagatagaatatcttcgctggactaggg

SEQ ID NO: 2665 - protein, 653 aa, Betatorquevirus sp.; identical to SEQ ID NO: 2663

SEQ ID NO: 2666 - DNA, 2919 bp, Betatorquevirus sp.
cgggtgccgaaggtgagtgaaaccaccgaagtcaaggggcaattcgggctgggtcagtctggcggaacgggcaagaaacttaaaatgtatttcattttagatatgagccaccgtctaattcaaccaaaaccatctgcaaaacaacaaaaactaaaatggatgaatatgctcgctcactgccatgatactttctgcgattgctacgatccaataacccacactgcagcactaatttttgaacaagaaccaaacctaaaattctctgcaccagaaaaggatataattagaaaatgtattactggagaaactaccgccgcaattactaccgacccagaacaagacgttattggagacggagaactcgccgctttgtttcaagaagacgttggagaagaaaaagatacagggtaagaaaaagaaaactaaaaactttaaaactaaaacaatggcaaccacattacataaagaaacttaaaattaaaggagactatccaatttttttaacaacttcacaaagaatatctaataacttgatatgctacttagaaagcatagcaccttgggactggccgggaggtgggggctttagtattgctaactttacatttgaaatgctgtataaagaaaacttaactgctaataattactggactgtaagcaatgataatatgccactatttagatatcttggatgccacattacactatacacacaaccagaagtagactacttattttactggaacaacacaccacccatgaaagcaacaaaactaacatacatgagcacacaaccacaaataatgttacaattaaaacatgtaaaagtaatgaaatgtagaaaaacaaacagaaaaaaaccatacaaaagaatatgggtaccacccccaacacaaatgcagaacaaatggtacttacaacacgacctagctaacgttccattattacaaactattgccacagtatgctcgttagaccgcaaatacttacatgcaaatgccaaatcaaccacaatgagtttctacactattaacacagaagaaatacaagaccattactttgcacaaacacaaggaacacaaggttacaatccaaaaaacaatgtaaagctttttggttgtctagaaccaccagctaaatactccctaacagatattaagataggaactttaacatacctaggacaagtagatactcaacattcaggaacaaaactaaaagatataaacacgtccactgcatcctttgctgacaaaatacagaaggcatttaatactccaggactacaaggaaaccccttttacaaagaatggctaaacccagactcctatgttgtaaaaacaacagcagacttacaaacattaaaagactactacaaagaagcagacacaaaattaaaccaacaacacttttcatgggcaggaaatcttctaaaagaagttagatacaatccttttaaagacaaaggcataggaaacaaagtatacttagtaaacatactaactagagaacattctcacacctgggacgctccattagacgatgacatagtctggaaagacctaccactttacaacctaacatggggatacctagattttcaaagaaaatgtggcctaaacacagctatagacacaaacaaatgccttgtaatatacacaccttacgtagaaccacaactcacaacaaaaatatacgtaccagtagataaaaaatttacagaaggactaagcccctattcacaaataacatttccatcagaccagtcaaactggcatccaaaagtaagataccaagtagatactgctaaccttatagcttctactggacctaatacagtaaaactacctgacaatataagctgtgaaggacatataagatataactttaaattcaaaattggaggagaaccagcaccaatgtcagttcttgtggatccacaggaacaaccagcacataccttccccaataacatcctacaaacaacttcgttacagagtccagcaaggccaattgaacaactattatggaaattcgatgaaagacgaggactgcttacaaaaaaagctgcacaaagaatcaaaacacacacagaaactgaaaaagatattctttcaattacagacccagcaacaagctgcccaatatggaccaccaaagaaacatcgacatcggacacatcgacagaggaagaagaagaagcaccactccagacacaactcctccacgagcgaagaaagcaaaaactcctccgaaagcgaatcaacagactcctcaaccgactaacaacattagaatagacaattgtaaaataaaagtaaaactattccctgatgaacaaccccgtaaccgtagaatgactaactgggaaagagaacaagaaatacaagaggcagctctgtggggtagaacaccaagatggtttatatttgacaaacatttttaccccgacgttcctcctgtaccaaaatatactgtaaactttgacttaaatgcgccgtaataaaacaaggccagcaaatattcactctcggtgtccatttatataagctttaacttaaataaacatccaccactctccctaatacgcaggcccagaagggggctccgcccccttcaacccccagggggggccaagcccccccctataaccccccctaatgaatattcaacaggaaaaccacacaattagaatggctaaccacaaactgccacttagttcccctttttactaaacttcctcttttactcattattattcataaaattaattagtaatcaccgtaaatccggggagtgtccaactacctatataactaactacacttccgaatggctgagtttatgccgccagacgggctgagtttatgccgccagacggagacgggatcacttcagtgactccaggctgaccaaggg

SEQ ID NO: 2667 - protein, 669 aa, Betatorquevirus sp.
MYYWRNYRRNYYRPRTRRYWRRRTRRFVSRRRWRRKRYRVRKRKLKTLKLKQWQPHYIKKLKIKGDYPIFLTTSQRISNNLICYLESIAPWDWPGGGGFSIANFTFEMLYKENLTANNYWTVSNDNMPLFRYLGCHITLYTQPEVDYLFYWNNTPPMKATKLTYMSTQPQIMLQLKHVKVMKCRKTNRKKPYKRIWVPPPTQMQNKWYLQHDLANVPLLQTIATVCSLDRKYLHANAKSTTMSFYTINTEEIQDHYFAQTQGTQGYNPKNNVKLFGCLEPPAKYSLTDIKIGTLTYLGQVDTQHSGTKLKDINTSTASFADKIQKAFNTPGLQGNPFYKEWLNPDSYVVKTTADLQTLKDYYKEADTKLNQQHFSWAGNLLKEVRYNPFKDKGIGNKVYLVNILTREHSHTWDAPLDDDIVWKDLPLYNLTWGYLDFQRKCGLNTAIDTNKCLVIYTPYVEPQLTTKIYVPVDKKFTEGLSPYSQITFPSDQSNWHPKVRYQVDTANLIASTGPNTVKLPDNISCEGHIRYNFKFKIGGEPAPMSVLVDPQEQPAHTFPNNILQTTSLQSPARPIEQLLWKFDERRGLLTKKAAQRIKTHTETEKDILSITDPATSCPIWTTKETSTSDTSTEEEEEAPLQTQLLHERRKQKLLRKRINRLLNRLTTLE

SEQ ID NO: 2668 - protein, 120 aa, Betatorquevirus sp.; identical to SEQ ID NO: 2404

SEQ ID NO: 2669 - protein, 121 aa, Betatorquevirus sp.; identical to SEQ ID NO: 2405

SEQ ID NO: 2670 - DNA, 2918 bp, Betatorquevirus sp.
cgggtaccgaaggtgagtgaaaccaccggagttaaggggcaatatgggcagtagcagtctagcggaccgggcaagaaactaaattatatttgttttttagaatgagcaagtttctgaaagaaccatcatactccaaaaaagcccttgaaacacaatggattaacttttgctttggagcccacgacctaatttgtggctgcaacaaagtaattcaacattttaaccatcttactaacaacaaaccatggcgccatttcgaagaacatactactggagaaactggagatggccacgaagaagaagaaaccggttttacaaaaggagatttagaagcactattcaacgaagaaaacgacgacgcagaagggtaagaagaaaacgcttttttaaaaacaaatttaaaaaattaaagcgtatacatatagatcaatggcaaccaagtactgtaaaaaaatgccaaataaaaggctatttatgcttatttcaaagcggtaaaggacgcttttggaacaattactgtttatctaaagaaagctacgtacccccacacactccaggtggagggggttggagttttcaacaactaagcctcggaaacttatatactcaaaagtgtgaatttatgaacatatggacccgttcaaaccgctctttaaatttgtgtagatattacggtacaaaagtaactttgtatagagaacaaaatgttgattatgtatttacttggtttaaagaaactcctagaactgtagaaaaatattttttctgctcacatcatccattaagactactaacacataacagaagagtaatagtacccagttttcaaacacaacctcataaaagaaaaccatttaaaacaatattcataccaccaccaccactactaaaaaaccaatggttttttcaacaacatttagcaccatttccactagtaacatttttagcatcagcagttagcttaacaggaatgtttggatctagaaactctataaataacaatgcattaatttggaatttagacactattttctttaaaaaaccaaattttcaatacgttagaacaacagaaccacaatttggataccaaccagatccacaatattatttgtgggcacttccagcaggaaaagaacaatttaaccaaaataaaatagcagactctatttacctaggaaactctcatttaaatcaagcaggagatcatataccatcaacagccgccagtatacaaaactataataaaggttcctggggaaatccattctggtggcaatacacaaccttacaagtaagacttttccaaaccccagcatcaacccaaacacaaggacacgacttaaacaattggcttacaaaaaaaaatcaaaatttaaacgacagctgggaattaacaaaaccatacataaacactataagatataacccatataaagacaaaggagacggaaatgaagtatactttattccaaattatgaccctaaacaaacagattggaatccaacaaacgatccgtcaatacactttagtggctttcccttatggatgatgctatggggaatagaagacatacttaacaaaatgggtaaatgcccaaaattagacgaagactggatatgtgttattagaactaaatacatgtttccaccagaaaaacaatatgtattgctatcttacaattttgtacacggcacaggaccatatgacacggaaagagaaaacatagcacccctagatgaagtcacatggtatccaaaatttaaatttcaacgagaggccttagatgctataatacaaacaggccctgcagtatgtagagcagatgatgtgaaaaatattcaagctaaaataaaatacaaatctttttttaagtttggtggaaacccaccaccaaacgaaatacccacagatcccacaactcaaccaattactcctacccccggtggattcgacatacaaaatgaaatcattaatccagcaacctccatccaatccatgctctaccagtgggactttagaagggactatattacaccaaaagctgcagaaagaattaaaacaagcgaaacttatgagcaatctatgttcacagatggagtacaaacttcaacagacgtccacctctacaaagcaccagaaacacaaacggaagagaccccggaaacacaagaaacgacattactcctccagctccagcagctccagcaatacaacttacaactccaacacagattcagacagctaaaacaatcattaatggacctataaaaagagctttactatttcctgaacaagaaaaaccaaaacctaaaagatttaaaggtagagactgggaaactgagttagaacttagtaaatggatgcatagaccaatgagacaatttacaaccgatccccctttttatccctggttgccccctacaccgcttgtaccatctgttaactttgatcttatgtctgcttacaataaaggcctgcattaattcacttaacaagcctgtttatttaagtaaaaacttatataaacatccaccgcctccctaatacgcctgcgcacaagggggctccgcccccttaaacccccgggggggtaaaccccccctaagccccccctactaattaatattcaacaggaaaaccacctaatttgccccccctaagccccccctactaattaatattcaacaggaaaaccacctaatttgaattgccgaccacaaacggtcaaccgttaactatacttccctaaaatgtacataacttccccaaatcacaacacacacctactaattaattagtaataaacatcatatccggggagtaactaaacctctataaaagtaacataccagacgaatggctgagtttatgccgctagacggagataacatcgcatcgattgttagctgctactggg

SEQ ID NO: 2671 - protein, 674 aa, Betatorquevirus sp.; identical to SEQ ID NO: 2640

SEQ ID NO: 2672 - protein, 93 aa, Betatorquevirus sp.; identical to SEQ ID NO: 2641

SEQ ID NO: 2673 - DNA, 2918 bp, Alphatorquevirus sp.
cgctacgccttcggctgcgcccacaccgcagtctaggggcaattcgggcacgggtctggccgggctatgggcaagactcttaaaaaatttcctcgctctgtactccgccaggacaccaagtcatgccgtggtctccgccgagacataatatcagaacaagagaagatctctgggtgcaatcggttatttactcacatgacactttttgtggctgtgatagtgttcttcagcatcttactagcctcctgggtggcctacaaccagctccacctagagacccagcaccccctgccatacggagcctgccggcactgccgccagctccgcaaccccctgaagaaccacggcgtggtggagatacagacgaaggccgtggagaagatggaggagacgccgctggggcctacgaaccaggagacctagaagaacttttcgccgccgccgaggaagacgatatgtgagtagagggcggcgccgccgatacaggcgcagacggagacgggggcgacgcagaaggggacacagacgcaggcacagaaagacgctcattgtcaggcagtggcaaccagacgttattaaaagatgctttattactgggtggctacccctaattatctgtggaaacggacacacccaatttaactttataactcatatggacgacattccacccaaaaatgcgtcctatgggggcaactttacaaatgttacctttaaccttgcctgcttctatgaagaattcatgcatcacagaaacagatggtcagcctccaaccatgacctagaactggtcagatacctcagaaccagcctaaaactctacagacacgagtcagtagactatgtagttagctacaccaccacaggcccattcgaaacaaatgaattgtcctacatgctcactcaccctctagccatgcttctcagcaaaaaacatgtagttgtacccagcctaaagacaaaaccacacggcagaaagtacaaaaagataacaatcaaacccccaaaactaatgctaaacaaatggtactttgccaaagacttctgccacataggcctctttcagctctgggccacaggcctagaactaagaaacccatggctcaggtcaggcacaaacagcccagttataggattctatgtccttaaaaatcaggtttatcaaaacaaatacagcaacctaaacacaacagaagcttacacttcaagaaaaagtgcatatgatgaactaacaaaacatagctctgatacaaagtggtacaattggcagtatacatacaacaaaataatgaaacctatttactatgcagctgccaatgaacaaaactcaaattttaaaacccaaacatataattggaaaaattacaaacaaaacttccaagcagtaaaaactaaatgggaaaaaacttgtaaagacgcctatgaattagtatcagaagaatacaaacaaatatacagcacaactgtcacatatccaccaccatgggaacccttgacacaaaacacaggcagacagtacctagaacatgactgtggcatatacagcccatactttctaacaccacaaatatacactcctgaatggcacacagcctggtcctacattagatacaatcccctaacagacaaaggcataggcaacagaatatgtgtgcagtactgcagcgaggccagcagtgactacaacccagtaaaaagcaagtgcatgctacaagacatgcccttgtggatgatgctgtatggctatgcagactatgtagtaaagagcacaggcatacagtcagcctggacagacatgagagtggccattaggagcccctacacagacccaaaactcataggcagctcagaaaacacaatgttcatacccataggcatagaattcatgaacggagacatgccagacaagaggccctacattccgttaaagtggtggttcaagtggtaccccatgattacacaccaaaaaaccgcacttgaggcaatagtttcctgcagcccgttcatgcccagagatcaggaacaagccagttgggacataactgtaggttacaaagcaaccttcttatggggcgggtcccccttacctccacagcccatcgacgacccctgccaaaaatccacacacgaacttcccgaccccgatagaaaccctccaagaatacaaatctcagacccgcagcacctcggaccggcgacgctgttccactcgtgggacctcagacgtggattcattaatacaaaaagtattaaaagagtgtcagaacacctcgactctaatgaatatttttcaacaggcgtcgtgtccaaaaaaccccgattcgacacaccccaccacgggcagctatcaaaccaagaagaagacgccttacatatcctcagacaactccagaaagagcaagaagagaccacctccgaagaagaacaagcactccaaaaagaagaggagcaaaaagaaaagctcctacagcagctccgagtccagcgacagcaccagcgagtcctcaggcagggaatcaaacacctcatgggagacgtcctccgactcagacagggagtccactggaacccaatcctataatacttccagcagaaccaataccagacctcctattccccaatactggtaaaaaaaaaaaattttcgcccttcgattggcagtgcgagcaggagcttgcgactttaatgaaacgacctatgcgtttctatccctcagacagcccgttctacccatggctaccccccaagcgagatatcccaaaaatatgtaaagtaaacttcaaaataaatttcagtgaatgaatctcgaggccccgggagtttcacttagcggtgtctacctctaaaggtcactaagcactccgagcgcaagcgaggagtgcgaccccctgcccggtagcaacttcctcggggtccgg

SEQ ID NO: 2674 - protein, 641 aa, Alphatorquevirus sp.; identical to SEQ ID NO: 1958

SEQ ID NO: 2675 - DNA, 2918 bp, Alphatorquevirus sp.
atgggcaaggctcttaaagaatgcacttttctcgaatttccaggcaaaagaaaaggaaagtgctactgcgacgtgtgcgagctaaaccgaaagctaggccttcaatgagccaccggcctccagcacacaatgccgcgggcattgagcgcctctggttcgacagttgctttaggtcccacggatcttgttgtggttgtggtaattttgttaatcatattcttctactggctaatcgctatggctttcaggccggtccgccggcgccaggtggtcctcggggtgcacccgcactgagggccctgccgcctcccggggaagccaatcccggtgacggcgagcaacaaccatggcgtggcgatggtggtggcagagacgaaggagacggtggccgtggaggagacgccgctggagacgcctacggacaagacgacctagacgcactgttcgccgccgtcgaagaagagcaacagtaaggagaaggaggtgggggcgcagacgggggcgacgcacatataccagacgcagggccagacgcagacgcagacccagaaaaaaactgctgctttctatgtggcagccccagactataaggagatgcactattaggggcttcactagcctaataatatgtgggaactccaaatcggggcgaaactacgccctccacagcgaggactacaccacacaaatagagccctttgggggcagctttagcaccactacatggagcctgaaggtgcttttcgacgagcaccaaaaaatgctcaacaaatggagctaccccaacacacagctagacctcgccagatacaaagggtgcaccttctacttctacagagacttaaaaacagactatatagtaacctggagtagaaatccaccctttaaactgaacaaatacagctctcccatgctgcatccaggtatgatgatgcagagaaaaaagaaacttatagtacctagctttcaaaccagacccaggggcaaaaagagatacagggtccgcataagaccccccaacatgtttgaagacaagtggtatacacaagaggacctctgtcccgttaatcttgtgtcacttgcggtttctgcggctacactgacacatccgttctgcccaccactaacgaacaatccttgcatcaccttccaggtgttgaaagacttctattacaaagccataggcattaacagtaacttaacctcacaatataatgaactagaaaatatattatatgaaaaaaactgcacatactatcaaacaagccaagttttagcacagctaaatccaaattttaaaccagcaaaaaacgcgaacacaaacaaagaactaggtaatcacgtaccctggcttaaagaaacaaataccactaatggcttcctaactaaaaacaaccctgtatttggaatgtgtagctacaaacctaacaaagagaagcttaaaaaagttagacagtggtactgggatcaacaaaacactgaaaatgacatacatagcacctatggaaaagccactcttgagcaatttgagtaccacataggcttttacagctctgtatttttaagcccccaaagagacctacagttccctgcagcataccaagatgtaacttacaatccaaactgtgacagggctgtaggaaacatggtgtggttccagtacaacacaaaatgcaccacagaattcgatgcgacccagtgtaaatgtgtccttaaagacattccactgtgggcagccttctatggctactctgactttataatacaagagctaagcataagcacagaaatatataacataggcctagtctgtgttatctgcccatacacctttccccctatgtacaacaaaacaaagcccacctggggatacgtgttctatgacaccacctttggaaatggcaagatgcccaacgggtctggccacatccctgtgcactggcagcagagatggtggcccagaatggccttccaacaacaagtaatgcatgactttacactaacaggccccttcagctataaagatgactatgctaacacaacattcactgcaaagtataagtttgatttcttatggggcggtaatatgatatccgaacaggttatcaagaacccgtgcaaatcagaaagtgaacacgcctcctacccccatcgagtcagtcgcgacctacaaattgttgacccagcaaccatgggcccccaatatgtattccacacctgggactggagacggggactttttggcagagatgctctcaaaagagtgtcagaaaaaccgacagatgcttttgagtttacaaacccttacaaaagaccaagatatctccctcctacagaccaagaagaagcagagcaagaaaaagacttctattcaccggagcaaaaactccggtcctcgtcagaagagaaccaggagacgagcccgccgcaaagcgagcagctccgagagcgagtcctctcactccagctcacagagcagcagcgagtcggagagcagctccgattcctgttacagcaagtcctcaaaacgcaagcaggtctccacctaaacccccagttatttcaaaagctgtaaacaaggtttacctgtttgagccccccaggcctgtaattcccataatgggcagagaggcctgggaagacgagtacaccacttgcaaggtgtgggatagaccagctagacagaaccacacagacacccccttctacccctgggctcctaaggcccccccacaattcaaagtgtctttcaaacttggctggagataaataaacaaggccttaaactgttcacttgtcggtgtctacctcttaaggtcactaagcactccgagcgtcagcgaggagtgcgaccctccaccaaggggcaactccctcgaagtccggcgctacgcgcttcgcgctgcgccggacatctc

SEQ ID NO: 2676 - protein, 742 aa, Alphatorquevirus sp.
MAWRWWWQRRRRRWPWRRRRWRRLRTRRPRRTVRRRRRRATVRRRRWGRRRGRRTYTRRRARRRRRPRKKLLLSMWQPQTIRRCTIRGFTSLIICGNSKSGRNYALHSEDYTTQIEPFGGSFSTTTWSLKVLFDEHQKMLNKWSYPNTQLDLARYKGCTFYFYRDLKTDYIVTWSRNPPFKLNKYSSPMLHPGMMMQRKKKLIVPSFQTRPRGKKRYRVRIRPPNMFEDKWYTQEDLCPVNLVSLAVSAATLTHPFCPPLTNNPCITFQVLKDFYYKAIGINSNLTSQYNELENILYEKNCTYYQTSQVLAQLNPNFKPAKNANTNKELGNHVPWLKETNTTNGFLTKNNPVFGMCSYKPNKEKLKKVRQWYWDQQNTENDIHSTYGKATLEQFEYHIGFYSSVFLSPQRDLQFPAAYQDVTYNPNCDRAVGNMVWFQYNTKCTTEFDATQCKCVLKDIPLWAAFYGYSDFIIQELSISTEIYNIGLVCVICPYTFPPMYNKTKPTWGYVFYDTTFGNGKMPNGSGHIPVHWQQRWWPRMAFQQQVMHDFTLTGPFSYKDDYANTTFTAKYKFDFLWGGNMISEQVIKNPCKSESEHASYPHRVSRDLQIVDPATMGPQYVFHTWDWRRGLFGRDALKRVSEKPTDAFEFTNPYKRPRYLPPTDQEEAEQEKDFYSPEQKLRSSSEENQETSPPQSEQLRERVLSLQLTEQQRVGEQLRFLLQQVLKTQAGLHLNPQLFQKL

SEQ ID NO: 2677 - protein, 150 aa, Alphatorquevirus sp.
MHFSRISRQKKRKVLLRRVRAKPKARPSMSHRPPAHNAAGIERLWFDSCFRSHGSCCGCGNFVNHILLLANRYGFQAGPPAPGGPRGAPALRALPPPGEANPGDGEQQPWRGDGGGRDEGDGGRGGDAAGDAYGQDDLDALFAAVEEEQQ

SEQ ID NO: 2678 - protein, 60 aa, Alphatorquevirus sp.
LFEPPRPVIPIMGREAWEDEYTTCKVWDRPARQNHTDTPFYPWAPKAPPQFKVSFKLGWR

SEQ ID NO: 2679 - DNA, 2917 bp, Betatorquevirus sp.
caggtgctgaaggtgagtgaaaccaccgaaatcaaggggcaatatgggcacgggcagtctgggggactgggcaacatacttaaaatatttattttacagatgagcaaactgctaaaaccaacatcacattcagaaagaaatataattctacaaaatgtaaacgcttgggttgccatccacgatattacctgcaagtgtgaatctcctctacgctgcattattcttcaaatataccgtcaagaaccaacattaaattttaaaccaaaggaattacaaaaatggcttactactaccgaccttaccgtcaaagatggtggagacgaagaagatatagatggaaaagagctagacgaccttttcgcttctttagaaaaagaagacgccaaagggtaagaaaaagaaaattaaaatctcttaaaataagacaatggcaaccaggatgtataagaaaacttgttgttaaaggactatattgtttatttgaagctaatcatagacttctaactaataactatactcaatacatggaaagtgtaccaccagaaggaattccttccggaggaggatttagtattaacagatttaacataaactgtttatggagcgaaagacaaaaagctagaaatgtatggacaacaggaaacaaaaacttacctatgataagatatacaggatgtgaatttaaaatatacagacctatacactgtgatgcagtaataaactttcaaaactgctttcctatggaagctacagcattaacatatcactctgcacaaccatacatagcaatgatgacaaaacacagcaaaaaaatcacacgactatctaacacaaaaaacaaaaaaccatataaaaaatataaattcaaaccaccacaacaaatgactaacaaatggttttttgccagtgacatatacaacacaggtctaattatgctaacatcctcagcggcagactttgaaaatatatacataagtccatactcagaatctaatactatttcattaaaactacttaatgtaaaattatttataaacagacacttcaatcaattacccacagcaggataccacccaaaagacggtttttggctatgggcaagcataaacggcagtatatccccaaaatttaaagaaatgatatttttaggaaacactatacaataccaaaaaggcacagaaatagcaaaactagaaaaagtaacagacaccacaacaattcaggaagctatgaaattatacacaaactctaaagactggggaaacccatttcacgaagactacattaataaaacacatagaatttggtacacacacaacagtccacaaataacattaggaactaaaacagatcgggtaactacagaaatcaataaattaggctttcaaccactagaccaagaattatattttgaaggcagatacaatcccaatagagacagaggtaaaaattccttaatatattttttaaaaacaacagaagaagcatcaggttgggacccaccagaaaaagacagcctaattacagcaggttttccactatgggtttctgtctggggactaaaagactaccatgaaaaactaaaagatatgcaacacatggacacagattatatagcagtaatacaaacaaaagcaatagaaccacaagatatacaattaaactactttgtggtactagacaaacaatttacacacggagacagtgaatggcatgacggagaaaacagaacaccatgggataacatacactggcaccctatgcttcactaccaacacagatcattagaaattataggacaatcagggccagcagtaccaaaactaggacaatacaaaaacgcagaattacattgtgaatacaaattttattttaaggttgggggctgcgtaccaccaatggcagaaattacagacccagcagaacaaacttctttcccgataccaactaacatcactgaatcaaattcgtttcagaatccaaacgaaccaatccaatcctacttgtactccttcgaccaaaggagacacgaaattactagtacagctgcaaaacgaatcacaaaagacattacatctccaacgcctttattcacagatacaacaacaactggaacagacgtcccaattctccaaacactccaagaaatccaagactcggaggaggaggaggaaacccaagaaacgacactgctccagcagctcatcaaccagcgagcaaagcagcaacgaatcagcaagcgaatcaagcagctcctaaaattactacacaatacaacataacctgcattaaaaaggtacaattattcccagagaaaaaaaatagacgactaacaccatgggaagaagaacaagacatacaagaatcaaaaatatggaaaagggcaagaaaacattttatatatgacattccctggtattatgattgtaaaccagaacctctagtaaattttaaacttaactttcaagataaataaagaaataaagggctaggccccattaattcataactcggtgtctgtttctttaagtgtaaccttattaaactgactccgcctccctaaattagggcgccaaaagggggctccgcccccttaaaccccaagggggctccgccccctttaacccccaagggggctccgcccccttacacccccttattaatattcaacaggaaaccccttattaatattcaacaggaaaaccacctaattagaattgccgaccacaaactgccactaagttcctctttttaaaatacttcccttttctcttattattattcattacattaattattaaacaccgtaattccggggaggagactaaactgtatataactaactacactgacgaatggctgagtttaccccgccagacggagacaagttaacaacattaacttggctgcccgtggg

SEQ ID NO: 2680 - protein, 667 aa, Betatorquevirus sp.
MAYYYRPYRQRWWRRRRYRWKRARRPFRFFRKRRRQRVRKRKLKSLKIRQWQPGCIRKLVVKGLYCLFEANHRLLTNNYTQYMESVPPEGIPSGGGFSINRFNINCLWSERQKARNVWTTGNKNLPMIRYTGCEFKIYRPIHCDAVINFQNCFPMEATALTYHSAQPYIAMMTKHSKKITRLSNTKNKKPYKKYKFKPPQQMTNKWFFASDIYNTGLIMLTSSAADFENIYISPYSESNTISLKLLNVKLFINRHFNQLPTAGYHPKDGFWLWASINGSISPKFKEMIFLGNTIQYQKGTEIAKLEKVTDTTTIQEAMKLYTNSKDWGNPFHEDYINKTHRIWYTHNSPQITLGTKTDRVTTEINKLGFQPLDQELYFEGRYNPNRDRGKNSLIYFLKTTEEASGWDPPEKDSLITAGFPLWVSVWGLKDYHEKLKDMQHMDTDYIAVIQTKAIEPQDIQLNYFVVLDKQFTHGDSEWHDGENRTPWDNIHWHPMLHYQHRSLEIIGQSGPAVPKLGQYKNAELHCEYKFYFKVGGCVPPMAEITDPAEQTSFPIPTNITESNSFQNPNEPIQSYLYSFDQRRHEITSTAAKRITKDITSPTPLFTDTTTTGTDVPILQTLQEIQDSEEEEETQETTLLQQLINQRAKQQRISKRIKQLLKLLHNTT

SEQ ID NO: 2681 - protein, 128 aa, Betatorquevirus sp.
LKVSETTEIKGQYGHGQSGGLGNILKIFILQMSKLLKPTSHSERNIILQNVNAWVAIHDITCKCESPLRCIILQIYRQEPTLNFKPKELQKWLTTTDLTVKDGGDEEDIDGKELDDLFASLEKEDAKG

SEQ ID NO: 2682 - DNA, 2917 bp, Alphatorquevirus sp.
tcggtgtctacctcttaaggtcactaagcactccaggggcaattcgggctcgggactggccgggctatgggcaaggctcttaaaaaagccatgtttctcggtaaactttacagaaagaaaagggcactgctactgccttgcctgccaactccaaagaaaaaactacctactgatatgagctactggtgtcctcctgttcacgatgtacgcgggcgcgaacatcagtggtatgaggcttgttaccgctctcatggtgctatgtgtggctgtggcaattttattaatcatcttgcttatctgggtgagcgttatggcttccgaccgggcaatagaggccctggctcgtctggtgtaggaggcccgccaccccagctccgtcgagccctgccggcacccccggctccggagccgtcccagcaggctaacaacaacaacaaccagagatggcctggggatggtggaaacgaaggaggcgccgctggtggagaggcctcttcaggagacgtcgctttgccagaagacgacctcgatggactgctcgccgccctagacgacgaagagtaaggaggcgcagacgatggaggagggggcgaccaagacgcagacagtttaaaaagagacgctacagacgtaggagaaagagacagaaaataattataaaacagtggcaaccagggatggtcagacgctgctatataatagggtacatggcgggactaataagtgggcacggaacttttgccagaaactatagcagccacttagaggacagaataagcaagggaccctttggagggggacacgccactttaaggttctccctaacagtactctacaacgagtttctaagacacttaaacttttggacatatagtaacgaaaacctagagctagccaggtactttggggccacattcaccttttacagacaccctacagcagactttatagtcacctacaacagaaaaactccactaggaggaaacatactaacagcaccctcactacacccaggaaatgccatgctaacaaaaagaaaaatacttatacccagcctagaaaccagaccaaagggcaaaaaatacaaaaaactaagaataggaccccccactctactaactgacaagtggtactttcaaaaggacatttgcgacttaacactgttaaacctcaacgtggtgcaagcggacttgcggtttccgttctgctcaccacaaactgacaacacttgcatcagtttccaggttctaagttccgtttataacggcttcattagcataaccaactgggatgatagtggactagataacagaataaaagactttttaagagcagcatttccaatatcaggaacaaaactaacatctttaaaccaattaaacacttttagaacagaaggatgctttagccacccacagctacataaaccatcaacacttagttcaccaccaagtacagtacaagcaaaccaatactttgccacactagacgggttgtggggagacccaatatacaacaactcacttaacagctcaaccccagcctcaaatagtaaaccaacacaagatgatataataaataaaatactaaacaacatgacaaattactggaataaatttaaacaagaggaatttccaatagaatggagaggaaaaaaatgcttctgtcacctaacaggcattttcagccctccattcctaacatcaggcagaataagcccagaaatatttggactgtacaaagaaataatttacaacccttacacagacaaaggcaaaggtaacatggtgtggatagacccacttagcaaagaaggcttcatatacagtgacaaacaaagcaaatgtctactaaaagacatgccactatggtgtgcactatttggatacacagactggattaaaaaagaactaaacaactgggaagcaccatttaattacagattactaatagtatgcccgtacacattcccaaaactatacaacgagacactaccaacatacgggtacgtgccctacagctaccaatttgggtcaggacaaatgccagacggcagtaactacgtacctataaagtggagaggcaaatggtatccaaacatgatacaccaacaaagagttatggaggatatagcaataacaggcccctttgcaccaaaacaaaacgtacctagcgtacaaatgagcataaaatacaaatttaaatttaactggggtggaaatcctattcttgaacagattgtcagagacccctgcacacaacccacctacgaaatacccggagccagtaacgtccctccaagagtacaagtcattgacccgagggtcgtcgggccacacctcacattcaaaagctgggacattaggcgtgaccaatttagctcaaaaagtattaaaagaatgtcagaacaatcagaaattgctgaaccttttttcgaaggcccaaaaaggccaagaatcgacctccagccacaagcgcagcaagaagaagactccggtacgagactccagagagaaccgagaccctgggagtcggaagaagagatggagagcagccagcaaagcgaagaagagacgacgttatccgtccgagagcagttgcagcagcaataccaagagcagctcagaatcagacagggaatcaaacacctcttcgagcagctagtaaaaacccagcagggagtccacgtacatccatccctcttgtaggcccaaaacagtatatgttcccagagagggccccaaaaccagcccccaggagcggggactgggagatggagtacctcatgtgtaaaatctttaacaggccccccagaagcaaccttacagacatccctttctacccctactgcaaaaaacaatacaatgtaacctttcagcttaactacaaataaactaggccgtgggagtttcacttg

SEQ ID NO: 2683 - protein, 754 aa, Alphatorquevirus sp.; identical to SEQ ID NO: 1102

SEQ ID NO: 2684 - protein, 165 aa, Alphatorquevirus sp.; identical to SEQ ID NO: 1103

SEQ ID NO: 2685 - protein, 122 aa, Alphatorquevirus sp.; identical to SEQ ID NO: 1104

SEQ ID NO: 2686 - DNA, 2917 bp, Betatorquevirus sp.
cgggtgccgaaggtgagtgaaaccaccgtagtcaaggggcccgtagtcaaggggcaattcgggctaggtcagtctggcggaacgggcaagaaactaaaaatattttattttacagaatgtcaagatatataccatctaaatcaacacttagacaacaaaaattaaaatggatgaattttttatgtcacggccatgacatattctgcgactgcccacacccactagaacacaccattggattaattttcgaacaagaaaaagaattaaaatttaacacccaagaaaaagatctaattaaaaaatgcgttactggagaagaaaccgctaccgctggagacgccatcgaccaagatattattggaaaagaagatttagacgccctatttggagaagattttggagaaaacgatacggggtaagaaaaagaaaacttaaatcaattagagttaaacaatggcaacctcattatataaaaagactacacataaaaggattttatccaatgtttatgtgcactaatgaaagacttggtaacaacttaaactgctacttagaaagtacagctcctcacaaaatgccagggggaggaggattttcaatatgtaactttaccttaaatatgctatatgaggaccatttaatagcaaaaaattggtggacaactggtaatgaaaatatgcctctaataagatacttatactgtaaaataacttgttatagagaagaaaatgtagactggttattttgttataataatagctatcctatgaatgcaacaaaacttacatatatgagcacccatccacaagccatgatactaaacaaacatacaaaaataattacatgcagaagaaacaatagacacaaaaaaccatacaaaagaatttttattaaaccaccaacacaaatgcaaaacacatggtattttcaaaaagacttagcattcatgccactgttacaaactttcacaacatgctgctcgttagaccgcatgtttctaaactctaactcaatctcaaccacaactggctttatttccttagacaccaacggctggaaaagccacaacttccctagacaaactacacaaccatatgaaccagtaaacaatcaattattatttggcatgtacaatggtgaacatgaattaaccaatataaaaataggagaattaacactattaggagacacatacaacaacacagaaggaaccccatttcaagacgtagatatacaggcaaaaggaacacaatcacaatttcaacaaaaactacaaaaagctaaacaaaactcaggatactggggaaacccatttaacaaaaaatacttttatggagatcagagaattctatatagcatagtaccatgggacaccattgtcaatagttacacaaacgaaactgataaattaaagtcacaacactttaaatttcaaacacaagactgggtagactgtagatacaatccatttaaagacaaaggacaaggaaacaaaatatatttagtaaacacagactcaggaccacacttagatgattggacaccaccaacagacgaagatattgttacagaaaatataccaatatggctaggcctatggggttatttagactttcaaagaaaatgtaatactaccactactgtagatactcacagaatacttgttataaaatctccatatattgtacctaatacattaacttactttgtaccacttgatgaaacatttctacatggtttaagtccataccaagatcatttaataccttcagactactatggatggcatccaaaagtgcgatttcaagtacaatcaataaataaactaacaatatcaggcccactaactgcaaaactgcctaatgaaatatcagtagaaggacatataaaatatgacttttactttaaggttggaggacaacctgctcctatgtcaatcctcacagcaccagacaaacaaccaaaatggattacacccaataatcccaataacctcatccaaaacacttcgttgcagaatccaagcactcccttcgaatataccctctacaactttgacgaaagacgaggacaaattactaaaaaagctgcacaaagaatcacaacacacaaagaaactgaaagctctcttttaccaattacagacacaagcagcttctgcccagtcgcaccctacaaagaaacagagacaacggactcatcggagacggaagaagacgaagcaccgctcgagacacaactcctccagcaccgaagagagcaaaaactcctccgaaagcgaatcaacaagctcctactcagattagctcaattagaataaaaacatgtaatgtaacagtatcaatgtttcaaaaagaacctgtaaatagacgaatgaacccctgggaatatgaacaagaactaaaagatgcttactactggggtagagttcctagaactcacatatttgataagcctttttacccagattgtcctcctgtacctaaatatactgttaactttgacttaaatgcgccgcaataaactcaacgccagcaaatattcactctcggtgtccatttatataagttaaaacttaaataaacatccaccactctcccaaatacgcaggcgtagaagggggctccgcccccttaaacccccagggggggggcaagccccccctacaaccccccaaaaaattaatattcaacaggaaaaccacataattagaatggccgaccacaaactgtcacttacttcccctttttaccaatacttcccattttcctaataaatattcattacattaattaataatcaccgtaattccggggaggagcataaaaactatataaccaagtacacttccgaatggctgagtttatgccgccagacggagactggagcagttcactgacttcaggctgaccaaggg

SEQ ID NO: 2687 - protein, 672 aa, Betatorquevirus sp.
MRYWRRNRYRWRRHRPRYYWKRRFRRPIWRRFWRKRYGVRKRKLKSIRVKQWQPHYIKRLHIKGFYPMFMCTNERLGNNLNCYLESTAPHKMPGGGGFSICNFTLNMLYEDHLIAKNWWTTGNENMPLIRYLYCKITCYREENVDWLFCYNNSYPMNATKLTYMSTHPQAMILNKHTKIITCRRNNRHKKPYKRIFIKPPTQMQNTWYFQKDLAFMPLLQTFTTCCSLDRMFLNSNSISTTTGFISLDTNGWKSHNFPRQTTQPYEPVNNQLLFGMYNGEHELTNIKIGELTLLGDTYNNTEGTPFQDVDIQAKGTQSQFQQKLQKAKQNSGYWGNPFNKKYFYGDQRILYSIVPWDTIVNSYTNETDKLKSQHFKFQTQDWVDCRYNPFKDKGQGNKIYLVNTDSGPHLDDWTPPTDEDIVTENIPIWLGLWGYLDFQRKCNTTTTVDTHRILVIKSPYIVPNTLTYFVPLDETFLHGLSPYQDHLIPSDYYGWHPKVRFQVQSINKLTISGPLTAKLPNEISVEGHIKYDFYFKVGGQPAPMSILTAPDKQPKWITPNNPNNLIQNTSLQNPSTPFEYTLYNFDERRGQITKKAAQRITTHKETESSLLPITDTSSFCPVAPYKETETTDSSETEEDEAPLETQLLQHRREQKLLRKRINKLLLRLAQLE

SEQ ID NO: 2688 - protein, 100 aa, Betatorquevirus sp.
MSRYIPSKSTLRQQKLKWMNFLCHGHDIFCDCPHPLEHTIGLIFEQEKELKFNTQEKDLIKKCVTGEETATAGDAIDQDIIGKEDLDALFGEDFGENDTG

SEQ ID NO: 2689 - protein, 121 aa, Betatorquevirus sp.
LPSRTLQRNRDNGLIGDGRRRSTARDTTPPAPKRAKTPPKANQQAPTQISSIRIKTCNVTVSMFQKEPVNRRMNPWEYEQELKDAYYWGRVPRTHIFDKPFYPDCPPVPKYTVNFDLNAPQ

SEQ ID NO: 2690 - DNA, 2917 bp, Betatorquevirus sp.
cgggtgccgaaggtgagtgaaaccaccgaagtcaaggggcaattcgggctgggtcagtctggcggaacgggcaagaaacttaaaatgtatttcattttagatatgagccaccgtctaattcaaccaaaaccatctgcaaaacaacaaaaactaaaatggatgaatatgctcgctcactgccatgatactttctgcgattgctacgatccaataacccacactgcagcactaatttttgaacaagaaccaaacctaaaattctctgcaccagaaaaggatataattagaaaatgtattactggagaaactaccgccgcaattactaccgacccagaacaagacgttattggagacggagaactcgccgctttgtttcaagaagacgttggagaagaaaaagatacagggtaagaaaaagaaaactaaaaactttaaaactaaaacaatggcaaccacattacataaagaaacttaaaattaaaggagactatccaatttttttaacaacttcacaaagaatatctaataacttgatatgctacttagaaagcatagcaccttgggactggccgggaggtgggggctttagtattgctaactttacatttgaaatgctgtataaagaaaacttaactgctaataattactggactgtaagcaatgataatatgccactatttagatatcttggatgccacattacactatacacacaaccagaagtagactacttattttactggaacaacacaccacccatgaaagcaacaaaactaacatacatgagcacacaaccacaaataatgttacaattaaaacatgtaaaagtaatgaaatgtagaaaaacaaacagaaaaaaaccatacaaaagaatatgggtaccacccccaacacaaatgcagaacaaatggtacttacaacacgacctagctaacgttccattattacaaactattgccacagtatgctcgttagaccgcaaatacttacatgcaaatgccaaatcaaccacaatgagtttctacactattaacacagaagaaatacaagaccattactttgcacaaacacaaggaacacaaggttacaatccaaaaaacaatgtaaagctttttggttgtctagaaccaccagctaaatactccctaacagatattaaaataggaactttaacatacctaggacaagtagatactcaacatgaaggaacaaaactaaaagatataaacacatccactcaatcctttgctgacaaaatacagaaggcacttaatactccaggactacaaggaaaccccttttacaaagaatggctaaacccagactcctatgttgtaaaaacaacagcagacttacaaacattaaaagactactacaaagaagcagacacaaaattaaaccaacaacacttttcatgggcaggaaatcttctaaaagaagttagatacaatccttttaaagacaaaggcataggaaacaaagtatacttagtaaacatactaactagagaacattctcacacctgggacgctccattagacgatgacatagtctggaaagacctaccactttacaacctaacatggggatacctagattttcaaagaaaatgtggcctaaacacagctatagacacaaacaaatgccttgtaatatacacaccttacgtagaaccacaactcacaacaaaaatatacgtaccagtagataaaaaatttacagaaggactaagcccctattcacaaataacatttccatcagaccagtcaaactggcatccaaaagtaagataccaagtagatactgctaaccttatagcttctactggacctaatacagtaaaactacctgacaatataagctgtgaaggacatataagatataactttaaattcaaaattggaggagaaccagcaccaatgtcagttcttgtggatccacaggaacaaccagcacataccttccccaataacatcctacaaacaacttcgttacagagtccagcaaggccaattgaacaactattatggaaattcgatgaaagacgaggactgcttacaaaaaaagctgcacaaagaatcaaaacacacacagaaactgaaaaagatattctttcaattacagacccagcaacaagctgcccaatatggaccaccaaagaaacatcgacatcggacacatcgacagaggaagaagaagaagcaccactccagacacaactcctccacgagcgaagaaagcaaaaactcctccgaaagcgaatcaacagactcctcaaccgactaacaacattagaatagacaattgtaaaataaaagtaaaactattccctgatgaacaaccccgtaaccgtagaatgactaactgggaaagagaacaagaaatacaagaggcagctctgtggggtagaacaccaagatggtttatatttgacaaacatttttaccccgacgttcctcctgtaccaaaatatactgtaaactttgacttaaatgcgccgtaataaaacaaggccagcaaatattcactctcggtgtccatttatataagctttaacttaaataaacatccaccactctccctaatacgcaggcccagaagggggctccgcccccttcaacccccagggggggccaagccccccctataaccccccctaatgaatattcaacaggaaaaccacacaattagaatggctaaccacaaactgccacttagttcccctttttactaaacttcctcttttactcattattattcataaaattaattagtaatcaccgtaaatccggggagtgtccaactacctatataactaactacacttccgaatggctgagtttatgccgccagacggctgagtttatgccgccagacggagacgggatcacttcagtgactccaggctgaccaaggg

SEQ ID NO: 2691 - protein, 669 aa, Betatorquevirus sp.
MYYWRNYRRNYYRPRTRRYWRRRTRRFVSRRRWRRKRYRVRKRKLKTLKLKQWQPHYIKKLKIKGDYPIFLTTSQRISNNLICYLESIAPWDWPGGGGFSIANFTFEMLYKENLTANNYWTVSNDNMPLFRYLGCHITLYTQPEVDYLFYWNNTPPMKATKLTYMSTQPQIMLQLKHVKVMKCRKTNRKKPYKRIWVPPPTQMQNKWYLQHDLANVPLLQTIATVCSLDRKYLHANAKSTTMSFYTINTEEIQDHYFAQTQGTQGYNPKNNVKLFGCLEPPAKYSLTDIKIGTLTYLGQVDTQHEGTKLKDINTSTQSFADKIQKALNTPGLQGNPFYKEWLNPDSYVVKTTADLQTLKDYYKEADTKLNQQHFSWAGNLLKEVRYNPFKDKGIGNKVYLVNILTREHSHTWDAPLDDDIVWKDLPLYNLTWGYLDFQRKCGLNTAIDTNKCLVIYTPYVEPQLTTKIYVPVDKKFTEGLSPYSQITFPSDQSNWHPKVRYQVDTANLIASTGPNTVKLPDNISCEGHIRYNFKFKIGGEPAPMSVLVDPQEQPAHTFPNNILQTTSLQSPARPIEQLLWKFDERRGLLTKKAAQRIKTHTETEKDILSITDPATSCPIWTTKETSTSDTSTEEEEEAPLQTQLLHERRKQKLLRKRINRLLNRLTTLE

SEQ ID NO: 2692 - protein, 120 aa, Betatorquevirus sp.; identical to SEQ ID NO: 2404

SEQ ID NO: 2693 - protein, 121 aa, Betatorquevirus sp.; identical to SEQ ID NO: 2405

SEQ ID NO: 2694 - DNA, 2916 bp, Betatorquevirus sp.
caggtgccgaaggtgagtgaaaccaccgtagtcaaggggcaatatgggctaggtcagtcttggcggactgggcaagaaacttaaaaatataacattttttacagatatgtcatctatctggaagaaaccaacaactactccgagacaactagaactaggatggctgaacttattccaccaagcacacgaccaattctgccaatgtgaggaccctgaccttcactatttaatggtaatcaacaaattttccgacttcaaaaaacctgaatctgaaattattaatataaaatgcctccttaccggaaaacctactggaacaactactactaccgaagaagaaaaagatatccatatcgacgaaggagatttagaaagcctcttcgaaaaagatttcgaagaagaacctactggagaaaacagcgaaaggtaaagaaatttaaacttaaaaaacttaaaaaactaactcttaaagtttttcaaccaaagactataaaactcttaaaaattaaaggatttaaatgcttatttcaaggcagcataaaaagagctaacaataactacatacaatatatatatgatactgtaaatgataaaagaccaggcggaggggcatggagtttacaagtatttagccttgcaagcttatttgaagaatggcaacacttacttaatatttggactgttagtaatgctggactgccactaatacgctttttaggagttaaatttaaattttatcaaagtgcagaaaatgactatgttgttaaatatgataattgttggcctatggtagatacaccatatacccatgcagacagtgcaccatcaagaatgataagagcacaacataaaataactgtaccaagtagaaaaacaaaacttagaagaagaccatacaaaaaagtatttgttagaccaccatcacaaatgacaaacaactggtactttcaaagagatatatgcaaaacaccactaacaatgcttacaaccacagctgttgatcttagattcccatttgctcccccagaagctctaagtaacaacgtaactctatatacacttaatacatttcaatttaaaaacacaaactttcagcaaccggaagctaccggttactactacaaaatggaaggaacacaaaaatactacttatatgcagcagcaagagaccacagtaactcctggggatcactaattcctttaacaaacacaaaagacaatcaaccaggaaaacaactaaatcaattaataactttaaatagctcaagtaacaataaaatgagcaactggggaaacccattttaccacttatatgactatgaaaacttcaaattttactttttaacaaaatcaccaacagaaataacttactcagacctaagtaatcaattaaaccaaaacataactgaatttacaagttacatatactaccaaattagatacaatccagaaaaagacacaggacaagataacaaagtatatttaatatctaatctacatgacacaaaatgggaagaaccttcaaacgaaaatttaattttcgatggttttccactaactatattactatggggatggacagactggcaaaaaaaactaaaacaagtatctaacatagataatcaatacatagtagttatacaaaccaaatttttttcagaaaacctaaagtactacgtacttattgatagagattttatagatggatttgaacctttttcaccacatgacgaacaagaaaaattacctattacaccagctaatcaacaacattggtatccaaaacacttatttcaacaacaatctataaacacactatgtctatcaggccaagcatgtccaagacctccttggaaccattatctacaagcattctgtacatacacattttactttaaattaggaggctgtccaaaacaactagaaaaagcttatgatccttgtttacagtcaaaatggcccacaaccgataacatccctgcaagatatcaaattacgaatcctgaaaccccaccagaaacagaactatactcctgggactgggatgaagactttgttaaaaagacagctttacaacgaattacagaatacacaccaacttatgaaacaatattcctttctacaggaagcaaatcagatcccatcgcactcaaaaaagtccaagaaaaccaagcccaagaagaagaggaggagaaagaactattcctccagctccagcagctcagacaccgacgaaagctcctacaacaccaactaaaagaattatcattaaaaagtgtacaaagatagtagaactattcccaaaacctataaaacaaaacagaagatttaccaaagatgaaagagagacagaaagacaggttgctatagcattttgtagaccacaaagatcatttttctatgatacacctatttacccttggctaccacctgaaccaaaagttccaaaagttaactttaaactaaattacaattgtaacgaataaaaattacaaggccaactattttcacttgtcggtgtccatttatttaagtttaacttatataaacatccaccactctcccaacagtgttggcgccaaaagggggctccgcccccttacacccccaagggggctccgccccaagggggctccgcccccttacacccccaagggggctccgcccccttacacccccttataaatattcaacaggaaaaccacctaatttgaattgccgaccacaaaccgtcactaacttcttctttttactatacttcctttttttctcattattattcattacattaattattaaaccgcgtaattccggggaggagactacaaactatataactaactacacttccgaatggctgagtttatgccgccagacggagactgtgttacacagtaacaacaggctgacctaggg

SEQ ID NO: 2695 - protein, 666 aa, Betatorquevirus sp.; identical to SEQ ID NO: 2176

SEQ ID NO: 2696 - protein, 120 aa, Betatorquevirus sp.; identical to SEQ ID NO: 2177

SEQ ID NO: 2697 - DNA, 2916 bp, Betatorquevirus sp.
cgggagccgaaggtgagtgaaaccaccgaagtctaggggcaattcgggctagatcagactggcggaacgggcaagaaacttaaatataagtattttacaggtatgagttctacttggaagaaaccaatatggtcaccgagacaacacgaaaacaaatggatcaatattatctttgaatcccacgaccaattttgcatgtgcgacgacccctggctacacctacttatctgcttaaacaagaacggcaacgcaccaaaacccagcattgacatccaaaatataaaatggctccttattggcaaaccagataccaaagaagaccctggagacaaagatggagaagaagaaacaggttttatagaaggagaattagaacggctattcgacgaagaaaatacaacagacgttacagaagacaaagatataaggtaaagagactaaaatttagaaaaagaaaactaattaaaattaaacaatggcaacctaaaagcataaaaagatgtaaaataacaggttttaaatgtttatttcaaggaagtctattaagagctaataataactatgtacaatatatgtatagcaatgtacctataaataatccaggaggtggaggatggagcttaatggtgttctcattaggatctctatatgaagattatgaccacttacaaaatgtatggacaactagtaatgctgcactaccgctagctagatttatatatgctaaatttagactatatcaaagtgattctactgactatgtagttacatatgatacttgttggcctatggtagacacaccacacacacacgcagacagctcaccatcaagaatgttactaaaaaaacacaaaataataatgccaagtaaacaaacacaacatagaagaaagccatacaaaacattcaaagtacatccaccaaaccaaatgtataaccgttggtattttcaaagagacatttgcgacacacctttagtaatgataaccgcaactgccatctctttaaccacaccatttgcaaaaccaacagccattagtaacaacatactaattcatagcttaaacacatttatttttcaaaatcctaactttgaacactttccagagacaacaggatactcacataaaatattgaattcaaaatccatgtatttatacgccacacatatgacaaaacccaattccacaaccttcaatcagccatacaaagagtggtgtaaaacattaatatttttaggaaacaccagaacaaaccaaagaggcaaaacaatgcaggacttaataacttcaggtaacaccaaacaaaactggggaaatccttttttccatgaatttttagaaataggagacaaagacaacacctcatatacaatttacacaactacatgtacagtaataaacatgttacaatatataaatacctcaaacgaaccagaagatgcaaaacccacaaatattcaagccctaacaggaccaataatatatagagtaacatacaacccagacaaagacactggactaaacaaaatatacttactaaaaacttacggaccaataacacttgacgaacctgaaaacacaaaccaaatatttgaaggttttccattatacaacctaatatggggatggacagactttataaaaaaactaaaaattatcacagacttagacagacacagcacattactaatcaaaaccaaaaactttagtgacaatactctaaacattttctggcctatcgataaagatttcatagacggctttgatccatacacaacacaagaagacacagcacaaacaaataattacaactatgaaaactggtacccaaaagtacaatttcaagaacaaaccataaacaacatagcactaacaggcagaaactcaccaacaaacacaaattacctacaggcattaatgaaatatagcttttactttaaatggggaggatgtcccaaaacattagaaaaagcttatgatccatgtttacagtcaaaatggaccacgcccgataacctccaaggaagacttacaatacagaatccttacacaccaccagaaacagaactatactcctgggactgggacaaagactatgttgaagaggcagctattaaaagaatacaacaatatacaacaactgatgaacctatcctctcaattacagactcaaagttccaaccgaaagccctcaaaaagcaagaaaaagaccaagcaccgaaagaggaggagacactcttcctcaagctccacaaactcagaaaagagcgactccacctcgagctccagtgcaagctaaaaatgatggaattaaaatctacaaaagcaaaataaacattaaactatttccagacaaaaaaccaaaaccaagaagatttacaccatgggaacaacaacaagaaaaagaagacgctgcaatatggaaaagaccacaaagacacttttggggggacccccctatatacccatggtgccccccagaaccatatgttaactttgacttaatatttagagataaataaacaaggccaacataaattcacttagtggtgtccatttatataagttaaactttaataaacatccaccaccctccctatcaatagggcctagaaaattaaagggggctccgcccccttacacccccaagggggctccgcccccttacaccccccctaataaatattcaacaggaaaaccacctaatttaaattgccgaccacaaactgccacttacttcccctttttaaaccacttcccatttttctaattattattcattacattaattattaatcagcgtaattcctgggaggagctaacaaactatataactaaatgcacttccgaatggctgagtttatgccgccagtcggagacgggatcacaacagtgactccaggctgatcttggg

SEQ ID NO: 2698 - protein, 683 aa, Betatorquevirus sp.
MAPYWQTRYQRRPWRQRWRRRNRFYRRRIRTAIRRRKYNRRYRRQRYKVKRLKFRKRKLIKIKQWQPKSIKRCKITGFKCLFQGSLLRANNNYVQYMYSNVPINNPGGGGWSLMVFSLGSLYEDYDHLQNVWTTSNAALPLARFIYAKFRLYQSDSTDYVVTYDTCWPMVDTPHTHADSSPSRMLLKKHKIIMPSKQTQHRRKPYKTFKVHPPNQMYNRWYFQRDICDTPLVMITATAISLTTPFAKPTAISNNILIHSLNTFIFQNPNFEHFPETTGYSHKILNSKSMYLYATHMTKPNSTTFNQPYKEWCKTLIFLGNTRTNQRGKTMQDLITSGNTKQNWGNPFFHEFLEIGDKDNTSYTIYTTTCTVINMLQYINTSNEPEDAKPTNIQALTGPIIYRVTYNPDKDTGLNKIYLLKTYGPITLDEPENTNQIFEGFPLYNLIWGWTDFIKKLKIITDLDRHSTLLIKTKNFSDNTLNIFWPIDKDFIDGFDPYTTQEDTAQTNNYNYENWYPKVQFQEQTINNIALTGRNSPTNTNYLQALMKYSFYFKWGGCPKTLEKAYDPCLQSKWTTPDNLQGRLTIQNPYTPPETELYSWDWDKDYVEEAAIKRIQQYTTTDEPILSITDSKFQPKALKKQEKDQAPKEEETLFLKLHKLRKERLHLELQCKLKMMELKSTKAK

SEQ ID NO: 2699 - protein, 109 aa, Betatorquevirus sp.
MSSTWKKPIWSPRQHENKWINIIFESHDQFCMCDDPWLHLLICLNKNGNAPKPSIDIQNIKWLLIGKPDTKEDPGDKDGEEETGFIEGELERLFDEENTTDVTEDKDIR

SEQ ID NO: 2700 - DNA, 2916 bp, Betatorquevirus sp.
ccgaaggtgagtgaaaccaccgtagccgtagtctaggggcaattcgggctagttcagtctggcggaacgggcaagaaactaaaaatatttatttttacagatgagcaaatactataaaaaaccttcatacagcgcccgccatcaacaactacaatggattaatactatggtttctttacatgaccttcattgctactgcgacaaacctcttaaccatataataattgcaatactggaccaagaaccaactatacaatttgataaagaagactccaaaaaaattcaaaaatgccttactattaccgatggagaagacgtcctagacgactttggcgacgcagaactagaaaagctattcgcagaagatatagatactacagacgatacccctggcgcaactactgggtaagaaaacgaaaaagaaaattaaaaaaaattgttattaaacaactgcaacctcgtaccattagaaaacttaaaataacaggaaatattccactttttgaatgtacttctgaaagaataggaaataatatgactcaagtattagaatccagggcaccacacaactatccgggaggtggctcctttagcttaaacttatttacttttgaatctctttatgaattacacagaaaagcaagaaactggtggacaacttctaactgtaatttacctttgttaagatacactggatgtaaatttacactatacagacctataactgctgattatatatttttttacacaacatgtggtaaattagaagcaaacttagacttataccaatcagctcaaccgagtattttaatgctgaacaaaaacaaaagaatcatcacatgcaaagaaaacaataaccacaaaagaccctacaaaacagtacacattaaaccaccagcactatggtctaataaatggtacacacaacaagaaatagcaaaaatgccactactactaacagtaacatctgcagcttcactagacagattttacatatcagcacaagccaaatcaaacactataggctttacgagcctaaatacagatacattccaatttcatgattttaaagtaccaccaacaacaaccggctatgtaccaaatgaaaaacaactattatttacagtacatccatggttaggtgacctaactaaaacatattggggtaacttaatatacttaggaaacacaaatgaagacctaaaaggtacttcagtgaatgaaaaaccaacacacgtaagagagtggaacacttggatagacacctgggcctccaacaaagaatactggggaaacccctttcactcacaatacttacaacaagaccaccaacccatacttattacaaacaaaacaatatcatacataaaatcaaaactaaaaaccttaggtgcagagagtgtaaaaacaacaccattagaaacagattttgcacaaaagaccattccacagctctgggactgcagatataacccagaagcagacactagtcacaatgcagtattctttgcaaaaataacacagggacatgatacatggaaagaacccacagaagaaagattaatatgtaaaggtttacccttatggtatttattacatggttttgttgactttcatgctaaagcactggacatacaaagacttgaaactgactgggtactatgtattgttagcgacgctataaccccaaaaaaagactactatgtcccacttgactactggtttttaaacggacaaagcccatacgagactgaagaaggacaaaaaacaatttatgacgcctttaactggcacccaaaagtaaactttcaaaaaagtactatatcaaaaattaatggaactgggcctgcaacagtaaaactacctgacaatataagctgcgagggtcatgcaaaatatacattttactttaaacttggtggatgcccaccaccaatggacgaagtgtgcgaccctgcaaagcaacctgactttcccagacctactaatttcctacaaacacctatattacaggacccagaaactcccatacaatactatctccaatcctctgacgaaagacgtggactgcttacaaagacagctgcaaaacgcctcaaaacagactggttcactacagaaactttatttacagctccaaaacagagttcactcgacctcccagggccgcaaaaagaaaccagctcggacgaagagacatcggcagaggaaaaagacccggagacactacagctccaactcaagctccaccgccgaaagcagcgaaaactccagcagcgaatcctcgacctcctaacaatatctcaaactttgtaataaaagaatgtactgttaaagcttacttatttccaaaacctaaaaaaaaccgtagatttacccctgaagaatttcaaactgaactagaaatatcaaaatggttacatagacctcctagaacatttataaatgatcctcctttttacccctggttaccaccagaacctgttgtaaattttgatttaaactaccattaaacaaggccagcattaattcacttagtggtgtctgtttatttaataaaaaactttaataaaccaacaccgcctccctaacacgcaggcgcacaagggggctccgcccccttaaacccccagggggggaataccccccctaaacccccccaaaaaccacaaaatttacattgccaaccacaaacgaacaggaaaccgcaaaatttgcattgccgaccacaaacgaatatgcaaattacacttcctaaaaacacttcttaacttcctcaaaaattaattagtaatcagcatcacataggcgtggtttactaactataaaactaactgcactgacgaatggctgagtttatgccgccagacggagacgggatcacttcagtgactccaggctgaacttgggcgggag

SEQ ID NO: 2701 - protein, 675 aa, Betatorquevirus sp.
MPYYYRWRRRPRRLWRRRTRKAIRRRYRYYRRYPWRNYWVRKRKRKLKKIVIKQLQPRTIRKLKITGNIPLFECTSERIGNNMTQVLESRAPHNYPGGGSFSLNLFTFESLYELHRKARNWWTTSNCNLPLLRYTGCKFTLYRPITADYIFFYTTCGKLEANLDLYQSAQPSILMLNKNKRIITCKENNNHKRPYKTVHIKPPALWSNKWYTQQEIAKMPLLLTVTSAASLDRFYISAQAKSNTIGFTSLNTDTFQFHDFKVPPTTTGYVPNEKQLLFTVHPWLGDLTKTYWGNLIYLGNTNEDLKGTSVNEKPTHVREWNTWIDTWASNKEYWGNPFHSQYLQQDHQPILITNKTISYIKSKLKTLGAESVKTTPLETDFAQKTIPQLWDCRYNPEADTSHNAVFFAKITQGHDTWKEPTEERLICKGLPLWYLLHGFVDFHAKALDIQRLETDWVLCIVSDAITPKKDYYVPLDYWFLNGQSPYETEEGQKTIYDAFNWHPKVNFQKSTISKINGTGPATVKLPDNISCEGHAKYTFYFKLGGCPPPMDEVCDPAKQPDFPRPTNFLQTPILQDPETPIQYYLQSSDERRGLLTKTAAKRLKTDWFTTETLFTAPKQSSLDLPGPQKETSSDEETSAEEKDPETLQLQLKLHRRKQRKLQQRILDLLTISQTL

SEQ ID NO: 2702 - protein, 102 aa, Betatorquevirus sp.
MSKYYKKPSYSARHQQLQWINTMVSLHDLHCYCDKPLNHIIIAILDQEPTIQFDKEDSKKIQKCLTITDGEDVLDDFGDAELEKLFAEDIDTTDDTPGATTG

SEQ ID NO: 2703 - protein, 135 aa, Betatorquevirus sp.
LVHYRNFIYSSKTEFTRPPRAAKRNQLGRRDIGRGKRPGDTTAPTQAPPPKAAKTPAANPRPPNNISNFVIKECTVKAYLFPKPKKNRRFTPEEFQTELEISKWLHRPPRTFINDPPFYPWLPPEPVVNFDLNYH

SEQ ID NO: 2704 - DNA, 2916 bp, Betatorquevirus sp.
cgggtgccgaaggtgagtgaaaccaccgtagtcaaggggcaattcgggctatgtcagtctagcggaacgggcaagaaacttaaaataatatactttattacagaatgtcaacaagaatcattccagctaaatcaactttaagacaaaacaacttaaaatgtatgaatatgatggtacatgctcatgatatgatctgcgattgttcaactcctctacaacatatcgtagttcttatttttcaacaagaaccagaactcgacttcaaaccaattgaaaaagatttaattaaaagatgcctttctggagaacataccgtacctaccgctaccgaccacgcagacgatggcgtagaagaaggtttattagacgcccttttcaaagaagactttggagaagaagacactaccgggtaagacgcagaaaacttaagaaaattaaaataactcaatggcaacctaaatatattaaaaaacttaaaatagtgggaacacatccactatttataactacttctgaaagactaacaaataactttccttgttatatggaaacaactgctccacacctgtacccaggaggaggaggattctctataaataactttactttgaatgctttatatgaaaaccatttaattttaaagaactggtggactaaaagtaatgacaatatgcctttaatacgttttatgggtgtaacactgtacttatatagaactgctgaatttgactatttgtttcaatacaataacacatacccaatgacagcacaactactaacatacacaagcatgcacccacaagcaatgttactacacaaaaacacattaaaaattacatgcaaaaaacataacagaaacaaaaaaccatacaaaaaactaaaaatacatccaccatcacaaatgtacaatagatggtactttcaaaaagacatagctcacataccgttattacaaacactttgcacagctacatcgttagaccgcatgtttcaacactcaacctcaataagctcaacagttggctttacatcactcgacatacgaggcatgaaaaaccacaattacacaaaacaaggcacacaaggatacgttgcattacctaactcccttctttttggagtaagaagaagagaaaattcaataacttctattaacttagttgacttaatctatatgggtaacccagaagactacacagacggtacaacaataggaaacataccttcttctgcatatcaacatcaaacacaaactacaacaataggaaaacaaattaaaacaatgcaaatgaacaacaactactggggaaacccatttaatgatgaatttcatagactaggtgctctaattaccactaacaaaacatgggacgaaattataaaagaatatgataaaaacagtacaacaactacaacaaaacttaaagcagattggtttcaatttaaagaaaactttacatttgaatgcagatacaacccctttgctgacaaagcaaaaggaaacaaactatatttagttaaactaaaagatgcagcacatgaaacagattgggactttccagaagcaaatacattatacacagacttaccaatatggctaatgatatttggatacttagactttatgagaaaatgtggacaatacactcaaatagacacaaactacatagcagtaatatattcaacatatatatttcccaaagaattccattactttgtaccactagataaagactttttagaaggtagaagtccatatgaagaaggagaattcattatagcttcagactacagaaactggcaccctaaagttagatttcaagcacaaacaataaacatgttaggttccacaggaccaggtataattaaactaccaccacaaatatcagctgaagctcatatgcgctacatatttcactttaagctcggaggccaaccaccaccaatggcaacactcacagaccctgatgaacaacctaagtacactactcccgataacatcatccaacaaccttcgttgcagagtccaacaacaccattcgaatacatcctgtacaactttgatgaaagacgagggcaaattactaaagcagctgcagaacgaatcaaaaaacacaaagaaactgaaaaatctattctcccaattacagaaacagcttttgcctgtccaatcaaaggttccaaagaaatacagacaccggactcatcggacgaggaaaaagaagaaatgtcgctcgaggagcagctcaagctccagcgaaagcagcaaaaactactcagactcagaatcaaccaactcctccagcacctaacaaaattagaataactcattgtactgtaaatgttgatttatttggtgataaaaaacctgtaaatagacgctttaccccctcagaatatgaacaagaggtagcagaagcaaaaatatggtgtagagctcctagagattttatctttgataaacccacatatccatgggtacctcaactttctccctacactgtaaactttgacttaaacgcgccgcaataaaatacaaggcttgcattgattcactctcggtgtccatttatataagtttaactttaataaacatccaccacactccctaatacgcaagcgcagtagggggctccgccccctacaacccccagggggggcaaagccccccccccccctaataaatattcaacaggaaaaccacataattagaatggctcaccacaaaccgtcaaaaacttcctcttttacctatacttcctcatttactcataaatattcataacattacttagtaatcaccatcacatcctgggaggatccttaaacctatataaccaacaacacttccgaatggctgagtttatgccgctagacggagacgggatcacacagtgactaccggctgacatcggg

SEQ ID NO: 2705 - protein, 677 aa, Betatorquevirus sp.
MPFWRTYRTYRYRPRRRWRRRRFIRRPFQRRLWRRRHYRVRRRKLKKIKITQWQPKYIKKLKIVGTHPLFITTSERLTNNFPCYMETTAPHLYPGGGGFSINNFTLNALYENHLILKNWWTKSNDNMPLIRFMGVTLYLYRTAEFDYLFQYNNTYPMTAQLLTYTSMHPQAMLLHKNTLKITCKKHNRNKKPYKKLKIHPPSQMYNRWYFQKDIAHIPLLQTLCTATSLDRMFQHSTSISSTVGFTSLDIRGMKNHNYTKQGTQGYVALPNSLLFGVRRRENSITSINLVDLIYMGNPEDYTDGTTIGNIPSSAYQHQTQTTTIGKQIKTMQMNNNYWGNPFNDEFHRLGALITTNKTWDEIIKEYDKNSTTTTTKLKADWFQFKENFTFECRYNPFADKAKGNKLYLVKLKDAAHETDWDFPEANTLYTDLPIWLMIFGYLDFMRKCGQYTQIDTNYIAVIYSTYIFPKEFHYFVPLDKDFLEGRSPYEEGEFIIASDYRNWHPKVRFQAQTINMLGSTGPGIIKLPPQISAEAHMRYIFHFKLGGQPPPMATLTDPDEQPKYTTPDNIIQQPSLQSPTTPFEYILYNFDERRGQITKAAAERIKKHKETEKSILPITETAFACPIKGSKEIQTPDSSDEEKEEMSLEEQLKLQRKQQKLLRLRINQLLQHLTKLE

SEQ ID NO: 2706 - protein, 102 aa, Betatorquevirus sp.
MSTRIIPAKSTLRQNNLKCMNMMVHAHDMICDCSTPLQHIVVLIFQQEPELDFKPIEKDLIKRCLSGEHTVPTATDHADDGVEEGLLDALFKEDFGEEDTTG

SEQ ID NO: 2707 - protein, 122 aa, Betatorquevirus sp.
LSNQRFQRNTDTGLIGRGKRRNVARGAAQAPAKAAKTTQTQNQPTPPAPNKIRITHCTVNVDLFGDKKPVNRRFTPSEYEQEVAEAKIWCRAPRDFIFDKPTYPWVPQLSPYTVNFDLNAPQ

SEQ ID NO: 2708 - DNA, 2916 bp, Betatorquevirus sp.
cgggtgccgaaggtgagtgaaaccaccgtagtcaaggggcaatatgggcagaatcagtcttggcagaacgggcaagaaactaaaatatatttatttttcagatatgacccatcgttatataccaactaattctacatatagacaaaaccaattaaaatggctgaatattttacaccatgttcacggttccttctgcgactgtcccaatggaatggcacacactaccgccttaatctttgaaaataatccggatttacaattctcaccacctgaaaaagatataataaaatcatgcctttctggagaaaatactggagacaaagatggagaaaaccatggcgtcgacggttttacaggagaagaactagagctccttttcaaagaaccagatggagaagacgccgccgcagaccggtaagaagaaaactaaaaactattaaactaaaacaatatcaaccgccttatattaaagtactaaaaataaaaggactctacccaataattttgggtacaagagaaagagtggccaacaacttaaactgttactttgaaagtactgcgccacactgggtaccgggagggggatgcttttcaatatgtaactttagcttaatgactttgtataaagaacatctagatgtaagaaactggtggacaactggtaatgaaaattatccacttataagatacttaggatgtgatattagactgtacagagaagaaaacatagactatctattttactataatagacagccacctatgacagcctcattaaccacataccaaagcacacaacctatggcaatgatgctaaataaacacacagtaaaaatctcatgtaaaaaaaatactaaaaacaaaaaaccatacaaaagattaagaataccaccacctacacaattacaaaacaagtggtattttcagtttgatattgcaaacacaccattactacaaacaatggcaacagcatgctcgtttgaccgcatgtttctaaacagtggagcaatatcaaccacaataggctttacaacacttgacacaaacggcttcttaaaccacaattatgacagaaccacaaggggctactcaccaagaccaggaacacttttattcaaaactaaaaatggtgcctacgacatacaaaaaatacaaataggagaattaatcttcttaggagaaacacaagacttaacagacggtacacaactaaaatcaatacctacagcacaaagtgtaccacacataaataatcccactgaatttcaaaaaagactttacaatgcaagcataaaacatgaacactggggaaatgtatttaaatcatccactttttatggagatgaaagaatgatagaaacaaacatgacttgggatcaaataataaacacgtataaagagcaaactaaaccactagagacagggtggacacttaaaaccactaaatggggagaatgcagatacaatccctatgcagatcatggaaaaggaaacatagtgtatttacttaaaataaactcaggactacaccccacagaatggggaccaccaacagacaaagacgtagttgcacaagacttaccactacacacacttttatggggatatttagactaccaaagaaaatgtcaagaatacagagacatagacacaacaacaattatagttttcaaaagcccttttattttaccaaaaacatacacattttattgcccactagaccaagactttttagatggaaacagcccctatagaccaccacaacacataattccatcagattaccagcattggcatccaaaagtaagattccaagtacaaacaataaataatatatgcttatcgggaccaggtactgtaaaattaccgcctcaagtttcctgtgaagctcacattgtatataattttcgctttaagattggagggcaaccagcaccaatgtcaaacctcaccaaaccagacgaacaaccaaaataccccatacccaataatctcctccaaacaccttcgttacagagtccaacaacgccatttacccagctcttgtggagctttgatgaacgcagaggggaactcactaaaaaagctacagacagaattacagactaccaaacacctgaaacatcttttttaccaattacagaaacaagcaactcatgccctacaaccctccaagtactcaaagaaacacaagagacgacatccgaggaagaagaagaaacatcgatccaggaacagctccacaaccagcgaagaaagcaaaaacagctcagacagcgaatcaacctcctcctccagcacctagcaaatttacaataaaagaaactgtaataaaagtaaaacttttccctgatccccctcaaaatcgcagaatgactgcaaaagaatatgaggacgaactatttgatgctaaatgctggttaagagtgcctagaactcatatatttgatagacctacttatccatgggtaccccaagattctaaatttactgtaaactttgaccttaacgcgccacaataaagctacgcctgcaaacttccacttgaggtgtccatttaatataaataaacttatataaacatccaccacactccctaatacgcaggcgcaaagggggctccgcccccttggcgcaaagggggctccgcccccttaaacccccagggggggcaaagccccccctacaacccccctaataaatattcaacaggaaaaccacctaatttaaattgccgaccacaaacagccatatgcaaatttacttccccaaaaaatacaacacgcccactatttaattaataaacaacatcatagtaggcgttcccttcaaaactatataacaaacaacacttccgaatggctgagtttatgctgccagacggagcggagagaaaacctctacgctgattctggg

SEQ ID NO: 2709 - protein, 675 aa, Betatorquevirus sp.
MPFWRKYWRQRWRKPWRRRFYRRRTRAPFQRTRWRRRRRRPVRRKLKTIKLKQYQPPYIKVLKIKGLYPIILGTRERVANNLNCYFESTAPHWVPGGGCFSICNFSLMTLYKEHLDVRNWWTTGNENYPLIRYLGCDIRLYREENIDYLFYYNRQPPMTASLTTYQSTQPMAMMLNKHTVKISCKKNTKNKKPYKRLRIPPPTQLQNKWYFQFDIANTPLLQTMATACSFDRMFLNSGAISTTIGFTTLDTNGFLNHNYDRTTRGYSPRPGTLLFKTKNGAYDIQKIQIGELIFLGETQDLTDGTQLKSIPTAQSVPHINNPTEFQKRLYNASIKHEHWGNVFKSSTFYGDERMIETNMTWDQIINTYKEQTKPLETGWTLKTTKWGECRYNPYADHGKGNIVYLLKINSGLHPTEWGPPTDKDVVAQDLPLHTLLWGYLDYQRKCQEYRDIDTTTIIVFKSPFILPKTYTFYCPLDQDFLDGNSPYRPPQHIIPSDYQHWHPKVRFQVQTINNICLSGPGTVKLPPQVSCEAHIVYNFRFKIGGQPAPMSNLTKPDEQPKYPIPNNLLQTPSLQSPTTPFTQLLWSFDERRGELTKKATDRITDYQTPETSFLPITETSNSCPTTLQVLKETQETTSEEEEETSIQEQLHNQRRKQKQLRQRINLLLQHLANLQ

SEQ ID NO: 2710 - protein, 124 aa, Betatorquevirus sp.
MGRISLGRTGKKLKYIYFSDMTHRYIPTNSTYRQNQLKWLNILHHVHGSFCDCPNGMAHTTALIFENNPDLQFSPPEKDIIKSCLSGENTGDKDGENHGVDGFTGEELELLFKEPDGEDAAADR

SEQ ID NO: 2711 - protein, 121 aa, Betatorquevirus sp.; identical to SEQ ID NO: 1563

SEQ ID NO: 2712 - DNA, 2916 bp, Alphatorquevirus sp.
ctcgggactggccgggctatgggcaaggctcttaaaaagccatgtttctcggtaaactttacagaaagaaaaggaaagtgcttctgcagactgtgccagacccaaagaaggctaggcggcttctgattatgtggcagccccccgtgcacaatgtacccgggatcgagagaaactggtacgagagttgctttcgatcccatgctgctgtttgtggctgtggcgactttgttggccatcttaatcatctggcagctactctgggtcgccctccgcgttctcggcaccccgggggccccggcactccgcagataagaaacctgccagcgctcccggcaccccagggtgagcccggtgacagagcgccatggcctacggatggtggggccggcggcgccgctggagaagatggaggacgcggcgcagaccgtggagaaccaggagacgtagaagacgacgcgctcctcgccgctttcgacctcgtcgaagagtaaggaggcgcagggggcggtggcgcaggcggtatagaaaatggaggcgacgcaggggcagacggacgcacagaaaaaagataatcataaaacagtggcagccgaactttataagacgctgctacatcataggctacctgcctctgatattctgtggcgagaacaccaccgcccagaactttgccacccactcggacgatatgatagcgaaaggaccgtggggggggggcatgactactaccaagtttactctgagaatcctgtacgacgagtttaccaggtttatgaacttttggactgtcagtaacgaagacctagacctgtgtagatacgtgggctgcaaactcatattctttaaacaccccaccgtagactttatagtaaggataaacacacagcctccattcttagacactaacctcactgcagcacagatacaccccggcatcatgatgctcagcaaaaaacacatactcataccctcgctaaagaccaggcccagcagaaaacacagggtggtcgtcagagtgggcccaccgagactttttcaagacaagtggtacccccagtcagacctgtgtgacacagttctgctttccgtgtttgcaacggcctgtgacttgcaatatccgttcggctcaccactaactgacaacccttgcgtcaacttccagattctggggcaccagtacaaaaaccaccttagtattagttccacaaatgataagtctaacaaagatcactatgacagcaatttatttaataaagtagaactatacaacacttttcaaacaatagctcaactaaaagacacaggactaataacaaacgtagcaccatcacaaaatatgtggacccaggtgcaaaacacaacacaactattagcagacggcagcaatgcacctgaaagcaaagacacttggtacaaaggcaacacatacaaagagaatattaaggagttagctcaaagaaccagagccagatttaaagctgcaacagagaaagccctgccgaactaccctacaatcatgtccacagacctctatgagtaccactcaggcatatactctagcatattcctagcagcaggcagaagctactttgaaaccccaggggcctacacagacgtcatatacaaccctttcacagacaagggcactggaaacatggtctggatagactacctcacaaaagcagactccatatacacaaacaacaaaagcaagtgtgagatatttgacttgcctctgtgggccaccttcacaggatactcagagttctgttcaaaagttacaggagacactgccatacacctgactgccagagtagtagtcagatgcccctacactgagcccatgctcatagaccactcagaacccaacaggggctttgtaccatactcctttaacttcggagagggcaagatgcccggaggctcctccaaagtacccataagaatgagagccaagtggtacgtgaacatttttcaccagcaagagttcatggaggccatagttcagagcggaccgtttgcttacaagggcgacataaaatcagcggtactaagcatgaaatacagattccactggaaatggggcggaaaccctatatccaaacaggtcgtccggaatccctgctccacctccagcacctccgcaggccgtcgaggacctcgcagcgtacaagtcgttgacccgaaacacgttaccccggaagtcacctggcactcgtgggacatcagacgcggcatctttggcaaagcaggtattaagagaatgcaacaggaatcagatgctctttacattcctacaggaccactcaagaggccccgcagagataccaacgcccaagacccagaagagcaaaacgaaagctcaggtttcagagtccagcagcgagtcccctgggtccactccagccaagaaacgcaaagctcccaagaagagatgcaaacggaggggacggtacaggaacaactcctcctccagctccgagagcagcgagtactccgactccagctccaacacctcgccagccaagtcctcaaagtgcaagcagggcaaggcctacaccccctattatcttcccaagcataaacaaagcctttatgtttgagcccaagggtcctaaacccatacagggctaccacgattggctagaggagtacacctgctgcaaatactgggacagaccccccagaaagctacacaccgacacacccttctacccctgggcaccaaaacccgcagaccaagtaagggtctcctttaaactcaacttccaataaaatttcaaggccgtgggagtctcacttgtcggtgtctgcttcttaaggtcaccaagcactccgagcgcagcgaggagtgcgaccctaggggtgggtgcaacgccctcggcggccgcgcgctacgccttcggctgcgcgcgg

SEQ ID NO: 2713 - protein, 739 aa, Alphatorquevirus sp.
MAYGWWGRRRRWRRWRTRRRPWRTRRRRRRRAPRRFRPRRRVRRRRGRWRRRYRKWRRRRGRRTHRKKIIIKQWQPNFIRRCYIIGYLPLIFCGENTTAQNFATHSDDMIAKGPWGGGMTTTKFTLRILYDEFTRFMNFWTVSNEDLDLCRYVGCKLIFFKHPTVDFIVRINTQPPFLDTNLTAAQIHPGIMMLSKKHILIPSLKTRPSRKHRVVVRVGPPRLFQDKWYPQSDLCDTVLLSVFATACDLQYPFGSPLTDNPCVNFQILGHQYKNHLSISSTNDKSNKDHYDSNLFNKVELYNTFQTIAQLKDTGLITNVAPSQNMWTQVQNTTQLLADGSNAPESKDTWYKGNTYKENIKELAQRTRARFKAATEKALPNYPTIMSTDLYEYHSGIYSSIFLAAGRSYFETPGAYTDVIYNPFTDKGTGNMVWIDYLTKADSIYTNNKSKCEIFDLPLWATFTGYSEFCSKVTGDTAIHLTARVVVRCPYTEPMLIDHSEPNRGFVPYSFNFGEGKMPGGSSKVPIRMRAKWYVNIFHQQEFMEAIVQSGPFAYKGDIKSAVLSMKYRFHWKWGGNPISKQVVRNPCSTSSTSAGRRGPRSVQVVDPKHVTPEVTWHSWDIRRGIFGKAGIKRMQQESDALYIPTGPLKRPRRDTNAQDPEEQNESSGFRVQQRVPWVHSSQETQSSQEEMQTEGTVQEQLLLQLREQRVLRLQLQHLASQVLKVQAGQGLHPLLSSQA

SEQ ID NO: 2714 - protein, 149 aa, Alphatorquevirus sp.
MFLGKLYRKKRKVLLQTVPDPKKARRLLIMWQPPVHNVPGIERNWYESCFRSHAAVCGCGDFVGHLNHLAATLGRPPRSRHPGGPGTPQIRNLPALPAPQGEPGDRAPWPTDGGAGGAAGEDGGRGADRGEPGDVEDDALLAAFDLVEE

SEQ ID NO: 2715 - protein, 127 aa, Alphatorquevirus sp.
LGPLQPRNAKLPRRDANGGDGTGTTPPPAPRAASTPTPAPTPRQPSPQSASRARPTPPIIFPSINKAFMFEPKGPKPIQGYHDWLEEYTCCKYWDRPPRKLHTDTPFYPWAPKPADQVRVSFKLNFQ

SEQ ID NO: 2716 - DNA, 2916 bp, Alphatorquevirus sp.; identical to SEQ ID NO: 2712

SEQ ID NO: 2717 - protein, 739 aa, Alphatorquevirus sp.; identical to SEQ ID NO: 2713

SEQ ID NO: 2718 - protein, 149 aa, Alphatorquevirus sp.; identical to SEQ ID NO: 2714

SEQ ID NO: 2719 - protein, 127 aa, Alphatorquevirus sp.; identical to SEQ ID NO: 2715

SEQ ID NO: 2720 - DNA, 2915 bp, Betatorquevirus sp.
cgggtgctgaaggtgagtgaaaccaccgaaatcaaggggcaattcgggctagatcagtctggcggaacgggcaagaaactaaaaatgtgttttattttacagaaatgacctcttactactcaaaaccagcatactcaccttctgctttagaactacaatggctaaacaacactgtatctagccacgaccttttctgcggctgccctaaaccttggaaacatttgcaagaaattcttaaatgtaaaggaacccaactatgccttggtggtaccgtagacgaccgcgacgctggaacacaaactggagaagacgacctagacctttcccctggagaactagagcgcttattcgcagaagaagacaccgccgataccgggtaagaagatggcgccgctacaaacgcttttttaaaaagaaacttacaaaaattagacttaaccaatggcaaccgtccactataagaaactgctcaatcaaaggacacttgcctttattactatgtggacaaggaagaatagctcataactttactatatgggcagaaagtactgtaccaattggagaaccctcgggaggcgggtggtcttatatacaaataaccttaagagctctttgggatgaatatagaaaatacagatcatggtggacaaaaggcaacgaaggactaccactagtaagatttagatactctaaacttacattttatagaagccaacacacagactatatagtagtaataaaaagatgtccaccatttagtgtaactagagaagattacttagacacacaaccaggaagaatgctaatgaatataagaaaaatactagtaccacacttaggaagaaaacaatataaaaaaacatatataacaaaaaaaatattaccaccagctctatggcaaaacaaatggtactttcaacaagacatgtgtaacttaccattatttatacttaaaacatcagcaacaaacttagatcaattttaccaaccagacacacaaatatcaaataacataactatatggagcctaaacacagacatgtatcaaaacccacaatggcactatgacgacacaacaggctacattccaaaatacacacaaccaccagaaggaggacaaaaaccagtatacatatacggtacagaaaatggacacaatgaaataacacaatggacacaattagttagattagcacaaacaaaactactaacaaaaggaaaacaggtaaacgacataagtaaaatgaacaaagaagaaaactggggaaacccatttcacccagcatacctaacaccagaagccagattattttactcatttgaattaccaaacacaacaaacacaaaaccaaagatatcacaattttactatacatttgaaccatgtagatacaaccccttaaaagacacaggagaaggtaacaaagtatattttaaaagtacaaaactacaacaaggcccatttactaaactaccagacaaagaagacattataatagtagaatacccactatggttagtcttctgggcctgggcagattggatacaaaaaagcaaacctatacaacacatagatgaagactaccaaattgtagtacaatcaaaatttattacaccaaaaagaaattgctatgtttttgtagacaaatatatgtggggagcagacacattacatactgaatttacagaaacagacaaaactaactggcatccaaaatatgcattccaatcagaaatagaaaactcatttgcagaaacaggcccagctacaccaaaactaaaccatactaaatcttttgaagtaaacatgaaatataacattaaattaaaatggggaggatgtcctgctccaatggaaaatgtttctaatccttgcgaacaggaaaaattccccacgcccagtaacgtcaacagcagatatgagatcacgaatccagaaaaacaaaaagaaacctatttgtatagatgggacgaaagaaactgctttcttacagcaacagctgcaaaaagacttaaaacagaccactcaactccaacatcttttacagactttccaagcctcaacccaccacaccaaatccaagaggcagaaacaccggagacatcgtccgaggaagaagaacaaacaccactactcaagcagctccacaaactccacaagcgaaaacgactcctccgagacagactccgacaactaataaaatcaaaattgtaaaactaagatacaacatatttggagaaccaacatttaaaaacagacgactaactccatacgaaagaaaagaagacctacaggaggcaaaaatatgggacagataccctaaagactatatttttgacagaccgttttacaaaaacattgttccagaacccatagttaactttcgcttaaactatgtagactaaaccctttaataaacaaggcctgcaatgattcacttctcggtgtccatttattaaagttttaacttatataaacatccaccacactccctaatacgcaggcgcacaagggggctccgcccccttaaaccccccagggggctccgccccctgaaacccccaagggggctccgcccccttacaccccctaattaatattcaacaggaaaaccacctaattagaattgccgaccacaaactgggctccgcccccttacaccccctaattaatattcaacaggaaaaccacctaattagaattgccgaccacaaactgccaaccgttgcaaacacttccctaaattataccttacttccctatttacagaactccacctactaattcattaatagtcagacgctattcctgggaggagctaactatctatataaccaagtggagtgacgaatggctgagtttacgccgccagacggaggactgatcactttagtgactcaggactgatcttggg

SEQ ID NO: 2721 - protein, 652 aa, Betatorquevirus sp.
MPWWYRRRPRRWNTNWRRRPRPFPWRTRALIRRRRHRRYRVRRWRRYKRFFKKKLTKIRLNQWQPSTIRNCSIKGHLPLLLCGQGRIAHNFTIWAESTVPIGEPSGGGWSYIQITLRALWDEYRKYRSWWTKGNEGLPLVRFRYSKLTFYRSQHTDYIVVIKRCPPFSVTREDYLDTQPGRMLMNIRKILVPHLGRKQYKKTYITKKILPPALWQNKWYFQQDMCNLPLFILKTSATNLDQFYQPDTQISNNITIWSLNTDMYQNPQWHYDDTTGYIPKYTQPPEGGQKPVYIYGTENGHNEITQWTQLVRLAQTKLLTKGKQVNDISKMNKEENWGNPFHPAYLTPEARLFYSFELPNTTNTKPKISQFYYTFEPCRYNPLKDTGEGNKVYFKSTKLQQGPFTKLPDKEDIIIVEYPLWLVFWAWADWIQKSKPIQHIDEDYQIVVQSKFITPKRNCYVFVDKYMWGADTLHTEFTETDKTNWHPKYAFQSEIENSFAETGPATPKLNHTKSFEVNMKYNIKLKWGGCPAPMENVSNPCEQEKFPTPSNVNSRYEITNPEKQKETYLYRWDERNCFLTATAAKRLKTDHSTPTSFTDFPSLNPPHQIQEAETPETSSEEEEQTPLLKQLHKLHKRKRLLRDRLRQLIKSKL

SEQ ID NO: 2722 - protein, 91 aa, Betatorquevirus sp.
MTSYYSKPAYSPSALELQWLNNTVSSHDLFCGCPKPWKHLQEILKCKGTQLCLGGTVDDRDAGTQTGEDDLDLSPGELERLFAEEDTADTG

SEQ ID NO: 2723 - DNA, 2915 bp, Betatorquevirus sp.
cgggagccgaaggtgagtgaaaccaccgtagtctaggggcctaggggcaattcgggctagatcagtctggcggaacgggcaagaaacttaaaattaactttttttacagatatgtccacaagacttaaaccagcaaaatcatctttaagacaaaacaacataaaatggcttaattctattgttcactcccacgacttcttctgcgactgcccaacaccactacaacatgctgttgttttaattttccaacaagaacctgacctggatttaaaaccaattgaaaaagatctaattaaaaaatgccttggagaagctactaccgccgatacaggtaccgtccaagaagactatggtatagaagaaggtacactagaagaccttttcaaagaagactttggagacgaaaacgccgcagggtaagaaaaagaaaactaaaatcaattaagattaaacaatggcaacctcactatataaagaaactaactgttgtgggaactgtgccattatttataaccacatcagcaagaataacaaataattttgcatgctacaaagactcaatagcaccccatttattcccaggaggagggggattttcaatatataattttactttaagagctttgtatcaaaaccatgctgtacttgaaaattggtggacaaaaagtaatgataacatgcctctaataagactaactggtataactttaaaactgtttagaaatgctggttctgattatatgtttttgtataataacacatatccaatgtcagcttctttactaagctacaccagtacacacccttctgctatgatgctacacaaacacagcaaaaaaattctttgcaaacaacacaacagaaacaaaaaaccatacaaaaaaataaatataagaccaccttcacaaatgtataacaaatggtactttcaacatgacatagcagatgtaccgttattacaaacatattgcacagcagctagctttgaccgcatgtacctagcatccaacggaattagcacaaccataggatttacatcacttaataccgttggctttcaaaaccacaattacataaaaacaaccacaagcggttacataccaataccaggcacaatgctttttggaatacacagaggtgaactaactttaaaacaaataaaattctacgacttaatatttctaggcaaccctgaaaatttaacaataggcaccacaataggaggcacaccaataggaagccaacaaggttcaacagaaacagaaaaaaaaataaaaaaccatagattagactggaaatactggggaaatccatttgatcccatatttagaacaacaggaaatatactaacaactaataaaacctgggaccaactaatacaaagttacaaaaatgcaaactcaactacaacgatatacgaaacagactttacctttaaaacacaatttttaatagatgtacgatacaatcctttcgctgacaaagccataggaaacaaattatacttaatagacataaaagacatggcccacagcaatgactgggaaacaccatccaaagacaccttatacacagacctaccaatgtggttaatgctatggggctacgtagactaccacaaaaaatgtggagaacacagtagtatagacacaacacacctgttagtatttaaatgtccatacttacaaccaaaagatataaaatatatagttccactagaccaagattttctacatggagttagcccataccaagaaccagacaacatatttaacaatgacttacttgcatggcatccaaaactcagataccaagcacaaacaataaacctaataggaagcacagggcctggaacaattaaactaccagatcaaacatcagctgaggctcacatgaaatatttttttcattttaagctcggaggacagccacctccaatgtcaacacttacagaccctttacttcaacccaaattcattacgcccgataacatcctccaaacaaattcgttacagaatccagcagccccaatcgaatacatgctatggaactttgacgaaagacggggacaacttacaaaaaaagctgcagatagaatcacaacatacaaagaaactgaacaaactcttttcccaattacagcagcaacttatgcctgccctacaacatccaaaaaagaaatacagacgacggacacatcggactcggaaaaagaagaaatgtcactcgaggaacaactccaccaccagcgaaagcagcaaaaactcctccgacacagaatcaagcaactcctcaaccgactaacaatattagaatagaaaaatgtgttgttaaagtaaagttatttgatgatgataaaaaacctaatcgtagaatgactaaatgggaatatgaacaagaattacaagatgcttacttttggcaaagagtacctagaacccacatatttgatcgccccacatacccttggtgtccacaggacacaaaatatactgtaaactttgacttaaatgcgccgcaataaaatacaaggcctgcaaactttaactctcggtgtccatttatataagttaaactttaataaacatccaccactctcccaaatacgcaggcgcacaagggggctccgcccccttaaacccccagggggggcaagccccccctacaacccccctaattataatattcaacaggaaaaccacataattagaattgccgaccacaaactgccaacaacttcccctttttatacatacttcctgttttactcataaatatttattacattaattaataatcaccatcactttaaggcggagccactactctatataaccaactacacttccgaatggctgagtttatgccgccagacggagactgaatcgcatcagtgacttcaggctgatcttggg

SEQ ID NO: 2724 - protein, 672 aa, Betatorquevirus sp.
MPWRSYYRRYRYRPRRLWYRRRYTRRPFQRRLWRRKRRRVRKRKLKSIKIKQWQPHYIKKLTVVGTVPLFITTSARITNNFACYKDSIAPHLFPGGGGFSIYNFTLRALYQNHAVLENWWTKSNDNMPLIRLTGITLKLFRNAGSDYMFLYNNTYPMSASLLSYTSTHPSAMMLHKHSKKILCKQHNRNKKPYKKINIRPPSQMYNKWYFQHDIADVPLLQTYCTAASFDRMYLASNGISTTIGFTSLNTVGFQNHNYIKTTTSGYIPIPGTMLFGIHRGELTLKQIKFYDLIFLGNPENLTIGTTIGGTPIGSQQGSTETEKKIKNHRLDWKYWGNPFDPIFRTTGNILTTNKTWDQLIQSYKNANSTTTIYETDFTFKTQFLIDVRYNPFADKAIGNKLYLIDIKDMAHSNDWETPSKDTLYTDLPMWLMLWGYVDYHKKCGEHSSIDTTHLLVFKCPYLQPKDIKYIVPLDQDFLHGVSPYQEPDNIFNNDLLAWHPKLRYQAQTINLIGSTGPGTIKLPDQTSAEAHMKYFFHFKLGGQPPPMSTLTDPLLQPKFITPDNILQTNSLQNPAAPIEYMLWNFDERRGQLTKKAADRITTYKETEQTLFPITAATYACPTTSKKEIQTTDTSDSEKEEMSLEEQLHHQRKQQKLLRHRIKQLLNRLTILE

SEQ ID NO: 2725 - protein, 117 aa, Betatorquevirus sp.
LAERARNLKLTFFTDMSTRLKPAKSSLRQNNIKWLNSIVHSHDFFCDCPTPLQHAVVLIFQQEPDLDLKPIEKDLIKKCLGEATTADTGTVQEDYGIEEGTLEDLFKEDFGDENAAG

SEQ ID NO: 2726 - protein, 122 aa, Betatorquevirus sp.
LPYNIQKRNTDDGHIGLGKRRNVTRGTTPPPAKAAKTPPTQNQATPQPTNNIRIEKCVVKVKLFDDDKKPNRRMTKWEYEQELQDAYFWQRVPRTHIFDRPTYPWCPQDTKYTVNFDLNAPQ

SEQ ID NO: 2727 - DNA, 2915 bp, Betatorquevirus sp.
caggtgctgaaggtgagtgaaaccaccgaaatcaaggggcaatatgggcacgggcagtctgggggactgggcaacatacttaaaatatttattttacagatgagcaaactgctaaaaccaacatcacattcagaaagaaatataattctacaaaatgtaaacgcttgggttgccatccacaatattacctgcaagtgtgaatctcctctacgctgcattattcttcaaatataccgtcaagaaccaacattaaattttaaaccaaaggaattacaaaaatggcttactactaccgaccttaccgtcaaagatggtggagacgaagaagatatagatggaaaaaagctagacgaccttttcgcttctttagaaaaagaagacgccaaagggtaagaaaaagaaaattaaaatctcttaaaataagacaatggcaaccaggatgtataagaaaacttgttgttaaaggactatattgtttatttgaagctaatcatagacttctaactaataactatactcaatacatggaaagtgtaccaccagaaggaattccttccggaggaggatttagtattaacagatttaacataaactgtttatggagcgaaagacaaaaagctagaaatgtatggacaacaggaaacaaaaacttacctatgataagatatacaggatgtgaatttaaaatatacagacctatacactgtgatgcagtaataaactttcaaaactgctttcctatggaagctacagcattaacatatcactctgcacaaccatacatagcaatgatgacaaaacacagcaaaaaaatcacacgactatctaacacaaaaaacaaaaaaccatataaaaaatataaattcaaaccaccacaacaaatgactaacaaatggttttttgccagtgacatatacaacacaggtctaattatgctaacatcctcagcggcagactttgaaaatatatacataagtccatactcagaatctaatactatttcattaaaactacttaatgtaaaattatttataaacagacacttcaatcaattacccacaacaggataccacccaaaagacggtttttggctatgggcaagcataaacggcaatatatccccaaaatttaaagaaatgatatttttaggaaacactatacaataccaaaaaggcacagaaatagcaaaactaaaagacgtaaaagacaccacaacaattcagcaagctatgaaattatacacaaactctaaagactggggaaacccatttcacgaagactacattaataaaacacatagaatttggtacacacacaacagtccacaaataacattaggaactaaaacagatcgggtaactacagaaatcaataaattaggctttcaaccactagaccaagaattatattttgaaggcagatacaatcccaatagagacagaggtaaaaactccttaatatattttttaaaaacaacagaagaagcatcaggttgggacccaccagaaaaagacagcctaattacagcaggttttccactatgggtttctgtctggggactaaaagactaccatgaaaaactaaaagatatgcaacacatggacacagattatatagcagtaatacaaacaaaagcaatagaaccacaagatatacaattaaactactttgtggtactagacaaacaatttacacacggagacagtgaatggcatgacggagaaaacagaacaccatgggataacatacactggcaccctatgcttcactaccaacacagatcattagaaattataggacaatcagggccagcagtaccaaaactaggacaatacaaaaacgcagaattacattgtgaatacaaattttattttaaggttgggggctgcgtaccaccaatggcagaaattacagacccagcagaacaaacttctttcccgataccaactaacatcactgaatcaaattcgtttcagaatccaaacgaaccaatccaatcctacttgtactccttcgaccaaaggagacacgaaattactagtacagctgcaaaacgaatcacaaaagacattacatctccaacgcctttattcacagatacaacaacaactggaacagacgtcccaattctccaaacactccaagaaatcgaagactcggaggaggaggaggaaacccaagaaacgacactgctccagcagctcatcaaccagcgagcaaagcagcaacgaatcagcaagcgaatcaagcagctcctaaaattactacacaatacaacataacctgcattaaaaaggtacaattattcccagagaaaaaaaatagacgactaacaccatgggaagaagaacaagacatacaagaatcaagaatatggaaaagggcaagaaaacattttatatatgacattccctggtattatgattgtaaaccagaacctctagtaaattttaaacttaactttcaagataaataaagaaataaagggctaggccccattaattcataactcggtgtctgtttctttaagtgtaaccttattaaactgactccgcctccctaaattagggcgccaaaagggggctccgcccccttaaaccccaagggggctccgccccctttaacccccaagggggctccgcccccttacacccccttattaatattcaacaggaacccttattaatattcaacaggaaaaccacctaattagaattgccgaccacaaactgccactaagttcctctttttaaaatacttcccttttctcttattattattcattacattaattattaaacaccgtaattccggggaggagactaaactgtatataactaactacactgacgaatggctgagtttaccccgccaaacagagacaagttaacaacattaacttggctgcccgtggg

SEQ ID NO: 2728 - protein, 667 aa, Betatorquevirus sp.
MAYYYRPYRQRWWRRRRYRWKKARRPFRFFRKRRRQRVRKRKLKSLKIRQWQPGCIRKLVVKGLYCLFEANHRLLTNNYTQYMESVPPEGIPSGGGFSINRFNINCLWSERQKARNVWTTGNKNLPMIRYTGCEFKIYRPIHCDAVINFQNCFPMEATALTYHSAQPYIAMMTKHSKKITRLSNTKNKKPYKKYKFKPPQQMTNKWFFASDIYNTGLIMLTSSAADFENIYISPYSESNTISLKLLNVKLFINRHFNQLPTTGYHPKDGFWLWASINGNISPKFKEMIFLGNTIQYQKGTEIAKLKDVKDTTTIQQAMKLYTNSKDWGNPFHEDYINKTHRIWYTHNSPQITLGTKTDRVTTEINKLGFQPLDQELYFEGRYNPNRDRGKNSLIYFLKTTEEASGWDPPEKDSLITAGFPLWVSVWGLKDYHEKLKDMQHMDTDYIAVIQTKAIEPQDIQLNYFVVLDKQFTHGDSEWHDGENRTPWDNIHWHPMLHYQHRSLEIIGQSGPAVPKLGQYKNAELHCEYKFYFKVGGCVPPMAEITDPAEQTSFPIPTNITESNSFQNPNEPIQSYLYSFDQRRHEITSTAAKRITKDITSPTPLFTDTTTTGTDVPILQTLQEIEDSEEEEETQETTLLQQLINQRAKQQRISKRIKQLLKLLHNTT

SEQ ID NO: 2729 - protein, 128 aa, Betatorquevirus sp.
LKVSETTEIKGQYGHGQSGGLGNILKIFILQMSKLLKPTSHSERNIILQNVNAWVAIHNITCKCESPLRCIILQIYRQEPTLNFKPKELQKWLTTTDLTVKDGGDEEDIDGKKLDDLFASLEKEDAKG

SEQ ID NO: 2730 - DNA, 2915 bp, Betatorquevirus sp.
cgggagccgaaggtgagtgaaaccaccgtagtctaggggcctaggggcaattcgggctagatcagtctggcggaacgggcaagaaacttaaaattaactttttttacagatatgtccacaagacttaaaccagcaaaatcatctttaagacaaaacaacataaaatggcttaattctattgttcactcccacgacttcttctgcgactgcccaacaccactacaacatgctgttgttttaattttccaacaagaacctgacctggatttaaaaccaattgaaaaagatctaattaaaaaatgccttggagaagctactaccgccgatacaggtaccgtccaagaagactatggtatagaagaaggtacactagaagaccttttcaaagaagactttggagacgaaaacgccgcagggtaagaaaaagaaaactaaaatcaattaagattaaacaatggcaacctcactatataaagaaactaactgttgtgggaactgtgccattatttataaccacatcagcaagaataacaaataattttgcatgctacaaagactcaatagcaccccatttattcccaggaggagggggattttcaatatataattttactttaagagctttgtatcaaaaccatgctgtacttgaaaattggtggacaaaaagtaatgataacatgcctctaataagactaactggtataactttaaaactgtttagaaatgctggttctgattatatgtttttgtataataacacatatccaatgtcagcttctttactaagctacaccagtacacacccttctgctatgatgctacacaaacacagcaaaaaaattctttgcaaacaacacaacagaaacaaaaaaccatacaaaaaaataaatataagaccaccttcacaaatgtataacaaatggtactttcaacatgacatagcagatgtaccgttattacaaacatattgcacagcagctagctttgaccgcatgtacctagcatccaacggaattagcacaaccataggatttacatcacttaataccgttggctttcaaaaccacaattacataaaaacaaccacaagcggttacataccaataccaggcacaatgctttttggaatacacagaggtgaactaactataaaacaaataaaattctacgacttaatatttctaggcaaccctgaaaatttaacaataggcaccacaataggaggcacaccaataggaagccaacaaggttcaacagaaacagaaaaaaaaataaaaaaccatagattagactggaaatactggggaaatccatttgatcccatatttagaacaacaggaaatatactaacaactaataaaacctgggaccaactaatacaaagttacaaaaatgcaaactcaactacaacgatatacgaaacagactttacctttaaaacacaatttttaatagatgtacgatacaatcctttcgctgacaaagccataggaaacaaattatacttaatagacataaaagacatggcccacagcaatgactgggaaacaccatccaaagacaccttatacacagacctaccaatgtggttaatgctatggggctacgtagactaccacaaaaaatgtggagaacacagtagtatagacacaacacacctgttagtatttaaatgtccatacttacaaccaaaagatataaaatatatagttccactagaccaagattttctacatggagttagcccataccaagaaccagacaacatatttaacaatgacttacttgcatggcatccaaaactcagataccaagcacaaacaataaacctaataggaagcacagggcctggaacaattaaactaccagatcaaacatcagctgaggctcacatgaaatatttttttcattttaagctcggaggacagccacctccaatgtcaacacttacagaccctttacttcaacccaaattcattacgcccgataacatcctccaaacaaattcgttacagaatccagcagccccaatcgaatacatgctatggaactttgacgaaagacggggacaacttacaaaaaaagctgcagatagaatcacaacatacaaagaaactgaacaaactcttttcccaattacagcagcaacttatgcctgccctacaacatccaaaaaagaaatacagacgacggacacatcggactcggaaaaagaagaaatgtcactcgaggaacaactccaccaccagcgaaagcagcaaaaactcctccgacacagaatcaagcaactcctcaaccgactaacaatattagaatagaaaaatgtgttgttaaagtaaagttatttgatgatgataaaaaacctaatcgtagaatgactaaatgggaatatgaacaagaattacaagatgcttacttttggcaaagagtacctagaacccacatatttgatcgccccacatacccttggtgtccacaggacacaaaatatactgtaaactttgacttaaatgcgccgcaataaaatacaaggcctgcaaactttaactctcggtgtccatttatataagttaaactttaataaacatccaccactctcccaaatacgcaggcgcacaagggggctccgcccccttaaacccccagggggggcaagccccccctacaacccccctaattataatattcaacaggaaaaccacataattagaattgccgaccacaaactgccaacaacttcccctttttatacatacttcctgttttactcataaatatttattacattaattaataatcaccatcactttaaggcggagccactactctatataaccaactacacttccgaatggctgagtttatgccgccagacggagactgaatcgcatcagtgacttcaggctgatcttggg

SEQ ID NO: 2731 - protein, 672 aa, Betatorquevirus sp.
MPWRSYYRRYRYRPRRLWYRRRYTRRPFQRRLWRRKRRRVRKRKLKSIKIKQWQPHYIKKLTVVGTVPLFITTSARITNNFACYKDSIAPHLFPGGGGFSIYNFTLRALYQNHAVLENWWTKSNDNMPLIRLTGITLKLFRNAGSDYMFLYNNTYPMSASLLSYTSTHPSAMMLHKHSKKILCKQHNRNKKPYKKINIRPPSQMYNKWYFQHDIADVPLLQTYCTAASFDRMYLASNGISTTIGFTSLNTVGFQNHNYIKTTTSGYIPIPGTMLFGIHRGELTIKQIKFYDLIFLGNPENLTIGTTIGGTPIGSQQGSTETEKKIKNHRLDWKYWGNPFDPIFRTTGNILTTNKTWDQLIQSYKNANSTTTIYETDFTFKTQFLIDVRYNPFADKAIGNKLYLIDIKDMAHSNDWETPSKDTLYTDLPMWLMLWGYVDYHKKCGEHSSIDTTHLLVFKCPYLQPKDIKYIVPLDQDFLHGVSPYQEPDNIFNNDLLAWHPKLRYQAQTINLIGSTGPGTIKLPDQTSAEAHMKYFFHFKLGGQPPPMSTLTDPLLQPKFITPDNILQTNSLQNPAAPIEYMLWNFDERRGQLTKKAADRITTYKETEQTLFPITAATYACPTTSKKEIQTTDTSDSEKEEMSLEEQLHHQRKQQKLLRHRIKQLLNRLTILE

SEQ ID NO: 2732 - protein, 117 aa, Betatorquevirus sp.; identical to SEQ ID NO: 2725

SEQ ID NO: 2733 - protein, 122 aa, Betatorquevirus sp.; identical to SEQ ID NO: 2726

SEQ ID NO: 2734 - DNA, 2915 bp, Betatorquevirus sp.
cgggagctgaaggtgagtgaaaccaccgaaatctaggggcaattcgggctgaatcagtctagcggaacgggcaacaaacttaaaaaaacttttatttttacagatgagcaaactgcttaaagagccactatatcaaggaaaaaaccttgaaaattgctgggtaaacaattggcacagctctcacgaattattctgcggctgtaacaaagcccttcaacactttctggaaataattaatcgccaaaacaaagcacctaaaccaccaaaagaaattgaaaatataatatgccttattactggagaaaaagaagacaaagatggagacgccgtagacaaccttatcgatggcgaactagaagaatttttcaaagacgaatttggagacaacgaaaaagaagaagaaactgggtaagaagacgcctttttaaaaaaaaactattatatatacctttaaaacaatttcaaccaaagactataaaacgctgtaatattattggaaatgtatgcttatttcaaggatctccttttagagctattaacaattatgtacaatacttatattcctatgtaccagatgacgaaccgggagggggagggtggactctaatggttgagagtttaagtagcttatgggaagacttccaacacttaaaaaatatatggactcgatcaaacaaaggtttacctttagtaaaatacggaggagtcacattaaccttttttcaaagtccatatacagactatgcagtacaaatttttagatgctacccaatgacagacacaaaataccaacatgcagacttagcaccaagtcgaatgatgctaaaaaaagatgttattaaaataccaagcttagaaacaagaaaaaaaagaaaaccatacaaaaaaatatatgtaccaccaccttcccaaatgcaaaacaaatggtactttcaaaagcaaatttgtaatattcctttagtaatgatagcagcaacagctatagacttaagatatccctttgcatccagtagcagcaaaagtaataacataacattaaaagcactaaacccaaacttatttcaaagacatgactttgatcacccatcagacaccataggctactttcctaaaagtaacacatacctatacgccacaaaaggaatagctaccacaaaaaaaccaactaagaaaacggagttaatttacttaggaaacacaaaagacaatcaaccaggaaaaggaacagatacatttgcagaatggggaaacccattctatcatgactatatagaccaaggtcacccagtatgggtatgcacaaaacctccaacacaactaagagaaactttaacagacactgagtggacacaattatctcaaccatactttatagacattagatataacccagaaaaagatacaggagcaggaaacagtattttcttagtaccaaactatgccggagaccactgggataaaccagctaacccagacttagtgttagaaggctttcctttgtatgacatggtatggggatttactgattggcaaaaaaaaattaaagtagcaacaaacatagataactcatggatagtggtcataacatctccattttttaatgaacctcttacaagctatatatttatagacgaaagttttgtagaaggatttggtccatatcacacaaaaaacattccaagacaacaccaacaacactggtcacctaaatttacttttcaacaaaaatcaataaacacaataggactatcaggacctgcagcacccagaccagcttatgacaattacatgcaagcaagaatgaaatataactttcatgtaaaatggggaggatgccctaaaaagttagatgaaccttacgatccttgttcacagccagactggactatacccagtaacatcaatgagggattacaaatccaggatccagcaacagaccccaaaaccgaactccaagagtgggactggagacgagattacgttacagaaaaagctattactagaatccaagaacacacgccaactgatgtctctttacaaatccctacagaatccagacacatcgctccagtactacgccaaaccagggaaacaacgagttcatcggactcggactcagaaacggaaaaagagaaaacaccatcactccaggaacagatcaccctcctcaagcgaaagcagcgacagctcaagcacaagatcctccacagactagcacaccaaagtttagaataataaaagacaaaacagtaatagagctttttccaaaacctaaaccctttagaaaccgtagatttcacccctgggaagaacaaacagaagcagaatgtgctaaaatctttcacagacctaaaagaacttttttctatgacacccctatatacccaatatttccaataactccacttgtaaattttgacctaaaatatgaataaacaaggccaacaatattcacttagtagtgtctgtttctttaagttgaactatactaaacggactccgcctcccaaaaattcgggcgccaaaagggggctccgcccccttaaacccccggggggggcccaaaaattcgggcgccaaaagggggctccgcccccttaaacccccggggggggcaaagccccccctaacccccccaataagttactaaactttacataatacttacactaaccgcaaaatttgcattgctgaccacaaacagaacaggaaaccacataatttgcattgccaaccacaaacgtttatgctaattaacttccctaaaccatacctctacttccctaaaaattaattaataatcaccgtcataaaaggaggagcttacaaactatataaccaactacacttccgaatggctgagtttatgccgctagacggagacgacacagacaactgcgtcggctgattcaggg

SEQ ID NO: 2735 - protein, 649 aa, Betatorquevirus sp.
MPYYWRKRRQRWRRRRQPYRWRTRRIFQRRIWRQRKRRRNWVRRRLFKKKLLYIPLKQFQPKTIKRCNIIGNVCLFQGSPFRAINNYVQYLYSYVPDDEPGGGGWTLMVESLSSLWEDFQHLKNIWTRSNKGLPLVKYGGVTLTFFQSPYTDYAVQIFRCYPMTDTKYQHADLAPSRMMLKKDVIKIPSLETRKKRKPYKKIYVPPPSQMQNKWYFQKQICNIPLVMIAATAIDLRYPFASSSSKSNNITLKALNPNLFQRHDFDHPSDTIGYFPKSNTYLYATKGIATTKKPTKKTELIYLGNTKDNQPGKGTDTFAEWGNPFYHDYIDQGHPVWVCTKPPTQLRETLTDTEWTQLSQPYFIDIRYNPEKDTGAGNSIFLVPNYAGDHWDKPANPDLVLEGFPLYDMVWGFTDWQKKIKVATNIDNSWIVVITSPFFNEPLTSYIFIDESFVEGFGPYHTKNIPRQHQQHWSPKFTFQQKSINTIGLSGPAAPRPAYDNYMQARMKYNFHVKWGGCPKKLDEPYDPCSQPDWTIPSNINEGLQIQDPATDPKTELQEWDWRRDYVTEKAITRIQEHTPTDVSLQIPTESRHIAPVLRQTRETTSSSDSDSETEKEKTPSLQEQITLLKRKQRQLKHKILHRLAHQSLE

SEQ ID NO: 2736 - protein, 102 aa, Betatorquevirus sp.
MSKLLKEPLYQGKNLENCWVNNWHSSHELFCGCNKALQHFLEIINRQNKAPKPPKEIENIICLITGEKEDKDGDAVDNLIDGELEEFFKDEFGDNEKEEETG

SEQ ID NO: 2737 - DNA, 2915 bp, Betatorquevirus sp.
cgggagctgaaggtgagtgaaaccaccgaaatctaggggcaattcgggctgaatcagtctagcggaacgggcaacaaacttaaaaaaacttttatttttacagatgagcaaactgcttaaagagccactatatcaaggaaaaaaccttgaaaattgctgggtaaacaattggcacagctctcacgaattattctgcggctgtaacaaagcccttcaacactttctggaaataattaatcgccaaaacaaagcacctaagccaccaaaagaaattgaaaatataatatgccttattactggagaaaaagaagacaaagatggagacgccgtagacaaccttatcgatggcgaactagaagaatttttcaaagacgaatttggagacaacgaaaaagaagaagaaactgggtaagaagacgcctttttaaaaaaaaactattatatatacctttaaaacaatttcaaccaaagactataaaacgctgtaatattattggaaatgtatgcttatttcaaggatctccttttagagctattaacaattatgtacaatacttatattcctatgtaccagatgacgaaccgggagggggagggtggactctaatggttgagagtttaagtagcttatgggaagacttccaacacttaaaaaatatatggactcgatcaaacaaaggtttacctttagtaaaatacggaggagtcacattaaccttttttcaaagtccatatacagactatgcagtacaaatttttagatgctacccaatgacagacacaaaataccaacatgcagacttagcaccaagtcgaatgatgctaaaaaaagatgttattaaaataccaagcttagaaacaagaaaaaaaagaaaaccatacaaaaaaatatatgtaccaccaccttcccaaatgcaaaacaaatggtactttcaaaagcaaatttgtaatattcctttagtaatgatagcagcaacagctatagacttaagatatccctttgcatccagtagcagcaaaagtaataacataacattaaaagcactaaacccaaacttatttcaaagacatgactttgatcacccatcagacaccataggctactttcctaaaagtaacacatacctatacgccacaaaaggaatagctaccacaaaaaaaccaactaagaaaacggagttaatttacttaggaaacacaaaagacaatcaaccaggaaaaggaacagatacatttgcagattggggaaacccattctatcatgactatatagaccaaggtcacccagtatgggtatgcacaaaacctccaacacaactaaaagacaatttaacagaaactgagtggacacaattatctcaaccatactttatagacattagatataacccagaaaaagatacaggagcaggaaacagtattttcttagtaccaaactatgccggagaccactgggataaaccagctaacccagacttagtgttagaaggctttcctttgtatgacatggtatggggatttactgattggcaaaaaaaaattaaagtagcaacaaacgtagataactcatggatagtggtcataacatctccattttttaatgaacctcttacaagctatatatttatagacgaaagttttgtagaaggatttggtccatatcacacaaaaaacattccaagacaacaccaacaacactggtcacctaaatttacttttcaacaaaaatcaataaacacaataggactatcaggacctgcagcacccagaccagcttatgacaattacatgcaagcaagaatgaaatataactttcatgtaaaatggggaggatgccctaaaaagttagatgaaccttacgatccttgttcacagccagactggactatacccagtaacatcaatgagggattacaaatccaggatccagcaacagaccccaaaaccgaactccaagagtgggactggagacgagattacgttacagaaaaagctattactagaatccaagaacacacgccaactgatgtctctttacaaatccctacagaatccagacacatcgctccagtactacgccaaaccagggaaacaacgagttcatcggactcggactcagaaacggaaaaagagaaaacaccatcactccaggaacagatcaccctcctcaagcgaaagcagcgacagctcaagcacaagatcctctacagactagcacaccaaagtttagaataataaaagacaaaacagtaatagagctttttccaaaacctaaaccctttagaaaccgtagatttcacccctgggaagaacaaacagaagcagaatgtgctaaaatctttcacagacctaaaagaacttttttctatgacacccctatatacccaatatttccaataactccacttgtaaattttgacctaaaatatgaataaacaaggccaacaatattcacttagtagtgtctgtttctttaagttgaactatactaaacggactccgcctcccaaaaattcgggcgccaaaagggggctccgcccccttaaacccccgggggggcaaagcccccccctaacccccccaataagttactaaactttacataatacttacactaaccgcaaaatttgcattgctgaccacaaacagaacaggaaaccacataatttgtaaccgcaaaatttgcattgctgaccacaaacagaacaggaaaccacataatttgcattgccaaccacaaacgtttatgctaattaacttccctaaaccatacctctacttccctaaaaattaattaataatcaccgtcataaaaggaggagcttacaaactatataaccaactacacttccgaatggctgagtttatgccgctagacggagacgacacagacaactgcgtcggctgattcaggg

SEQ ID NO: 2738 - protein, 649 aa, Betatorquevirus sp.
MPYYWRKRRQRWRRRRQPYRWRTRRIFQRRIWRQRKRRRNWVRRRLFKKKLLYIPLKQFQPKTIKRCNIIGNVCLFQGSPFRAINNYVQYLYSYVPDDEPGGGGWTLMVESLSSLWEDFQHLKNIWTRSNKGLPLVKYGGVTLTFFQSPYTDYAVQIFRCYPMTDTKYQHADLAPSRMMLKKDVIKIPSLETRKKRKPYKKIYVPPPSQMQNKWYFQKQICNIPLVMIAATAIDLRYPFASSSSKSNNITLKALNPNLFQRHDFDHPSDTIGYFPKSNTYLYATKGIATTKKPTKKTELIYLGNTKDNQPGKGTDTFADWGNPFYHDYIDQGHPVWVCTKPPTQLKDNLTETEWTQLSQPYFIDIRYNPEKDTGAGNSIFLVPNYAGDHWDKPANPDLVLEGFPLYDMVWGFTDWQKKIKVATNVDNSWIVVITSPFFNEPLTSYIFIDESFVEGFGPYHTKNIPRQHQQHWSPKFTFQQKSINTIGLSGPAAPRPAYDNYMQARMKYNFHVKWGGCPKKLDEPYDPCSQPDWTIPSNINEGLQIQDPATDPKTELQEWDWRRDYVTEKAITRIQEHTPTDVSLQIPTESRHIAPVLRQTRETTSSSDSDSETEKEKTPSLQEQITLLKRKQRQLKHKILYRLAHQSLE

SEQ ID NO: 2739 - protein, 102 aa, Betatorquevirus sp.; identical to SEQ ID NO: 2736

SEQ ID NO: 2740 - DNA, 2915 bp, Betatorquevirus sp.
cgggagctgaaggtgagtgaaaccaccgaaatctaggggcaattcgggctgaatcagtctagcggaacgggcaacaaacttaaaaaaacttttatttttacagatgagcaaactgcttaaagagccactatatcaaggaaaaaaccttgaaaattgctgggtaaacaattggcacagctctcacgaattattctgcggctgtaacaaagcccttcaacactttctggaaataattaatcgccaaaacaaagcacctaagccaccaaaagaaattgaaaatataatatgccttattactggagaaaaagaagacaaagatggagacgccgtagacaaccttatagatggcgaactagaagaatttttcaaagacgaatttggagacaacgaaaaagaagaagaaactgggtaagaagacgcctttttaaaaaaaaactattatatatacctttaaaacaatttcaaccaaagactataaaacgctgtaatattattggaaatgtatgcttatttcaaggatctccttttagagctattaacaattatgtacaatacttatattcctatgtaccagatgacgaaccgggagggggagggtggactctaatggttgagagtttaagtagcttatgggaagacttccaacacttaaaaaatatatggactcgatcaaacaaaggtttacctttagtaaaatacggaggagtcacattaaccttttttcaaagtccatatacagactatgcagtacaaatttttagatgctacccaatgacagacacaaaataccaacatgcagacttagcaccaagtcgaatgatgctaaaaaaagatgttattaaaataccaagcttagaaacaagaaaaaaaagaaaaccatacaaaaaaatatatgtaccaccaccttcccaaatgcaaaacaaatggtactttcaaaagcaaatttgtaatattcctttagtaatgatagcagcaacagctatagacttaagatatccctttgcatccagtagcagcaaaagtaataacataacattaaaagcactaaacccaaacttatttcaaagacatgactttgatcacccatcagacaccataggctactttcctaaaagtaacacatacctatacgccacaaaaggaatagctaccacaaaaaaaccaagtaagaaaacggagttaatttacttaggaaacacaaaagacaatcaaccaggaaaaggaacagatacatttgcagattggggaaacccattctatcatgactatatagaccaaggtcacccagtatgggtatgcacaaaacctccaacacaactaaaagacaatttaacagaaactgagtggacacaattatctcaaccatactttatagacattagatataacccagaaaaagatacaggagcaggaaacagtattttcttagtaccaaactatgccggagaccactgggataaaccagctaacccagacttagtgttagaaggctttcctttgtatgacatggtatggggatttactgattggcaaaaaaaaattaaagtagcaacaaacgtagataactcatggatagtggtcataacatctccattttttaatgaacctcttacaagctatatatttatagacgaaagttttgtagaaggatttggtccatatcacacaaaaaacattccaagacaacaccaacaacactggtcacctaaatttacttttcaacaaaaatcaataaacacaataggactatcaggacctgcagcacccagaccagcttatgacaattacatgcaagcaagaatgaaatataactttcatgtaaaatggggaggatgccctaaaaagttagatgaaccttacgatccttgttcacagccagactggactatacccagtaacatcaatgagggattacaaatccaggatccagcaacagaccccaaaaccgaactccaagagtgggactggagacgagattacgttacagaaaaagctattactagaatccaagaacacacgccaactgatgtctctttacaaatccctacagaatccagacacatcgctccagtactacgccaaaccagggaaacaacgagttcatcggactcggactcagaaacggaaaaagagaaaacaccatcactccaggaacagatcaccctcctcaagcgaaagcagcgacagctcaagcacaagatcctctacagactagcacaccaaagtttagaataataaaagacaaaacagtaatagagctttttccaaaacctaaaccctttagaaaccgtagatttcacccctgggaagaacaaacagaagcagaatgtgctaaaatctttcacagacctaaaagaacttttttctatgacacccctatatacccaatatttccaataactccacttgtaaattttgacctaaaatatgaataaacaaggccaacaatattcacttagtagtgtctgtttctttaagttgaactatactaaacggactccgcctcccaaaaattcgggcgccaaaagggggctccgcccccttaaacccccgggggggtcccaaaaattcgggcgccaaaagggggctccgcccccttaaacccccgggggggcaaagccccccctaaccccccccaataagttactaaactttacataatacttacagtaaccgcaaaatttgcattgctgaccacaaacagaacaggaaaccacataatttgcattgccaaccacaaacgtttatgctaattaacttccctaaaccatacctctacttccctaaaaattaattaataatcaccgtcataaaaggaggagcttacaaactatataaccaactacacttccgaatggctgagtttatgccgctagacggagacgacacagacaactgcgtcggctgattcaggg

SEQ ID NO: 2741 - protein, 649 aa, Betatorquevirus sp.
MPYYWRKRRQRWRRRRQPYRWRTRRIFQRRIWRQRKRRRNWVRRRLFKKKLLYIPLKQFQPKTIKRCNIIGNVCLFQGSPFRAINNYVQYLYSYVPDDEPGGGGWTLMVESLSSLWEDFQHLKNIWTRSNKGLPLVKYGGVTLTFFQSPYTDYAVQIFRCYPMTDTKYQHADLAPSRMMLKKDVIKIPSLETRKKRKPYKKIYVPPPSQMQNKWYFQKQICNIPLVMIAATAIDLRYPFASSSSKSNNITLKALNPNLFQRHDFDHPSDTIGYFPKSNTYLYATKGIATTKKPSKKTELIYLGNTKDNQPGKGTDTFADWGNPFYHDYIDQGHPVWVCTKPPTQLKDNLTETEWTQLSQPYFIDIRYNPEKDTGAGNSIFLVPNYAGDHWDKPANPDLVLEGFPLYDMVWGFTDWQKKIKVATNVDNSWIVVITSPFFNEPLTSYIFIDESFVEGFGPYHTKNIPRQHQQHWSPKFTFQQKSINTIGLSGPAAPRPAYDNYMQARMKYNFHVKWGGCPKKLDEPYDPCSQPDWTIPSNINEGLQIQDPATDPKTELQEWDWRRDYVTEKAITRIQEHTPTDVSLQIPTESRHIAPVLRQTRETTSSSDSDSETEKEKTPSLQEQITLLKRKQRQLKHKILYRLAHQSLE

SEQ ID NO: 2742 - protein, 102 aa, Betatorquevirus sp.; identical to SEQ ID NO: 2736

SEQ ID NO: 2743 - DNA, 2915 bp, Betatorquevirus sp.
ggcgggtgctgaggtgagtgaaaccaccgaatcaaggggcaattcgggctagttcagtctagcggaacgggcaagtaacttaaattattgttttttagatgtcagattttgtggacccaagatttacaaaaagacaacttaacctacacatggtaaatggctacgtacacattcatgatttaagatgccactgcaaacaacccctacaacacatcattaaacaaatacaagaacaagaaccaactcttcaaaaatggcaagatactactaccgcaacaaatacaagaacaagaaccaactcttcaaaaatggcaagatactactaccgcagacgctggaaaaaccgttaccgaagaagatatcgaccattttggacctggagaactagagcgccttttcgcagaagacgacgccgcaaaccaagggtaagaagaaaacttcgtacattaaaacttaaagaatggcaacccagccatataaatagactaaatataaaaggacttttttgtctatttcaaatgcataaagcaagatataatagagactttaacagttatgaaataagtgtaccagctgaaggactcccaaatggcggaggcttcactatagtaagatttaacttactaagcctgtacgaacaacatgaaaaagctcataatgtatggacaaaatctaacaaaaactttccattgtttagatacttaggatgtaatataaaagtatatagaccattacatgttgatcttgtactaaaatttcagacttgttatcccatgagtagcagcaaactaatgtttactggtacacaacctagtataatgatgatgactaaaggctgtaaaataatacgttgtaaacaaaatgcgccgaatgctagaccatatagaaaatttagattaccaccaccacaacaaatgttaaacaaatggtattttcaaaaacaccaaagccaaacagggtttttactaattcaggcagcagcagcaagtctagacaactactacacatcctccggagcagacagctcctcaataacattaactactttaaacacaaagatatttaaaaacctaaactttgcaaattttccattaacaactggatacagcccaaatgacaaatttcacttatgggcttctaatggtggcaatgaagaacttaaagacttaatatggttaggtcaatccaaaaaatataatcaaggaaatacacttaacacagccaaaggtaaagatttaaaagaaaaatttgaagactactttaaaaacccagataattggggaaacccattccatagattaaatttgcataaaacacataccctatggttcacacaacacacaccagcaatacacttttcattaaaactaaacaaatggaacttaaacacaaaaataaaagatgcaggattcaacaaagtcgaacaagaactgttttttaaaattagatacaacccatttgcagacaaaggatacaataacaacatatacataaaagcaaactggaaagacaacgaagacttagacccagaaccagacatagacctacaaaaccctggctttccaaattggttatcatgctttggttttgaagattatttaataaaactaggcacaaaatcacaaataagaacacactatataatgtttcacaaatccccatactttcaaccacaactagactactacctatttgtagatagcttttttttaaacggtgattccgatgattacgaaggaagaatacaatttgaaaaccttaactggtatcctatgataacacaccaagaacaggccttaaacactcttgcactatgtggtccaggagcaccaaaaataggggaaataaaacttgctgaagctaaaattgaatacaattttaaatttaagattggcggatgcgcaccaccagttgaaaaagttacagaccctacaaaacaaccaacttttgttacaccaagtaacatccttgacactaattcgttacagagtccagaacagccaatcgaaagcttcttataccaatttgattggcgacgagaccaaattactgaaacagctgcaaaacgaatcacaaaagacttctcatctacaaaacatttatttacagatgcaacaacaactggaacaacagtgccactccaccaagcacaagaaaaagaactgctctcgtcggaggaagaggaaaccaaaacggagacactattcgagcagctctacaaccagcgaagaaagcaaaagcagctcagactccgaatcaagcaactaatgaaccaaatacaacaattagaataaagcacatcaaccaaacaataaacctattcggagactacaaaccaaaaaacagacgtatgaatacatgggaaaaagaacaagaaatacaagaagcatccatttggggacactatgtcagagactatatactagactttccttactataaaaacatgccaataaccccaaaagttccatatattcctaaagtaaaatttgacttaaactttaaagaataaagcctgcaaactttcactttcggtgtccatttatttaagttataacctatataaacatccaccacactcccaaatacgcaggcgcaaagggggctccgcccccttaaacccccagggggctccgccccctcaaaccccctagggggctacgccccctaacacccccttattaatattcaacaggaaaaccacctaattagaattgccgaccacaaaccgtcctttacttccctttttcaacaacacttcccttttttctaattattattcattaaattaattagtaaacaccgtaaatccggggaggagccaaaaacctatataaccaactgtactgacgaatggctgagtttatgccgctagacggaggacgcatcagtacactgactgcgaactgaactcg

SEQ ID NO: 2744 - protein, 731 aa, Betatorquevirus sp.
MSDFVDPRFTKRQLNLHMVNGYVHIHDLRCHCKQPLQHIIKQIQEQEPTLQKWQDTTTATNTRTRTNSSKMARYYYRRRWKNRYRRRYRPFWTWRTRAPFRRRRRRKPRVRRKLRTLKLKEWQPSHINRLNIKGLFCLFQMHKARYNRDFNSYEISVPAEGLPNGGGFTIVRFNLLSLYEQHEKAHNVWTKSNKNFPLFRYLGCNIKVYRPLHVDLVLKFQTCYPMSSSKLMFTGTQPSIMMMTKGCKIIRCKQNAPNARPYRKFRLPPPQQMLNKWYFQKHQSQTGFLLIQAAAASLDNYYTSSGADSSSITLTTLNTKIFKNLNFANFPLTTGYSPNDKFHLWASNGGNEELKDLIWLGQSKKYNQGNTLNTAKGKDLKEKFEDYFKNPDNWGNPFHRLNLHKTHTLWFTQHTPAIHFSLKLNKWNLNTKIKDAGFNKVEQELFFKIRYNPFADKGYNNNIYIKANWKDNEDLDPEPDIDLQNPGFPNWLSCFGFEDYLIKLGTKSQIRTHYIMFHKSPYFQPQLDYYLFVDSFFLNGDSDDYEGRIQFENLNWYPMITHQEQALNTLALCGPGAPKIGEIKLAEAKIEYNFKFKIGGCAPPVEKVTDPTKQPTFVTPSNILDTNSLQSPEQPIESFLYQFDWRRDQITETAAKRITKDFSSTKHLFTDATTTGTTVPLHQAQEKELLSSEEEETKTETLFEQLYNQRRKQKQLRLRIKQLMNQIQQLE

SEQ ID NO: 2745 - DNA, 2915 bp, Betatorquevirus sp.
cgggtgccgaaggtgagtgcaaccaccgtagtcaaggggcaattcgggctagatcagtctggtggaacgggcaagaaactaaaatatatattttttacagaatgtccaagtttttaaaaccaacaatatacaaaaatggagccctagaaacacagtggatgaactccattttcacaacacacgacattgtctgcggctgccaagacaccattaaccacttaaaatttttaattgaaaaccaacaatgccattctattatcgaaggaaatggaacaacaactactttcgcaaacgccgatatcaacgcaggggacctagaaagacttttcgcagaagacgaagacaacgaagggtaagaagaaaacgctttaaaaaatatagactaagaaaacttaaaactataatacaaagacaataccaacctgaacaaataagaaaatgtaaaataagaggatttctagaacttatagaatgcggatatggcagactttcagataactgggcattatacaaagaaagctatgtacctgaacatgaaccaggagggggaggttggagcatacaacaactaactttgggaaatttatatatacaaagcaaatatgcaatgaactactggacacatacaaacagaggttacaatttagccagatacctaggagtaaacataagactctacagacaaccacaaacagactatatatttcattacaatttacaagacccacaaataataactaaatacacatatccatcatatcacccatacaaaatactacaataccatcaacgaattgtagttccaagcttacaaactgcaccacataaaaaaaaactatacaaacaaagatttattaaaccaccaaaaaaaatgaaaaatcaatggtactttcaagaacaactaacaaacttcccactgttaacattttatacaacagcagtagacctacaatcaatgtatatttcctccaaagcacaaaacaataacataacattaaatgtattaaacacacaactttttcacaacccaaattttcaatttccaccagaaacaacaggatacaaaccagattcagaaaattacttatatggttatacagcaccacatatacaatggccaacgacaggcgttcccctgaaagatttcatattattagcagacacaacaaacaataccccaggagaaccaatacaaaataacattatgccaccaaaaaaaaaatggggtaacccattttttcatgaattttttaatatggacgcagcaacaacattacaaaatataaaacccgaagatagtggctttatggataaaaaaattaaagaaactgacctaaaagtacaaccatactatgaacaagtcagatataaccctaacaaagataacggagaaggtaatgaggcatatataataaaaaattttacaagtgctcaacaaccaaattgggatccaccaaaagatgaagatctcatattaagaggacacccattatggctaatgctttggggtctacaaagttacatagaaaaaaagaaactatttaatgacttagacaaaaacggcatacttgtaataagaacaaaaaagtttagtgggccaccattgccagcatacgttatactaaatgatagcttttgtagaggacaaggcccatacgaccaaccaagagaagaaataagtttatacaataacacacactggtatccacgctttaaatatcaaaaagaagcactagaacaaatattagaaacaggaccaggagtttacaaaactaacaaaggaacatccatacagtctcacttacactatacttttctttttaagtggggaggcaacccatcaaagatggaaacaattgcagacccaacaacacaaccaacaggacctgaccccaataacctcctattctcaaatgaaatcaatagtccagaacaaacaatccttaactacatctacaagtgggatgtcagacgagacctccttacacaaaaagctacaaacagaattacagaactccaaattcctaaacaaactgtatttacagatggaaaagcaacttcaacagacatcccaatctggacacaaacaacaccacaaacgaaagagaccacggaagaagaaaaccaagagatacagcagcagctcgagctcgtccaactgtacaaccaacaactccagcagcgactcagacaactaatattatccaacaacccataaatataaaatgcattaaaaaagtatacctatttgatcctccaaaaccacgtaaaaatgaaagatttacagggtgggactgggaaactgagttacaactatgtaaagcctttaaaagacctatgagaacctttaaaaatgatcccccttattacccatggttgcctccagaacccattgttaactttgatttaaactttaataaaggccagcattaattcacttaacaagtctgtttatttaagtataaacttaataaaccaacaccgcctccctaatacgcaggcgcaaagggggctccgcccccttaaacccccagggggggcaagcccccccaaaacccccccaaaaaaaccacaaaatttgcatttaaaaccacaaacggtccggaaaccacaaaatttgcattgccgaccacaaacggtccggaaaccacaaaatttgcattgccgaccacaaacggtacatttttacaacacagttaacaacttccttaaaattatataaatattcataaaattaattaataatcactgtcacacataggaggggccttaaacatatataactaactacacttccgaatggctgagtttatgccgccagacggagacagaaccacttcagtgacttctggctgatcttgggcgggtgccgaaggtgagtgcaaccaccgtagtcaaggggcaattcgggcggg

SEQ ID NO: 2746 - protein, 657 aa, Betatorquevirus sp.
MPFYYRRKWNNNYFRKRRYQRRGPRKTFRRRRRQRRVRRKRFKKYRLRKLKTIIQRQYQPEQIRKCKIRGFLELIECGYGRLSDNWALYKESYVPEHEPGGGGWSIQQLTLGNLYIQSKYAMNYWTHTNRGYNLARYLGVNIRLYRQPQTDYIFHYNLQDPQIITKYTYPSYHPYKILQYHQRIVVPSLQTAPHKKKLYKQRFIKPPKKMKNQWYFQEQLTNFPLLTFYTTAVDLQSMYISSKAQNNNITLNVLNTQLFHNPNFQFPPETTGYKPDSENYLYGYTAPHIQWPTTGVPLKDFILLADTTNNTPGEPIQNNIMPPKKKWGNPFFHEFFNMDAATTLQNIKPEDSGFMDKKIKETDLKVQPYYEQVRYNPNKDNGEGNEAYIIKNFTSAQQPNWDPPKDEDLILRGHPLWLMLWGLQSYIEKKKLFNDLDKNGILVIRTKKFSGPPLPAYVILNDSFCRGQGPYDQPREEISLYNNTHWYPRFKYQKEALEQILETGPGVYKTNKGTSIQSHLHYTFLFKWGGNPSKMETIADPTTQPTGPDPNNLLFSNEINSPEQTILNYIYKWDVRRDLLTQKATNRITELQIPKQTVFTDGKATSTDIPIWTQTTPQTKETTEEENQEIQQQLELVQLYNQQLQQRLRQLILSNNP

SEQ ID NO: 2747 - protein, 84 aa, Betatorquevirus sp.
MSKFLKPTIYKNGALETQWMNSIFTTHDIVCGCQDTINHLKFLIENQQCHSIIEGNGTTTTFANADINAGDLERLFAEDEDNEG

SEQ ID NO: 2748 - protein, 118 aa, Betatorquevirus sp.
LDTNNTTNERDHGRRKPRDTAAARARPTVQPTTPAATQTTNIIQQPINIKCIKKVYLFDPPKPRKNERFTGWDWETELQLCKAFKRPMRTFKNDPPYYPWLPPEPIVNFDLNFNKGQH

SEQ ID NO: 2749 - DNA, 2915 bp, Betatorquevirus sp.
cgggagctgaaggtgagtgaaaccaccgaaatctaggggcaattcgggctgaatcagtctagcggaacgggcaagaaacttaaaataacttttatttttacagatgagcaaactgcttaaagagccactatatcaaggaaaaaaccttgaaaattgctgggtaaacaattggcacagctctcacgaattattttgcggctgtaacaaagcccttcaacactttctggaaataattaatcgccaaaacaaagcaccaaagccaccacaagaaattaaaaatataatatgccttattactggagaaaaagaagacaaagatggagacgccgtagacaaccttatcgatggcgaactagaagaatttttcaaagacgaatttggagacaacgaaaaagaagaagaaactgggtaagaagacgcctttttaaaaaaaaactattatacatacctttaaaacaatttcaaccaaagactataaaacgctgtaatattattggaaatgtatgcttatttcaaggatctccttttagagctattaacaattatgtacaatacttatattcctatgtaccagatgatgaaccgggagggggaggatggactctaatggttgaaagtttaagtagcttatgggaagacttccaacacttaaaaaatatatggacacgatcaaacaaaggtttacctttagtaaaatacggaggagttacattaaccttttttcaaagtccatatacagactatgcagtacaaatatttagatgctacccaatgacagacacaaaataccaacatgcagacctagcaccaagtagaatgatgctaaaaaaagacgttattaagatcccaagcttagaaacaagaaaaaaaagaaaaccatacaaaagaatatatgtgccacccccttcccaaatgcaaaacaaatggtactttcaaaagcaaatttgtaatattcctttagtaatgatagcagcaactgctatagacttaagatatccctttgcatgcagtagcagcaaaagtaataacataacattaaaagcactaaaccccaacttatttcaaagacatgactttgatcacccatcagacacgttaggctactttcctaaatctaacacatacctatactccacaaaaggaataagtaccacagcaaaaccaacaacaaaaagtcagctaatttacttaggtaacacaaaagacaatcaaccaggaaagggaatagataaattttcagagtggggaaacccattctatcatgactacatagaccaaggtcacccagtatgggtatgcacaaaagctccaacacaactacaagaaactttagtagacagtgactggacacaattatctcaaccatactttatagacattagatataaccctgaaaaagacacaggagaaggaaacagtattttcttagtaccaaactatgcaggacagcactgggataaaccaggtaaccaagacttaatattagaaggctttccgttatatgacatggtatggggatttactgattggcaaaaaaaaataaaagtagcaacaaacatagataactcatggatagttgtaataacatctccattttttaatgaacctcttacaagctatatatttatagacgaaagttttatagaaggatttgggccatatcacacaaaaaacattccaagacaacaccaacaacactgggcacctaaatttacttttcaacaaaaatcaataaacacaataggactatcaggacctgcagcacccagaccaccttatgacaattacatgcaagccagaatgaaatataactttcatgtaaaatggggaggatgccctaaaaagttagatgaaccttacgatccttgttcacagccagactggactatacccagtaacatcaatgagggattacaaatccaggatccagcaacagaccccaaaaccgaactccaagagtgggactggagacgagattatgttacagaaacagctattgctagaatccaagaacacacgccaactgatgtctctttacaaatccctacagaatccagacacatcgctccaatactacgccaaaccagggaaacaacgagttcatcggactcggactcagaaacggaaaaagagaaaacaccatcactccaggaacagatcaccctcctcaagcgaaagcagcgacagctcaagcacaggatcctccacagactagcacaccaaagtttagaataataaaagacaaaacagtagtagaactttttcctaaacctaaaccctttagaaaccgtagatttcacccctgggaagaacaaacagaagcagaatgtgctaaactgtttcaaagacctaaaagaacttttttttatgacacccctatatacccaatatttccaataactccacttgtaaattttgacctaaaatatgaataaacaaggccaacaatattcacttagtggtgtctgtttctttaagtttaactatactaaactgactccgcctcccaataatttgggcgccaaaagggggctccgcccccttaaacccccggggggggcccaataatttgggcgccaaaagggggctccgcccccttaaacccccggggggggcaaagccccccctaacccccccaataagttacaaaactttaagtaatacttacattaaccgcaaaatttgcattgccaaccacaaacagaacaggaaaccacaaaatttgcattgccgaccacaaacgtatatgctaattaacttccctaaaccatgcctgtacttccccaaaaattaattaataatcaccgtcataaaaggaggagcctacaaaatatataaccaagtgcactttcgaatggctgagtttatgccgctagacggagacgacacagacaactgcgtcggctgattcaggg

SEQ ID NO: 2750 - protein, 649 aa, Betatorquevirus sp.
MPYYWRKRRQRWRRRRQPYRWRTRRIFQRRIWRQRKRRRNWVRRRLFKKKLLYIPLKQFQPKTIKRCNIIGNVCLFQGSPFRAINNYVQYLYSYVPDDEPGGGGWTLMVESLSSLWEDFQHLKNIWTRSNKGLPLVKYGGVTLTFFQSPYTDYAVQIFRCYPMTDTKYQHADLAPSRMMLKKDVIKIPSLETRKKRKPYKRIYVPPPSQMQNKWYFQKQICNIPLVMIAATAIDLRYPFACSSSKSNNITLKALNPNLFQRHDFDHPSDTLGYFPKSNTYLYSTKGISTTAKPTTKSQLIYLGNTKDNQPGKGIDKFSEWGNPFYHDYIDQGHPVWVCTKAPTQLQETLVDSDWTQLSQPYFIDIRYNPEKDTGEGNSIFLVPNYAGQHWDKPGNQDLILEGFPLYDMVWGFTDWQKKIKVATNIDNSWIVVITSPFFNEPLTSYIFIDESFIEGFGPYHTKNIPRQHQQHWAPKFTFQQKSINTIGLSGPAAPRPPYDNYMQARMKYNFHVKWGGCPKKLDEPYDPCSQPDWTIPSNINEGLQIQDPATDPKTELQEWDWRRDYVTETAIARIQEHTPTDVSLQIPTESRHIAPILRQTRETTSSSDSDSETEKEKTPSLQEQITLLKRKQRQLKHRILHRLAHQSLE

SEQ ID NO: 2751 - protein, 102 aa, Betatorquevirus sp.
MSKLLKEPLYQGKNLENCWVNNWHSSHELFCGCNKALQHFLEIINRQNKAPKPPQEIKNIICLITGEKEDKDGDAVDNLIDGELEEFFKDEFGDNEKEEETG

SEQ ID NO: 2752 - DNA, 2915 bp, Betatorquevirus sp.
cgggagctgaaggtgagtgaaaccaccgaaatctaggggcaattcgggctgaatcagtctagcggaacgggcaagaaacttaaaataacttttatttttacagatgagcaaactgcttaaagagccactatatcaaggaaaaaaccttgaaaattgctgggtaaacaattggcacagctctcacgaattattttgcggctgtaacaaagcccttcaacactttctggaaataattaatcgccaaaacaaagcaccaaagccaccacaagaaattaaaaatataatatgccttattactggagaaaaagaagacaaagatggagacgccgtagacaaccttatcgatggcgaactagaagaatttttcaaagacgaatttggagacaacgaaaaagaagaagaaactgggtaagaagacgcctttttaaaaaaaaactattatacatacctttaaaacaatttcaaccaaagactatcaaacgctgtaatattattggaaatgtatgcttatttcaaggatctccttttagagctattaacaattatgtacaatacttatattcctatgtaccagatgatgaaccgggagggggaggatggactctaatggttgaaagtttaagtagcttatgggaagacttccaacacttaaaaaatatatggacacgatcaaacaaaggtttacctttagtaaaatacggaggagttacattaaccttttttcaaagtccatatacagactatgcagtacaaatatttagatgctacccaatgacagacacaaaataccaacatgcagacctagcaccaagtagaatgatgctaaaaaaagacgttattaagatcccaagcttagaaacaagaaaaaaaagaaaaccatacaaaagaatatatgtgccacccccttcccaaatgcaaaacaaatggtactttcaaaagcaaatttgtaatattcctttagtaatgatagcagcaactgctatagacttaagatatccctttgcatccagtagcagcaaaagtaataacataacattaaaagcactaaaccccaacttatttcaaagacatgactttgatcacccatcagacacgttaggctactttcctaaatctaacacatacctatactccacaaaaggaataattaccacagcaaaaccaaaaaaaatagaacagctaatttacttaggtaacacaaaagacaatcaaccaggaaggggaatagataaattttcaaactggggaaacccattctatcatgactacatagaccaaggtcacccagtatgggtatgcacaaaagctccaacacaactacaagaccctttagtagacaatgaatggacagaattatctcaaccatactttatagacattagatataaccctgaaaaagacacaggagaaggaaacagtatttacttagtaccaaactatgcaggacagcactgggataaaccgggtaaccaagacttaatattagaaggctttccgttatatgacatggtatggggatttactgattggcaaaaaaaaataaaagtagcaacaaacgtagataactcatggatagttgtaataacatctccattttttaatgaacctcttacaagctatatatttatagacgaaagttttatagaaggatttgggccatatcacacaaaaaacattccaagacaacaccaacaacactggtcacctaaatatacttttcaacaaaaatcaataaacacaataggactatcaggacctgcagcacccagaccaccttatgacaattacatgcaagccagaatgaaatataactttcatgtaaaatggggaggatgccctaaaaagttagatgaaccttacgatccttgttcacagccagactggactatacccagtaacatcaatgagggattacaaatccaggatccagcaacagaccccaaaaccgaactccaagagtgggactggagacgagattatgttacagaaaaagctattgctagaatccaagaacacacgccaactgatgtctctttacaaatccctacagaatccagacacatcgctccaatactacgccaaaccagggaaacaacgagttcatcggactcggactcagaaacggaaaaagagaaaacaccatcactccaggaacagatcaccctcctcaagcgaaagcagcgacagctcaagcacaggatcctccacagactagcacaccaaagtttagaataataaaagacaaaacagtagtagaactttttcctaaacctaaaccctttagaaaccgtagatttcacccctgggaagaacaaacagaagcagagtgtgctaaactgtttcaaagacctaaaagaacttttttttatgacacccctatatacccaatatttccaataactccacttgtaaattttgacctaaaatatgaataaacaaggccaacaatattcacttagtggtgtctgtttctttaagtttaactatactaaactgactccgcctcccaataatttgggcgccaaaagggggctccgcccccttaaacccccgggggggtcccaataatttgggcgccaaaagggggctccgcccccttaaacccccgggggggcaaagccccccctaaccccccccaataagttacaaaactttaagtaatacttacattaaccgcaaaatttgcattgccaaccacaaacagaacaggaaaccacaaaatttgcattgccgaccacaaacgtatatgctaattaacttccctaaaccatgcctgtacttccccaaaaattaattaataatcaccgtcataaaaggaggagcctacaaaatatataaccaagtgcactttcgaatggctgagtttatgccgctagacggagacgacacagacaactgcgtcggctgattcaggg

SEQ ID NO: 2753 - protein, 649 aa, Betatorquevirus sp.
MPYYWRKRRQRWRRRRQPYRWRTRRIFQRRIWRQRKRRRNWVRRRLFKKKLLYIPLKQFQPKTIKRCNIIGNVCLFQGSPFRAINNYVQYLYSYVPDDEPGGGGWTLMVESLSSLWEDFQHLKNIWTRSNKGLPLVKYGGVTLTFFQSPYTDYAVQIFRCYPMTDTKYQHADLAPSRMMLKKDVIKIPSLETRKKRKPYKRIYVPPPSQMQNKWYFQKQICNIPLVMIAATAIDLRYPFASSSSKSNNITLKALNPNLFQRHDFDHPSDTLGYFPKSNTYLYSTKGIITTAKPKKIEQLIYLGNTKDNQPGRGIDKFSNWGNPFYHDYIDQGHPVWVCTKAPTQLQDPLVDNEWTELSQPYFIDIRYNPEKDTGEGNSIYLVPNYAGQHWDKPGNQDLILEGFPLYDMVWGFTDWQKKIKVATNVDNSWIVVITSPFFNEPLTSYIFIDESFIEGFGPYHTKNIPRQHQQHWSPKYTFQQKSINTIGLSGPAAPRPPYDNYMQARMKYNFHVKWGGCPKKLDEPYDPCSQPDWTIPSNINEGLQIQDPATDPKTELQEWDWRRDYVTEKAIARIQEHTPTDVSLQIPTESRHIAPILRQTRETTSSSDSDSETEKEKTPSLQEQITLLKRKQRQLKHRILHRLAHQSLE

SEQ ID NO: 2754 - protein, 102 aa, Betatorquevirus sp.; identical to SEQ ID NO: 2751

SEQ ID NO: 2755 - DNA, 2915 bp, Alphatorquevirus sp.
tcgggactggccgggctatgggcaaggctcttaaaaaagccatgtttctcggtcggccttacagaaagaagaggtcactgtcactgctacgcgtgcgagctccagaggcgaaaccacctgctatgagctggagacccccggtgcacaaccctaatgggatcgagagaaacctgtgggaggcattctttcgcatgcatgcttcagcttgtggttgtggcgatcttgttggccatcttactgtactggctggtcggtatggtgctcctcctcgtcccccggcccccggggctcccagaccaccgctgaaccggcagctggcccttccggcgccccccgctgatcctcagcaggccaacccgagatggcctggtggggacggtggagaagatggcgctggaggccccgccgctggcggcgccgtcgcagacgccgagtaccaagaagacgagctcaacgccctgttcgacgccgtcgagcaagaagagtaaggaggaggcgatgggggaggcggaggtggagacgggggtacagacgcagacttagactcagacgcagacgcagacgaaagaaaataagactgactcagtggaacccagctaaagtcaggagatgtactattaagggggtcctgcccatgatactgtgcggagcaggacgctcagggtttaactatggactgcacagcgacgactacaccatacagaaaccccttggccaaaacccccacgggggcggtatgagcacagtgacttttagcctacaggtgctatatgaccagtaccagaggtttatgaacaagtggtcgtactccaacgaccagctagacctagccagatactttggctgcacgttctggttttacagacacccagaagtagactttgtcgctcagtttgacaacgttcccccaatgaaaatggacgagaacacagcccctaacactcacccgtcattcctactacaaaacaaacacagggttaaaatccccagctttaaaaccaagccttttggcaaaaaaaaagttagagttacagtggggccccccaaactgtttgaagacaagtggtacagccagcatgacttgtgtaaggtgcccctagtcagttggcggttaaccgcagctgacttcaggtttccgttctgctcaccacaaactgacaacccttgctacactttccaggtattgcatgaagagtattacccagtaataggcacttctgctttagaaggtggaactaatcacaatcctacagacatacaaaaattagagaattttttatatggcaaaggtacccactatcaaacatttgccacagacacaagactaaaccctcaaaaacccacaataaacaacaacaaaaacacatataatccaagcggagccattgaaccaattatatggtcattaactgattttaataactttaaaaagcacacagacagcaactatggctactgcacctactgccctactgacgacttaatttctaaaattaaagcctacagagacaaaagattccaatggctaactcaaacgccaccaacaaacacctgccacataaatgccacctacgctcgaggaaaaattaaagagtgggaatatcacctaggatggtactcaaatatatttataggcaacctcagacacaacctagcattcaggacagcatacatagacgttacctataaccccattacagacaaaggagaaggcaacatagtgtggttccaatatgccaccaaacccaacacacagtacatagagtcacaggcaaaatgcaccatcacaaacatacccctatatgctgctttttatggctacgaagactatatccaaagaacactaggcccctatcaagatgtagagaccctaggcataatatgtgttaaatgtccctacacagatcccccactagttcacaaagacaaggataaggcagactggggctatgtattctacgacgttcactttggcaacggaaagaccccggagggcctgggccaagtgcacccttactggatgcagagatggagaccctatgtacagttccagaaagacactatgaacaagatagccagaaccggaccgttcagctacagagacgagacgccttccatcaccttgactgccgggtacaagtttcgttttaactgggggggcgactctatatttccacagattattaaaaacccctgcccagacagcggggtacgaccttcaaccagtagagagcgtcgctcagtacaagtcgttagcccgctcacaatggggccagagtacatattccaccggtgggactggcgacgggggttctttaatacaaaaactctcaaaagaatgcttgaaaaatcaattaatgatgaagaatattcaacaggcccaaaggtccctcgatggtttcccccactcgacaaccaagagcaagaaggcgtctcagatacagagacgacaaccacgcagtcctcgcaagaagaagccgctcaagaagccctccaagaagtccaagaggcgtcgctacagcagcacctcctccagcagtaccgagagcagcgaagaatcggaaagcaactccaactcgtcatgctccaactcaccaagacgcagagcaacctgcacataaatccccgtgtccttggccatgcataaataaagtgtacatgtttccccccgaaaaaccaatgcccatacacgggtaccacgggtgggagacagagtatcaagcctgcaaagcctttgacaggccccctagaaactacctgtcagacaaacccatctatccctggcttccccgctcccaacctgaattcaaagtcagttttaagctcggttttcaataaacaaggccgtgggaatttcacttgtcggtgtctacctcttaaggtcactaagcactccgagcgtcagcgaggagtgc

SEQ ID NO: 2756 - protein, 761 aa, Alphatorquevirus sp.
MAWWGRWRRWRWRPRRWRRRRRRRVPRRRAQRPVRRRRARRVRRRRWGRRRWRRGYRRRLRLRRRRRRKKIRLTQWNPAKVRRCTIKGVLPMILCGAGRSGFNYGLHSDDYTIQKPLGQNPHGGGMSTVTFSLQVLYDQYQRFMNKWSYSNDQLDLARYFGCTFWFYRHPEVDFVAQFDNVPPMKMDENTAPNTHPSFLLQNKHRVKIPSFKTKPFGKKKVRVTVGPPKLFEDKWYSQHDLCKVPLVSWRLTAADFRFPFCSPQTDNPCYTFQVLHEEYYPVIGTSALEGGTNHNPTDIQKLENFLYGKGTHYQTFATDTRLNPQKPTINNNKNTYNPSGAIEPIIWSLTDFNNFKKHTDSNYGYCTYCPTDDLISKIKAYRDKRFQWLTQTPPTNTCHINATYARGKIKEWEYHLGWYSNIFIGNLRHNLAFRTAYIDVTYNPITDKGEGNIVWFQYATKPNTQYIESQAKCTITNIPLYAAFYGYEDYIQRTLGPYQDVETLGIICVKCPYTDPPLVHKDKDKADWGYVFYDVHFGNGKTPEGLGQVHPYWMQRWRPYVQFQKDTMNKIARTGPFSYRDETPSITLTAGYKFRFNWGGDSIFPQIIKNPCPDSGVRPSTSRERRSVQVVSPLTMGPEYIFHRWDWRRGFFNTKTLKRMLEKSINDEEYSTGPKVPRWFPPLDNQEQEGVSDTETTTTQSSQEEAAQEALQEVQEASLQQHLLQQYREQRRIGKQLQLVMLQLTKTQSNLHINPRVLGHA

SEQ ID NO: 2757 - protein, 156 aa, Alphatorquevirus sp.
MGKALKKAMFLGRPYRKKRSLSLLRVRAPEAKPPAMSWRPPVHNPNGIERNLWEAFFRMHASACGCGDLVGHLTVLAGRYGAPPRPPAPGAPRPPLNRQLALPAPPADPQQANPRWPGGDGGEDGAGGPAAGGAVADAEYQEDELNALFDAVEQEE

SEQ ID NO: 2758 - protein, 147 aa, Alphatorquevirus sp.
MVSPTRQPRARRRLRYRDDNHAVLARRSRSRSPPRSPRGVATAAPPPAVPRAAKNRKATPTRHAPTHQDAEQPAHKSPCPWPCINKVYMFPPEKPMPIHGYHGWETEYQACKAFDRPPRNYLSDKPIYPWLPRSQPEFKVSFKLGFQ

SEQ ID NO: 2759 - DNA, 2914 bp, Betatorquevirus sp.
cgggagctgaaggtgagtgaaaccaccgaaatctaggggcaattcgggctgaatcagtctagcggaacgggcaacaaacttaaaaaaacttttatttttacagatgagcaaactgcttaaagagccactatatcaaggaaaaaaccttgaaaattgctgggtaaacaattggcacagctctcacgaattattctgcggctgtaacaaagcccttcaacactttctggaaataattaatcgccaaaacaaagcacctaagccaccaaaagaaattgaaaatataatatgccttattactggagaaaaagaagacaaagatggagacgccgtagacaaccttatcgatggcgaactagaagaatttttcaaagacgaatttggagacaacgaaaaagaagaagaaactgggtaagaagacgcctttttaaaaaaaaactattatatatacctttaaaacaatttcaaccaaagactataaaacgctgtaatattattggaaatgtatgcttatttcaaggatctccttttagagctattaacaattatgtacaatacttatattcctatgtaccagatgacgaaccgggagggggagggtggactctaatggttgagagtttaagtagcttatgggaagacttccaacacttaaaaaatatatggactcgatcaaacaaaggtttacctttagtaaaatacggaggagtcacattaaccttttttcaaagtccatatacagactatgcagtacaaatttttagatgctacccaatgacagacacaaaataccaacatgcagacttagcaccaagtcgaatgatgctaaaaaaagatgttattaaaataccaagcttagaaacaagaaaaaaaagaaaaccatacaaaaaaatatatgtaccaccaccttcccaaatgcaaaacaaatggtactttcaaaagcaaatttgtaatattcctttagtaatgatagcagcaacagctatagacttaagatatccctttgcatccagtagcagcaaaagtaataacataacattaaaagcactaaacccaaacttatttcaaagacatgactttgatcacccatcagacaccataggctactttcctaaaagtaacacatacctatacgccacaaaaggaatatctaccacacaaaaaccaactaagaaatcggagttaatttacttaggaaacacaaaagacaatcaaccaggaaaaggaacagatacatttgcagattggggaaacccattctatcatgactatatagaccaaggtcacccagtatgggtatgcacaaaacctccaacacaactaaaagataaattaacagacactgagtggacagaattatctcaaccatactttatagacattagatataacccagaaaaagatacaggagcaggaaacagtattttcttagtaccaaactatgccggagaccactgggataaaccagctaacccagacttagtgttagaaggctttcctttgtatgacatggtatggggatttactgattggcaaaaaaaaattaaagtagcaacaaacgtagataactcatggatagtggtcataacatctccattttttaatgaacctcttacaagctatatatttatagacgaaagttttgtagaaggatttggtccatatcacacaaaaaacattccaagacaacaccaacaacactggtcacctaaatttacttttcaacaaaaatcaataaacacaataggactatcaggacctgcagcacccagaccagcttatgacaattacatgcaagcaagaatgaaatataactttcatgtaaaatggggaggatgccctaaaaagttagatgaaccttacgatccttgttcacagccagactggactatacccagtaacatcaatgagggattacaaatccaggatccagcaacagaccccaaaaccgaactccaagagtgggactggagacgagattacgttacagaaaaagctattactagaatccaagaacacacgccaactgatgtctctttacaaatccctacagaatccagacacatcgctccagtactacgccaaaccagggaaacaacgagttcatcggactcggactcagaaacggaaaaagagaaaacaccatcactccaggaacagatcaccctcctcaagcgaaagcagcgacagctcaagcacaagatcctctacagactagcacaccaaagtttagaataataaaagacaaaacagtaatagagctttttccaaaacctaaaccctttagaaaccgtagatttcacccctgggaagaacaaacagaagcagaatgtgctaaaatctttcacagacctaaaagaacttttttctatgacacccctatatacccaatatttccaataactccacttgtaaattttgacctaaaatatgaataaacaaggccaacaatattcacttagtagtgtctgtttctttaagttgaactatactaaacggactccgcctcccaaaaattcgggcgccaaaaggggggttgaactatactaaacggactccgcctcccaaaaattcgggcgccaaaagggggctccgcccccttaaacccccgggggggcaaagccccccctaacccccccaataagttactaaactttacataatacttacactaaccgcaaaatttgcattgctgaccacaaacagaacaggaaaccacataatttgcattgccaaccacaaacgtttatgctaattaacttccctaaaccatacctctacttccctaaaaattaattaataatcaccgtcataaaaggaggagcttacaaactatataaccaactacacttccgaatggctgagtttatgccgctagacggagacgacacagacaactgcgtcggctgattcaggg

SEQ ID NO: 2760 - protein, 649 aa, Betatorquevirus sp.
MPYYWRKRRQRWRRRRQPYRWRTRRIFQRRIWRQRKRRRNWVRRRLFKKKLLYIPLKQFQPKTIKRCNIIGNVCLFQGSPFRAINNYVQYLYSYVPDDEPGGGGWTLMVESLSSLWEDFQHLKNIWTRSNKGLPLVKYGGVTLTFFQSPYTDYAVQIFRCYPMTDTKYQHADLAPSRMMLKKDVIKIPSLETRKKRKPYKKIYVPPPSQMQNKWYFQKQICNIPLVMIAATAIDLRYPFASSSSKSNNITLKALNPNLFQRHDFDHPSDTIGYFPKSNTYLYATKGISTTQKPTKKSELIYLGNTKDNQPGKGTDTFADWGNPFYHDYIDQGHPVWVCTKPPTQLKDKLTDTEWTELSQPYFIDIRYNPEKDTGAGNSIFLVPNYAGDHWDKPANPDLVLEGFPLYDMVWGFTDWQKKIKVATNVDNSWIVVITSPFFNEPLTSYIFIDESFVEGFGPYHTKNIPRQHQQHWSPKFTFQQKSINTIGLSGPAAPRPAYDNYMQARMKYNFHVKWGGCPKKLDEPYDPCSQPDWTIPSNINEGLQIQDPATDPKTELQEWDWRRDYVTEKAITRIQEHTPTDVSLQIPTESRHIAPVLRQTRETTSSSDSDSETEKEKTPSLQEQITLLKRKQRQLKHKILYRLAHQSLE

SEQ ID NO: 2761 - protein, 102 aa, Betatorquevirus sp.; identical to SEQ ID NO: 2736

SEQ ID NO: 2762 - DNA, 2914 bp, Alphatorquevirus sp.
ctctataagtcactaagcactccgagcgaagcgagggggcaattcgggctcgggactggccgggccctgggcaaggctcttaaaaaagctatgtttctacgcagagctcaccagaaaaggatactgctactgcaaattgtgccagctacaccgcaggcacctgccatgagctttcgcgcacccaccattcaaggtggagtccgagaccagcaatggttcgaggcctgtattcgatcacacgccgctttctgtggctgtggcgatcccgtgcttcattttaataacattgctgctcgctttcactatctgcctgctacctcctcgcctctggaccctaccggaggagcgccgccgcgccgcccgcagctacgccgccttgcagcgctcccggcggcgccccccagcacctctgagagccagccatggcgtggtggtggtggagacgatggcgccggtggcccagacgccgctggaggacccgtcgccgacgccgagtacgaaccagaagacctagacgacctgttcgccgctatcgaagcagatacacagtaaggaggcgaaggcggagagggtggcgagggcgacgtaggcgcagactgtacagacgcagatacactataaggagaaaaagaaagaaactcatactgaaacagtggcagcccgccaatgttagaaaatgcaaaataaggggcctgtttccaatagttatctgtggacacggcaagagtgccaataactatgccctacactcggacgacgtactaccaatgagacaggcttttggaggggctctaagcactgtatcttttagcctaaaagtactgtatgatcagtatttaagacacctgaacagatggagcacctcaaacgatgtgctagaccttgccaggtacctaggatgcaccttttggttttacagagacaaaaaaactgactacttagtgcagtatgacatctctgctccctacaagctagacaaagacagcggaccgtcctaccatccaggagtactcatgcaagccaaacacaaagtactagtgcccagttttgacacgcaccccaaaggaaaagctaaagtaaaaattagaattaagccccccaaactttttatagataagtggtactctcaagaggatctgtgtaccgttaatcttgtaacatttgtggtcagcctagcttccttctcacatccgttctgcccaccactaacgaacaacccttgtgtaaccttccaagtgttgaacaacttctacaattccgttataggttcctcaattaatgttgcagacactacagtaaactcagtcttcaataactttttatataacaaaggagccttttaccaacaagtactagtagactcttacattaaagaaattaaaacaaatcctgatggctctcctgtagttgcaggccctaacgatagaccctcaacaagcgaaatgagtgcttataacgaatgggtaaaatctaaatttaaagtaccaggaacatctgttcactacaacttttgcacatacaaacctgacagtgccaaattaaatacacttagacaatactactttcattgggaaactgcacagtccacaaaccataaatttaatgtagaacacgtaccacacgcgggcacaaaacctacaaaagactggtgggagtatagaacaggcctattttcacctatatttcttagtccatacagaaccagtcccatagacagctggttgctggcatacagagacgtgtcctacaatccactaaatgacaagggagtaggcaaccgagtatggatgcagagtctagtaaaaccagacacccagttcacactgccctcatgtgtatttgtactagaagacaaacccctgtggtgctgtttctatggctatactgactttataaagagtgtcagagagggccaagacatagactttgaaaacattatttgcattcagtgtccttacacagagcctcctctatatgaaaagcacaaccccaacatgggcttcatagtatatgacagcaactttggcaatggcaaatggctagacggaaccgggttcgtcccggtagaataccagtgccgctggcggccctgcatagctttccagcaacaggtactaacagacattaccatgagcgggcccttcagctacaaagacgatgttaaaaacacctgcatacaggccaaatacagatttgactttaaatggggcggcaatattctttatcagcagaccatcagaaacccatgtaaagacggacaagctaccgattcccatagacagcctagagacgtacaagtcactgacccgcttaccatgggaccccgatacgctttccaccaatgggactggcgacgtgggtggcttagtgacaaagctctcaaaagaatgctccagaaaccgctcgattttgaactgtatccaatcaatccaaagagacctagactattccctcccacagaagcaggagaaggagaggtcccaaaagaaagctcattttcagaggaagaaagcgagccgtcctcgcaagaagagacgaggccggagaggctccagctcaagctccgacagcagctccgagagcagcgagagctccgagtccacctcaagcacctcttccagcagctcctcaagacacaagcggggctccacctcaacccgctcttattcaaccagcaataaacaaagttcttctgtttccagaaatgggtccaaagcccgctcctactagtggagactgggaaacagaataccaggcctgtaaattctgggacagacctcccagaaaatttctcaccgatacacccttttatccctggatgcctccggcacccccaaaattctctgttagtttcaaactaggcttcaaaccctaaataaacaaggccatacactgttcacttgtcggtgtctac

SEQ ID NO: 2763 - protein, 752 aa, Alphatorquevirus sp.; identical to SEQ ID NO: 2391

SEQ ID NO: 2764 - protein, 161 aa, Alphatorquevirus sp.; identical to SEQ ID NO: 503

SEQ ID NO: 2765 - protein, 60 aa, Alphatorquevirus sp.; identical to SEQ ID NO: 504

SEQ ID NO: 2766 - DNA, 2914 bp, Alphatorquevirus sp.; identical to SEQ ID NO: 2762

SEQ ID NO: 2767 - protein, 752 aa, Alphatorquevirus sp.; identical to SEQ ID NO: 2391

SEQ ID NO: 2768 - protein, 161 aa, Alphatorquevirus sp.; identical to SEQ ID NO: 503

SEQ ID NO: 2769 - protein, 60 aa, Alphatorquevirus sp.; identical to SEQ ID NO: 504

SEQ ID NO: 2770 - DNA, 2914 bp, Betatorquevirus sp.
cgggagctgaaggtgagtgaaaccaccgaaatctaggggcaattcgggctgaatcagtctagcggaacgggcaagaaacttaaaataacttttatttttacagatgagcaaactgcttaaagagccactatatcaaggaaaaaaccttgaaaattgctgggtaaacaattggcacagctctcacgaattattttgcggctgtaacaaagcccttcaacactttctggaaataattaatcgccaaaacaaagcaccaaagccaccacaagaaattaaaaatataatatgccttattactggagaaaaagaagacaaagatggagacgccgtagacaaccttatcgatggcgaactagaagaatttttcaaagacgaatttggagacaacgaaaaagaagaagaaactgggtaagaagacgcctttttaaaaaaaaactattatacatacctttaaaacaatttcaaccaaagactataaaacgctgtaatattattggaaatgtatgcttatttcaaggatctccttttagagctattaacaattatgtacaatacttatattcctatgtaccagatgatgaaccgggagggggaggatggactctaatggttgaaagtttaagtagcttatgggaagacttccaacacttaaaaaatatatggacacgatcaaacaaaggtttacctttagtaaaatacggaggagttacattaaccttttttcaaagtccatatacagactatgcagtacaaatatttagatgctacccaatgacagacacaaaataccaacatgcagacctagcaccaagtagaatgatgctaaaaaaagacgttattaagatcccaagcttagaaacaagaaaaaaaagaaaaccatacaaaagaatatatgtgccacccccttcccaaatgcaaaacaaatggtactttcaaaagcaaatttgtaatattcctttagtaatgatagcagcaactgctatagacttaagatatccctttgcatgcagtagcagcaaaagtaataacataacattaaaagcactaaaccccaacttatttcaaagacatgactttgatcacccatcagacacgttaggctactttcctaaatctaacacatacctatactccacaaaaggaataagtaccacagcaaaaccaacaacaaaaagtcagctaatttacttaggtaacacaaaagacaatcaaccaggaaagggaatagataaattttcagagtggggaaacccattctatcatgactacatagaccaaggtcacccagtatgggtatgcacaaaagctccaacacaactacaagaaactttagtagacagtgactggacacaattatctcaaccatactttatagacattagatataaccctgaaaaagacacaggagaaggaaacagtattttcttagtaccaaactatgcaggacagcactgggataaaccaggtaaccaagacttaatattagaaggctttccgttatatgacatggtatggggatttactgattggcaaaaaaaaataaaagtagcaacaaacatagataactcatggatagttgtaataacatctccattttttaatgaacctcttacaagctatatatttatagacgaaagttttatagaaggatttgggccatatcacacaaaaaacattccaagacaacaccaacaacactgggcacctaaatttacttttcaacaaaaatcaataaacacaataggactatcaggacctgcagcacccagaccaccttatgacaattacatgcaagccagaatgaaatataactttcatgtaaaatggggaggatgccctaaaaagttagatgaaccttacgatccttgttcacagccagactggactatacccagtaacatcaatgagggattacaaatccaggatccagcaacagaccccaaaaccgaactccaagagtgggactggagacgagattatgttacagaaacagctattgctagaatccaagaacacacgccaactgatgtctctttacaaatccctacagaatccagacacatcgctccaatactacgccaaaccagggaaacaacgagttcatcggactcggactcagaaacggaaaaagagaaaacaccatcactccaggaacagatcaccctcctcaagcgaaagcagcgacagctcaagcacaggatcctccacagactagcacaccaaagtttagaataataaaagacaaaacagtagtagaactttttcctaaacctaaaccctttagaaaccgtagatttcacccctgggaagaacaaacagaagcagaatgtgctaaactgtttcaaagacctaaaagaacttttttttatgacacccctatatacccaatatttccaataactccacttgtaaattttgacctaaaatatgaataaacaaggccaacaatattcacttagtggtgtctgtttctttaagtttaactatactaaactgactccgcctcccaataatttgggcgccaaaagggggctccgcccccttaaacccccgggggggtcccaataatttgggcgccaaaagggggctccgcccccttaaacccccgggggggcaaagccccccctaacccccccaataagttacaaaactttaagtaatacttacattaaccgcaaaatttgcattgccaaccacaaacagaacaggaaaccacaaaatttgcattgccgaccacaaacgtatatgctaattaacttccctaaaccatgcctgtacttccccaaaaattaattaataatcaccgtcataaaaggaggagcctacaaaatatataaccaagtgcactttcgaatggctgagtttatgccgctagacggagacgacacagacaactgcgtcggctgattcaggg

SEQ ID NO: 2771 - protein, 649 aa, Betatorquevirus sp.; identical to SEQ ID NO: 2750

SEQ ID NO: 2772 - protein, 102 aa, Betatorquevirus sp.; identical to SEQ ID NO: 2751

SEQ ID NO: 2773 - DNA, 2914 bp, Betatorquevirus sp.
cgggagctgaaggtgagtgaaaccaccgaaatctaggggcaattcgggctgaatcagtctagcggaacgggcaagaaacttaaaataacttttatttttacagatgagcaaactgcttaaagagccactatatcaaggaaaaaaccttgaaaattgctgggtaaacaattggcacagctctcacgaattattttgcggctgtaacaaagcccttcaacactttctggaaataattaatcgccaaaacaaagcaccaaagccaccacaagaaattaaaaatataatatgccttattactggagaaaaagaagacaaagatggagacgccgtagacaaccttatcgatggcgaactagaagaatttttcaaagacgaatttggagacaacgaaaaagaagaagaaactgggtaagaagacgcctttttaaaaaaaaactattatacatacctttaaaacaatttcaaccaaagactatcaaacgctgtaatattattggaaatgtatgcttatttcaaggatctccttttagagctattaacaattatgtacaatacttatattcctatgtaccagatgatgaaccgggagggggaggatggactctaatggttgaaagtttaagtagcttatgggaagacttccaacacttaaaaaatatatggacacgatcaaacaaaggtttacctttagtaaaatacggaggagttacattaaccttttttcaaagtccatatacagactatgcagtacaaatatttagatgctacccaatgacagacacaaaataccaacatgcagacctagcaccaagtagaatgatgctaaaaaaagacgttattaagatcccaagcttagaaacaagaaaaaaaagaaaaccatacaaaagaatatatgtgccacccccttcccaaatgcaaaacaaatggtactttcaaaagcaaatttgtaatattcctttagtaatgatagcagcaactgctatagacttaagatatccctttgcatccagtagcagcaaaagtaataacataacattaaaagcactaaaccccaacttatttcaaagacatgactttgatcacccatcagacacgttaggctactttcctaaatctaacacatacctatactccacaaaaggaataattaccacagcaaaaccaaaaaaaatagaacagctaatttacttaggtaacacaaaagacaatcaaccaggaaggggaatagataaattttcaaactggggaaacccattctatcatgactacatagaccaaggtcacccagtatgggtatgcacaaaagctccaacacaactacaagaccctttagtagacaatgaatggacagaattatctcaaccatactttatagacattagatataaccctgaaaaagacacaggagaaggaaacagtatttacttagtaccaaactatgcaggacagcactgggataaaccgggtaaccaagacttaatattagaaggctttccgttatatgacatggtatggggatttactgattggcaaaaaaaaataaaagtagcaacaaacgtagataactcatggatagttgtaataacatctccattttttaatgaacctcttacaagctatatatttatagacgaaagttttatagaaggatttgggccatatcacacaaaaaacattccaagacaacaccaacaacactggtcacctaaatatacttttcaacaaaaatcaataaacacaataggactatcaggacctgcagcacccagaccaccttatgacaattacatgcaagccagaatgaaatataactttcatgtaaaatggggaggatgccctaaaaagttagatgaaccttacgatccttgttcacagccagactggactatacccagtaacatcaatgagggattacaaatccaggatccagcaacagaccccaaaaccgaactccaagagtgggactggagacgagattatgttacagaaaaagctattgctagaatccaagaacacacgccaactgatgtctctttacaaatccctacagaatccagacacatcgctccaatactacgccaaaccagggaaacaacgagttcatcggactcggactcagaaacggaaaaagagaaaacaccatcactccaggaacagatcaccctcctcaagcgaaagcagcgacagctcaagcacaggatcctccacagactagcacaccaaagtttagaataataaaagacaaaacagtagtagaactttttcctaaacctaaaccctttagaaaccgtagatttcacccctgggaagaacaaacagaagcagactaaaccctttagaaaccgtagatttcacccctgggaagaacaaacagaagcagaatgtgctaaactgtttcaaagacctaaaagaacttttttttatgacaccccaatatacccaatatttccaataactccacttgtaaattttgacctaaaatatgaataaacaaggccaacaatattcacttagtggtgtctgtttctttaagtttaactatactaaactgactccgcctcccaataatttgggcgccaaaagggggctccgcccccttaaacccccgggggggcaaagccccccctaacccccccaataagttacaaaactttaagtaatacttacattaaccgcaaaatttgcattgccaaccacaaacagaacaggaaaccacaaaatttgcattgccgaccacaaacgtatatgctaattaacttccctaaaccatgcctgtacttccccaaaaattaattaataatcaccgtcataaaaggaggagcctacaaaatatataaccaagtgcactttcgaatggctgagtttatgccgctagacggagacgacacagacaactgcgtcggctgattcaggg

SEQ ID NO: 2774 - protein, 649 aa, Betatorquevirus sp.; identical to SEQ ID NO: 2753

SEQ ID NO: 2775 - protein, 102 aa, Betatorquevirus sp.; identical to SEQ ID NO: 2751

SEQ ID NO: 2776 - DNA, 2914 bp, Betatorquevirus sp.
gcgggagccgaaggtgagtttaccaccgtagtctaggggcaattcgggctagatcagtctagcggaacgggcaagaaatttaaaatatttattttacagatgaaaattgtcgatccaaaatggacaaccaaacagaaaattaacaactggatgaacctactagctcacatccacgacactaactgcaactgcgacgaaccacttcaacacaccattcaccttattttagaaaaagaaccaaacctaccattatctgaagatacaaaacaactaatgaaaaaatgccttggttcagaagatacaaaagaagatggagacgccgtagacggccttggtataggagaactagagcgccttttcgcagaagatactggagaagatactgggtaagcaaaagaaaaagaaaacttaaaaaaataactgtaaaacaatttcaaccagaaaaaattaacaaactaagtgtaaaaggaatttatcctttatttttaactactcatgacagaatatctcacaacttaattcaagtaatagacagcaccacgcctcacagaggccccggaggcggtggattctctataatgcaattttctttacaaggactatatgaactatttttaaaatcacaaaactggtggacaaaaagtaattgtaacttaccgctaataaggtttaatggtgttactttaaaattgtatagaactgaacatgtagactatattgtaacaattcaacaatgctatccaatgtgctgtaatgatataatgtttatgagtactcaaccaagtataatgctaatgacaaaaggatccatcaaagtatcatgcagacaaaacacaagaaacaaaaaaccatataaaatactaagaatatcccctccggcacaaatgctaacaaaatggtactttcaatccttacttgctaaaacaggcttactcctcataaaagctacagcagcctcctttgatagattttacacccactcctttgcatcatcaacaacaatgggctttacttctctaaatacaacaacttttcaataccacaattttaaacaatttccacaaacaacaggctacaaaccacaaaacaatttatacttatggggtgctgtaaaaccaacaattccaaatcctatgaatacaaaagtatcacaacttatatacttaggacaaactactttactacaagaaggccaacccttagaaaactttaaaaacaaattagagacctatttaacagcaaaagacaaatggggaaatccctttcaccctagattttttacatatgattaccaagtattttcaacaaatcaaccaataaataatataatatccaaagctaaacaaaatcaaaatctaaacaaaacaatagaccaggtattttcaacagaatttacacctagaacaattccactacaaacacaatgcagatataatccacttgcagacaaaggaactggaaacaaaatatttcttgttagcattgttagtgaccaagaaacctggcatgaacctaaagatgaaagactaatgagacaaaatttacctttatggctattaacttggggatggtcagactggcaaaaaaaattagcccaaatacatcattttgactatgactatgtaacagttataaaaagcccctatatagaacctactttaaacttttatataccgttagatgacagttttacaaattggcctccatcttccccatatggaacagaccttaatcaaagtgactctcaaaactggtttcctaaaaacaattttcaagttgtagcactaaataatatagctgcttcagggcctggaactgtaaaacttagaaaagatcaaagttgtgaagctcatgtattttataaatttcactttaagcttggagggtgcccagcacccatggaaaccatctgtaacccaattaacgaaccagtgtatcccgtccccgataaccagcttcaaacaccttcgttgcagagtccagaaacacccctacaaaccttcctatacgcattcgacgaaagacggggacaaattacaactaaagctgcaaagcgcctcaaaacagactttacaactagagaaccttttatctcaactacaggaacagccatggaagtcccatccgaccaaagacaaccggaggaggactcatcgacatcggaagaagagaaagaagagatgcagctccagctcgagtacctccagcgaagacaacgcaagctccgcaagcgagtcctccagctattagacatacaaaatatgtaataaaacatcaaaaatgtagaattaacctgtttaatgattacaaacctaaaaatcgtagaatgactcctaaagaatttgaggaggagctatggcaagctagcatttttaaacgtcctcctagaacaatgttacatgatactccattttatccctggctacctgtaaccccccttgctaatcaaccatttgttaatttcaagcttaactatactgaataaaggcctgcaaacttccacttgacgtgtccatttattaaagtttaaacttatataaacatccaccactctccctaatacgcaggcgcacaagggggctccgcccccttaaacccccaagggggctccgcccccttacacccccggggctccgcccccttacacccccaagggggctccgcccccttacaccccctaattaatattcaacaggaaaaccacataattagaattgcccaccacaaaccgtcacttacttccccattttacaaaacttcctttttttttcataaatattcattaaattaattaataatcaccgtaaatccggggaggagttagcaaactatataactaactacacagacgaatggctgagtttatgccgctagacggagagcacatcacacagtgactgggcgctgatcttgg

SEQ ID NO: 2777 - protein, 661 aa, Betatorquevirus sp.
MPWFRRYKRRWRRRRRPWYRRTRAPFRRRYWRRYWVSKRKRKLKKITVKQFQPEKINKLSVKGIYPLFLTTHDRISHNLIQVIDSTTPHRGPGGGGFSIMQFSLQGLYELFLKSQNWWTKSNCNLPLIRFNGVTLKLYRTEHVDYIVTIQQCYPMCCNDIMFMSTQPSIMLMTKGSIKVSCRQNTRNKKPYKILRISPPAQMLTKWYFQSLLAKTGLLLIKATAASFDRFYTHSFASSTTMGFTSLNTTTFQYHNFKQFPQTTGYKPQNNLYLWGAVKPTIPNPMNTKVSQLIYLGQTTLLQEGQPLENFKNKLETYLTAKDKWGNPFHPRFFTYDYQVFSTNQPINNIISKAKQNQNLNKTIDQVFSTEFTPRTIPLQTQCRYNPLADKGTGNKIFLVSIVSDQETWHEPKDERLMRQNLPLWLLTWGWSDWQKKLAQIHHFDYDYVTVIKSPYIEPTLNFYIPLDDSFTNWPPSSPYGTDLNQSDSQNWFPKNNFQVVALNNIAASGPGTVKLRKDQSCEAHVFYKFHFKLGGCPAPMETICNPINEPVYPVPDNQLQTPSLQSPETPLQTFLYAFDERRGQITTKAAKRLKTDFTTREPFISTTGTAMEVPSDQRQPEEDSSTSEEEKEEMQLQLEYLQRRQRKLRKRVLQLLDIQNM

SEQ ID NO: 2778 - protein, 96 aa, Betatorquevirus sp.
MKIVDPKWTTKQKINNWMNLLAHIHDTNCNCDEPLQHTIHLILEKEPNLPLSEDTKQLMKKCLGSEDTKEDGDAVDGLGIGELERLFAEDTGEDTG

SEQ ID NO: 2779 - protein, 63 aa, Betatorquevirus sp.
LFNDYKPKNRRMTPKEFEEELWQASIFKRPPRTMLHDTPFYPWLPVTPLANQPFVNFKLNYTE

SEQ ID NO: 2780 - DNA, 2914 bp, Betatorquevirus sp.
gcgggagccgaaggtgagtttaccaccgtagtctaggggcaattcgggctagatcagtctagcggaacgggcaagaaatttaaaatatttattttacagatgaaaattgtggatccaaaatggacaaccaaacagaaaattaacaactggatgaacctactagctcacatccacgacactaactgcaactgcgacgaaccacttcaacacaccattcaccttattttagaaaaagaaccaaacctaccattatctgaagatacaaaacaactaatgaaaaaatgccttggttcagaagatacaaaagaagatggagacgccgtagacggccttggtataggagaactagagcgccttttcgcagaagatactggagaagatactgggtaagcaaaagaaaaagaaaacttaaaaaaataactgtaaaacaatttcaaccagaaaaaattaacaaactaagtgtaaaaggaatttatcctttatttttaactactcatgacagaatatctcacaacttaattcaagtaatagacagcaccacgcctcacagaggccccggaggcggtggattctctataatgcaattttctttacaaggactatatgaactatttttaaaatcacaaaactggtggacaaaaagtaattgtaacttaccgctaataaggtttaatggtgttactttaaaattgtatagaactgaacatgtagactatattgtaacaattcaacaatgctatccaatgtgctgtaatgatataatgtttatgagtactcaaccaagtataatgctaatgacaaaaggatccatcaaagtatcatgcagacaaaacacaagaaacaaaaaaccatataaaatactaagaatatcccctccggcacaaatgctaacaaaatggtactttcaatccttacttgctaaaacaggcttactcctcataaaagctacagcagcctcctttgatagattttacacccactcctttgcatcatcaacaacaatgggctttacttctctaaatacaacaacttttcaataccacaattttaaacaatttccacaaacaacaggctacaaaccacaaaacaatttatacttatggggtgctgtaaaaccaacaattccagatcctatgaatacaaaagtatcacaacttatatacttaggacaaactactttactacaagaaggccaacccttagaaaactttagagcaaatttagaggactatttaacagcaaaagacaaatggggaaatccctttcaccctagattttttacatatgattaccaagtattttcaacaaatcaaccaataaataatataatatccaaagctaaacaaaatcataatctaaacaaaacaatagaccaggtattttcaacagaatttacacctagaacaattccactacaaacacaatgcagatataatccacttgcagacaaaggaactggaaacaaaatatttcttgttagcattgttagtgaccaagaaacctggcatgaacctaaagatgaaagactaatgagacaaaatttacctttatggctattaacttggggatggtcagactggcaaaaaaaattagcccaaatacatcattttgactatgactatgtaacagttataaaaagcccctatatagaacctactttaaacttttatataccgttagatgacagttttacaaattggcctccatcttccccatatggaacagaccttaatcaaagtgactctcaaaactggtttcctaaaaacaattttcaagttgtagcactaaataatatagctgcttcagggcctggaactgtaaaacttagaaaagatcaaagttgtgaagctcatgtattttataaatttcactttaagcttggagggtgcccagcacccatggaaaccatctgtaacccaattaacgaaccagtgtatcccgtccccgataaccagcttcaaacaccttcgttgcagagtccagaaacacccctacaaaccttcctatacgcattcgacgaaagacggggacaaattacaactaaagctgcaaagcgcctcaaaacagactttacaactagagaaccttttatctcaactacaggaacagccatggaagtcccatccgaccaaagacaaccggaggaggactcatcgacatcggaagaagagaaagaagagatgcagctccagctcgagtacctccagcgaagacaacgcaagctccgcaagcgagtcctccagctattagacatacaaaatatgtaataaaacatcaaaaatgtagaattaacctgtttaatgattacaaacctaaaaatcgtagaatgactcctaaagaatttgaggaggagctatggcaagctagcatttttaaacgtcctcctagaacaatgttacatgatactccattttatccctggctacctgtaaccccccttgctaatcaaccatttgttaatttcaagcttaactatactgaataaaggcctgcaaacttccacttgacgtgtccatttattaaagtttaaacttatataaacatccaccactctccctaatacgcaggcgcacaagggggctccgcccccttaaacccccaagggggctccgcccccttacacccccggggctccgcccccttacacccccaagggggctccgcccccttacaccccctaattaatattcaacaggaaaaccacataattagaattgcccaccacaaaccgtcacttacttccccattttacaaaacttcctttttttttcataaatattcattaaattaattaataatcaccgtaaatccggggaggagttagcaaactatataactaactacacagacgaatggctgagtttatgccgctagacggagagcacatcacacagtgactgggcgctgatcttgg

SEQ ID NO: 2781 - protein, 661 aa, Betatorquevirus sp.
MPWFRRYKRRWRRRRRPWYRRTRAPFRRRYWRRYWVSKRKRKLKKITVKQFQPEKINKLSVKGIYPLFLTTHDRISHNLIQVIDSTTPHRGPGGGGFSIMQFSLQGLYELFLKSQNWWTKSNCNLPLIRFNGVTLKLYRTEHVDYIVTIQQCYPMCCNDIMFMSTQPSIMLMTKGSIKVSCRQNTRNKKPYKILRISPPAQMLTKWYFQSLLAKTGLLLIKATAASFDRFYTHSFASSTTMGFTSLNTTTFQYHNFKQFPQTTGYKPQNNLYLWGAVKPTIPDPMNTKVSQLIYLGQTTLLQEGQPLENFRANLEDYLTAKDKWGNPFHPRFFTYDYQVFSTNQPINNIISKAKQNHNLNKTIDQVFSTEFTPRTIPLQTQCRYNPLADKGTGNKIFLVSIVSDQETWHEPKDERLMRQNLPLWLLTWGWSDWQKKLAQIHHFDYDYVTVIKSPYIEPTLNFYIPLDDSFTNWPPSSPYGTDLNQSDSQNWFPKNNFQVVALNNIAASGPGTVKLRKDQSCEAHVFYKFHFKLGGCPAPMETICNPINEPVYPVPDNQLQTPSLQSPETPLQTFLYAFDERRGQITTKAAKRLKTDFTTREPFISTTGTAMEVPSDQRQPEEDSSTSEEEKEEMQLQLEYLQRRQRKLRKRVLQLLDIQNM

SEQ ID NO: 2782 - protein, 96 aa, Betatorquevirus sp.; identical to SEQ ID NO: 2778

SEQ ID NO: 2783 - protein, 63 aa, Betatorquevirus sp.; identical to SEQ ID NO: 2779

SEQ ID NO: 2784 - DNA, 2914 bp, Betatorquevirus sp.
cgggagccgaaggtgagtgaaaccaccggagtctaggggcaattcgggctagatcagtctggcggaacgggcaagaaactaaaaacatattttttttttagatgagcaaacaactacaaaattcagtatattctggaaaagcattagaatctcaatggagaaacaacatctttagctctcacgacttgatgtgcggctgcaaagatccagtactacatttattaattattataaacagagaaggaaaagcaccaaaacctgaagaagacgtcaaaaacataaaatgccttattactggagaaggcgccaaagatggagaaaaagatattatcccagacgatttcgaacctggagacctagaccgactgttttcagaacttggagaaacagaagaaaaagacgaaaaccctaccgacgacgggtaagaaaaagactttttaaacgtaaattacaagctataaaacttaaagaatttcagcctgatgttataagacgctgtaatatttttggcaacatttgtttatttcaaggaagtccagaaagagcaaatcataactatgtacaatatatatatagctatgtaccagttaatggacccggagggggcggatggacattaatgatagaaagcttatcctctttatgggaagactggcaacatttaaaaaatgtatggactactagtaatgctggactgccactagtaagatacagaggagcaacactcacattttttcaatcaccatacacagactatatagtaaaagtacacagatgctacccaatgacagacactaaatacacacatgcagactctgcaccaagtagaatgcttttaaaaagaaaaaccataaaagtacctagcttagaaaccagaaaaaaaagaaaaccatataaaaaagttaaaattccaccacctgcacaaatgcaaaataaatggtacttccaaaaagacatttgtgacattccacttgttatgatacaagctacagcagtagacttcagatacccatttgctcctagtagtgcacaaagtaacaatgtaactttactttgcctaaacataagtttatttcaaaatacaaactttgacaacccttctacaacacaaggctactttccaaaaccaggaacatacctatatagcacaaccagcagagcagtatctaaaccagaccaattaaatatggaaaacttaatttacctgggaaacacaaaagactacactctaggtaaagactcagaagacacatttgcaaactggggaaatccgtttatgccagaatacatacacggagaaaaacctgtttttactaaccaagtaaaagtaaataaaaacaactttgaacaagtaaaaaacagctttcacttactagaagaagactacttcttttgggtacgctataacccagaaaaagacacaggagacagtaacacagtatttttacaaaacaactttgtacaaacaagctggcacagaccagaaaatcccaacttaataatggaaggatttccattatatgacatgctctggggatttacagactgggaaagaaaattacatgacacacaggacatagacaacaaatacatactagttatacaaacacagcaatttgacgataaaaaaggatattatgtacttatagatccacactttaaagacggaaaaaacccctatgacacaccacttacaaactataacaaatctcactggaatatatgcactagaatacaagaaaaaccagtaaatgacatttgcttatcaggacccggaagtcctaaaccaccttatggaaactatatgcaagcaaaaatgcactataaatttcactttaattggggaggctgtccaaaaagtatagaaaaaccatatgatccttgttcacagcctacctggaatattccccgtaacctccatgaaggagtacaaatacagaatccagaaacagaaccacaaacagaactacaaaaatgggactggagaagggactacattacacccaaagctatcgaaagaattagtagctacacgtcaattgatgaagatgtacaaatttttacaggaaccaaaagagacgtgccaatatgtcgacaaacaccaccagaggacacgagctcggaagaggaaaaagaggagacaccaccgatccaggagcaaatcaacaagctcaaacgaaagcaacacaaactcaagctccgaatcctcaagcgactgaaaacaacaaatatataattaaaaactgtaaaaacaaagtacaattgtttcctactactcatccctttaaaaatagaagattcacaccagctgagagacaaacagaaaaagaactaagtaaaatattccttagaccagaaagaagcttcttttatgatcctcccttttatccctggcttccctgggaaccgcttgtaaactttgatatgggtaataaattttaaggccaacaaatttcacttagtggagtccatttatttaagttaaaccttaataaacagtcaccgcctcccaatcaataaggcgccaaaagggggctccgcccccttacacccccaagggggctccgcccccttacacccccaagggggctccgccccctaacccccggaaaaccacctaatttacatggctctccacaaactgctaaacggaaaccacaaaatttgcattgccgaccacaaacgaatatgcaaataaagttcctctaactaccgttaacttccctaaaaattaattagtaatcaccgttaatttacgttctaactaccgttaacttccctaaaaattaattagtaatcaccgttaatttacgtcaccacaacaacctatataaccaagtacacttccgaatggctgagtttatgctgccagacggaggcggcaaagcatcagcgacagccggctgatcttggg

SEQ ID NO: 2785 - protein, 650 aa, Betatorquevirus sp.
MPYYWRRRQRWRKRYYPRRFRTWRPRPTVFRTWRNRRKRRKPYRRRVRKRLFKRKLQAIKLKEFQPDVIRRCNIFGNICLFQGSPERANHNYVQYIYSYVPVNGPGGGGWTLMIESLSSLWEDWQHLKNVWTTSNAGLPLVRYRGATLTFFQSPYTDYIVKVHRCYPMTDTKYTHADSAPSRMLLKRKTIKVPSLETRKKRKPYKKVKIPPPAQMQNKWYFQKDICDIPLVMIQATAVDFRYPFAPSSAQSNNVTLLCLNISLFQNTNFDNPSTTQGYFPKPGTYLYSTTSRAVSKPDQLNMENLIYLGNTKDYTLGKDSEDTFANWGNPFMPEYIHGEKPVFTNQVKVNKNNFEQVKNSFHLLEEDYFFWVRYNPEKDTGDSNTVFLQNNFVQTSWHRPENPNLIMEGFPLYDMLWGFTDWERKLHDTQDIDNKYILVIQTQQFDDKKGYYVLIDPHFKDGKNPYDTPLTNYNKSHWNICTRIQEKPVNDICLSGPGSPKPPYGNYMQAKMHYKFHFNWGGCPKSIEKPYDPCSQPTWNIPRNLHEGVQIQNPETEPQTELQKWDWRRDYITPKAIERISSYTSIDEDVQIFTGTKRDVPICRQTPPEDTSSEEEKEETPPIQEQINKLKRKQHKLKLRILKRLKTTNI

SEQ ID NO: 2786 - DNA, 2913 bp, Gammatorquevirus sp.
cgggagcccgaggtgagtgaaaccaccgaggtctaggggcaattcgggctagggcagtctagcggaacgggcaagaaacttaaaaatatttctctttacagatgagccatctctgtcctgctgacttttatcacaaaaccacttttaatcttgatacacaaaaccaaatatggatgtctcagctagcagacgggcatgacaatttctgtgactgcaaaactccttttggtcatttgcttgcttctatttttcctcctggtcataaagaccgtgatctcacaattaatcaaattctgctgcgagactacagagaaacatgccattctggtggaacaggagaaaaaggttctggaggagaaactacaggagaaaacccaggtacaagaaatacaaacctagaagatacagaagaacttacagaacaaaatatagaagagctaatcgccgtggcagacgccgcagaagaagaagacacaaggtaagaagaaaaaaacaaacaataccagttagacaatggcaacctgactctattgttaaatgtaaaattaaaggcttgtctactctagtgctgggtgcagaaggcaaacaacttgtatgctacacaaatgtaaaaaatgcaaatactcctccaaaagcaccagctggaggaggatttggctgtgaacaattttccttagaatcattatatacagactttgtatttagaaaaaatatatggacaaaatcaaatactcttaaagacttatgtagatacctaggagttaaaatggtattttatagagctccagaaacagactttattgtatcttacagcagacaaccaccatttgaaatttctaaagaaatatatacatcatgtcacccactaaatatgatactagataaacacaaaattattattccaagcagatttaccaatcccagaggtaaactaaaagtaaaaaaatttattaaacctcctaaacaaatgttatctaaatggtttttccaagagcactttgcaaactatccattagtaatgataaaagcagcagcttgcaatcttaactacagtaatttagggtgctgtaacacaaatcaaatggttacctttttttacattaatattaactggtactccttagctgactggtcagcaagaaaatcaggcacagctatatacacaccatattctaactttccagcaaacatatacacctggaataaaaaacaatgggacacacaaacattagcaacagactcccaaaaatttacaaaacctactacttactttgcttctgtaaatattaaaactggctttttttcaccacaaatattacaagcagtacaaataactgccaatacaaccaaagaatcaattaccagaaacaatcccttaaacatatgcagatacaacccaaacttagacagtggaaaaaaaaataaaatatggctagtatcaactctcacagccacatgggaccctccacattcagacaaaatactaatatatgagggctatcctctatacatgatgctatggggatttcttagctatgtacaagccattaaaaaatctcctgacttttttttaggatatgtacttgcaatgcaatcacctgctttattaccctactcacaaccaggagcacaaacagctattatagttccactagactataaaatgccacaaggcaaagctccatatgatgaagaactaacagactccatgaaaacactatggtttccaaccatatacaaccaattagaaatattaaatgccatagtagaatctggtccattagtaccaaaatactctcaaactaaaaacagtacatgggaacttgatatgttttatacctttatttttaagtggggcggcccagaaattacagaacaacaaattgcagatccacacctacaaggaacttatgaagtaccagataccctccaaaaagctatacaaatccatgacccggcaaaacaaaaaattgggagcctcctccatccctgggatattagaaggggatactttacaaaaacagctcttaaaagaatgcatgataacctctcaactgagtcatctttcatcccagatggagaagaaatacctgcaaaaaagaaaagacaacagacaggtccagagctgtcccacccctaccaagaagaagaagaagtccagagctctctccgctcgctcttcgaagaaaatatctacccagaaacacaaacacaaacaccagacatcctccagctcatcaagcagcagcagcagcagcagcaagagctcaagtacaatatcctcagaataatctcagacatcaaagccaaacagaatctactcagacttcaaacaggagcaatgttttaacaagatttaaaccaggatttgaatgggaaacagagctacaactagcttcagcttttaaaagaccccctagactttttaaagaagacacacctttctatccctggcttccaaaacttgtaccaattgtaaactttcacctcaactttaaatgctaggcctacactgttcacttagtggtgtatgtttaataaagtttgcaccccaaaaaaattgtaaaaaaaggtaaccatttgatttgtgttacagcaccctaaattactgtagtggggggggcatagcccccccacaccccccgcgggggggggcagagccccccccgcaccccccctacgtcacaaaccacgcccccgccgccatcttgggtgcggcagggcggagactaaaatggcggcaaccaatcactttatactttcactttccaattaaaacatgccacgtcacactaacagggcgaagactaaaaactatatattaaactactgtgacgaatggctgagtttaccccgctagacggtgcagggaccggatcgagcgcagcgaggaggtccccggctgcccttggg

SEQ ID NO: 2787 - protein, 677 aa, Gammatorquevirus sp.; identical to SEQ ID NO: 1573

SEQ ID NO: 2788 - protein, 126 aa, Gammatorquevirus sp.; identical to SEQ ID NO: 1574

SEQ ID NO: 2789 - DNA, 2912 bp, Alphatorquevirus sp.
ggtgtctacctcttaaggtcactaagcactcccaaggggcaattcgggctcgggactggccgggctatgggcaaggctcttaaaaatgcacttttctaggtgcagtagaaagaaaaggacactgtcactgttaccactgcaccattcacagaaaactaggccatctgtgaaaggtatgtggagacccccgactcgaaatgcatttactattcaacgtgactggttctacagttgctttcactcccacgcttctatgtgtggctgtgctgattttattagtcatttcaatcatatcgctgctatgctcggccgtccggaagaccagaaccctcctccgccacccggggctctgagacccctacccgctctcccggcctcctccgagacacccggtgatcgagcaccatggcctatgggtggtggtggaggcgacggaggcgcccatggaggaggaggagatggcgccgctggagacgtcgccggagaccccgcagacgccgacctcgtcgccgctatcgacgccgcagaacagtaaggagacgcggcagggggaggtggactaggagatatagacgatggcgccgcaagggcaaacgaagaggcaaaaaaaagattatcataaaacagtggcagcccaactacactcgcagatgcaacatagtgggctacatgcctctcctaatctgtggggaaaatactgttgctacaaactatgccactcactcagacgacagctactaccccggaccctttggggggggaatgactacagacaaatttactctaagaatactgtatgatgagtacaagaggtttatgaactactggaccgcctcaaacgaggacctagacctctgtagatacctaggagctactctatatgtgtttagacacccagaagtagactttatactaattataaacacctcccctccatttctagacacagaaataacagggcccagcatacacccaggcatgatggccctcaacaaaagagccaggtggatacctagcttaaaaaacagaccaggcagaaagcactatgtaaagattaaagtaggagccccccgaatgttcacagataagtggtacccccagacagacctctgtgacatgacactcctaacgatttttgccagtgcggcggatatgcaatatccgttcggctcaccactaactgacactatagttgtgtcattccaagttctgcaatccatgtacaacgactgcctaagtgtacttcctgaaaattttgcagacgcaacaggcaaaggcgcccagctatataaaaaaataactgatcatttaccctactacaacaccacacaaacacaagcacaatttaaaagatttgtagaaaacagtgcagcaaccaacggtgacaatatatgggcaaactacataaatactaataagttctcaacaacagaaccatcaaagaatgatacaaacataggaggcccttacaccaattattcagactcatggtacaaaggcacagtatacaatgagagaattaaacagatacctgaaaaagcaagtaaattatactacgaacaaaccaaaaaacttattggcattacatttacaggatccacacacaaactacactactgtggaggcctatattcttccgtatggctatcagcaggtagatcctactttgaaaccaaaggcccatacacagacatcacttacaaccccttttcagacagaggagagggtaatatgctatggatagactggctaactaaagatgactcagcttactcaaaaacaagtagcaagtgcctcatagaacacttgcccctgtgggccgcagtatacggatacaaagaatactgcagcaaagtcacaggagacacaaacatagaacacaactgtagatgtgttataagaagcccctacacagtaccacagctattagaccacaacaatcccctcagaggttacgtgccttatagcataaactttggaaatggtaaaatgccaggcggtagcagcctagtacccattagaatgagagccaagtggtaccccactcttttccaccaaaaagaagtactagaggccatagcgcaggcgggcccctttgcataccactcagacattaaaaaagtgtccctgggcataaagtacagatttaagtgggtatggggtggcaaccccgtgtcccaacaggttgttaaaaacccctgcaagaccacccaaggttcctcgggcaatagagtgcctcgatcaatacaagtcgttgacccgcggtacaacgcgccagagctcaccatacacgcgtgggacttcagacatgggttctttggcagaaaagctattaagagaatgcaagaacaaccaatacctcatgacactttttcagcagggttcaaacgcagtcgccgagacacagaagcactccaatccagtcaagaagagcaacaaaaagaaaacttacttttcccagtccagcagctcaagcgagtccccccgtgggagacctcgcaagagagccaaagcgaggaagaaaactcgcaaaaacaggagaccctctcccagcaactcagagaccagctgcacaagcagcggctcatgggagagcaactccgatcgctcctctaccaaatgcagagggtccaacaaaatcaacacataaaccctatgttattgccaaagggtctggcattaacttctatttctcacaatgtaatatagatatgtttggtgaccccaaaccctacaagccctcctccaatgactggaaggaggagtacgaagccgcaaagtactgggacagaccccccagacacgacctgagaagcacccccttctacccctgggcccccacccccaaaccatacaatgtcaactttgccctcaactacaaataaacggtggccgtgggagtttcacttgtc

SEQ ID NO: 2790 - protein, 767 aa, Alphatorquevirus sp.
MAYGWWWRRRRRPWRRRRWRRWRRRRRPRRRRPRRRYRRRRTVRRRGRGRWTRRYRRWRRKGKRRGKKKIIIKQWQPNYTRRCNIVGYMPLLICGENTVATNYATHSDDSYYPGPFGGGMTTDKFTLRILYDEYKRFMNYWTASNEDLDLCRYLGATLYVFRHPEVDFILIINTSPPFLDTEITGPSIHPGMMALNKRARWIPSLKNRPGRKHYVKIKVGAPRMFTDKWYPQTDLCDMTLLTIFASAADMQYPFGSPLTDTIVVSFQVLQSMYNDCLSVLPENFADATGKGAQLYKKITDHLPYYNTTQTQAQFKRFVENSAATNGDNIWANYINTNKFSTTEPSKNDTNIGGPYTNYSDSWYKGTVYNERIKQIPEKASKLYYEQTKKLIGITFTGSTHKLHYCGGLYSSVWLSAGRSYFETKGPYTDITYNPFSDRGEGNMLWIDWLTKDDSAYSKTSSKCLIEHLPLWAAVYGYKEYCSKVTGDTNIEHNCRCVIRSPYTVPQLLDHNNPLRGYVPYSINFGNGKMPGGSSLVPIRMRAKWYPTLFHQKEVLEAIAQAGPFAYHSDIKKVSLGIKYRFKWVWGGNPVSQQVVKNPCKTTQGSSGNRVPRSIQVVDPRYNAPELTIHAWDFRHGFFGRKAIKRMQEQPIPHDTFSAGFKRSRRDTEALQSSQEEQQKENLLFPVQQLKRVPPWETSQESQSEEENSQKQETLSQQLRDQLHKQRLMGEQLRSLLYQMQRVQQNQHINPMLLPKGLALTSISHNVI

SEQ ID NO: 2791 - protein, 159 aa, Alphatorquevirus sp.; identical to SEQ ID NO: 286

SEQ ID NO: 2792 - protein, 57 aa, Alphatorquevirus sp.; identical to SEQ ID NO: 287

SEQ ID NO: 2793 - DNA, 2912 bp, Alphatorquevirus sp.
ggtgtctacctcttaaggtcactaagcactcccaaggggcaattcgggctcgggactggccgggctatgggcaaggctcttaaaaatgcacttttctaggtgcagtagaaagaaaaggacactgtcactgttaccactgcaccattcacagaaaactaggccatctgtgaaaggtatgtggagacccccgactcgaaatgcatttactattcaacgtgactggttctacagttgctttcactcccacgcttctatgtgtggctgtgctgattttattagtcatttcaatcatatcgctgctatgctcggccgtccggaagaccagaaccctcctccgccacccggggctctgagacccctacccgctctcccggcctcctccgagacacccggtgatcgagcaccatggcctatgggtggtggtggaggcgacggaggcgcccgtggaggaggaggagatggcgccgctggagacgtcgccggagaccccgcagacgccgacctcgtcgccgctatcgacgccgcagaacagtaaggagacgcggcagggggaggtggactaggagatatagacgatggcgccgcaagggcaaacgaagaggcaaaaaaaagattatcataaaacagtggcagcccaactacactcgcagatgcaacatagtgggctacatgcctctcctaatctgtggggaaaatactgttgctacaaactatgccactcactcagacgacagctactaccccggaccctttggggggggaatgactacagacaaatttactctaagaatactgtatgatgagtacaagaggtttatgaactactggaccgcctcaaacgaggacctagacctctgtagatacctaggagctactctatatgtgtttagacacccagaagtagactttatactaattataaacacctcccctccatttctagacacagaaataacagggcccagcatacacccaggcatgatggccctcaacaaaagagccaggtggatacctagcataaaaaacagaccaggcagaaagcactatgtaaagattaaagtaggagccccccgaatgttcacagataagtggtacccccagacagacctctgtgacatgacactcctaacgatttttgccagtgcggcggatatgcaatatccgttcggctcaccactaactgacactatagttgtgtcattccaagttctgcaatccatgtacaacgactgcctaagtgtacttcctgaaaattttacagactcagcaggcaaaggcgcccagctacataaaaaaataattgatcatttaccctactacaacaccacacaaacacaagcacaatttaaaagatttgtagaaaacagtgaagcaaccaacggtaacaatatatgggcaaactacataaatactaagaagttctcagaaacagaaccatcaaagaatgatacaaacataggaggcccttacaccggttattcagactcatggtacaaaggcacagtatacaatgagagaattaaacagatacctgaaaaagcaagtaaattatactacgaccaaaccaaaaaccttattggcattacatttacaggatccacacacagactacactactgtggaggcctatattcttccgtatggctatcagcaggtagatcctactttgaaaccaaaggcccatacacagacatcacttacaaccccttttcagacagaggagagggtaatatgctatggatagactggctaactaaagatgactcagcttactcaaaaacaagtagcaagtgcctcatagaacacttgcccctgtgggccgcagtatacggatacaaagaatactgcagcaaagtcacaggagacacaaacatagaacacaactgtagatgtgttataagaagcccctacacagtaccacagctattagaccacaacaatcccctcagaggttacgtgccttatagcataaactttggaaatggtaaaatgccaggcggtagcagcctagtacccattagaatgagagccaagtggtaccccactcttttccaccaaaaagaagtactagaggccatagcgcaggcgggcccctttgcataccactcagacattaaaaaagtgtccctgggcataaagtacagatttaagtgggtatggggtggcaaccccgtgtcccaacaggttgttaaaaacccctgcaagaccacccaaggttcctcgggcaatagagtgcctcgatcaatacaagtcgttgacccgcggtacaacacgccagagctcaccatacacgcgtgggacttcagacatgggttctttggcagaaaagctattaagagaatgcaagaacaaccaatacctcatgacactttttcagcagggttcaaacgcagtcgccgagacacagaagcactccaatccagtcaagaagagcaacaaaaagaaaacttacttttcccagtccagcagctcaagcgagtccccccgtgggagacctcgcaagagagccaaagcgaggaagaaaactcgcaaaaacaggagaccctctcccagcaactcagagaccagctgcacaagcagcggctcatgggagagcaactccgatcgctcctctaccaaatgcagagggtccaacaaaatcaacacataaaccctatgttattgccaaagggtctggcattaacttctatttctcacaatgtaatatagatatgtttggtgaccccaaaccctacaagccctcctccaatgactggaaggaggagtacgaagccgcaaagtactgggacagaccccccagacacgacctgagaagcacccccttctacccctgggcccccacccccaaaccatacaatgtcaactttgccctcaactacaaataaacggtggccgtgggagtttcacttgtc

SEQ ID NO: 2794 - protein, 767 aa, Alphatorquevirus sp.
MAYGWWWRRRRRPWRRRRWRRWRRRRRPRRRRPRRRYRRRRTVRRRGRGRWTRRYRRWRRKGKRRGKKKIIIKQWQPNYTRRCNIVGYMPLLICGENTVATNYATHSDDSYYPGPFGGGMTTDKFTLRILYDEYKRFMNYWTASNEDLDLCRYLGATLYVFRHPEVDFILIINTSPPFLDTEITGPSIHPGMMALNKRARWIPSIKNRPGRKHYVKIKVGAPRMFTDKWYPQTDLCDMTLLTIFASAADMQYPFGSPLTDTIVVSFQVLQSMYNDCLSVLPENFTDSAGKGAQLHKKIIDHLPYYNTTQTQAQFKRFVENSEATNGNNIWANYINTKKFSETEPSKNDTNIGGPYTGYSDSWYKGTVYNERIKQIPEKASKLYYDQTKNLIGITFTGSTHRLHYCGGLYSSVWLSAGRSYFETKGPYTDITYNPFSDRGEGNMLWIDWLTKDDSAYSKTSSKCLIEHLPLWAAVYGYKEYCSKVTGDTNIEHNCRCVIRSPYTVPQLLDHNNPLRGYVPYSINFGNGKMPGGSSLVPIRMRAKWYPTLFHQKEVLEAIAQAGPFAYHSDIKKVSLGIKYRFKWVWGGNPVSQQVVKNPCKTTQGSSGNRVPRSIQVVDPRYNTPELTIHAWDFRHGFFGRKAIKRMQEQPIPHDTFSAGFKRSRRDTEALQSSQEEQQKENLLFPVQQLKRVPPWETSQESQSEEENSQKQETLSQQLRDQLHKQRLMGEQLRSLLYQMQRVQQNQHINPMLLPKGLALTSISHNVI

SEQ ID NO: 2795 - protein, 159 aa, Alphatorquevirus sp.
LAGLWARLLKMHFSRCSRKKRTLSLLPLHHSQKTRPSVKGMWRPPTRNAFTIQRDWFYSCFHSHASMCGCADFISHFNHIAAMLGRPEDQNPPPPPGALRPLPALPASSETPGDRAPWPMGGGGGDGGARGGGGDGAAGDVAGDPADADLVAAIDAAEQ

SEQ ID NO: 2796 - protein, 57 aa, Alphatorquevirus sp.; identical to SEQ ID NO: 287

SEQ ID NO: 2797 - DNA, 2912 bp, Betatorquevirus sp.
caggtgccggaggtgagtgaaaccaccgaagtcaaggggcttaatgggcaaattcagtcttggcagaacgggcaactaacttaaaaacactttttttacagatgagcaaattccaaaaaccatgcctttatgaaaaacgagcactagatatacaatggcttaacataattcatgcctctcacgacctttgctgtggatgttctacaccaattgaacacctgcaagatatcttacaacgcgaaaaatgccattctggtataaaagattctacaaaagaaactactactacccttacagacgatattggaataagtcaaggagatctagaaaaactcttcgcagaagaagaagacgacgaccggtaagaagaaaacgctttaaaagatatagacttaaaaaacttaagactataattaacagaacttaccaaccagaaaaaataagaaagtgccgcataaagggaatattacaattatttgaatgtggatatggacgtatatcaaataattggcctttatataaagaaagctatgtaccacctcatgaaccaggtggaggagggtggggtatacaacaattaactctaggaaatttatatatacaaggaaaatatgcattaaattactggacatattcaaacaaaggactaaacttatgcagatataaaggctgtagaataacattatacagacaaccttacgtagactatatttttcattacaacttacaagatcctcaaatagtaactaaatatacatatccttcttaccacccatttaaaatttttaactatcaccaaagaataattgttcccagtttaaaaacacaaccactaaaaagaaaaccttacaaaagaaagtacattagaccacctaaaaagttaaaaaatgattggtactttcaagaacaactatctaactatccactactaacattttttgctacagccgtagatttacaaaacatatttataccacaaagagcaaacaacaataatataacactctatagtattaacacaagacttttccgaaaccctaactttgcaaacccacctcaaaaaacaggttattcaccaaacaacaactatttatatgcctacacacatccaccagaaccatggaccccaaaaaaactaaaagaatttatatttttaggaaacacaacaataaacacaccaggaacaccaatgaacaactcttcctcacaaggaaaatggggaaaccctttttactttgaacatttccaaatgaattcagtactaacaatacaaacagaaaacgtaacccaagcatgtagttctgaaacagaaataactgaaagcaccattaaacatgaaccactatactacgaacttagatataatcccaacaaagacaatggagatggtaatgaggcatactgggtaaacaattttaatccacaaaaaacagactgggaacctcccacagatcaagacttaattattagaggtcacccactttggctcatgctttggggatttgcagactacatagaaaaaactaaaaaatttaacaaactagaccaaaacggaatactagtaattagaacaaaacaatttgcaacagagccactacctgcatatgttttagttagtgactcctttataaatggagaaggtccatatgaacaagacagagatcaaataaacacttataacaacacacactggtatcctagatggcaataccaaaaagaagcaatagaaaaaatactaatgacaggaccaggggtatataaagaaaacaatggaaatagcatacaagcttatatgaaatatgactttctttttaagtggggaggaaacccttcaaaaatggaaaccattgcagaccccaatcaacaaccaacaggacccgatcccaataacatcttcggctcaaatgaaatgcatagtccggaacaaacaattgacaacttcatctacaaatgggatgttaggcgagacatccttacacaaacagctacaaaacgaattacagaaatcccattacttaaacaaactttatttacagatggacaaacaacttcaacagacccgccagtccaaaaaacatggacaccacaagaggaagaaaccccgaaagaagaagacccgacattactccagcaactccagctcctccaccacaacaaccaacaactcgagtacagactcagacaattaacaacaattctggacgaacaataataacttgtgtaaaacgtgcatatttgtttgaacctaaaaaaacccctaaaaaccgtagaataacaggcccagactgggaaacagaattatacttagctaaattctttaaaagacctttaagaacctttcacaatgacccccctttttacccatggcttccccctgaacctcttgtaaattttgacttaaacttcaataaaggccagcattaattcacttaacaagcctgtttattataaaaaaacttaactaaacaacctccgcctccctaatacgcatgcgcaaagggggctctgcccccttaaacccccagggggggctccctaatacgcatgcgcaaagggggctctgcccccttaaacccccagggggggtaaacccccccctaagcccccccgaaaaaccacaaaatttacattgcccaccacaaacgaacaggaaaaccacaaaatttgcattgccgaccacaaacgaacaggaaaaccacaaaatttgcattgccgaccacaaaccgtctctaacttcctttatttaagacacttcctttttaacttataaatattcataacataaattagtaatcaccatcacttcccgggaggagtaacaaaactatataataaacataccctccgaatggctgagtttatgctgccagacgaagacagaacacgttcagtgacttctggctgaatttggg

SEQ ID NO: 2798 - protein, 655 aa, Betatorquevirus sp.
MPFWYKRFYKRNYYYPYRRYWNKSRRSRKTLRRRRRRRPVRRKRFKRYRLKKLKTIINRTYQPEKIRKCRIKGILQLFECGYGRISNNWPLYKESYVPPHEPGGGGWGIQQLTLGNLYIQGKYALNYWTYSNKGLNLCRYKGCRITLYRQPYVDYIFHYNLQDPQIVTKYTYPSYHPFKIFNYHQRIIVPSLKTQPLKRKPYKRKYIRPPKKLKNDWYFQEQLSNYPLLTFFATAVDLQNIFIPQRANNNNITLYSINTRLFRNPNFANPPQKTGYSPNNNYLYAYTHPPEPWTPKKLKEFIFLGNTTINTPGTPMNNSSSQGKWGNPFYFEHFQMNSVLTIQTENVTQACSSETEITESTIKHEPLYYELRYNPNKDNGDGNEAYWVNNFNPQKTDWEPPTDQDLIIRGHPLWLMLWGFADYIEKTKKFNKLDQNGILVIRTKQFATEPLPAYVLVSDSFINGEGPYEQDRDQINTYNNTHWYPRWQYQKEAIEKILMTGPGVYKENNGNSIQAYMKYDFLFKWGGNPSKMETIADPNQQPTGPDPNNIFGSNEMHSPEQTIDNFIYKWDVRRDILTQTATKRITEIPLLKQTLFTDGQTTSTDPPVQKTWTPQEEETPKEEDPTLLQQLQLLHHNNQQLEYRLRQLTTILDEQ

SEQ ID NO: 2799 - protein, 101 aa, Betatorquevirus sp.
LAERATNLKTLFLQMSKFQKPCLYEKRALDIQWLNIIHASHDLCCGCSTPIEHLQDILQREKCHSGIKDSTKETTTTLTDDIGISQGDLEKLFAEEEDDDR

SEQ ID NO: 2800 - protein, 115 aa, Betatorquevirus sp.
MDTTRGRNPERRRPDITPATPAPPPQQPTTRVQTQTINNNSGRTIITCVKRAYLFEPKKTPKNRRITGPDWETELYLAKFFKRPLRTFHNDPPFYPWLPPEPLVNFDLNFNKGQH

SEQ ID NO: 2801 - DNA, 2912 bp, Gammatorquevirus sp.
cgggagcccgaggtgagtgaaaccaccgaggtctaggggcaattcgggctagggcagtctagcggaacgggcaagaaacttaaaatattttattttacagatgcaaaacctttgcagcagagacttcttcaaaaaatgtacttataactcagatacccaaactcaaatttggtgttctcaaattgctgattctcatgacaatatttgctgctgcaactggccatttgcacacctgctagccagcttgtttccacctggacatccagacagacaactaaccattaatcaaatacttgaaagagactacaagcaactatgccattctggtggggccgcagaagaaagccatggtatggcaggtttcgatggagaaggagatatcaaacaaccaaaagaagaagaaaacccagaagaagatttcgaaccagaagaaatagaagaaatgctaatcgccgctataaaagaaggcgcaaggtaagaagaaagcttaaaagaataactttaaaacaatggcaaccagactctataaaaaaatgtaaaattaagggttattcctgcttggtactggggggtgaaggaacccaaatgttttgctataccaatgaagcaagtagctacccacagcctaaagctccagggggagggggatttggagtagaaataattactttgcaatggctataccaagaattccttaaacataacaacatatggactagaagtaataactatacagacctttgcagatacacaggctgccaaattattttttacagacaccctacaattgacttcattgcaggctatgacatagcaccaccctttgaccttaataaatattcatatgctgaaatgcaaccacaaaatttactacttagaagacatagaaaactaatattaagtagagcatctaatcctaaaggtagactaactgttaaaatgaaaataaaaccaccaaaacaattaattactaagtggttttttcaaaaagacttttgtaaatatggtctagtaaaaatatttgcttctgcatgtgactttaattaccctagaatatcaccaatagcacccagcactgttttaactgtatacagccttagcaccaccttttacaataacagtgactgggcaaaagcagaagaagaaggatacaaaaatatttctactcaagccttaccacttaccttttattacaaaaacaaacaaggtcaggaacaaagatttaactacaaccctacctccattgagaaaaaagatttagaaagatactactatacaataagcagagacactggattattttcaccaaaagtgctactatcatacaaatacacacatagtgaaaaaacatatgctaatttaccactcattgttttaagatacaacccacatgaagacacaggacatggcaatgaggtatacctaaccaacattttaggaggccactataataaaccatctatctctacagactactcatttaacaatgttccactacccatagcattttatggatactggaactatttacaacaatattctaaagacaaaaatatttttaaaagctacatgtttgtagttaaatgtcctgcactaaaacctattacacaaacaacagcacaagtatactaccctatactagactcagactttgtttatggtaacaaaccttgggatgaatttatatcagacacagacaaaaaactttggtaccccacagcagaaaaacaacaacaaataataaatgctattgtagagtcaggaccatatgtcccaagactatcaaatttaaagtacagtacatgggaactagattacagatacaaatttttttttaagtggggaggaccacaagtatcagacccagcagttgaagatccctgccagagaggaaaataccccgttcccgatacagtgcaaaaaaaattacaagttaccaacccagaaaaatgtaaaactgaagaattattccatgactgggacattagaagggggttcattacaagctcagctcttaaaagaatgtcagaaaacctccaaactgattcatctatccaatctgatgactcagaatcaccaaagaaaaaaaggaaaatcaccaaagagctacagtgccaaacacaggggaaagaaaagatccaggaatgtctcctctcactcttcgaagaaaatacatgccaagagtcgccagaaacactgcagcagtacatccagcagcagcagcagcagcagcaccagctcaagagaaacatcctccaactcctcacacacctgaaaaaggcccagagatgtacagaactacaaacaggccttttagagtagaaccattcaaaccaggttttgaatgggaaacagaaaaagaactagcaaaagcattttgtagaccacctagaacatacaaaaatgaccccccattttacccttggctgccacctgcaccccttgtacaatttaaccttaatttcaaaggctaggccaacaatgtacacttagacaagcttgtttaataaagtttaaccccaaaaaaaaaaaaaaaaaaaaaaataaaaaattgcaaaaattcggcgctcgcgcgcgctgaattagttccccttttacacagtaaaaaggggaagtgggggggcaaagcccccccacaccccccgcggggggggcaaagccccccccgcaccccccctacgtcacaaaccacgcccccgccgccatgttgggcgcggcagggcgggggctaaaatggcgggaaccaataaatttatactttcactttccaattaaaacatgccacatcacagcaaatgggcggagacttaaacactatatagataactgcactgacgaatggctgagtttaccccgctagacggtgcagagatcgaccgagcgcagcgaggagatcttcagctgcccgtggg

SEQ ID NO: 2802 - protein, 668 aa, Gammatorquevirus sp.
MPFWWGRRRKPWYGRFRWRRRYQTTKRRRKPRRRFRTRRNRRNANRRYKRRRKVRRKLKRITLKQWQPDSIKKCKIKGYSCLVLGGEGTQMFCYTNEASSYPQPKAPGGGGFGVEIITLQWLYQEFLKHNNIWTRSNNYTDLCRYTGCQIIFYRHPTIDFIAGYDIAPPFDLNKYSYAEMQPQNLLLRRHRKLILSRASNPKGRLTVKMKIKPPKQLITKWFFQKDFCKYGLVKIFASACDFNYPRISPIAPSTVLTVYSLSTTFYNNSDWAKAEEEGYKNISTQALPLTFYYKNKQGQEQRFNYNPTSIEKKDLERYYYTISRDTGLFSPKVLLSYKYTHSEKTYANLPLIVLRYNPHEDTGHGNEVYLTNILGGHYNKPSISTDYSFNNVPLPIAFYGYWNYLQQYSKDKNIFKSYMFVVKCPALKPITQTTAQVYYPILDSDFVYGNKPWDEFISDTDKKLWYPTAEKQQQIINAIVESGPYVPRLSNLKYSTWELDYRYKFFFKWGGPQVSDPAVEDPCQRGKYPVPDTVQKKLQVTNPEKCKTEELFHDWDIRRGFITSSALKRMSENLQTDSSIQSDDSESPKKKRKITKELQCQTQGKEKIQECLLSLFEENTCQESPETLQQYIQQQQQQQHQLKRNILQLLTHLKKAQRCTELQTGLLE

SEQ ID NO: 2803 - DNA, 2911 bp, Betatorquevirus sp.
cgggagccgaaggtgagtgaaaccaccgtagtctaggggcaattcgggctgagttagtcttgcggaacgggcaagattcttaaaataattttattttacagatgcaatttattcctacaaattataaaccaaaagaactacaactacaatggattaacaatattgttcacacccacgacctactctgcaaatgtgataaacctctggaacatacaattcatggaattataaaacaagaacccaacctgcgccttcatcaagaaactaaagatcttctacaaaaatgccttactacagaaagtggtggggaccgcgcagaagacgatttcgacggtcttggcgccggagatttagaggcccttttcgcagaagatactggagacgaaactgggtaagaaattattctcgaaagagaaaacttaataaactaactctaaaagaatggcaacctataacaataagaaaaaccaaagttaaaggaatgtacccagcttttatgtgtacttcagacagaataagcaacaatgctatacaatatttagactcaatagccccacaccactttccaggtggaggaggctttggaataatacaatttactttacaaggactttatgaacaatttgtaaaagcaacaaactggtggactcaaacaaactgttcattgcctttaataagatacaactactgtaatcttaaattttatagaactgaaaactttgattatgttgtaaaaataataagatgttatcctttaaaagcaactaatgatttatatatgtctacacaaccttctatattaatgagagataaacatagtatactaataccatgcagaaaaaacggtaaaaaccgcaaaccttacaaaagagtaagagtaaaaccaccaacacaaatgtctaacggttggttctttcaaaaggacctttgcaactttcctttattagtaatcttaacttcatctgcaagctttgaccgttattatacaaactctaagtcaaagtctgcaacaattggttttatttcactaaacacacaaacatttcagtatcatgattggcaagaccccccaaccacaggatataaaccacaagacaacatgtggttttggggtacagaaaatggtgctgatgacccagatgaagaaccactaccaaacttaatttacttaggtggcacaaataatcattctaaaggaataccagtaaaaacccaacaaaattatgcttcacttccaaaaatttggggtaatatatttcatgaagactacttgtttggaactagccaaatatatgtttctaataaacctccttcagaggtagtaacttacatagtacaaaatcaaaataagaaagttaaagactacgaaggaattacacctcgcactctaccacttacagtagaatgtagatataatccatttaatgataaatcaacaaacaacaatacatacatggtttcaaaccactcagatcacacaaaatggcatccaatagacaacatagaaacacaaagaccaaacttaccactttggctatctacatggggatttatggactggatgaaaaaagcacaaataatatcacaaccagaattaaactatgttactgtaattgaaagtgattttataagcagtaatcctaaattaaaatattatgtacctattgatgatacaatgcaaataggacaaagtccttatattgaaactttatctcaatctgatgctaagcactggtatcctaaaggaacttttcaaataaaaacattaaatacaatagcatctactggtccaggaactattaaattacaacctgaccaaagctgtgaagctcattttgaatatgattttcgttttaagattggaggttgccctccagcaatggaaaaactctgcgacccatcaaaacaaaacaagtatcctattcccaatactaagctccaaacaacttcgttgcagagtccagcatcacccattgaaacctatctctacaactttgacgaacgacacggaatcattacagaaaaagcttcgaaaagaatcaaaaaagactatggaactgaacaaactcttttgccatttgcaggaacgtcaatggacctcccaacaccctacaagggaccaccggaggacgaaacatcgacagaggaagaagaagagacgacacaggagctccagctcctcaaactccgacgcaaacagcgtatcctcaagcagcgaatcctcaagttattagacataccaaatatagaataatacatagcaaagttaagatagacatgtttggtgacagacctcctaaaaatagacgaatgaccccagaagaaagacaagaggaactatttctagcaggactgtttcgcagaccaccaagagaatatatactagataaacctttttatccttatgtacctactcctcctaaaaaattcatggtaaactttgatctaaacccccctgaataaacaaggcatgcaaatattcacttctcggtgtccatttatataagttcaaacttaaataaacatccaccactctcccaacattgctggcgtagtaaggggctccgccccttaaacccctagggggctccgccccctacaacccccaagggggctccgcccccttacaccccctcataaatattcataaaggaaaccacaaaattagaattgccgaccacaaccctcataaatattcataaaggaaaccacaaaattagaattgccgaccacaaacagccatatgctaatttacttccctaaaacacatattacttccctaaaaattaattaataaacaccgtcatatccgttactcatactccctataaaactaactacactgacgaatggctgagtttacgccgcaagacggagcgaagaacagttactgaccttcgctaactcaggg

SEQ ID NO: 2804 - protein, 656 aa, Betatorquevirus sp.
MPYYRKWWGPRRRRFRRSWRRRFRGPFRRRYWRRNWVRNYSRKRKLNKLTLKEWQPITIRKTKVKGMYPAFMCTSDRISNNAIQYLDSIAPHHFPGGGGFGIIQFTLQGLYEQFVKATNWWTQTNCSLPLIRYNYCNLKFYRTENFDYVVKIIRCYPLKATNDLYMSTQPSILMRDKHSILIPCRKNGKNRKPYKRVRVKPPTQMSNGWFFQKDLCNFPLLVILTSSASFDRYYTNSKSKSATIGFISLNTQTFQYHDWQDPPTTGYKPQDNMWFWGTENGADDPDEEPLPNLIYLGGTNNHSKGIPVKTQQNYASLPKIWGNIFHEDYLFGTSQIYVSNKPPSEVVTYIVQNQNKKVKDYEGITPRTLPLTVECRYNPFNDKSTNNNTYMVSNHSDHTKWHPIDNIETQRPNLPLWLSTWGFMDWMKKAQIISQPELNYVTVIESDFISSNPKLKYYVPIDDTMQIGQSPYIETLSQSDAKHWYPKGTFQIKTLNTIASTGPGTIKLQPDQSCEAHFEYDFRFKIGGCPPAMEKLCDPSKQNKYPIPNTKLQTTSLQSPASPIETYLYNFDERHGIITEKASKRIKKDYGTEQTLLPFAGTSMDLPTPYKGPPEDETSTEEEEETTQELQLLKLRRKQRILKQRILKLLDIPNIE

SEQ ID NO: 2805 - protein, 97 aa, Betatorquevirus sp.
MQFIPTNYKPKELQLQWINNIVHTHDLLCKCDKPLEHTIHGIIKQEPNLRLHQETKDLLQKCLTTESGGDRAEDDFDGLGAGDLEALFAEDTGDETG

SEQ ID NO: 2806 - protein, 61 aa, Betatorquevirus sp.
MFGDRPPKNRRMTPEERQEELFLAGLFRRPPREYILDKPFYPYVPTPPKKFMVNFDLNPPE

SEQ ID NO: 2807 - DNA, 2911 bp, Gammatorquevirus sp.
cgggagcccgaggtgagtgaaaccaccgaggtctaggggcaattcgggctagggcagtctagcggaacgggcaagaaacttaaatataaatttgttttacagatgaccaactactctgcctcacacttttttaaaccaactccttacaacaatgacaccaaaaaccaaatgtggatgtccatgatagctgatgggcatgactgtatttgcaactgccctagtccttttggccacttgcttgcatctatttttcctcctggtcatcaagaccgtgatcttacaattgaagctattattaatcgagatatacaagaatgcctttctggtggaacagaagaaagaggtggtggaggggtcgccgcagaccatactacaaacgcagatttaactacaaaaagagaagaccaagaagaagattttacagaagaaaacatagaagaactcatcgccgccgcagaaagcgcttcacaaaggtaaggagaaaaagaaaaaccttacctctcaaacaatggcaaccagagactatcagaaaatgtaaagttaaaggcatagctgttaatacattgggtgtagagggtacacaatatagatgctatactcctaacaaatatgaatatacaatagctaaacaaccatcaggtgggggtataggagtagagagatataccttagaatacttatataaagaacacaaagctggaaataacatatggacagcctccaatgtaaacttagatcttgtaagatatacaggctgttgctttaaattttggagacacccacatatagactttattggtatgtacagtagaaactacccaatgcaactacaaaaatatacatatccagactcacatccacaacaaataatgctatccaaacacaaattttttatacctagcttactatctaagccaacaggcaaaagatatgttaaggtaaaaattaaaccacccacacaaatgatcaacaagtggttttttcaagaaggattctctgacacaggactagttcaaatacacactgctgcagctgactttagatatccacacttaggctgctgcaacaccaatcagttagcaagctttctaacattaaatactgacttctaccaatatgcagcctggggcaacaataccaatccatatatatcaactgaattagacaaatggtacagaccatatagaatggctgaaccagtaacagaagtagaagatgtcaaaggtaacaaaaaagaaattacaactaaatttacaccatacaaggacacaattaactatacaacaggttggtttcaaccagcattactacaagctaaatctataacaaaacctcaacaagcaaatccacctctaaaaggagccagatacaaccctaccttagacacaggtgaaaacacatctgtatggttaactagtgtactaaacaaatcatactatcctccaaaaacagacttagatctatacttagacggcctgccactgtggcaattactactaggatttttagactgggttagacaaaagaaaagagacccaacatttttacagtcatattacctatgctttcactgtgattctattgaacccaaaccaggaatacaccaagtatttattccagtagattacagttttgtacaaggcaaaggaccttatgattctttactaagcacctgggacacagaacactggtatccaacattaaaacaccaaatcaaatctattaactctatagttgaaacagggccctttattccaaaattagacacactaaaaaactctacatgggaattatattcaaactacacattttactttaagtttggaggtgcatccttacctgaagcagaaacaaaagatccagccacacaaggaactcatgaggtacccgataaacaatccaaaacaatacaaattattaacccgcaaaaaaacactgcagcagctgccatacactgctgggactttagaagagggcacattacaagcagagcttttaagagaatgtgcgaaaacgcagaaactgattcagatttccaagcagatgtgccatcaaaaaagaaaaagacatcactccaagaaaacacactgccatgcatcagcaaagaagcagaagaagtccaggaatgtctccagagtctctacaaagaagatatctcccaagaattccaagagccacacaacatccagcagttcctacagcagcagcagcaacaacagcagcaaacaaagctccagctcctccagctcatcaacaacctaaagaaaaaacagaaactaatacaacttcaaacaggcatcctagactaactccctttaaaccaggctttgagcaacaaacagaacaagagttagcatgtgcttttaaaagacctgcaagaaaatttaaagaagataccccattttacccatggttaccacaaatcactccccttgtaaactttcatttaaattacaaattctaggccggcaactttcacttagtaactgatgtttaataaagtttaatccccaaaaaaaaaaaaaaaaaaaaaaataaaaaattgcaaaaattcgccacaaactgccatatgctaattagttccccttttacacagtaaaaaggggaagttgggggggcagggccccccccaaaccccccgcggggggggcggagccccccccccgcaccccccctacgtcacacaccacgcccccgccgccatcttgggtgcggcagggcggggaataaaatggcgggacccaatgaatttatactttcactttccaattaaaatatgccacatcacacacaaagggtggagcctttcaaactatataactaagtggggtggcgaatggctgagtttaccccgctagacggtgcagggaccggatcgagcgcagcgaggaggtccccggctgcccatggg

SEQ ID NO: 2808 - protein, 664 aa, Gammatorquevirus sp.
MPFWWNRRKRWWRGRRRPYYKRRFNYKKRRPRRRFYRRKHRRTHRRRRKRFTKVRRKRKTLPLKQWQPETIRKCKVKGIAVNTLGVEGTQYRCYTPNKYEYTIAKQPSGGGIGVERYTLEYLYKEHKAGNNIWTASNVNLDLVRYTGCCFKFWRHPHIDFIGMYSRNYPMQLQKYTYPDSHPQQIMLSKHKFFIPSLLSKPTGKRYVKVKIKPPTQMINKWFFQEGFSDTGLVQIHTAAADFRYPHLGCCNTNQLASFLTLNTDFYQYAAWGNNTNPYISTELDKWYRPYRMAEPVTEVEDVKGNKKEITTKFTPYKDTINYTTGWFQPALLQAKSITKPQQANPPLKGARYNPTLDTGENTSVWLTSVLNKSYYPPKTDLDLYLDGLPLWQLLLGFLDWVRQKKRDPTFLQSYYLCFHCDSIEPKPGIHQVFIPVDYSFVQGKGPYDSLLSTWDTEHWYPTLKHQIKSINSIVETGPFIPKLDTLKNSTWELYSNYTFYFKFGGASLPEAETKDPATQGTHEVPDKQSKTIQIINPQKNTAAAAIHCWDFRRGHITSRAFKRMCENAETDSDFQADVPSKKKKTSLQENTLPCISKEAEEVQECLQSLYKEDISQEFQEPHNIQQFLQQQQQQQQQTKLQLLQLINNLKKKQKLIQLQTGILD

SEQ ID NO: 2809 - protein, 124 aa, Gammatorquevirus sp.
MTNYSASHFFKPTPYNNDTKNQMWMSMIADGHDCICNCPSPFGHLLASIFPPGHQDRDLTIEAIINRDIQECLSGGTEERGGGGVAADHTTNADLTTKREDQEEDFTEENIEELIAAAESASQR

SEQ ID NO: 2810 - protein, 123 aa, Gammatorquevirus sp.
MHQQRSRRSPGMSPESLQRRYLPRIPRATQHPAVPTAAAATTAANKAPAPPAHQQPKEKTETNTTSNRHPRLTPFKPGFEQQTEQELACAFKRPARKFKEDTPFYPWLPQITPLVNFHLNYKF

SEQ ID NO: 2811 - DNA, 2911 bp, Betatorquevirus sp.
caggtgccggaggtgagtgaaaccaccgaagtcaaggggcttaatgggcaaattcagtcttggcagaacgggcaactaacttaaaaacactttttttacagatgagcaaattccaaaaaccatgcctttatgaaaaacgagcactagatatacaatggcttaacataattcatgcctctcacgacctttgctgtggatgttctacaccaattgaacacctgcaagatatcttacaacgcgaaaaatgccattctggtataaaagattctacaaaagaaactactactacccttacagacgatattggaataagtcaaggagatctagaaaaactcttcgcagaagaagaagacgacgaccggaataagtcaaggagatctagaaaaactcttcgcagaagaagaagacgacgaccggtaagaagaaaacgctttaaaagatatagacttaaaaaacttaagactataattaacagaacttaccaaccagaaaaaataagaaagtgccgcataaagggaatattacaattatttgaatgtggatatggacgtatatcaaataattggcctttatataaagaaagctatgtaccacctcatgaaccaggtggaggagggtggggtatacaacaattaactctaggaaatttatatatacaaggaaaatatgcattaaattactggacatattcaaacaaaggactaaacttatgcagatataaaggctgtagaataacattatacagacaaccttacgtagactatatttttcattacaacttacaagatcctcaaatagtaactaaatatacatatccttcttaccacccatttaaaatttttaactatcaccaaagaataattgttcccagtttaaaaacacaaccactaaaaagaaaaccttacaaaagaaagtacattagaccacctaaaaagttaaaaaatgattggtactttcaagaacaactatctaactatccactactaacattttttgctacagccgtagatttacaaaacatatttataccacaaagagcaaacaacaataatataacactctatagtattaacacaagacttttccgaaaccctaactttgcaaacccacctcaaaaaacaggttattcaccaaacaacaactatttatatgcctacacacatccaccagaaccatggaccccaaaaaaactaaaagaatttatatttttaggaaacacaacaataaacacaccaggaacaccaatgaacaactcttcctcacaaggaaaatggggaaaccctttttactttgaacatttccaaatgaattcagtactaacaatacaaacagaaaacgtaacccaagcatgtagttctgaaacagaaataactgaaagcaccattaaacatgaaccactatactacgaacttagatataatcccaacaaagacaatggagatggtaatgaggcatactgggtaaacaattttaatccacaaaaaacagactgggaacctcccacagatcaagacttaattattagaggtcacccactttggctcatgctttggggatttgcagactacatagaaaaaactaaaaaatttaacaaactagaccaaaacggaatactagtaattagaacaaaacaatttgcaacagagccactacctgcatatgttttagttagtgactcctttataaatggagaaggtccatatgaacaagacagagatcaaataaacacttataacaacacacactggtatcctagatggcaataccaaaaagaagcaatagaaaaaatactaatgacaggaccaggggtatataaagaaaacaatggaaatagcatacaagcttatatgaaatatgactttctttttaagtggggaggaaacccttcaaaaatggaaaccattgcagaccccaatcaacaaccaacaggacccgatcccaataacatcttcggctcaaatgaaatgcatagtccggaacaaacaattgacaacttcatctacaaatgggatgttaggcgagacatccttacacaaacagctacaaaacgaattacagaaatcccattacttaaacaaactttatttacagatggacaaacaacttcaacagacccgccagtccaaaaaacatggacaccacaagaggaagaaaccccgaaagaagaagacccgacattactccagcaactccagctcctccaccacaacaaccaacaactcgagtacagactcagacaattaacaacaattctggacgaacaataataacttgtgtaaaacgtgcatatttgtttgaacctaaaaaaacccctaaaaaccgtagaataacaggcccagactgggaaacagaattatacttagctaaattctttaaaagacctttaagaacctttcacaatgacccccctttttacccatggcttccccctgaacctcttgtaaattttgacttaaacttcaataaaggccagcattaattcacttaacaagcctgtttattataaaaaaacttaactaaacaacctccgcctccctaatacgcatgcgcaaagggggctctgcccccttaaacccccagggggggtaaaccccccctaagcccccccgaaaaaccacaaaatttacattgcccaccacaaacgaacaggaaaaccacaaaatttgcattgccgaccacaaacgaacaggaaaaccacaaaatttgcattgccgaccacaaaccgtctctaacttcctttatttaagacacttcctttttaacttataaatattcataacataaattagtaatcaccatcacttcccgggaggagtaacaaaactatataataaacataccctccgaatggctgagtttatgctgccagacgaagacagaacacgttcagtgacttctggctgaatttggg

SEQ ID NO: 2812 - protein, 735 aa, Betatorquevirus sp.
LAERATNLKTLFLQMSKFQKPCLYEKRALDIQWLNIIHASHDLCCGCSTPIEHLQDILQREKCHSGIKDSTKETTTTLTDDIGISQGDLEKLFAEEEDDDRNKSRRSRKTLRRRRRRRPVRRKRFKRYRLKKLKTIINRTYQPEKIRKCRIKGILQLFECGYGRISNNWPLYKESYVPPHEPGGGGWGIQQLTLGNLYIQGKYALNYWTYSNKGLNLCRYKGCRITLYRQPYVDYIFHYNLQDPQIVTKYTYPSYHPFKIFNYHQRIIVPSLKTQPLKRKPYKRKYIRPPKKLKNDWYFQEQLSNYPLLTFFATAVDLQNIFIPQRANNNNITLYSINTRLFRNPNFANPPQKTGYSPNNNYLYAYTHPPEPWTPKKLKEFIFLGNTTINTPGTPMNNSSSQGKWGNPFYFEHFQMNSVLTIQTENVTQACSSETEITESTIKHEPLYYELRYNPNKDNGDGNEAYWVNNFNPQKTDWEPPTDQDLIIRGHPLWLMLWGFADYIEKTKKFNKLDQNGILVIRTKQFATEPLPAYVLVSDSFINGEGPYEQDRDQINTYNNTHWYPRWQYQKEAIEKILMTGPGVYKENNGNSIQAYMKYDFLFKWGGNPSKMETIADPNQQPTGPDPNNIFGSNEMHSPEQTIDNFIYKWDVRRDILTQTATKRITEIPLLKQTLFTDGQTTSTDPPVQKTWTPQEEETPKEEDPTLLQQLQLLHHNNQQLEYRLRQLTTILDEQ

SEQ ID NO: 2813 - DNA, 2911 bp, Alphatorquevirus sp.
tcggtgtctacctcttaaggtcactaagcactccgagcgtcagcgaggctcgggactggccgggctatgggcaaggctcttaaaaaagccatgtttctcggtcggccttacagaaagaaaagggcactgtcactgctacgcgtgcgagctccaaaggcgaaaccacctgctatgagctggagacccccggtgcacaaccccaatgggatcgagagaaacctgtgggaggcattctttcgcatgcatgcttcagcttgtggttgtggcgatcttgttggccatcttactgtactggctggtcggtatggtgctcctcctcgtcccccggcccccggggctcccagaccaccgctgaaccggcagctggcccttccggcgccccccgctgatccccagcaggccaacccgagatggcctggtggggacggtggagaagatggcgctggaggccccgccgctggcggcgccgtcgcagacgccgagtaccaagaagacgagctcaacgccctgttcgacgccgtcgagcaagaagagtaaggaggaggcgatgggggaggcggaggtggagacgggggtacagacgcagacttagactgagacgcagacgcagacgaaagaaaataagactgactcagtggaacccagctaaagtcaggagatgtactattaagggtgtcctgcccatgatactgtgcggagcaggacgctcagggtttaactatggactgcacagcgacgactgcaccatacagaaaccccttggccagaacccccacgggggcggcatgagcacagtaacttttagcctacaggtgctatatgaccagtaccagaggtttatgaacaagtggtcgtactccaacgaccagctagacctagccagatactttggctgcaccttctggttttacagacacccagaagtagactttgtcgctcagtttgacaacgttcccccaatgaaaatggacgagaacacagcccctaacactcacccgtcgttcctactgcaaaacaaacacagggttaaaatccccagctttaaaaccaagccttttggcagaaaaaaagttagagttacagtggggccccccaaactgtttgaagacaagtggtacagccagcatgacttgtgtaaggtgcccctagtcagttggcggttaaccgcagctgacttcagatttccgttctgctcaccacaaactgacaacccttgctacaccttccaggtattgcatgaagagtattacccagtaataggcactgctgctatagaacaaggaacaaattacaatccaacaggcatacaaactttagaaaagtttttatatggcagatgtactcactatcaaacatttgccacagacacaagactaaaccctcaaagacccatatcatcaaagaatccaaacacatataatcccagtggtgctccggaaaacataatatggagtacagacgattttaacacatttaaaaaacacacagacagcaactatggctactgcacctactgccctactgacgacttaattgaaaaaattaaaaactacagagacaaaagattcgaatggctaactaaaatgccagaaacaaacacctgccatataaatgccacctacgctcgaggaaaaattaagcagtgggaatatcacctaggctggtactcaaatatatttataggcaacctcagacacaacctggcattccggacagcatacatagacattacctacaatcctataacagacaaaggagaaggcaacatagtgtggttccaatatgccacgaaacccaacacacagtacatagagtcacaggcaaaatgcaccattacaaacatacccctatatgctgctttttatggctacgaagactatatccaaagaacactaggcccctatcaagatgtagagaccctaggcataatatgtgttaaatgtccctacacagatcccccactagttcacaaagacaaggataagtcagactggggctatgtattctacgacgttcactttggcaacggaaagaccccggagggcctgggccaagtgcacccttactggatgcagagatggagaccctatgtacagttccagaaagacactatgaacaaaatagccagaacgggaccgttcagctacagagacgagacgccttccatcaccttgactgccgggtacaagtttcgttttaactgggggggcgactctatatttccacagattattaaaaacccctgcccagacagcggggtacgaccttcaaccagtagagagcgtcgctcagtacaagtcgttagcccgctcacaatggggccagagtacatattccaccggtgggactggcgacgggggttctttaatacaaaaactctcaaaagaatgcttgaaaaatcaattaatgatgaagaatattcaacaggcccaaaggtccctcgatggtttcccccactcgacaaccaagagcaagaaggcgtctcagatacagagacgacaacctcgcagtcctcgcaagaagaagccgctcaagaagccctccaagaagtccaagaggcgtcgctacagcagcacctcctccagcagtaccgagagcagcgaagaatcggaaagcaactccaactcgtcatgctccaactcaccaagacgcagagcaacttgcacataaatccccgtgtccttggccatgcataaataaagtgtacatgtttcccccggaaaaacccatgcccatacacgggtaccacgggtggcagacagagtatgaggcctgcaaagcctttgacaggccccctagaaactacctgtcagacaaacccatctatccctggcttccccgctcccaaccagaatttaaagtcagttttaaacttggttttcaataaacaaggccgtgggaatttcacttg

SEQ ID NO: 2814 - protein, 761 aa, Alphatorquevirus sp.
MAWWGRWRRWRWRPRRWRRRRRRRVPRRRAQRPVRRRRARRVRRRRWGRRRWRRGYRRRLRLRRRRRRKKIRLTQWNPAKVRRCTIKGVLPMILCGAGRSGFNYGLHSDDCTIQKPLGQNPHGGGMSTVTFSLQVLYDQYQRFMNKWSYSNDQLDLARYFGCTFWFYRHPEVDFVAQFDNVPPMKMDENTAPNTHPSFLLQNKHRVKIPSFKTKPFGRKKVRVTVGPPKLFEDKWYSQHDLCKVPLVSWRLTAADFRFPFCSPQTDNPCYTFQVLHEEYYPVIGTAAIEQGTNYNPTGIQTLEKFLYGRCTHYQTFATDTRLNPQRPISSKNPNTYNPSGAPENIIWSTDDFNTFKKHTDSNYGYCTYCPTDDLIEKIKNYRDKRFEWLTKMPETNTCHINATYARGKIKQWEYHLGWYSNIFIGNLRHNLAFRTAYIDITYNPITDKGEGNIVWFQYATKPNTQYIESQAKCTITNIPLYAAFYGYEDYIQRTLGPYQDVETLGIICVKCPYTDPPLVHKDKDKSDWGYVFYDVHFGNGKTPEGLGQVHPYWMQRWRPYVQFQKDTMNKIARTGPFSYRDETPSITLTAGYKFRFNWGGDSIFPQIIKNPCPDSGVRPSTSRERRSVQVVSPLTMGPEYIFHRWDWRRGFFNTKTLKRMLEKSINDEEYSTGPKVPRWFPPLDNQEQEGVSDTETTTSQSSQEEAAQEALQEVQEASLQQHLLQQYREQRRIGKQLQLVMLQLTKTQSNLHINPRVLGHA

SEQ ID NO: 2815 - protein, 156 aa, Alphatorquevirus sp.; identical to SEQ ID NO: 624

SEQ ID NO: 2816 - protein, 147 aa, Alphatorquevirus sp.; identical to SEQ ID NO: 597

SEQ ID NO: 2817 - DNA, 2908 bp, Betatorquevirus sp.
cgggagctgaaggtgagtgaaaccaccgaaatctaggggcaattcgggctgaatcagtctagcggaacgggcaacaaacttaaaaaaacttttatttttacagatgagcaaactgcttaaagagccactatatcaaggaaaaaaccttgaaaattgctgggtaaacaattggcacagctctcacgaattattctgcggctgtaacaaagcccttcaacactttctggaaataattaatcgccaaaacaaagcacctaaaccaccaaaagaaattgaaaatataatatgccttattactggagaaaaagaagacaaagatggagacgccgtagacaaccttatcgatggcgaactagaagaatttttcaaagacgaatttggagacaacgaaaaagaagaagaaactgggtaagaagacgcctttttaaaaaaaaactattatatatacctttaaaacaatttcaaccaaagactataaaacgctgtaatattattggaaatgtatgcttatttcaaggatctccttttagagctattaacaattatgtacaatacttatattcctatgtaccagatgacgaaccgggagggggagggtggactctaatggttgagagtttaagtagcttatgggaagacttccaacacttaaaaaatatatggactcgatcaaacaaaggtttacctttagtaaaatacggaggagtcacattaaccttttttcaaagtccatatacagactatgcagtacaaatttttagatgctacccaatgacagacacaaaataccaacatgcagacttagcaccaagtcgaatgatgctaaaaaaagatgttattaaaataccaagcttagaaacaagaaaaaaaagaaaaccatacaaaaaaatatatgtaccaccaccttcccaaatgcaaaacaaatggtactttcaaaagcaaatttgtaatattcctttagtaatgatagcagcaacagctatagacttaagatatccctttgcatccagtagcagcaaaagtaataacataacattaaaagcactaaacccaaacttatttcaaagacatgactttgatcacccatcagacaccataggctactttcctaaaagtaacacatacctatacgccacaaaaggaatatctaccacacaaaaaccaactaagaaatcggagttaatttacttaggaaacacaaaagacaatcaaccaggaaaaggaacagatacatttgcagattggggaaacccattctatcatgactatatagaccaaggtcacccagtatgggtatgcacaaaacctccaacacaactaaaagataaattaacagacactgagtggacagaattatctcaaccatactttatagacattagatataacccagaaaaagatacaggagcaggaaacagtattttcttagtaccaaactatgccggagaccactgggataaaccaggaaacccagacttagtgttagaaggctttcctttgtatgacatggtatggggatttactgattggcaaaaaaaaattaaagtagcaacaaacgtagataactcatggatagtggtcataacatctccattttttaatgaacctcttacaagctatatatttatagacgaaagttttctagaaggatttggtccatatcacacaaaaaacattccaagacaacaccaacaacactggtcacctaaatttacttttcaacaaaaatcaataaacacaataggactatcaggacctgcagcacccagaccagcttatgacaattacatgcaagcaagaatgaaatataactttcatgtaaaatggggaggatgccctaaaaagttagatgaaccttacgatccttgttcacagccagactggactatacccagtaacatcaatgagggattacaaatccaggatccagcaacagaccccaaaaccgaactccaagagtgggactggagacgagattacgttacagaaaaagctattactagaatccaagaacacacgccaactgatgtctctttacaaatccctacagaatccagacacatcgctccagtactacgccaaaccagggaaacaacgagttcatcggactcggactcagaaacggaaaaagagaaaacaccatcactccaggaacagatcaccctcctcaagcgaaagcagcgacagctcaagcacaagatcctccacagactagcacaccaaagtttagaataataaaagacaaaacagtaatagagctttttccaaaacctaaaccctttagaaaccgtagatttcacccctgggaagaacaaacagaagcagaatgtgctaaaatctttcacagacctaaaagaacttttttctatgacacccctatatacccaatatttccaataactccacttgtaaattttgacctaaaatatgaataaacaaggccaacaatattcacttagtagtgtctgtttctttaagttgaactatactaaacggactccgcctcccaaaaattcgggcgccaaaagggggctccgcccccttaaacccccgggggggcaaagccccccctaacccccccaataagttactaaactttacataatacttaccccctcctaaccccccccaataagttactaaactttacataatacttacactaaccgcaaaatttgcattgctgaccacaaacagaacaggaaaccacataatttgcattgccaaccacaaacgtttatgctaattaacttccctaaaccatacctctacttccctaaaaattaattaataatcaccgtcataaaaggaggagcttacaaactatataaccaagtacacttccgaatggctgagtttatgccgctagacggagacgacacagacaactgcgtcggctgattcaggg

SEQ ID NO: 2818 - protein, 649 aa, Betatorquevirus sp.
MPYYWRKRRQRWRRRRQPYRWRTRRIFQRRIWRQRKRRRNWVRRRLFKKKLLYIPLKQFQPKTIKRCNIIGNVCLFQGSPFRAINNYVQYLYSYVPDDEPGGGGWTLMVESLSSLWEDFQHLKNIWTRSNKGLPLVKYGGVTLTFFQSPYTDYAVQIFRCYPMTDTKYQHADLAPSRMMLKKDVIKIPSLETRKKRKPYKKIYVPPPSQMQNKWYFQKQICNIPLVMIAATAIDLRYPFASSSSKSNNITLKALNPNLFQRHDFDHPSDTIGYFPKSNTYLYATKGISTTQKPTKKSELIYLGNTKDNQPGKGTDTFADWGNPFYHDYIDQGHPVWVCTKPPTQLKDKLTDTEWTELSQPYFIDIRYNPEKDTGAGNSIFLVPNYAGDHWDKPGNPDLVLEGFPLYDMVWGFTDWQKKIKVATNVDNSWIVVITSPFFNEPLTSYIFIDESFLEGFGPYHTKNIPRQHQQHWSPKFTFQQKSINTIGLSGPAAPRPAYDNYMQARMKYNFHVKWGGCPKKLDEPYDPCSQPDWTIPSNINEGLQIQDPATDPKTELQEWDWRRDYVTEKAITRIQEHTPTDVSLQIPTESRHIAPVLRQTRETTSSSDSDSETEKEKTPSLQEQITLLKRKQRQLKHKILHRLAHQSLE

SEQ ID NO: 2819 - protein, 102 aa, Betatorquevirus sp.; identical to SEQ ID NO: 2736

SEQ ID NO: 2820 - DNA, 2908 bp, Betatorquevirus sp.
cgggagccggaggtgagtgaaaccaccgtagtctaggggcaattcgggctagatcagtctggcggaacgggcaacattcttaaaaatacttttattttacagatgtccaaacaactacaaccagtaaaatataccaaaaaacaacaagaaaacaattggattaacaacatttattcatcccacgacctattttgtggctgttcagaaccaattctacacctactaaaagtattaaatagatcaggaaacgctccaaaaccagaagaagaaattaataatataaaatgccttattaccggagacgatactatcaaagaagaaggcgcaggaatttctacccaagaactagaagatattttcgcagatataactggagaaaaagacgacaaccctggtacctccgaggggtaaggagaacttttctacgaaaacttaagactttgaaacttaaagtatggcaaccacagactataagaaaatgtaatattattggtattagaccactatttcagggttctcctgaaagacttaacaacaactatgtacaaactttatactcatttgtaccacctgatgaaccgggagggggtggatggactttaatgatagaaacattaagcagcttatgggaagactgggaacatttaaagaatatatggacaacaagcaatgcaggccttccactagtcagatataatggagtaacattaacattttttcaatcagaatacacagattatatgatacaaatagacagatgcctacctatgttagacacaaaatacaaacatgcagacagtgcacccaacagaatgctacttaaaagaaatgtaattagaataccttcattacaaactagaagaaaaaagaggccatacaaaaaagtgtttgtaccaccacctactcaatttactaacaaatggtattttcaaaatgaaatttgtagaatacctctagtaatgataacagcagtgtcttgtgacttcagatatccattttgtgccagctcttgtagaagcaacaacttaacattaacctgtttaaacattaaattttttcaattccataactttgacaattatccaaaaactgtaggctatcaaccgaaaccagaaacatatatgtattctacttcaggtagagatccacacaaaaaacctcaacccacagaacttattttcttaggagacacaaaaacaaacacacccggtaaagcaactagcgacaaagactaccaaaaacctgaaaactggggaaacccattttggcaccactatatagacggcagtatcaaagtatggacatcaacaaaagcaccaacagcaacaagcacagcagcaaatataatatcagatatgacagaaatggcagacacttacttcttaaaatttagatacaatcctgaaagagacaaaggagacagcaacagaatatacctaatacaaaactttcaaaacacaggatggaatccaccacaaaataaaaacttaatactagaaggattcccattatatgatatatgttggggatacatagattgggaagaaaaattacatgacatacaaaatatagaccaacattacatgtttgctattcaaacagaccaatttaatgaacccctacaagcatatgttccaatagacccattcttcatagacggactaggcccatatgaagcaccacacactaattatgacaatgctcactggcatccaaaagtaagatttcaaacaaaatctataaatgacatatgcttaacagggcctgcttgtgctagatcaccatttggaaactatgtacaagccaaatttaaatacaactttcactttaaatggggaggctgtccaaaaacattagaacaaccatatgatccttgttcacagccaacttggactatacccaataacctccaagaaagactttcgatcacgaatccagaatccaaaccacaaacagaactctatgactttgactggagaagagattatatctcacaaaaagctattaaaagaatccaaaaatacacggaacctgatgaaaatttacaaatctttacaggatccaacctcgagcctccaatactacgacaagcacacagcagcagcagcgaaacagaggaggagacggaagaaaaccaaacatcgatccaaacacaactactcaagctcaagcgacaacagcacaagctcaagcgacgaatcctccagcgattaactctccaacatatgttataaaaaaaagctcaagcgacgaatcctccagcgattaactctccaacatatgttataaaaaaatgtaagtttaaagttagactgtttgaaacaaaaacagtacaaaacagaagaatgaccccatgggaagaagaacaagaaagagaagacgcaaaaatatggcgtagacctagaagatactttatacatgatattcctttttacccaggatgtccacctgaacccaaagtaaactttgaccttggttataaacaataaagaaataaagggctaggccccattaattcacagctccgtgtctacttctttaagtttcaacttatttaaacagactccgcctccctaaattcgggcgccaaaagggggctccgcccccttaaaccccaagggggctccgcccccttaaacccccaagggggctccgcccccttacaccccctaattaatattcaacaggaaaaccacctaattagaattgccaaccacaaaccgtcactaacttcccctttttaccacacttcctcattttataatgaatattcataacattacttagtaatcaccgtaattccggggcgtgccctataaactataaaagtaactacactgtcgaatggctgagtttatgccgccagacgaagacgggatcactacagtgactccaggctgatcttggg

SEQ ID NO: 2821 - protein, 649 aa, Betatorquevirus sp.
MPYYRRRYYQRRRRRNFYPRTRRYFRRYNWRKRRQPWYLRGVRRTFLRKLKTLKLKVWQPQTIRKCNIIGIRPLFQGSPERLNNNYVQTLYSFVPPDEPGGGGWTLMIETLSSLWEDWEHLKNIWTTSNAGLPLVRYNGVTLTFFQSEYTDYMIQIDRCLPMLDTKYKHADSAPNRMLLKRNVIRIPSLQTRRKKRPYKKVFVPPPTQFTNKWYFQNEICRIPLVMITAVSCDFRYPFCASSCRSNNLTLTCLNIKFFQFHNFDNYPKTVGYQPKPETYMYSTSGRDPHKKPQPTELIFLGDTKTNTPGKATSDKDYQKPENWGNPFWHHYIDGSIKVWTSTKAPTATSTAANIISDMTEMADTYFLKFRYNPERDKGDSNRIYLIQNFQNTGWNPPQNKNLILEGFPLYDICWGYIDWEEKLHDIQNIDQHYMFAIQTDQFNEPLQAYVPIDPFFIDGLGPYEAPHTNYDNAHWHPKVRFQTKSINDICLTGPACARSPFGNYVQAKFKYNFHFKWGGCPKTLEQPYDPCSQPTWTIPNNLQERLSITNPESKPQTELYDFDWRRDYISQKAIKRIQKYTEPDENLQIFTGSNLEPPILRQAHSSSSETEEETEENQTSIQTQLLKLKRQQHKLKRRILQRLTLQHML

SEQ ID NO: 2822 - protein, 102 aa, Betatorquevirus sp.
MSKQLQPVKYTKKQQENNWINNIYSSHDLFCGCSEPILHLLKVLNRSGNAPKPEEEINNIKCLITGDDTIKEEGAGISTQELEDIFADITGEKDDNPGTSEG

SEQ ID NO: 2823 - DNA, 2908 bp, Betatorquevirus sp.
cgggtgctgaaggtgagtgaaaccaccgaaatcaaggggcaattcgggcctggcagtctggtggaacgggcaagaaacttaaaactattttattttacagatgccattaaaaagagctactaaacttaaattagtaaactcttttgttggaaaccacgaccttgtatgtgactgcaacgaaccagcatttcacagcttttatattcttgctgaccaactaaaatctgaattaactccagaccagaaaaacaaaatacaacaatgccttggtacaactactaccccagaagacgccgttggagacgtagatggagaggacttagagcgcctcttcgcagaagatattggagaagacgatgggtaagaagacctattattaaaaagaaactaaaaagactaaaactaacacaatggcaaccaaaaagtattagaaaatgcaaagtgaaaggcaatatatgcttatttcagactactaatgaaagactatctaatgactttgacctatatgaactaagtgatgtaccggaacatttaccggggggaggtggatggggacttaaagtatatactttaactgcattatttagtgaacatgaatactgtagaaacatttggacacattctaatagagacctaccactagtaagatatgtaggatgttggttaaaactatttcaaagccatgacacagactacatatttacatacagcaacagtctaccaatggaatcaaatttaggaatgtataatgccatgcaacctagcattcaacagctacaacaacaccacataacagttcctagtacaataacatataaaaagaaaaaaccttggataaaaatatggataccaccaccaacacctctacaaaacaaatggtactttcaacacgatcttagtaaaactcctttactaatgacaagagtaacagcatgctcattaacacaattttacattgacaaatatgacattaacaccaacatgaacatcacaacattaaatccgaacttatttcaaaacagaaactttgctaacccaggtacagaatacataccaaaaactgcaaaaaaaccaggtactcaaacagaatcaaatgtatacctatatgctagcagagactactacaattcaggaatagaggtaggctcactaattccactaacagacaccaaaaattataaagaaggccaaagtttcagagaagtatttagaacagaaacagactggactacatggaaacaaaaatacactaaatatgtaggcaatcccttttataaagactacttagacaaccacacacccgtatatcaatcatttaaatctccagtagaaatatttagtgctgcttctcccaaacacaaagaaacagaactaacaacagtagaactaacaaaaactattagatacaacccttataatgatgatggacacaccaacatagcatactttaaaagcaacaacaaaccagaaacaggatggctaccaccagatgatgaaaaactaactaatgaacacttaccatggtggttactattatggggtttctgtgactttcatagaaaagtaaaactatataaacacttagacacagactggatattaacaatgagacaccaaccaaaccacatacaaagagaatacttaatacctctatcacaagactttatagaaggtagaagcccatatgaaacacaaggcccaccattacaagcagatagtataagctggtatccacaattacaataccaagctagaattataaatgacatatgcagagtaggcccaggagtagctaaactacaagacaacaccagtgctcaagcttacatgagataccaatttgtatttaagtttggaggtgacccagctaaaatgtcaacaattgaagaccccagggagcaacccacatttattatacccggtaatcagtcaacaccaacttcgttacagcatccagaaacaaacccagaaaaaattctctggagctttgatgaacgaagacaccaaattacccctgcagctctcaaacgccttcgaaaagacgaaacaactgaaaaaactcttgttacaggtggaagccacttccaagaatacacaccaacaccagaaaaagaaacatcggaggagagctcctcggaagaagaaacgacaacattactcgagcagctccagcagcagcagcaacaacacagactactcaagcgacgaatactgaaaactcttcaaaaaattcaacaattagaataactaaaagccacataacagtaagtttatttcccagacaacccaaaaatagaagaatgacaccatgggaagaacaagaagaaaaacaactagcagctatatttcgtagaccaccaagaaaatttatttttgatcccccattttatccctggtgcccaccagaaccacaagttaactttgatttaaaatttaaacaataaagaaataaagggctaggccccattaattcacagctcggtgtctgtttctttaagttttactttactaaactgactccgcctccctgtcactgggcgccaaaagggggctccgcccccttaaaccccaagggggctccgccccctttaacccccagggggctccgccccctttaaccccctaataaatattcaacaggaaaaccacctaattagaattgccgaccacaataaatattcaacaggaaaaccacctaattagaattgccgaccacaaaccgtcgctaacttccccttttaactacaacttctgcttttactcattaattattaaacacttaattaataatcaccgtaattccggggaggagcttaaacactataaaagtaactacacttacgaatggctgagtttatgccgccagacggaggacgcagcacaacagtgactgaggactgccagaggg

SEQ ID NO: 2824 - protein, 661 aa, Betatorquevirus sp.
MPWYNYYPRRRRWRRRWRGLRAPLRRRYWRRRWVRRPIIKKKLKRLKLTQWQPKSIRKCKVKGNICLFQTTNERLSNDFDLYELSDVPEHLPGGGGWGLKVYTLTALFSEHEYCRNIWTHSNRDLPLVRYVGCWLKLFQSHDTDYIFTYSNSLPMESNLGMYNAMQPSIQQLQQHHITVPSTITYKKKKPWIKIWIPPPTPLQNKWYFQHDLSKTPLLMTRVTACSLTQFYIDKYDINTNMNITTLNPNLFQNRNFANPGTEYIPKTAKKPGTQTESNVYLYASRDYYNSGIEVGSLIPLTDTKNYKEGQSFREVFRTETDWTTWKQKYTKYVGNPFYKDYLDNHTPVYQSFKSPVEIFSAASPKHKETELTTVELTKTIRYNPYNDDGHTNIAYFKSNNKPETGWLPPDDEKLTNEHLPWWLLLWGFCDFHRKVKLYKHLDTDWILTMRHQPNHIQREYLIPLSQDFIEGRSPYETQGPPLQADSISWYPQLQYQARIINDICRVGPGVAKLQDNTSAQAYMRYQFVFKFGGDPAKMSTIEDPREQPTFIIPGNQSTPTSLQHPETNPEKILWSFDERRHQITPAALKRLRKDETTEKTLVTGGSHFQEYTPTPEKETSEESSSEEETTTLLEQLQQQQQQHRLLKRRILKTLQKIQQLE

SEQ ID NO: 2825 - protein, 87 aa, Betatorquevirus sp.
MPLKRATKLKLVNSFVGNHDLVCDCNEPAFHSFYILADQLKSELTPDQKNKIQQCLGTTTTPEDAVGDVDGEDLERLFAEDIGEDDG

SEQ ID NO: 2826 - DNA, 2907 bp, Alphatorquevirus sp.
ctaagcactccggtgagtttacacaccgcagtcaaggggcaattcgggctcgggactggccgggctgtgggcaaggctcttagggttatcgctcttaaaaagctatgtttgttggcagggtctggagaaagaaaagggaagtgctactgtccgcactgcgagctacaaaaacgcctaggcgggctatgagctggcgaccaccggtccaccatgccgcggagatcgatagaaactggtatcaatcagtttataagtcccacgccgcttgctgtggctgtggcaattttgtgctgcatcttaatactctggctgatcgctacgggtttgcttcggggccatcaccgccaggtgatccgggcccgcgtcccccggcgcggctaagaaggcagaacgctaccgagaaccccaatagcggtcccagagccctgccatggcgtggggatggtggagaagacgctggacgtggcccagaaggaggcgatggaggcaatggaggcgccgcagacgactaccgagaagaagacctagacgccctgttcgccgccgtcgacagagacgagtaaggaggcgcttttaccgggggaggcgaaggggatggcgacgcagacggtacataagacgcagacgcagagtaagacgcaaaaaactagtactgactcagtggcagccagccaccagacgcaaatgtgttataaagggggttctgccccttgtgtggtgcggctacctccgcagcggcagaaactacgccctgcactctgacgataccccaaaacaaggagagccctttggagggtctcttagcaccacatcctttaacctaaaagtactgtatgaccagcatcaaagaggactgaacagatggactttccccaacgaccaactagacctagctagatacaagggctgcaaattcacattctacagaaacaaactgactgactttatagcccagtatgacatagctgctccctttgcactagacaaaaacagcagcccctcttatgccccagggataatgatgcaggccaaaaacaaaatacttattcccagctacaacactaaaccaaggggtcgccaaaaaatttcagttaaaatacctccccccaaactatttgtagataagtggtactcacaagaggacctctgttccgttaatcttgtgtcacttgcggtttctgcggctgactttgtacatccgttcggctcaccacaaactgacactccttgtgtaaccttccaggtttgcgagagcttcctcaattctgtaataggctttagctctactaaacaaaaacaagtactagatgaaatgtacaacaaaaatcaatattgggcctcacatctcactccatttttcactacaggccttaaaaatccatatccagccgttcccgaaacagcatcacctccaaactcagtaacagcattacacacattaactgcatcacaaataagaataggtggagacacttcatatcaatggtatccatacaacatgaaagcatacaaatcaaaactagatagcattagaaagcaatactttgactggcttactataaaacttccacaaccaacacaatcagactatggaatgccaaacccacatccaacacctacaaataattactatgaataccacctaggcctttttagccctatatttataggtcccactagaacagcaaacatgtttccagcagcatactttgactgtacatacaaccctttaaatgacaaaggagtaggcaaccacgtatggttccagtacaacagcaaagcagacacacaaatagccacaactggcctatactgccacatacaagacaagcccctgtgggcagccctttatggctacgaagactttgtagaatcagtactaggtcccaatgtagatgctgaatctgtaggccttgtaatagttatatgtccatacaccataccacctttatatgacaaaaaaaatccaggcatgggctggatattttatgacagtaaatttggaaatggcaaatggctagacggcaggggacatattcctgtatactggcagacccgctggcgccctgaaatgatgttccaacatgaggttataagagacattgttcaaacaggaccctttagctacaaagacgaacttaaaaactctgtactggtagcaaaatacaagttctactttacatggggcggtaacatggtgtctcaacagagcattagaaacccctgcaagacgaacgaacacgactccgactccaatagatacactagaacagtacaagttgttgacccgcttaccatgggaccccgctgggtattccacgcctgggactggagacggggctatgttagcgaacaagctctcaagagagtgtcagaaaaacctcttgactatgaagagtattttaaaaagccaaagagacctagaatattccctttatcagaaggagcagaccagtcccacaggctcgaagaagactcaagttccgaggaagaaaaatcgctatcactcatcgaagagacgaccccggcgatccaggagcagttcagaaagcagctcaagcgacagcagcgactcgggcagcagctcaaactcctccaactacacctcctcaaaacgcaagcgggtctccaaataaaccccctattatttacccatgcataaacaaagtgtacatgtttccagaaagggcaccaaaaccttctcccagcaagggagactgggaaacagagtaccaggcctgtcgtcactgggacagacctcctagaaagtacctgtcagatacaccttactacccctgggtacctccagcacctaagttttctgtaagcttcaagcttggatttaaaccctaaataaaatgcaaagccgtggaactttcacttgtcggtgtctacctcttaaggtca

SEQ ID NO: 2827 - protein, 743 aa, Alphatorquevirus sp.
MAWGWWRRRWTWPRRRRWRQWRRRRRLPRRRPRRPVRRRRQRRVRRRFYRGRRRGWRRRRYIRRRRRVRRKKLVLTQWQPATRRKCVIKGVLPLVWCGYLRSGRNYALHSDDTPKQGEPFGGSLSTTSFNLKVLYDQHQRGLNRWTFPNDQLDLARYKGCKFTFYRNKLTDFIAQYDIAAPFALDKNSSPSYAPGIMMQAKNKILIPSYNTKPRGRQKISVKIPPPKLFVDKWYSQEDLCSVNLVSLAVSAADFVHPFGSPQTDTPCVTFQVCESFLNSVIGFSSTKQKQVLDEMYNKNQYWASHLTPFFTTGLKNPYPAVPETASPPNSVTALHTLTASQIRIGGDTSYQWYPYNMKAYKSKLDSIRKQYFDWLTIKLPQPTQSDYGMPNPHPTPTNNYYEYHLGLFSPIFIGPTRTANMFPAAYFDCTYNPLNDKGVGNHVWFQYNSKADTQIATTGLYCHIQDKPLWAALYGYEDFVESVLGPNVDAESVGLVIVICPYTIPPLYDKKNPGMGWIFYDSKFGNGKWLDGRGHIPVYWQTRWRPEMMFQHEVIRDIVQTGPFSYKDELKNSVLVAKYKFYFTWGGNMVSQQSIRNPCKTNEHDSDSNRYTRTVQVVDPLTMGPRWVFHAWDWRRGYVSEQALKRVSEKPLDYEEYFKKPKRPRIFPLSEGADQSHRLEEDSSSEEEKSLSLIEETTPAIQEQFRKQLKRQQRLGQQLKLLQLHLLKTQAGLQINPLLFTHA

SEQ ID NO: 2828 - protein, 152 aa, Alphatorquevirus sp.
MFVGRVWRKKREVLLSALRATKTPRRAMSWRPPVHHAAEIDRNWYQSVYKSHAACCGCGNFVLHLNTLADRYGFASGPSPPGDPGPRPPARLRRQNATENPNSGPRALPWRGDGGEDAGRGPEGGDGGNGGAADDYREEDLDALFAAVDRDE

SEQ ID NO: 2829 - protein, 59 aa, Alphatorquevirus sp.; identical to SEQ ID NO: 869

SEQ ID NO: 2830 - DNA, 2907 bp, Alphatorquevirus sp.
ctaagcactccggtgagtttacacaccgcagtcaaggggcaattcgggctcgggactggccgggctgtgggcaaggctcttagggttatcgctcttaaaaagctatgtttgttggcagggtctggagaaagaaaagggaagtgctactgtccgcactgcgagctacaaaaacgcctaggcgggctatgagctggcgaccaccggtccaccatgccgcggagatcgatagaaactggtatcaatcagtttataagtcccacgccgcttgctgtggctgtggcaattttgtgctgcatcttaatactctggctgatcgctacgggtttgcttcggggccatcaccgccaggtgatccgggcccgcgtcccccggcgcggctaagaaggcagaacgctaccgagaaccccaatagcggtcccagagccctgccatggcgtggggatggtggagaagacgctggacgtggcccagaaggaggcgatggaggcaatggaggcgccgcagacgactaccgagaagaagacctagacgccctgttcgccgccgtcgacagagacgagtaaggaggcgcttttaccgggggaggcgaaggggatggcgacgcagacggtacataagacgcagacgcagactaagacgcaaaaaactagtagtgactcagtggcagccagccaccagacgcaaatgtgttataaagggggttctgccccttgtgtggtgcggctacctccgcagcggcagaaactacgccctgcactctgacgataccccaaaacaaggagagccctttggagggtctcttagcaccacatcctttaacctaaaagtactgtatgaccagcatcaaagaggactgaacagatggactttccccaacgaccaactagacctagctagatacaagggctgcaaattcacattctacagaaacaaactcactgactttatagcccagtatgacatagctgctccctttgcactagacaaaaacagcagcccctcttatgccccagggataatgatgcaggccaaaaacaaaatacttattcccagctacaacactaaaccaaggggtcgccaaaaaatttcagttaaaatacctccccccaaactatttgtagataagtggtactcgcaagaggacctctgttccgttaatcttgtgtcacttgcggtttctgcggctgactttgtacatccgttcggctcaccacaaactgacactccttgtgtaaccttccaggtttgcgagagcttcctcaattctgtaataggctttagctctactaaacaacaccaagtactaagtgaaatgtacaacaaaaatcaatattgggcctcacatctcactccatttttcactacaggccttaaaaatccatatccagccagtccccaaacaccatcagctccaagctcagtaacagcaacaaagacattaactgcatcacaaataagaataggtggagacacttcatatcaatggtatccatacaacatgaaaggacaagaatcaacactacatgacattagaaagcaatactttgactggcttactataaaacttccacaaccaacacaatcagactatggaatgccaaacccacatccaacacctacaaataattactatgaataccacctaggcctttttagccctatatttataggtcccactagaacagcaaacatgtttccagcagcatactttgactgtacatacaaccctttaaatgacaaaggagtaggcaaccacgtatggttccagtacaacagcaaagcagacacacaaatagccacaactggcctatactgccacatacaagacaagcccctgtgggcagccctttatggctacgaagactttgtagaatcagtactaggtcccaatgtagatgctgaatctgtaggccttgtaatagttatatgtccatacaccataccacctttatatgacaaaaaaaatccaggcatgggctggatattttatgacagtaaatttggaaatggcaaatggctagacggcaggggacatattcctgtatactggcagacccgctggcgccctgaaatgatgttccaacatgaggttataagagacattgttcaaacaggaccctttagctacaaagacgaacttaaaaactctgtactggtagcaaaatacaagttctactttacatggggcggtaacatggtgtctcaacagagcattagaaacccctgcaagacgaacggacacgactccgactccaatagataccctagaacagtacaagttgttgacccgcttaccatgggaccccgctgggtattccacgcctgggactggagacggggctatgttagcgaacaagctctcaagagagtgtcagaaaaacctcttgactatgaagagtattttaaaaagccaaagagacctagaatattccctttatcagaaggagcagaccagtcccacaggctcgaagaagactcaagttccgaggaagaaaaatcgctatcactcatcgaagagacgaccccggcgatccaggagcagttcagaaagcagctcaagcgacagcagcgactcgggcagcagctcaaactcctccaactacacctcctcaaaacgcaagcgggtctccaaataaaccccctattatttacccatgcataaacaaagtgtacatgtttccagaaagggcaccaaaaccttctcccagcaagggagactgggaaacagagtaccaggcctgtcgtcactgggacagacctcctagaaagtacctgtcagatacaccttactacccctgggtacctccagcacctaagttttctgtaagcttcaagcttggatttaaaccctaaataaaatgcaaagccgtggaactttcacttgtcggtgtctacctcttaaggtca

SEQ ID NO: 2831 - protein, 743 aa, Alphatorquevirus sp.
MAWGWWRRRWTWPRRRRWRQWRRRRRLPRRRPRRPVRRRRQRRVRRRFYRGRRRGWRRRRYIRRRRRLRRKKLVVTQWQPATRRKCVIKGVLPLVWCGYLRSGRNYALHSDDTPKQGEPFGGSLSTTSFNLKVLYDQHQRGLNRWTFPNDQLDLARYKGCKFTFYRNKLTDFIAQYDIAAPFALDKNSSPSYAPGIMMQAKNKILIPSYNTKPRGRQKISVKIPPPKLFVDKWYSQEDLCSVNLVSLAVSAADFVHPFGSPQTDTPCVTFQVCESFLNSVIGFSSTKQHQVLSEMYNKNQYWASHLTPFFTTGLKNPYPASPQTPSAPSSVTATKTLTASQIRIGGDTSYQWYPYNMKGQESTLHDIRKQYFDWLTIKLPQPTQSDYGMPNPHPTPTNNYYEYHLGLFSPIFIGPTRTANMFPAAYFDCTYNPLNDKGVGNHVWFQYNSKADTQIATTGLYCHIQDKPLWAALYGYEDFVESVLGPNVDAESVGLVIVICPYTIPPLYDKKNPGMGWIFYDSKFGNGKWLDGRGHIPVYWQTRWRPEMMFQHEVIRDIVQTGPFSYKDELKNSVLVAKYKFYFTWGGNMVSQQSIRNPCKTNGHDSDSNRYPRTVQVVDPLTMGPRWVFHAWDWRRGYVSEQALKRVSEKPLDYEEYFKKPKRPRIFPLSEGADQSHRLEEDSSSEEEKSLSLIEETTPAIQEQFRKQLKRQQRLGQQLKLLQLHLLKTQAGLQINPLLFTHA

SEQ ID NO: 2832 - protein, 152 aa, Alphatorquevirus sp.; identical to SEQ ID NO: 2828

SEQ ID NO: 2833 - protein, 59 aa, Alphatorquevirus sp.; identical to SEQ ID NO: 869

SEQ ID NO: 2834 - DNA, 2907 bp, Alphatorquevirus sp.
ctaagcactccggtgagtttacacaccggagtcaaggggcaattcgggctcgggactggccgggctgtgggcaaggctcttagggttatcgctcttaaaaagctatgtttgttggcagggtctggagaaagaaaagggaagtgctactgtccgcactgcgagctacaaaaacgcctaggcgggctatgagctggcgaccaccggtccaccatgccgcggagatcgatagaaactggtatcaatcagtttataagtcccacgccgcttgctgtggctgtggcaattttgtgctgcatcttaatactctggctgatcgctacgggtttgcttcggggccatcaccgccaggtgatccgggcccgcgtcccccggcgcagctaagaaggcacaacgctaccgagaaccccaatagcgctcccagagccctgccatggcgtggggatggtggagaagacgctggacgtggcccagaaggaggcgatggaggcaatggaggcgccgcagacgactaccgagaagaagacctagacgccctgttcgccgccgtcgacagagacgagtaaggaggcgcttttaccgggggaggcgaaggggatggcgacgcagacggtacataagacgcagacgcagagtaagacgcaaaaaactagtactgactcagtggcagccagccaccagacgcaaatgtgttataaagggggttctgccccttgtgtggtgcggctacctccgcagcggcagaaactacgccctgcactctgacgataccccaaaacaaggagagccctttggagggtctcttagcaccacatcctttaacctaaaagtactgtatgaccagcatcaaagaggactgaacagatggactttccccaacgaccaactagacctagctagatacaagggctgcaaattcacattctacagaaacaaactcactgactttatagcccagtatgacatagctgctccctttgcactagacaaaaacagcagcccctcttatgccccagggataatgatgcaggccaaaaacaaaatacttattcccagctacaacactaaaccaaggggtcgccaaaaaatttcagttaaaatacctccccccaaactatttgtagataagtggtactcacaagaggacctctgttccgttaatcttgtgtcacttgcggtttctgcggctgactttgtacatccgttcggctcaccacaaactgacactccttgtgtaaccttccaggtttgcgagagcttcctcaattctgtaataggctttagctctactaaacaacaccaagtactaagtgaaatgtacaacaaaaatcaatattgggcctcacatctcactccatttttcactacaggccttaaaaatccatatccagccagtccccaaacaccatcagctccaagctcagtaacagcaacaaagacattaactgcatcacaaataagaataggtggagacacttcatatcaatggtatccatacaacatgaaaggaaaagaatcaatactacatgacattagaaagcaatactttgactggcttactataaaacttccacaaccaacacaatcagactatggaatgccaaacccacatccaacacctacaaatgattactatgaataccacctaggcctttttagccctatatttataggtcccactagaacagcaaacatgtttccagcagcatactttgactgtacatacaaccctttaaatgacaaaggagtaggcaaccacgtatggttccagtacaacagcaaagcagacacacaaatagccacaactggcctatactgccacatacaagacaagcccctgtgggcagccctttatggctacgaagactttgtagaatcagtactaggtcccaatgtagatgctgaatctgtaggccttgtaatagttatatgtccatacaccataccacctttatatgacaaaaaaaatccaggcatgggctggatattttatgacagtaaatttggaaatggcaaatggctagacggcaggggacatattcctgtatactggcagacccgctggcgccctgaaatgatgttccaacatgaggttataagagacattgttcaaacaggaccctttagctacaaagacgaacttaaaaactctgtactggtagcaaaatacaagttctactttacatggggcggtaacatggtgtctcaacagagcattagaaacccctgcaagacgaacgaacacgactccgactccaatagatacactagaacagtacaagttgttgacccgcttaccatgggaccccgctgggtattccacgcctgggactggagacggggctatgttagcgaacaagctctcaagagagtgtcagaaaaacctcttgactatgaagagtattttaaaaagccaaagagacctagaatattccctttatcagaaggagcagaccagtcccacaggctcgaagaagactcaagttccgaggaagaaaaatcgctatcactcatcgaagagacgaccccggcgatccaggagcagttcagaaagcagctcaagcgacagcagcgactcgggcagcagctcaaactcctccaactacacctcctcaaaacgcaagcgggtctccaaataaaccccctattatttacccatgcataaacaaagtgtacatgtttccagaaagggcaccaaaaccttctcccagcaagggagactgggaaacagagtaccaggcctgtcgtcactgggacagacctcctagaaagtacctgtcagatacaccttactacccctgggtacctccagcacctaagttttctgtaagcttcaagcttggatttaaaccctaaataaaatgcaaagccgtggaactttcacttgtcggtgtctacctcttaaggtca

SEQ ID NO: 2835 - protein, 743 aa, Alphatorquevirus sp.
MAWGWWRRRWTWPRRRRWRQWRRRRRLPRRRPRRPVRRRRQRRVRRRFYRGRRRGWRRRRYIRRRRRVRRKKLVLTQWQPATRRKCVIKGVLPLVWCGYLRSGRNYALHSDDTPKQGEPFGGSLSTTSFNLKVLYDQHQRGLNRWTFPNDQLDLARYKGCKFTFYRNKLTDFIAQYDIAAPFALDKNSSPSYAPGIMMQAKNKILIPSYNTKPRGRQKISVKIPPPKLFVDKWYSQEDLCSVNLVSLAVSAADFVHPFGSPQTDTPCVTFQVCESFLNSVIGFSSTKQHQVLSEMYNKNQYWASHLTPFFTTGLKNPYPASPQTPSAPSSVTATKTLTASQIRIGGDTSYQWYPYNMKGKESILHDIRKQYFDWLTIKLPQPTQSDYGMPNPHPTPTNDYYEYHLGLFSPIFIGPTRTANMFPAAYFDCTYNPLNDKGVGNHVWFQYNSKADTQIATTGLYCHIQDKPLWAALYGYEDFVESVLGPNVDAESVGLVIVICPYTIPPLYDKKNPGMGWIFYDSKFGNGKWLDGRGHIPVYWQTRWRPEMMFQHEVIRDIVQTGPFSYKDELKNSVLVAKYKFYFTWGGNMVSQQSIRNPCKTNEHDSDSNRYTRTVQVVDPLTMGPRWVFHAWDWRRGYVSEQALKRVSEKPLDYEEYFKKPKRPRIFPLSEGADQSHRLEEDSSSEEEKSLSLIEETTPAIQEQFRKQLKRQQRLGQQLKLLQLHLLKTQAGLQINPLLFTHA

SEQ ID NO: 2836 - protein, 152 aa, Alphatorquevirus sp.; identical to SEQ ID NO: 868

SEQ ID NO: 2837 - protein, 59 aa, Alphatorquevirus sp.; identical to SEQ ID NO: 869

SEQ ID NO: 2838 - DNA, 2906 bp, Alphatorquevirus sp.
cgaggagtgcgccccttcaccaaggggcaagtcaaggggcaattcgggctcgggactggccgggctatgggcaaggctcttaaagaatgcacttttctcgaatttctaggcaaaagaaaaggaaagtgctactgcgacgtgtgcgagctaaaccgaaagctaggccttcaatgagccaccggcctccagcacacaatgccgcgggcattgagcgcctctggttcgacagttgctttaggtcccacggatcttgttgtggttgtggtaattttgttaatcatattcttgtactggctaatcgctatggctttcaggccggtccgccggcgcaacgtggtcctcggggtgcacccgcactgagggccctgccgcctcccggggaagccaatcccggtgacggcgagcaacaaccatggcgtggcgatggtggtggcagagacgaaggagacggtggccgtggaggagacgccgctggagacgcctacggacaagacgacctcgacgccctgttcgccgccgtcgaagaagagcaacagtaaggagaaggaggtgggggcgcagacgggggcgacgcacatacaccagacgcagggccagacgcagacgcagacccagaaagaaactgctgctgtctatgtggcagccccagactataaggaaatgcactattaggggctttactagcctaataatatgtggcaactccaaatcggggcgaaactacgccctccacagcgaggactacaccacacagatagagccctttgggggcagctttagcaccactacatggagcctgaaggtgctgttcgacgagcaccaaaaaatgctcaacaaatggagctaccccaacacacaactagacctcgccagatacaaagggtgcaccttctacttctacagagacttaaaaacagactatatagtaacctggagtagaaatccaccctttaaactgaacaaatacagctctcccatgctgcatccaggcatgatgatgcagagaaaaaagaaactaatagtacctagctttcaaaccagacccaagggcaaaaagagatacagggtccgcataagaccccccaacatgtttgaggacaagtggtacacacaagaggacctgtgtcccgttaatcttgtgtcacttgcggtttctgcggctacactgacacatccgttctgcccaccactaacgaacaatccttgcatcaccttccaggtgttgaaagaattctattacaaagccataggcattaacaactctttaacatcagagtatacagaaatagaaaactgtttatatcaagataactgtacatactatcaaacaggccaagttttagcacagctaaatccaaactttaaaccagcagtaaatggaggtacaaaccaagatctaggcacagatgtaccatggctaagacaaacaaatgccaccaatggatttctaactaaaaataaccctgtatttggaatgtgtagctacaaaccaaataaaactcaaatacttaaagtaagaaagtggtactgggatcaactaaacactaaaaataacttacatggccagtatggaaaagctacacttgagcaatttgaatatcacataggcttttacagctcaatattcttaagcccccaaagagacctacagttccctgcagcataccaagatgtaacttataatccaaactgtgacagggctgtaggaaacatggtgtggtttcagtacagtacaaaagccaccacagaattcaatgagacccagtgcaaatgtttgcttaaagacattccactgtgggcagccttctatggctactctgactttataattcaagagctaagcataagcacagaaatatataacataggcctagtctgtgtcatttgcccatacacctttccccctatgtacaacaaaacaaagcccacctgggggtacgtgttctatgacaccacctttggcaatggcaagatgcccaacgggtctggccacatccctgtgtactggcagcagagatggtggcccagaatggcctttcagcatcaagtaatgcatgactttacactaacaggcccctttagctataaagatgactatgctaacgcaacattcactgcaaaatataagtttgatttcttatggggtggtaatatgatatccgaacaggttatcaagaacccgtgcaaatcagagagtgaacacgcctcctacccccatcgagtcagtcgcgacctacaaattgttgacccagcaaccatgggtccccaatatgtattccacacctgggactggagacggggactttttggcagagatgctctcaaaagagtgtcacaaaaaccgacagatgcttttgagtttacaaacccttacaaaagaccaagatatctccctcctacagaccaagaagaagcagagcaagaaaaagacttctattcaccggagcaaagactccggtactcgtcagaagagaaccaggagacgagcccgccgcaaagcgagcagctccgagagcgagtcctctcactccagctcacagagcagcagcgagtcggagagcagctccgattcctgttacagcaagtcctcaaaacgcaagcaggtctccacctaaacccccaattatttcaaaagctgtaaacaaggtttacctgtttgagccccccaggcctgtaatccccataatgggcagagaggcctgggaagacgagtacaccacttgcaaggtgtgggatagaccagctagacagaaccacacagacacccccttctacccctgggctcctaaggcccccccacaattcaaagtgtctttcaaacttggctggaaataaataaacaaggccttaaactgttcacttgtcggtgtctacctgttaaggtcactaagcactccgagcgtcag

SEQ ID NO: 2839 - protein, 742 aa, Alphatorquevirus sp.
MAWRWWWQRRRRRWPWRRRRWRRLRTRRPRRPVRRRRRRATVRRRRWGRRRGRRTYTRRRARRRRRPRKKLLLSMWQPQTIRKCTIRGFTSLIICGNSKSGRNYALHSEDYTTQIEPFGGSFSTTTWSLKVLFDEHQKMLNKWSYPNTQLDLARYKGCTFYFYRDLKTDYIVTWSRNPPFKLNKYSSPMLHPGMMMQRKKKLIVPSFQTRPKGKKRYRVRIRPPNMFEDKWYTQEDLCPVNLVSLAVSAATLTHPFCPPLTNNPCITFQVLKEFYYKAIGINNSLTSEYTEIENCLYQDNCTYYQTGQVLAQLNPNFKPAVNGGTNQDLGTDVPWLRQTNATNGFLTKNNPVFGMCSYKPNKTQILKVRKWYWDQLNTKNNLHGQYGKATLEQFEYHIGFYSSIFLSPQRDLQFPAAYQDVTYNPNCDRAVGNMVWFQYSTKATTEFNETQCKCLLKDIPLWAAFYGYSDFIIQELSISTEIYNIGLVCVICPYTFPPMYNKTKPTWGYVFYDTTFGNGKMPNGSGHIPVYWQQRWWPRMAFQHQVMHDFTLTGPFSYKDDYANATFTAKYKFDFLWGGNMISEQVIKNPCKSESEHASYPHRVSRDLQIVDPATMGPQYVFHTWDWRRGLFGRDALKRVSQKPTDAFEFTNPYKRPRYLPPTDQEEAEQEKDFYSPEQRLRYSSEENQETSPPQSEQLRERVLSLQLTEQQRVGEQLRFLLQQVLKTQAGLHLNPQLFQKL

SEQ ID NO: 2840 - protein, 150 aa, Alphatorquevirus sp.
MHFSRISRQKKRKVLLRRVRAKPKARPSMSHRPPAHNAAGIERLWFDSCFRSHGSCCGCGNFVNHILVLANRYGFQAGPPAQRGPRGAPALRALPPPGEANPGDGEQQPWRGDGGGRDEGDGGRGGDAAGDAYGQDDLDALFAAVEEEQQ

SEQ ID NO: 2841 - protein, 60 aa, Alphatorquevirus sp.
LFEPPRPVIPIMGREAWEDEYTTCKVWDRPARQNHTDTPFYPWAPKAPPQFKVSFKLGWK

SEQ ID NO: 2842 - DNA, 2906 bp, Alphatorquevirus sp.
tcgggactggccgggctatgggcaaggctcttaaaaaagcatgtttctcggcagggtttggagaaagaaaaggtcgctgccactgcccgagctgcgaactcctgcgaaaaaaccatctctaatgagctggtcccagcctctgcacaatgtcaccacccgcgagggcttcttttacgcggggtgtaagcagcttcataactgcttttgtggttgtgatgattttattaatcatcttcttcgcatccagacccagcagggtccctctccctcgcggcccttcactcctccgtcaacaccacgccctgtaatccgtagagccctgccggcaccggcggctccggacgcaccggcgccatggcgtggagctggtggtggacccgccgccgacgcagaccgtggacccggaggagatggaggagactacgcacccggagacctcgacgacctgtacgccgccgtcgacgccgaaaacgcagagtaaggaggagacggtggggaaggagacgagggcgacgaacattttacaaacgcaggtttagaaagagacgcaggcgacgaaaaaagctagttcttactcagtggaaccctcagactattagagcatgttctataaggggcacagtatgcctagtaatgtgtggacacacaaaagccagcagaaactatgctctgcactcagaagactatgtgccacaactgcatgctatgggagggtcttttagtactactacctggagcctaaaagccctatatgatgagcaccagaaattccacaacaggtggtcctaccccaacactcagctagacctagccagatacagggggtgtcgctggtggttttacagagaccccaaggtagactacatagtcacctactacacagtacctccatttaaaataaacaaatacactagtccaatgctacacccaggcatgatgatgcagtacaaaaagaaaatattagtacccagctatcaaacaaaacctaaaggcaaatccaaaattagtatttttattaagcccccagttctttttgaagacaagtggtacactcagcaagacttgtgtcccgttaatcttatgtcacttgcggttagcgcagcttcctttatacatccgttctgcccaccagaaagtgacaacatgtgtattacattccaagttttgaaacaattttattacacacaaatgagtgtaaccgcaatgaacggcacaaaagccacagacgaagacgaagccattctttcaaaactttactcaactgccagtttttggcagtctttacacacacagtctttaatttctactactcaaaaaactgctgtattttctgaccacgataagtttccaaacgtatcaaactggttaacaaaagacatagatgcaacaacatttaaaactggaaacaatagcatatatggccaagtaaattacagaccaaataaagataagatgacacaaatactacaatggtactttaaacaagaatcactaccaaacgatcctcacgggcaatacggaaaaccagtatattatccagccagctatcacataggaaagtacagtcccatatttttaagcccatacagaaccaatctccaatttgaaacagcataccaagacaccacatacaaccccaacacagacaaaggtttaggaaacaaaatgtggatacaatcagtaactaaaaaaaacacaaacctagactcacaatgcaaatgtttacttgaagacatacctttgtgggccatggctacaggctatggagaattttgtgagtctgaacttaactctgaagtgtggaacctatacattgtttgcattatatgtccctacaccaagcctcaactatattcaaaaacaaacccaacacagggctgggtattctatgatacactatttggagatggcaaaatgcccaccgggtcaggcctagtacccgtgtggctacaaagcaggtggtaccccagactagtgttccaacaacaagtactacacgatatttacctcacaggaccctttagttacaaagatgacctaaagagctttactataaatgccaggtacaaattcaaattcttatggggcggcactataatccccgaacaggttattaaaaacccgtgcaaagagcaagactcgccattcacctttaccggtagacagcctcgcgacctacaaattgctgacccacaaaccatgggcccacaatgggttttccacacctgggactggcgacgaggactatttggtgaaaatgctctcaaaagagtgtcagaacaaccaagcaatgatgcagactattatgctccaccaaaaaaacctagactattccctccaacagacctccaagagcaagaaagaggctcagatttcacactgcaggaactcaggatcctctcggagagggcgccgtcgcaaacaagcgaagaagaggacccgcaagaggagcaccagctccagcagcaagagctccagctccgactccagcagcagttcagaatcaggcagcaactgcagcacctattcgtacaagtcctcaaaacccaagcaggtctccatataaacccattatttttaaaccctgcataaaccaggtgtacatgtttcctcctaacacccctaaacccattaccactgcacaagattggaaagaggagtatgaatgctgtaaatactgggatagaccccccagaaagtaccttacagaccgccccttctacccctggatgcccaaggagccccctcagtgtcgtgtcagctttaaacttggcttccaataaaatttcaaggcctttcaaatttcacttgtcggtgtttacctctataagtcactaagcactccgagcgtaagcgaggagtgcgacccttccccctgactcaacttcttcggagccgcgcgctac

SEQ ID NO: 2843 - protein, 745 aa, Alphatorquevirus sp.
MAWSWWWTRRRRRPWTRRRWRRLRTRRPRRPVRRRRRRKRRVRRRRWGRRRGRRTFYKRRFRKRRRRRKKLVLTQWNPQTIRACSIRGTVCLVMCGHTKASRNYALHSEDYVPQLHAMGGSFSTTTWSLKALYDEHQKFHNRWSYPNTQLDLARYRGCRWWFYRDPKVDYIVTYYTVPPFKINKYTSPMLHPGMMMQYKKKILVPSYQTKPKGKSKISIFIKPPVLFEDKWYTQQDLCPVNLMSLAVSAASFIHPFCPPESDNMCITFQVLKQFYYTQMSVTAMNGTKATDEDEAILSKLYSTASFWQSLHTQSLISTTQKTAVFSDHDKFPNVSNWLTKDIDATTFKTGNNSIYGQVNYRPNKDKMTQILQWYFKQESLPNDPHGQYGKPVYYPASYHIGKYSPIFLSPYRTNLQFETAYQDTTYNPNTDKGLGNKMWIQSVTKKNTNLDSQCKCLLEDIPLWAMATGYGEFCESELNSEVWNLYIVCIICPYTKPQLYSKTNPTQGWVFYDTLFGDGKMPTGSGLVPVWLQSRWYPRLVFQQQVLHDIYLTGPFSYKDDLKSFTINARYKFKFLWGGTIIPEQVIKNPCKEQDSPFTFTGRQPRDLQIADPQTMGPQWVFHTWDWRRGLFGENALKRVSEQPSNDADYYAPPKKPRLFPPTDLQEQERGSDFTLQELRILSERAPSQTSEEEDPQEEHQLQQQELQLRLQQQFRIRQQLQHLFVQVLKTQAGLHINPLFLNPA

SEQ ID NO: 2844 - protein, 146 aa, Alphatorquevirus sp.; identical to SEQ ID NO: 834

SEQ ID NO: 2845 - protein, 59 aa, Alphatorquevirus sp.; identical to SEQ ID NO: 2548

SEQ ID NO: 2846 - DNA, 2906 bp, Betatorquevirus sp.
cgggagccgaaggtgagtgaaaccaccgtagtctaggggcaattcgggctagatcagtctggcggaacgggcaagaaacttaaaagtctaggggcaattcgggctagatcagtctggcggaacgggcaagaaacttaaaatattttattttacagatgtcaaagcagctacaaccaacaaaatacacaccaagacaaacagaacttaactggattaattcaacaaaacacatccacgacctgttttgctcctgcgacgactttgttaaacactttttaatagtgttaaacaaatttggaaaagcaccaaaaccagaagaagaatttactaacataaaatgccttattaccggagaagatactatcaaagaagaccccgttggaatagataccgaagaattagaaaaaatatttggagaaggtactggagaacaagaagaagaacgccctactacctccgaggggtaagaaaaagatttaatagaaaatttaagtatatgaaattaaaacaatggcaaccacagactataagaaactgtaaagtagtaggacttcgacctttatttcaaggaagtcctgaaagaatgaacaataactatgttcaatcaatatattcttttgtccctccagaagaacctggaggcggtggatggacattaatgattgagactttaagtagcttatgggaagattgggaacacttaaaaaatatatggactagtagtaatgctggactaccattagtaagatttatgggagtatatttaacattttttcaatcagaatatacagactacatagtacaggtagacagatgttttcctatgatagacacaaaatacaaacatgcagatagtgcaccaaacagaatgctactaaaaagaaatgttattaaagtaccctcattacaaactagaagaaaaaagagaccatttaaaaagatatttgtaccaccaccctcacaatttacaaacaaatggtactttcaaaatgaagtatgtagaataccattagtaatgattaccgcagtctcatgcgacttcagataccctttttgtgcaagctcttgtgctagtaataatcttacattaagatgcttaaacattaaattttttcaattccacaactttgatcaatacccaaccacagtaggatatcaacctaaaccagaaacatacatgtacaccacatcaggacgagaccctgataaaaaacccacagaaacaactttaatatacctaggagacacaaaaacaaatacaccaggcagagcaacagccaaaggcgaccataaaaaaacagtaaattggggcaatccattttggcatcactatatagacggtagtgtaaaagtatggacaggaacaaatgcccctacagctgaagcaaacacaattatagaaggcttatcagaaatgacagaaccatactttttaacatacagatacaatccagaaagagacaaaggagattccaacagaatttacttagtagaaaactttaaaaacacaggatggctacctccacaaaacaaaaacctaataatggaaggatttcctttatatgatatatgctggggatacacagattggcaagaaaaactacatgacattcaaaacatagatcaacattacatgtttgtaatacaaacagaccaatttaatgaaccactacaagcatatgtaccaatagacccattctttataaatggtcatggaccatatgaagctccacttacaaactatgacaaagcacactggcatccaaaacaaagatttcaaacaaaagccataaatgatatttgcttaacaggaccaggttgctgtagatcaccatatggtaactatgtacaggcaaaatttaaatatgattttcgctttaaatggggaggctgtcctaaaacattagaacaaccttatgatccttgttcacagccaaattggactgtacccaataacttccaagaaagacttcaaattacgaatccagaatccaaaccacaaaccgaactatatgactttgactggcgacgagactatgtctcacaaaaagctattaaaagaattcaaaaatacacggaacctgacgaaaatttacaaatctttgcaggatccagcctcgagcctccaatactacgacaaacacaaaccagcagctcggaaacagaagaaacctcggaagaagaacaaatatcgctcaaagaccagatactcaagctcaagcgacaacagcgaaagctcaagcaccgaatcagacagcgattaaccctacaaagtatactataaaaaactgtaacgtaaaagtacaactatttccacctacaacaccaccaaacagacgaatgacaccatgggaagaggagcaagaaagatttgatgcctacgtgtggaaaagaccccgtagaacatttattagagaccctccaacatatccatggtgtccccctgaaccatatgtaaattttgacctgggatggaaaaataaataaagaaataaagggctaggccccattaattcacactcggtgtctgttcctttaagtctcaacttatttaaacagactccgcctcccaaaattcgggcgccaaaagggggctccgcccccttaaacccccaagggggctccgcccccttaaacccccaagggggctccgcccccttacaccccctaataaatattcaacaggaaaaccacataattagaattgccgaccacaaaccgtcacttacttcccttttttaacatacttccctttttgctcattattattcattaaattaattagtaaacagtgtaattccggggaggagctccatacctatataactaactatacttccgaatggctgagtttatgccgccagacggagacgggatcacttcagtgactccaggctgatcttggg

SEQ ID NO: 2847 - protein, 648 aa, Betatorquevirus sp.
MPYYRRRYYQRRPRWNRYRRIRKNIWRRYWRTRRRTPYYLRGVRKRFNRKFKYMKLKQWQPQTIRNCKVVGLRPLFQGSPERMNNNYVQSIYSFVPPEEPGGGGWTLMIETLSSLWEDWEHLKNIWTSSNAGLPLVRFMGVYLTFFQSEYTDYIVQVDRCFPMIDTKYKHADSAPNRMLLKRNVIKVPSLQTRRKKRPFKKIFVPPPSQFTNKWYFQNEVCRIPLVMITAVSCDFRYPFCASSCASNNLTLRCLNIKFFQFHNFDQYPTTVGYQPKPETYMYTTSGRDPDKKPTETTLIYLGDTKTNTPGRATAKGDHKKTVNWGNPFWHHYIDGSVKVWTGTNAPTAEANTIIEGLSEMTEPYFLTYRYNPERDKGDSNRIYLVENFKNTGWLPPQNKNLIMEGFPLYDICWGYTDWQEKLHDIQNIDQHYMFVIQTDQFNEPLQAYVPIDPFFINGHGPYEAPLTNYDKAHWHPKQRFQTKAINDICLTGPGCCRSPYGNYVQAKFKYDFRFKWGGCPKTLEQPYDPCSQPNWTVPNNFQERLQITNPESKPQTELYDFDWRRDYVSQKAIKRIQKYTEPDENLQIFAGSSLEPPILRQTQTSSSETEETSEEEQISLKDQILKLKRQQRKLKHRIRQRLTLQSIL

SEQ ID NO: 2848 - protein, 117 aa, Betatorquevirus sp.
LAERARNLKYFILQMSKQLQPTKYTPRQTELNWINSTKHIHDLFCSCDDFVKHFLIVLNKFGKAPKPEEEFTNIKCLITGEDTIKEDPVGIDTEELEKIFGEGTGEQEEERPTTSEG

SEQ ID NO: 2849 - DNA, 2906 bp, Betatorquevirus sp.
caggagccgtaggtgagtgaaaccaccgaagtctaggggcaatatgggctagatcagtctggcggaacgggcaagaaactaaaatctaggggcaatatgggctagatcagtctggcggaacgggcaagaaactaaaataatttgtattttacagtatgaacttctacaaagaaccagtttatggtccaaaaaggcaagaattaaactggctaaatggctgtattatagctcatgacaacttttgcggctgcaacactccagcagatcatcttttatggctactttctactaaaagtggatactctgttgttaaaaaccaacaaaaatgccttactactggaacagaagaaactactggagaaaaagacgactttggcttagaagaaggagaattagagctgctcttcgcagaaaatacagacaaagaagatactgggtaagaaaatttaaattctttcctaagactataaaattaagacaatggaacccaaaagtacaaaaaacttgttatataaaaggactaataccactctttctatgtggtaaagacagacaagtatttaactatatacaatacaaagaatctatggttccagaatctcaatcgggaggcggtggatggtctcttatggtatttaatttaggaggactgtacgacgaatttagaaaactaaataactggtggacagcagacaatgacggactaccactatgtaaatacatgggctgtgaatttaaattttatcaatcatgggacacagactatattgtaaactacaaaacttgtccccctatgacagacaccgagctacaacacttagactcacatccaagcagaatgctaatgaacaaaaaagctattattgtagaaaatataataagaaaatctaacaaaagaagaaaatacaaaagaataaaatttccacctccatcactgttaaaaaatcaatggttttttcaacaagacctttgtaattacaacttactaatgctaacagcttcagcatgttcactagaccaaatgtaccttccaaacaatgaactatcaaacaacattacattaatttctctaaacacaaatatatttcatgacattaactttttaaaagatgggacaacaggatattcacctaaacccaactttcacttatggggagaaccaacaccatttacaggctccgccgtaacaacggcaaacggacttatatacctaggaaacgtaaaaacctacacctatggcaatccagtctccgattacacttcatttgaaactcaatcaaactggggaaacccatttcattcactacacggacaccatgacacacacatatactacagtcaacaattaccaacaaaatccaaaccaccatcacaaataaatgtcacattagcagaagaactattcacaaaatgtagatacaaccccctaaaagacactggagacggtaacgaagtctactttaaaagcatttctatttcacgaggctacatatatgatccacctgaagacccacaagttcaaattcacgggtttcccttatggctaattttctggggatggacagactggcaagaaaaactacatgccataaaccaaatacaattaaactacgcacttatagttaaatccaaatttataacaccaacaagggcagcatacctatttctagatgacttttttactaacccacaaataacagaactaacagataatgacacaaaacactggcaccctagatttaaataccaattaaaatcaacaaatctaataggaacaacaggaccttgctcacctagagtaaacaaaagtagcagcatacaagctcatgcattttataaatttcgttttaagtggggaggatgcccagctccaatgcacaacatcaaagacccttgcaaccagtccaagttccccgtgcccaataaccagctacaagcaatacaagcaacgcatccagggcaagatcccaaaacaatgctccacgactgcgacgaaagacgacaaacaattacaaagtctgctatcaaaagacttatgtcaatttctgaaactccaaaaactgtactttcaggaacgaaccaattcaacgcaccaatccaaaaagaaagcacatcggaggaaagctcctcggaagaagagaaagagacaacagtcagagagcaactcctccatatccgaaaacagcaccgaaagctcaagcgacagctccaccgactaaaacttttccaattataaaaactgttgaactatttccaaaacaaaaacctataaaactaagtccttatgataaggtgggatgggaaactgaactaatgtgctgtaaaatatttggcagaccaatgagatcatttttaactgatatgccattttactatgatacaaaaccagaacctcttgtaaattttaacctaaattttaaagactaggcctgcattaattcacttaacaagcatgtttaataaagttaaaacttaaataaacagacaccgcctcccttattcgccggccaagggggctccgcccccttaaacccccggggggggggcaaagcccccccccccttcccccacccaagccattaactaacccggcaatttacaacacaaaaccacaaaatttgcattgccgaccacaaactgacaggaaaaccacataatttgcattgccgaccacaaactgacaggaaaaccacaaaatttgcattgccaaccacaaaccgtcacctacttctgctttttataactacttccttaaaaattcatacatattcattaaattaattaataaacaccgtaattccggggaggagcattaccactatataactaactacactgacgaatggctgagtttatactgccagacggagacggcatcacgttagtgactgcaggctgatcttggg

SEQ ID NO: 2850 - protein, 636 aa, Betatorquevirus sp.
MPYYWNRRNYWRKRRLWLRRRRIRAALRRKYRQRRYWVRKFKFFPKTIKLRQWNPKVQKTCYIKGLIPLFLCGKDRQVFNYIQYKESMVPESQSGGGGWSLMVFNLGGLYDEFRKLNNWWTADNDGLPLCKYMGCEFKFYQSWDTDYIVNYKTCPPMTDTELQHLDSHPSRMLMNKKAIIVENIIRKSNKRRKYKRIKFPPPSLLKNQWFFQQDLCNYNLLMLTASACSLDQMYLPNNELSNNITLISLNTNIFHDINFLKDGTTGYSPKPNFHLWGEPTPFTGSAVTTANGLIYLGNVKTYTYGNPVSDYTSFETQSNWGNPFHSLHGHHDTHIYYSQQLPTKSKPPSQINVTLAEELFTKCRYNPLKDTGDGNEVYFKSISISRGYIYDPPEDPQVQIHGFPLWLIFWGWTDWQEKLHAINQIQLNYALIVKSKFITPTRAAYLFLDDFFTNPQITELTDNDTKHWHPRFKYQLKSTNLIGTTGPCSPRVNKSSSIQAHAFYKFRFKWGGCPAPMHNIKDPCNQSKFPVPNNQLQAIQATHPGQDPKTMLHDCDERRQTITKSAIKRLMSISETPKTVLSGTNQFNAPIQKESTSEESSSEEEKETTVREQLLHIRKQHRKLKRQLHRLKLFQL

SEQ ID NO: 2851 - protein, 94 aa, Betatorquevirus sp.
MNFYKEPVYGPKRQELNWLNGCIIAHDNFCGCNTPADHLLWLLSTKSGYSVVKNQQKCLTTGTEETTGEKDDFGLEEGELELLFAENTDKEDTG

SEQ ID NO: 2852 - DNA, 2906 bp, Alphatorquevirus sp.
ggcaaggctcttaaaaaagccatgtttctcggtaaactttacagaaagaagaggcgcctgccactgtccccactgtacactccacaaaaaactcgcaggcttctgactgctatgtggacacccccggcgcacaatgtccgcggccaggagagacagtggtacgagtcctgctttcgctctcacgcttgtttttgtggctgtggtgattttattcggcatctttgtgatctggcgaatgattttggacgtcctcctaccgctcaacgaccaccggcaccaccacctccagtaaggcctctgccagctctcccggcaccccccaacccctccggtagcagagcggcatggcctactggtggtacagacggagacgaagagccccgaggtggaggagacggcgctggagggttcgcagacctcgcagacgaagaactgctgtccgccgccgtagaggccgccgaagagtaagaaagaggagggggaggtggaggaggagttatagaaaatggcggaggggcagaaagagacgcaaacacaagagacgcttagtactgactcagtggcaacctgcttttataagacgctgctatatagtaggcttcttgcccctcataatctgcggagaaaacacctccgcaagaaactttgctacccactctgacgacctcatttccaacggaccgtacgggggaggcatgacgaccactaaattcaccctcagaatactgtatgacgaacacctcaggtggctaaactactggactgttagcaaccaggacctagacctgtgtagatacctggggggcaccttctatgcatacagacaccccacagtagactttattgtacagatacatactagtccccctttcctagacactcccctcacagggcccagcatacaccctggcatgctcatgctagcaaaaaacaaaatactaatacctagcctgaaaaccagaccaaacaaaaaacacaaagtaaaaattagattcaggcccccaaaactctttgaagacaagtggtacccccagtcagaactctgtgacaccacactactaaccgtctttgcaaccgcatgtgacctgcaatttccgttcggctcaccactaactgacaaccattgcgtcaacttccaggtgctaggttccgcttacaaacggcacctcagtatacttcctgagaaactaaacttagctaaagatcactttgatcgcagcttatattcagttgctgcttactacaacacattccaaacaatagctcaaatgaaaccttccacccaacaaacagatttcacccctaagtggtccacaatagttaacaacacacaattagcagtagatggcaaaaaccagtctaaatcaaatgacacctggtacctaggcaatgcatataatgttgaacttgcaaaagaagcagcaaaaaacataagaacaaaatacttaaacgctactagacaagcactacccgccctattaacactaggagacgaattactagaataccacacaggtatctacagctcaatattcttatcggcaggcagatcttactttgaaacactaggtgcctacacagacataatctacaatccctttgtagacaaaggaataggaaacaaagtatggttagaccccctaatcaaagaagatgcagtactagacacaaaaaaagccaaagtactaatagaagaccaaccaatatgggcagcactatttggatacacagaatttgcagcaaaatacacaggagactctgcaataacagccaactacagacttgtaataagatgcccctacacagaccctatgctagtagacagagacaatgaactacaggggtttgtaccatactctaaaaactttggcaacggaaaaatgccagggggctctgccaacgttccactaactatgagaataaagtggtaccccatgctatttcaccaactagaggtactagaagaactagtgcagtccggaccgtttgcatacaagggcgaccaaaagagctgtgtacttgctttaaaatacatcttcagatggaaatggggaggtaaccctgtgtctcaccagattgtacgcaacccctgcaaaggaggcacccgttcccgtcgagagcctcgctcagtacaagcagctgacccgaaatatgtcacaccgaggctgtccttccactcgtgggacttcagacgagggctttttggcgcggcaagtattaaaagaatgtcagaggaatcaggagctcctgtctatcctacaggcccaccgagaaaaagaccaaaaagagacaccgacccgtacgactcgcagcaagaagaaaactcgagttcaagacacctccagctccagccctgggtccactccagccaagaagtccaaagcgaagaagagacgcaagtcccgcaaaacctacaagaacaactcctccagcagctccgagagcagcagcagctcaggctccacttacagtccctcgccaaccaagtcctcaaaatcaaagcgggatacagcatacaccccctattatcttcccaagcctaaacaaagtctatatgtttgagcctaaaggccccaaacccatacaaggctatgaggcctggttagatgaataccaaacagcaggtatttgggataggccagtgagaacataccacacagacacccccttctacccctgggcacctaaaccccccaaccaattccgcgtcagctttaaactcggctttcaataaaatttcaaggcctttcactgctcacttgtcggtgtctacctctataagtcactaagcactccgagcgtcagcgaggagtgcgaccctagggggggactcaacgccttcggagccgcgggctacgccttcggctgcgcgcggcacctcagacccccgctcgtgctgacacgct

SEQ ID NO: 2853 - protein, 732 aa, Alphatorquevirus sp.
MAYWWYRRRRRAPRWRRRRWRVRRPRRRRTAVRRRRGRRRVRKRRGRWRRSYRKWRRGRKRRKHKRRLVLTQWQPAFIRRCYIVGFLPLIICGENTSARNFATHSDDLISNGPYGGGMTTTKFTLRILYDEHLRWLNYWTVSNQDLDLCRYLGGTFYAYRHPTVDFIVQIHTSPPFLDTPLTGPSIHPGMLMLAKNKILIPSLKTRPNKKHKVKIRFRPPKLFEDKWYPQSELCDTTLLTVFATACDLQFPFGSPLTDNHCVNFQVLGSAYKRHLSILPEKLNLAKDHFDRSLYSVAAYYNTFQTIAQMKPSTQQTDFTPKWSTIVNNTQLAVDGKNQSKSNDTWYLGNAYNVELAKEAAKNIRTKYLNATRQALPALLTLGDELLEYHTGIYSSIFLSAGRSYFETLGAYTDIIYNPFVDKGIGNKVWLDPLIKEDAVLDTKKAKVLIEDQPIWAALFGYTEFAAKYTGDSAITANYRLVIRCPYTDPMLVDRDNELQGFVPYSKNFGNGKMPGGSANVPLTMRIKWYPMLFHQLEVLEELVQSGPFAYKGDQKSCVLALKYIFRWKWGGNPVSHQIVRNPCKGGTRSRREPRSVQAADPKYVTPRLSFHSWDFRRGLFGAASIKRMSEESGAPVYPTGPPRKRPKRDTDPYDSQQEENSSSRHLQLQPWVHSSQEVQSEEETQVPQNLQEQLLQQLREQQQLRLHLQSLANQVLKIKAGYSIHPLLSSQA

SEQ ID NO: 2854 - protein, 148 aa, Alphatorquevirus sp.
MFLGKLYRKKRRLPLSPLYTPQKTRRLLTAMWTPPAHNVRGQERQWYESCFRSHACFCGCGDFIRHLCDLANDFGRPPTAQRPPAPPPPVRPLPALPAPPNPSGSRAAWPTGGTDGDEEPRGGGDGAGGFADLADEELLSAAVEAAEE

SEQ ID NO: 2855 - protein, 126 aa, Alphatorquevirus sp.
LGPLQPRSPKRRRDASPAKPTRTTPPAAPRAAAAQAPLTVPRQPSPQNQSGIQHTPPIIFPSLNKVYMFEPKGPKPIQGYEAWLDEYQTAGIWDRPVRTYHTDTPFYPWAPKPPNQFRVSFKLGFQ

SEQ ID NO: 2856 - DNA, 2905 bp, Betatorquevirus sp.
caggtgccgaaggtgagtgaaaccaccgtagtcaaggggcaatatgggctaggtcagtcttggcggaccgggcaagaaacttaaaaatataacctttcttacaggtatgtcatctatctggaagaaaccaacaactactccgagacaactagaactaggatggctgaacttattccaccaagcacacgaccaattttgccaatgtgaagaccctgaccttcactatttaatggtaattaacaaattttccaacttcaaaaagcctgaatctgaaattatcaacataaaatgcctccttaccggaaaacctactggaacaactactactaccgaagaagaaaaagatatccatatcgacgaaggagacttagaaagccttttcgaaaaagatttcgaagaagaacctactggagaaaacagcgaaaggtaaagaaatttaaacttaaaaaacttaaaaaactaactcttaaagtttttcaaccaaagactataagactattaaaaattaaaggatttaaatgcctatttcaaggaagcataaaaagagctaacaataactatatacaatatatatatgatactgtaaatgataaaagaccaggcggaggggcatggagtttacaagtatttagccttgcaagcttatatgaagaatggcaacacttacttaacatttggactgttagtaatgctggactgccactaatacgctttatgggagctagatttaaattttatcaaagtgcagaaaatgactatgttgttaaatatgataattgttggcctatggtagatacaccatacacacatgcagacagtgcaccatcaagaatgataagagcacaacataaaataactgtaccaagtagaaaaacaaaacttagaaaaaaaccatacaaaaaagtatttgttagaccaccatcacaaatgacaaacaactggtactttcaaagagatatatgcaaaacaccactaacaatgcttacaaccacagccgttgatcttagattcccatttgctcccccagaagctttaagtaacaatgtaactttatatacacttaatacatttcaatttaaaaacacaaactttcaacaacctgaagctaccggttactactacaaaatggaaggcacacaaaaatactacttatatgcagcaccaagagaccacgaaaccaactggggatcactaattcctttaacaaacacaaaagacaatcaaccaggaaaacaacttagtcaattaatacaaaacaataacaatgacctaaataaaatgagcaactggggaaacccattttaccacttatatgactatgaaaactttaagttttactttttaacaaaaaatccaacagaaataaaatatacagatttaagcaaaaagttagatagagacattactgaattttcaagttacatatactaccaaataagatacaatccagaaaaagacacaggacaagataataaagtatatttaatttctaatctacatgacacaaaatgggaagaaccttcaaacgaaaatttaatttttgaaggttttccactaactatattactatggggatggacagactggcaaaaaaaactaaaacaagtatctaacatagataaccaatacatagtagttatacaaaccaaattcttttcagaaaacctaaaatactacgtacttattgataaagattttatagatggatttgaacctttctcaccacatgacgaacaagacaaattacctattacaccagctaatcaacaacattggtatccaaaacacttatttcaacaacaatccataaacacactatgtctatcaggccaagcatgtccaagacctccttggaaccattatctacaagcgttttgtacatacacattttactttaaattaggaggctgtccaaaacaactagaaaaagcttatgatccttgtttacagtcaaaatggcccacagccgataacatccctgcaagatatcaaattacgaatcctgaaaccccaccagaaacagaactgtactcctgggactgggatgaagactttgttaaaaagacagctttacaacgaattacagaatacacaccaacttatgaaacaatattcctttctacaggaagcaaatcagatcccatcgcactcaaaaaagtccaagaaaaccaagcccaagaagaagaggaggagaaagaactattcctccagctccagcagctcagacaccgacgaaagctcctacaactccaactaaaagaattatcattaaaaagtgtacaaagatagtagaactattcccaaaacctataaaacaaaacagaagatttaccaaagatgaaagagagacagaaagacaagtagctatagcattttgtaggccacaaagatcatttttctatgatccacctatttacccctggttaccaccggaaccaaaagttccaaaagttaactttaaactaaattacaattctaacgaataaaaattacaaggccaactattttcacttgtcggtgtccatttatttaagtttaacttatataaacatccaccactctcccaacagtgttggcgccaaaagggggctccgcccccttacacccccaaggggagggggctccgcccccttacacccccaagggggctccgcccccttacacccccttataaatattcaacaggaaaaccacctaattagaattgccgaccacaaacggtcactaacttctcttttttaacatacttcctttttttctaattattattcattacattaattattaaaccgcgtaattccggggaggagactataaactatataatcaactacactttcgaatggctgagtttatgccgccagacggagactgtgttacacagtaacaacaggctgacctaggg

SEQ ID NO: 2857 - protein, 666 aa, Betatorquevirus sp.
MPPYRKTYWNNYYYRRRKRYPYRRRRLRKPFRKRFRRRTYWRKQRKVKKFKLKKLKKLTLKVFQPKTIRLLKIKGFKCLFQGSIKRANNNYIQYIYDTVNDKRPGGGAWSLQVFSLASLYEEWQHLLNIWTVSNAGLPLIRFMGARFKFYQSAENDYVVKYDNCWPMVDTPYTHADSAPSRMIRAQHKITVPSRKTKLRKKPYKKVFVRPPSQMTNNWYFQRDICKTPLTMLTTTAVDLRFPFAPPEALSNNVTLYTLNTFQFKNTNFQQPEATGYYYKMEGTQKYYLYAAPRDHETNWGSLIPLTNTKDNQPGKQLSQLIQNNNNDLNKMSNWGNPFYHLYDYENFKFYFLTKNPTEIKYTDLSKKLDRDITEFSSYIYYQIRYNPEKDTGQDNKVYLISNLHDTKWEEPSNENLIFEGFPLTILLWGWTDWQKKLKQVSNIDNQYIVVIQTKFFSENLKYYVLIDKDFIDGFEPFSPHDEQDKLPITPANQQHWYPKHLFQQQSINTLCLSGQACPRPPWNHYLQAFCTYTFYFKLGGCPKQLEKAYDPCLQSKWPTADNIPARYQITNPETPPETELYSWDWDEDFVKKTALQRITEYTPTYETIFLSTGSKSDPIALKKVQENQAQEEEEEKELFLQLQQLRHRRKLLQLQLKELSLKSVQR

SEQ ID NO: 2858 - protein, 107 aa, Betatorquevirus sp.; identical to SEQ ID NO: 1934

SEQ ID NO: 2859 - DNA, 2905 bp, Betatorquevirus sp.
caggtgccgaaggtgagtgaaaccaccgtagtcaaggggcaatatgggctaggtcagtcttggcggaccgggcaagaaacttaaaaatataacctttcttacagatatgtcatctatctggaagaaaccaacaactactccgagacaactagaactaggatggctgaacttattccaccaagcacacgaccaattctgccaatgtgaagaccctgaccttcactatttaatggtaattaacaaattttccaacttcaaaaagcctgaatctgaaattatcaacataaaatgcctccttaccggaaaacctactggaacaactactactaccgaagaagaaaaagatatccatatcgacgaaggagacttagaaagccttttcgaaaaagatttcgaagaagaacctactggagaaaacagcgaaaggtaaagaaatttaaacttaaaaaacttaaaaaactaactcttaaagtttttcaaccaaagactataagactattaaaaattaaaggatttaaatgcctatttcaaggaagcataaaaagagctaacaataactatatacaatatatatatgatactgtaaatgataaaagaccaggcggaggggcatggagtttacaagtatttagccttgcaagcttatatgaagaatggcaacacttacttaacatttggactgttagtaatgctggactgccactaatacgctttacgggagttaaatttaaattttatcaaagtgcagaaaatgactatgttgttaaatatgataattgttggcctatggtagatacaccatacacacatgcagacagtgcaccatcaagaatgataagagcacaacataaaataactgtaccaagtagaaaaacaaaacttagaaaaaaaccatacaaaaaagtatttgttagaccaccatcacaaatgacaaacaactggtactttcaaagagatatatgcaaaacaccactaacaatgcttacaaccacagccgttgatcttagattcccatttgctcccccagaagctttaagtaacaatgtaactttatatacacttaatacatttcaatttaaaaacacaaactttcaacaacctgaagctagcggttactactacaaaatggaaggcacacaaagatactacttatatgcagcagcaagagaccactcaaacacctggggatcactaattcctttaacaaacacaaaagacaatcaaccaggaaaacaacttaatcaattaataaaacgcactaacagtaacgataataaaatgagcaactggggaaacccattttaccacttatatgactatgaaaactttacgttttactttttaacaaaaggtccaacagaaatacaatttgaagatttaaacaaacgtttaaatgaaggaattactgaattttcaagttacatatactaccaaatcagatacaatccagagaaagacacaggacaagataataaagtatatttaatttctaatttacatgacacaaaatgggaagaaccttcaaacgaaaatttaatttttgatggttttccactaactatattactatggggatggacagactggcaaaaaaaactaaaacaagtatctaacatagataaccaatacatagtagttatacaaaccaaattcttttcagaaaacctaaaatactacgtacttattgataaagattttatagatggatttgaacctttctcaccacatgacgaacaagacaaattacctattacaccagctaatcaacaacattggtatccaaaacacttatttcaacaacaatccataaacacactatgtctatcaggccaagcatgtccaagacctccttggaaccattatctacaagcattttgtacatacacattttactttaaattaggaggctgtccaaaacaactagaaaaagcttatgatccttgtttacagtcaaaatggcccacagccgataacatccctgcaagatatcaaattacgaatcctgaaaccccaccagaaacagaactgtactcctgggactgggatgaagactttgttaaaaagacagctttacaacgaattacagaatacacaccaacttatgaaacaatattcctttctacaggaagcaaatcagatcccatcgcactcaaaaaagtccaagaaaaccaagcccaagaagaagaggaggagaaagaactattcctccagctccagcagctcagacaccgacgaaagctcctacaactccaactaaaagaattatcattaaaaagtgtacaaagatagtagaactattcccaaaacctataaaacaaaacagaagatttaccaaagatgaaagagagacagaaagacaagtagctatagcattttgtaggccacaaagatcatttttctatgatccacctatttacccttggttaccaccggaaccaaaagttccaaaagttaactttaaactaaattacaattctaacgaataaaaattacaaggccaactattttcacttgtcggtgtccatttatttaagtttaacttatataaacatccaccactctcccaacagtgttggcgccaaaagggggctccgcccccttacacccccaaggggagggggctccgcccccttacacccccaagggggctccgcccccttacacccccttataaatattcaacaggaaaaccacctaattagaattgccgaccacaaacggtcactaacttctcttttttaacatacttcctttttttctaattattattcattacattaattattaaaccgcgtaattccggggaggagactataaactatataaccaactacactttcgaatggctgagtttatgccgccagacggagactgtgttacacagtaacaacaggctgacctaggg

SEQ ID NO: 2860 - protein, 666 aa, Betatorquevirus sp.
MPPYRKTYWNNYYYRRRKRYPYRRRRLRKPFRKRFRRRTYWRKQRKVKKFKLKKLKKLTLKVFQPKTIRLLKIKGFKCLFQGSIKRANNNYIQYIYDTVNDKRPGGGAWSLQVFSLASLYEEWQHLLNIWTVSNAGLPLIRFTGVKFKFYQSAENDYVVKYDNCWPMVDTPYTHADSAPSRMIRAQHKITVPSRKTKLRKKPYKKVFVRPPSQMTNNWYFQRDICKTPLTMLTTTAVDLRFPFAPPEALSNNVTLYTLNTFQFKNTNFQQPEASGYYYKMEGTQRYYLYAAARDHSNTWGSLIPLTNTKDNQPGKQLNQLIKRTNSNDNKMSNWGNPFYHLYDYENFTFYFLTKGPTEIQFEDLNKRLNEGITEFSSYIYYQIRYNPEKDTGQDNKVYLISNLHDTKWEEPSNENLIFDGFPLTILLWGWTDWQKKLKQVSNIDNQYIVVIQTKFFSENLKYYVLIDKDFIDGFEPFSPHDEQDKLPITPANQQHWYPKHLFQQQSINTLCLSGQACPRPPWNHYLQAFCTYTFYFKLGGCPKQLEKAYDPCLQSKWPTADNIPARYQITNPETPPETELYSWDWDEDFVKKTALQRITEYTPTYETIFLSTGSKSDPIALKKVQENQAQEEEEEKELFLQLQQLRHRRKLLQLQLKELSLKSVQR

SEQ ID NO: 2861 - protein, 107 aa, Betatorquevirus sp.; identical to SEQ ID NO: 1934

SEQ ID NO: 2862 - DNA, 2905 bp, Alphatorquevirus sp.
ctatgggcaaggctcttaaaaaagccatgtttctcggtaaactttacagaaagaaaagggcactgctactgcctggcctgccaactccaaagaaaaaaccacctactgatatgagctactggtgtccccctgtccacgatgtacgcgggcgcgaacatcagtggtatgaggcttgctaccgctctcatggtgctatgtgtggttgtggcaattttattaatcatctctcttatctgggtgagcgttatggcttcaggccgggccctcgggctcctggggcacctggagtaggaggcccgccacccccgctccgtcgagccctgccggcacccccggctccggagccgtcccagcaggctaacaacaacaacaaccagagatggcctggggatggtggagaaggaggcgccgccggtggttccgtggcctctggagaagaaaacgccgtacccgaagacgacctcgatggacttatcgccgccctagacgacgaagagtaaggaggcgcagactgtggaggagggggagacccagacgcagacgctttaaaaagagacgtttcagacgcagacgcaaaaagcccaagataattattaaacagtggcagccgggaactgttagaaaatgtttaataatagggtacatggctgctcttataagcggacgaggtagcttctctagaaactacagcagccacctagaagacagaattctaaagggaccctttggcggggggcacagcactatgagattctccctaacagtactgtacaatgactttttaagacacatgaacttttggacaaagagcaaccaagacctagaacttgctagatactttggggtcacatttaccttttacagacaccccacagaggactttataataacatacaacagaaaaaccccactaggaggaaacatactgacagcaccatcactacacccgggcaactgcatgctcagcaagagaaagatactactacccagcttagaaaccagacccaagggaaaaaagaccaaaaaactaagaatagggccccccacactctttactgacaagtggtactttcaaaaggacatatgtgacctgacactgttaaacctcaatgtggtgcaagctgacttgcggtttccgttctgctcaccacaaactgacaacatttgcgtaaacttccaggtactaagttccgtttacaacggctacttagacatacaccactttgataatgcaagccaagagacacaagtaaataatataacagcatttttaaaaacagtttttaaagaccagggaacaaaactaacaagctttaacgcattaaatacattcagaacagagggctgcgccagtcacccacaactaaaaaagcctacctccactagtaatcccagcagcacagtacaaacggacaaatactttgcccagctagacggcctatggggagaccccatttatgccaacagccttaactccacaaactctgcaagcactgcaacagcagactctattatttccattttagtaaaaaacatgaaatcgtactatcaaaaatttatagatgaaggctttccatcatcctggtacggtaacatggcaaactgccaccttacaggcatatactctccaatatacctaaacgcaggcagaataagtccagaaataccaggactttacacagaaatactgtacaacccatacacagacaaaggcaaaggcaataaagtatggctagacccccttaccaaaaaagacaacatatacactccaccacaaagcaagtgtttaatagctgacatacctctgtggtgtgcagtatttggctaccaagactggataaaaaaagaattaaaccactgggacgcaccatttaattacagaatagtattcatatgcccatacacctttccaaaactatataacgcagcagatgccaactatggctacatacctattagcgatcagttcggagcaggtcagatgccagacggcagcacatacgtacccataaaatggagaggaaagtggtaccctaaccttatacaccaacaaaatgtattagaagacctgtcacgcagcgggccctttgcacccaaaaaagacatacccagcacacagctaagcatgaaatacaaatttagatttaactggggtggcaatcctattcttgaacagattgttagagacccctgcacgcagcccacctacgacatacccggtgccagtaacatgcctccgagagtacaagtcattgacccgagggtcgtcgggcctaacctcacattcaaaacctgggacatcagacgttaccaatttagcgacaaaagtattaagagagtgtcagaacaatcagaaactgctgaaccttttttcgaaggcccaaaaaggccccgcatcgacctcggtccccaaatccaagaagaagaagactcgcgttcgacacgcccgagagaaccgcagccctgggactcggaccaagagatggagagcagccagcaaagcgaagaagagacgacgctcaccgtccgagagcagttgcagcagcaataccaagagcagctcagaatcagacagggaatcaaacacctcttcgagcagctagtaaaaacccagcagggagtacacgtacatccatccctcttgtaggcccaaagcagtacatgttcccagaaagggccccaaaaccagctcccacctcgggagactgggagatggagtaccttatgtgtaaaatatttgacagaccccccagaagcaagctcacagacaaccctttttacccctactgcaaaaaccaatacaatgtaacctttcagcttaactacaaataaaacagccattctaactgctaggccgtgggagtttcactggtcggtgtctacctcttaaggtcactaagcactc

SEQ ID NO: 2863 - protein, 755 aa, Alphatorquevirus sp.
MAWGWWRRRRRRWFRGLWRRKRRTRRRPRWTYRRPRRRRVRRRRLWRRGRPRRRRFKKRRFRRRRKKPKIIIKQWQPGTVRKCLIIGYMAALISGRGSFSRNYSSHLEDRILKGPFGGGHSTMRFSLTVLYNDFLRHMNFWTKSNQDLELARYFGVTFTFYRHPTEDFIITYNRKTPLGGNILTAPSLHPGNCMLSKRKILLPSLETRPKGKKTKKLRIGPPTLFTDKWYFQKDICDLTLLNLNVVQADLRFPFCSPQTDNICVNFQVLSSVYNGYLDIHHFDNASQETQVNNITAFLKTVFKDQGTKLTSFNALNTFRTEGCASHPQLKKPTSTSNPSSTVQTDKYFAQLDGLWGDPIYANSLNSTNSASTATADSIISILVKNMKSYYQKFIDEGFPSSWYGNMANCHLTGIYSPIYLNAGRISPEIPGLYTEILYNPYTDKGKGNKVWLDPLTKKDNIYTPPQSKCLIADIPLWCAVFGYQDWIKKELNHWDAPFNYRIVFICPYTFPKLYNAADANYGYIPISDQFGAGQMPDGSTYVPIKWRGKWYPNLIHQQNVLEDLSRSGPFAPKKDIPSTQLSMKYKFRFNWGGNPILEQIVRDPCTQPTYDIPGASNMPPRVQVIDPRVVGPNLTFKTWDIRRYQFSDKSIKRVSEQSETAEPFFEGPKRPRIDLGPQIQEEEDSRSTRPREPQPWDSDQEMESSQQSEEETTLTVREQLQQQYQEQLRIRQGIKHLFEQLVKTQQGVHVHPSLL

SEQ ID NO: 2864 - protein, 165 aa, Alphatorquevirus sp.
MGKALKKAMFLGKLYRKKRALLLPGLPTPKKKPPTDMSYWCPPVHDVRGREHQWYEACYRSHGAMCGCGNFINHLSYLGERYGFRPGPRAPGAPGVGGPPPPLRRALPAPPAPEPSQQANNNNNQRWPGDGGEGGAAGGSVASGEENAVPEDDLDGLIAALDDEE

SEQ ID NO: 2865 - protein, 122 aa, Alphatorquevirus sp.
LGLGPRDGEQPAKRRRDDAHRPRAVAAAIPRAAQNQTGNQTPLRAASKNPAGSTRTSIPLVGPKQYMFPERAPKPAPTSGDWEMEYLMCKIFDRPPRSKLTDNPFYPYCKNQYNVTFQLNYK

SEQ ID NO: 2866 - DNA, 2904 bp, Betatorquevirus sp.
cgggtgctggaggtgagtgaaaccaccgcaatcaaggggcaattcgggcatgatcagtctggtggaacgggcaagaaactaaaataattattcttttgcagatgtcaagccgctttataccaacacaagattcaaagaaccagaaatacttaaaatggctgaatgctcttactcacattcatgatatttactgcaactgctacaacccgctaacacacaccgttgccttaattttcgaaaaagaatctgatttcaactttaatacttcagaaaaacaactaattcaaaaatgcctttctggagaagaccatactacacccgctggagaacctggagaagaactcgccgcaggagacctagacgcgctttttggagaacctttcgaagaagacgacaaacggtaagaagacgccgctttagaaaaaaactaaaaactttatctataagacaatttcaaccaccaacaataagactactaaaaataactggaaaataccaactatttttctgtacttcagacagaataccgaacaataatactttataccttgatacaatttcaccttttcatataccttccggaggaggattttctttaacacaatttactttacaaaacttatttgatcaacacataagactgagaaactggtggactaaaagcaatgaattcctacctttaataagatacataaaatgcattgtatacttatattaccaagaaaatgttgactatatatttgcttatgacacttctttccctttaaaagctagcagacttatgtataactctactcaaccttctgtaatgtaccttatgaaacatagaaaaataataccttgtaaacattacaacaaacgcagaaaaccatacaaaagactagtaattaaaccacctgcacaactagaaaacaaatggtattttcaacacaatttagcagacataccacttgtaaactttatggcagtagcatgctcattagatagatggtacacatcttctaaagcaagcactccaactataggatttacatgcctagatgccacagtatggcaaatgcacaactttaaagaacaaactacatatggatacactccacaaccaaaccaacacctatttagtatggccaatggaaatttaacattaaatacaattaaaataggagacttaatattactagcaaatgccaccgatcatcaagtaggaacagaactaaaaaatgttacaggcacggctgaaacaaaatggaataactgggtaacaaacagggaaaactggggtaatcctttcttattagactacttagatggtacaaaaccactaattaaatcaaccacaccactcactcagatcagagacaaactaaaaaattataagtgggactttaacaaacatttatcagactttgatagcatgttccaaattagcacagtacctaatctcattcactgcagatataacccaaatgcagacaaaggcataggaaacaaagtatattttttgccaattacaaaccaagcacgtcaaggctgggatccacaacctgacaaacctgaacttttataccaagatttaccattatgggcactttactggggcctagtagactggaacaaacgagcaggaaccataacatctatagaaacacacggaataacagtattccaaacacaatatattaacccaaaagaagaaaaatactacataccattaggtaaatattttctatctgacagatcagaatactacccaccaggagacccctcagaaccacaaattgccataggtgaccttaaaaactggcatccaaaactatcctttcaacttgatgtaattactgatatctgtaactgtggaccaggcactgtaaaactgcctccagatataagttgtgaagcttacctaaaatataaatttatttttaagattggaggctcaccaccaccaatggaaattgtatcagaccctagcaaacaacccatatggcctctacccaataacttcactgaaacaacttcgttacagagtccagggataccctttgaacacttcttgtaccacttcgaccaaagaggagactacctcacaaaaacagctatacaacgcctgcaaaaagactacccgtctaaagaaattatttcttcaattacaggagcaactggcctcaacatcccaacacatcaaacccaagaaagcgactcggaagaggagattccgcaagaagtccaaacgacattacagcagcagctcctcctgcagcgaagagagcaacacaaactcagacagcgaatcaacaagctcctaaccaaaatatctctattagaataagtaaatgtactataactacatctttgtttcctcccgataagcctgtaaatcgccgcttaactccaaaagaaatggaggaagaaatagcaaacagtaaaatatggggacatattccccgtactcatttacttgatgtgcctttctatacaaacataccaaaaccacctttatacaatgtaacctttgatattactccccctcaataaacaaggcctgaatttttcacatctcggtgtccatttattaaagctttacttatataaacatccaccactctcccaaatacgcaggcgcaaaagggggctccgccaagggggctccgcccccttacaccccctaataaatattcaacaggaaaaccacctaatttaaattgccgaccacaaaccgtcacttacttctccttttttatatacttccccttttactaattattattcattacattaattaataaacagcgtatgtccggggaggagcttattacctatataactaactacacttccgaatggctgagtttatgccgccagacggagactgcaacacgttagtgacttcagtctgatcaaggg

SEQ ID NO: 2867 - protein, 679 aa, Betatorquevirus sp.; identical to SEQ ID NO: 15

SEQ ID NO: 2868 - protein, 102 aa, Betatorquevirus sp.; identical to SEQ ID NO: 16

SEQ ID NO: 2869 - DNA, 2904 bp, Betatorquevirus sp.
cgggagccgaaggtgagtgaaaccaccgtagtctaggggcaattcgggctagatcagtctggcggaacgggcaagaaacttaaaaatattttattttacagatatgtattctttatggaagaatcaatcatactcaaagagacaactagaactccaatggattaacgccaccaacaacatccacgacctattctgccactgcgacaaccccacttttcatctactttactgcattaacaagttttctagtgctcaaaaacccgaaactgatcttcgaaacatacaatgcctgcttactggagagcgaatcgctacagaagataccaacaaagaagacgccggagaccctactggatttctagatggagagctagaagacctcttcaaagaagaagatacagaagaaaaagatactcctaccgaaaggtaaagagacgctttaaactaaaaaaagctaaaaaaataactttaaaacaatttcaaccttatactatacaaaaatgtaaagttataggatacaaatgcttatttcaaggcagtacaaaaaacttacctgtaaactatatacaatatatatattccactgtaccacctttttggccgggaggcggagggtggagcataatggtttttagcttaacttctttatttgaagactgggaacatttagaaaacatatggactaaaagtaacttaggattaccacttgtaaaatatagaggatgcattttaaaactataccaaagctatgacacagactatgtagcagtttatgacagatgttggcctatggtagacacagaactaacacacccaaacgcagcacctagtagaatgctacaaaacaaacataaaattgttataccctccagaaaaacaaaccctagaaaaaaaccatataaaaaagtttttattaaaccaccgtctcaaatgataacacaatggtattttcaaagagatatttgcaaactaccactattcatgttaacaaccactgcagtagacctattatatccattttgtaatccacatgcctcatcaaacaacataacattatattcacttaacccatacacttttcaaaacctaaattttacagaatatggcacgtcgggatactcaccaaaaacaataaacaatgttgattattacctatatgctagtactgaacaaaatttatcaacgctaaaacaaaaagacgttttgacattcattccactacttaacaccaaagactaccaaccaggacaaccatacacagacggttataaagatacaccagaaagttggggaaatcccttccaccataactacttaacagatgacaaagaaactccaaactatacaatttacatttcctcaagcacaactactacatttaaatcaaacgctaaaaacagcgaagacgaaacaacaattagagttactccaattacaggccccatgctttatcaattaagatataatccatcaaaagacaaaggagacacaaacaaaatatatctagtaagcacatctacttcagataaaacaattactccaccaccaaatgaaaatttagttatagaaggcctaccactatttattttactatggagttggacagactgggtaattaaagctaaaataacaacagacataacaaaatacagaactttagttatagacacaaaaatgtttgacactgaattaccacactatattttattagacaaagactttagagaaggaaaagacccatacacaccagatcatacagacggaacaataatacaccctaattactataacagtaaaaactggcacccaaaactactatttcaacaacaaagtttaagagaaattgccatgtcaggccctgctgtacacagagatactaaccataaatatatacaagcatactgcaaatacaaatttctattcacatggggaggctgcccaaagcaactaccaaaaccatttgaaccttgcttacagccaaaatggaccacagccaataacatccctggaagacttgaaattacgaatccacaacatgaccccaaaacagaattatatgactgggactgggatgaagactatgttacagcagaagctgtcgaacgagttaaatgctacacaaaaactgattcaaaaactctctcaacagcaaacagaaacctgccaaaaagcatcacgaaaacatcaaagaaagagaaaacaccagaaaaagaggagcaggaaatactccaacagctcctccagctccgacagcagcgacagctcctccagctccaactgaagtcttacctaccataaaaataaaaaccggcaatataaaagcctatttgttccctccagtaaaaaaaaatagactaatgaatgcctgggaacaacaagaagaaaagcaagatgcagctatatggtgtagaccgcaaagaaaatatttgtatgataagcctacttatcctttctttcctccaactcctataataccaaaaattaactttgatttaatgtattctgaataaacttttcaacgccaacaattttcacttagtggtgtccatttattaaagtttaacttaaataaacagtcaccgcctccctatcaatagggcgccaaaatttaaagggggctccgcccccttacacccccaagggggctccgcccccttacaccccctaataaatattcaacaggaaaaccacctaattagaattgccgaccacaaaccgtcacatacttccccttttataacatacttccccttttgctaattattattcatgaaattaattattaatctgcgtaaatccggggcggtactacatacctatataactaactacacttccgaatggctgagtttatgccgccagacggaggctgtatcacttcagtgactacagactgatcttggg

SEQ ID NO: 2870 - protein, 670 aa, Betatorquevirus sp.
MPAYWRANRYRRYQQRRRRRPYWISRWRARRPLQRRRYRRKRYSYRKVKRRFKLKKAKKITLKQFQPYTIQKCKVIGYKCLFQGSTKNLPVNYIQYIYSTVPPFWPGGGGWSIMVFSLTSLFEDWEHLENIWTKSNLGLPLVKYRGCILKLYQSYDTDYVAVYDRCWPMVDTELTHPNAAPSRMLQNKHKIVIPSRKTNPRKKPYKKVFIKPPSQMITQWYFQRDICKLPLFMLTTTAVDLLYPFCNPHASSNNITLYSLNPYTFQNLNFTEYGTSGYSPKTINNVDYYLYASTEQNLSTLKQKDVLTFIPLLNTKDYQPGQPYTDGYKDTPESWGNPFHHNYLTDDKETPNYTIYISSSTTTTFKSNAKNSEDETTIRVTPITGPMLYQLRYNPSKDKGDTNKIYLVSTSTSDKTITPPPNENLVIEGLPLFILLWSWTDWVIKAKITTDITKYRTLVIDTKMFDTELPHYILLDKDFREGKDPYTPDHTDGTIIHPNYYNSKNWHPKLLFQQQSLREIAMSGPAVHRDTNHKYIQAYCKYKFLFTWGGCPKQLPKPFEPCLQPKWTTANNIPGRLEITNPQHDPKTELYDWDWDEDYVTAEAVERVKCYTKTDSKTLSTANRNLPKSITKTSKKEKTPEKEEQEILQQLLQLRQQRQLLQLQLKSYLP

SEQ ID NO: 2871 - protein, 123 aa, Betatorquevirus sp.; identical to SEQ ID NO: 1083

SEQ ID NO: 2872 - protein, 60 aa, Betatorquevirus sp.; identical to SEQ ID NO: 1084

SEQ ID NO: 2873 - DNA, 2904 bp, Betatorquevirus sp.
gcgggtgctgaaggtgagtttaccaccgaaatcaaggggcaattcgggcatgaccagtctagcggaacgggcaactaacttaaattattttacagatgagcgactatgtaccaccaagatacacaaaaaaacaactaactctgcaaacagtaaatgcctacgttcacatccacgacctcaactgcaactgcaaacaacctctacagcatgtaattaaacaaatattagatcaagaaccatctcttaaaccatggctcgctactattaccgaaggaaatggagaccaagatggagaaaaagatatcgacggttttggacctggagaactggagcgccttttcgcagaagacggcgccacaaacgacgggtaagaagaaaacttcctgctattcatattaaacaatatcaacctaaatacattaacagactaaatattaaaggactattttgcttactacaagtaaataaagtaagatacaatcataactttaaccaatatgctacaacagtaacaagagaaggactagctaatggaggtggcttcagcttaattagatttactttaaactctttatatgaactgcatgaaaaagcaagaaactattggactcgtagcaacaaatatatgcctttgtttagatatactggatgtaatataagagtatatagaccaccagacattgaccttgttataaaatttcaaagatgttatcctatgtgctgtacaaaattaatgtatactggatgtcaacctagcttaatgatgatgtctaagggaagcaaaattataagatgtaagaaaaatgcaccaaattctaaaccatatgtaaaatttaaattcccaccacctgaccaaatgactaacaaatggtattttcaacataatgaaagtaacacaggattattaatgatacaagtagccgctgtttctttagaccactattacacatctcaatgggcagaatctagcacagtaacactatggggaattaatacaagaatatttcaaaacctaaactttgctagaacacccacatacggctacatacctaaaacaggctttacactgtacgccactaatggaaacgacattgtaggtgatctgatatggttaggacaatctaaaaaatacaaccatggagatcaactaaaagatcacaaagttggcaacagctttgataacacagtaaaacaatacatgcaacatccagaatggtggggaaaccctttccacagcgaaatattacaccaaaagtggacactgtggaaaggaacatcaaaccccctcacacaactcacaaacaaagggcttgactttaacagtcaatgcacaaccgctggactttctaaactaagtcaagaactatttttcaaatttagatacaacccatttaaagacaaaggatacaacaacatttatattttagcaaactttcaggacaatttcataaatgacaaatatgacttagaaccatacgacgacccagaccttcaaaacccaggcttcccaaactggttaggttgctttggctttcaagactatcttattaaactaggaaaaaaacaaagaattaacacagactatataatgttactaaaaacaaaagcaattgacccagtagaaacatactacatattagtagatgaatattttctacatggagattcagaagaattaataggaagaacagactgggataacgaaaattggtaccctatgattcaacaccaacaaggtgcacttaatacactagcactatgcggaccgggtgcacctaaattaggagacattaaaacagcagaagctaaattagactattcatttcactttaaggttggaggatgctctaaagcacctgaaaaagttacagaccctacaacacaaccaacttttgttacaccaagtaacatccttaacacaaattcgttacagagtccagatgagccaattgaaacattcctctaccaattcgattggagacgagaccaaattactgaaagcgctgcagaacgaatcactaaagactacagaactaaaacaaatttatttacagatgcagaacgaagtgcaacggaagtcccaactctccaaacacaagaaaaagaactcctctcgtcggaggaggaggaaaccaaaaaagagacattattcgagcagctccaacagcagcgactcaaacaacgagacctcagactcagaatcaagcagctcctgaaccaactacaagaattagaataaaaagacaaaatgtaacaataaatatgtttggggacaactacaagaattagaataaaaagacaaaatgtaacaataaatatgtttggggacaacccaccaaaaaaccgtagaatgactgtatgggaaagggaacaagaaatacaagaaagtattatatggggtcattatgtaagagattatatattagacaaacctacctataaaaatatgcccattaccccaatcatacctaaaataaactttgaccttaacttcaaagaataaagcctgcaaactacacttgatggtgtccatttattaaagttataacttatataaacatccaccaccctccctaatacgcaggcgcacaagggggctccgcccccttacacccccagggggctccgccccctacaacccccaagggggctccgcccccttacaccccctcataaatatgcaacaggaaaaccacctaatttaaattgccgaccacaaaccgtcactaacttctgctttttacacaacttccccttttactcataaatatttataaaattaattaataatcagcatcacaactaggaggagcctaacaactatataactaactacacttccgaatggctgagtttatgccgctagacggagacaagtccggacacagacttggctggtcaagg

SEQ ID NO: 2874 - protein, 662 aa, Betatorquevirus sp.
MARYYYRRKWRPRWRKRYRRFWTWRTGAPFRRRRRHKRRVRRKLPAIHIKQYQPKYINRLNIKGLFCLLQVNKVRYNHNFNQYATTVTREGLANGGGFSLIRFTLNSLYELHEKARNYWTRSNKYMPLFRYTGCNIRVYRPPDIDLVIKFQRCYPMCCTKLMYTGCQPSLMMMSKGSKIIRCKKNAPNSKPYVKFKFPPPDQMTNKWYFQHNESNTGLLMIQVAAVSLDHYYTSQWAESSTVTLWGINTRIFQNLNFARTPTYGYIPKTGFTLYATNGNDIVGDLIWLGQSKKYNHGDQLKDHKVGNSFDNTVKQYMQHPEWWGNPFHSEILHQKWTLWKGTSNPLTQLTNKGLDFNSQCTTAGLSKLSQELFFKFRYNPFKDKGYNNIYILANFQDNFINDKYDLEPYDDPDLQNPGFPNWLGCFGFQDYLIKLGKKQRINTDYIMLLKTKAIDPVETYYILVDEYFLHGDSEELIGRTDWDNENWYPMIQHQQGALNTLALCGPGAPKLGDIKTAEAKLDYSFHFKVGGCSKAPEKVTDPTTQPTFVTPSNILNTNSLQSPDEPIETFLYQFDWRRDQITESAAERITKDYRTKTNLFTDAERSATEVPTLQTQEKELLSSEEEETKKETLFEQLQQQRLKQRDLRLRIKQLLNQLQELE

SEQ ID NO: 2875 - protein, 91 aa, Betatorquevirus sp.
MSDYVPPRYTKKQLTLQTVNAYVHIHDLNCNCKQPLQHVIKQILDQEPSLKPWLATITEGNGDQDGEKDIDGFGPGELERLFAEDGATNDG

SEQ ID NO: 2876 - DNA, 2902 bp, Betatorquevirus sp.
cgggtgctgaaggtgagtgaaaccaccgaaatcaaggggcaattcgggctgtttcagtctagcggaacgggcaagtaacttaatattattttttttagatgagcaaatttctaaaagaaccattatatgaaggaaaagccttagaagatcaatggattaacagcatttacaccaaccacgatttgttttgcggctgcaacgacgtacttactcacctaattggaatttttaacagaaaaggaaaatctccaaaaccaaaaaaggatattaaaaatataatatgccttataactggagaaggcaaagaagacggagatattatagaagacgaattccaacctggagaattagacaaacttttccaagaagatggaggattcgaagaagaatccgtcgcaaacccagacgggtaagacgacgacgtttcaatagaaaactaaaaactataaaactaacacaatttcaaccagatgttattagaaaatgtactattataggaaatatttgcttatttcaaggtagccctgaaagagcaagccataactatgtacaatatatatattcttatgtacctgttggggcgccgggagggggaggatggacattaatgatagaaagcctatcaagtttatgggaagactggcaacatttaaaaaatgtatggacaaatagtaatgcaggactacctttagtaagatacctaggagcaacattttacttttttcaaagcccatacacagactacattgttaatgttatccgatgctatccaatgacagatactgaacatatgcatgcagactctgctcctagtagaatgctactaaaaagaaaagcagtaagagtaccaagcctagaaacacgtagaaagagaaaaccatacaaaaaagttagagtgagaccaccagcacaaatgcaaaaccaatggtattttcaaaaagacatatgtaatattccattagtaatgatacaagccacagcagtagactttagatatccttttgctcctagctcagcacaaagcaacaatgtaaccttaacatgcttaaatatagcactttttcaaaattcaaactttgacgaccccagcattacacatggttactttcctaaacctaacttatacctatacagcagtacaaatcgactaataacagatccaaaacactataagtttaacgatataatatacctaggaaacacaaaggacagacaactaggaaaagacagtgggaacacatttgctaactggggaaacccatttatgcctgaatacatacatggagaaaaacctgtatttacaaacacagtgaaactcacatcagacaactatgaacaattcaaacaacacaacgcaatcttacaagaagattacttctttacagttagatataacccagaaaatgacacagggtctgcaaacacaatatttattcaaaacaactttcaacaaacatcttggcatagaccacaaaatcctgatttaatattagaaggctttcccttatatgacatgctatggggatatttagactggcaaaaaaaacttcaaaaaacacaagacataagcaacaaatacatagcagtaatacaaacagaccaatttgatgacaaaaaaaactactatgtagtaatagatcctaaatttctagacggacataacccttatgattcaccactaacaaactataataaaagccactggaacatatgtactagaatacaagaaaaacctttaaatgacatctgtttaagtggaccaggtgcacctagaccagcctttggaaactatatgcaagccaaaatgcaatacagatttcactttaaatggggaggctgtccaaaggtattagaaaaaccttatgatccttgttcacagccttcctggaatatcccccgtaacttcgattcaggaattcaaatccagaatcctaacacaccaccagaaacagaactgcaaaagtgggactggagaagagactatattacgagcaaagctatccaaagaattaaacaatacgaaacaactgatgaaactttacaactctttacaggatgctccaaagacccaccaatactccaacaaacaaagacaccggagatcagctcagaggaggaagaagaggaaacaccatcactccaaaaccagatcaacaagctcaagcgacaccaacacaagctacagcagcgaatcctcaagcgaatgcgactaactacaaaataaaaggctgtaaaatacgagtacaactatttcctacaaaaactgagtttaaaaatcgtagatttactgagtctgaaagagaactagaaaaattagtagcaagagcatttaaaagacctcaaagacactttttctatgatcccccaacatatccttggcttcctcctgaaccacttgttaactttgatcttggaaataaattttaaggccaacaatattcacttagtggtgtctatttattaagtataaacttaaataaaccaactccgcctccctacagtagggcgccaaaaaggggctccgccccttaaaccccaagggggctccccccccttaaaccccaaagggggctccgccccctaaaacccccaagggggctccgccccctattaccaaacccccaagggggctccgccccctattacccccaggaaaaccacataattagcatggctaaccacaaactgaaaaaggaaaccacaaaatttgcattgccgaccacaaacgaatatttaaattaacttccctaaatgaaacaacacttccctaaaaattaattaataaacatcgtcacaaggggaggagacaccacactataaaactaacatacatgacgaatggctgagtttatgccgctagacggaggacacttcacgttagtgacagtggactgaaaccggg

SEQ ID NO: 2877 - protein, 647 aa, Betatorquevirus sp.; identical to SEQ ID NO: 2576

SEQ ID NO: 2878 - protein, 104 aa, Betatorquevirus sp.; identical to SEQ ID NO: 2577

SEQ ID NO: 2879 - protein, 123 aa, Betatorquevirus sp.; identical to SEQ ID NO: 2578

SEQ ID NO: 2880 - DNA, 2902 bp, Betatorquevirus sp.
cgggagccgaaggtgagtgaaaccaccgtagtctaggggcaattcgggctagatcagtctggcggaacgggcaagaaacttaaaaatatattattttacagatatgttttcttcatggaagacacccacatcatcacaaagacagaaagaactccaatggatcaacattattaacagcacccacgatcaaatttgctactgtgacaatcctaccctacatctcctctactgcctaaacaaattttccggagcacaaaagccagaaattgatattaaaaatatccaatgcctccttaccggcgttactacagaccataccgaagaacctactacaaaagaagaagaaacaggttttatcgaaggggaattagagcgccttttcgacgaaagcaatggagaagaaaaagaaaattcaaacccagatacaaggtaaagaaatttaaattttacaaaagaaagaaaaaaactattataatgagacagtttcaaccaactgccattaacaaatgtaaatgtataggatataaatgtttactacaaggctccatattaagagcctcaaacaattttgtacaatatgtatattcatttgtaccagaaaagcagccgggaggtgggggatggagtattcaagtattaagtctagactctatttttgaggactaccaacacttacaatgtatttggacaaaaggcaatgcaggacttcctttagtaagatatatgggaacaaaattcacactataccaatcacaagaaacagactatgtttttaaatatgataattgctggcctatggtagacacaatacacacacacgcagactcagcaccatttagaatgctacaaacaaaacataaagtagtagttccaagtttaaatacaaaaaagagaaaaaaaccgtataaaacagtttttgttccaccaccagcacaaatgctaaacagatggtactttcaaaaagaaatttgtaaaacaccgttagtgatgtttaccaccacagcagtatcactaacatttccatttgcagacccaaaagccaaaagtaataatgttacagtactttgcataaatccatatatatttaaaaatccagatttccaacactatggaacaacaggctacagtccaaaatcaacagaagacggcacaccactctacttatatggtagcaatcaaccaaacgtaacatatgaccaattaaaagaccaacgaaataaaccattaataacagcactagtagacacaaaaaatcacactccaggtataccactaaataactcaagtaacaaaactatagacaaagtagcaggaaatccattccacgaagaatggaccagtggagaccaatacatttatttttcactaatgacacccacagaaatgcaaaagttaataaccacaaacgaagaaccaaaaacccaacaaaaaaaaagcataacaaacacaggagaaattatatacacatttagatacaatccagacaaagacgacggctcaacaaacaaacaatatatagttagtacatcatcaggaaaattaatacaacctccaaacaatgaaaatcacatactatcaggatttccattcccatacatgctttggggatggacagactggattaaaaaactaggagaaacaccagcatttgacacaaacaaactagtagtactagaaagtaaagcctttaatgacacaacaataccattatttatacctattgatccacaatttgtacacggctttgatccatattcagacatgaatgaacaaaaccatacaatatcaccatacaatgcaaaaaactggtttcctagatacgaatatcaaaaatatacaataaatgaaatatgcttatctggacctgcgtgtccaagaccgccatggaatcattacttacaagctttatgtaaatataaaatgtactttaaatggggaggttgtcctaaaactttagaaaaagcatataatccttgttcacagtcaatttggcccacgcccgataacaagtatggaagatctgaagtgcagaatcctaacatcttcccacaaacagaattatactcatgggactggaacaaagactatgttacagaagaagctattgcaagaatcaaaaaatatacagacattgatccaacaatgctctcaattacaggatcaaaaggcaacccaccggcgctccaaaaaacacaaaaacaaaacgaagacgaagaggaggagaagaaactccagttccagctccaccagctccgattcaagaaagtcatcctccagctccagctccagcagcaattaaaatcactaaaagcaaagtaaaagtacaactatttgaaccaactaaaccaaaaaatagaagaatgaacgcctgggaacaagcacaagaaaaagaagatgcagctatatggcataggcctcaaagacaatttattttcgatcccccaatatatccatggttacccccagaaccttatgttaactttgaattaaaatacaagtatgaataataaacgccaacaaatttcacttagtggtgtccatttatataagttttaacttaaataaacatccaccgcctccctaaaaatagggcctagccctttaaaagggggctccgcccccttacacccccaagggggctccgcccccttacaccccccccctaataaatattcaacaggaaaaccacctaatttaaattgccgaccacaaaccgtcccaaagttcctcttttttcgcctacttcctctttaactcattattattcattacattaattaataatcaccgtaattccggggaggagctacttatctatataaccaactatacttccgaatggctgagtttatgccgccagacggaggctgtaacacttcagtgtctacagactgatcttggg

SEQ ID NO: 2881 - protein, 677 aa, Betatorquevirus sp.
MPPYRRYYRPYRRTYYKRRRNRFYRRGIRAPFRRKQWRRKRKFKPRYKVKKFKFYKRKKKTIIMRQFQPTAINKCKCIGYKCLLQGSILRASNNFVQYVYSFVPEKQPGGGGWSIQVLSLDSIFEDYQHLQCIWTKGNAGLPLVRYMGTKFTLYQSQETDYVFKYDNCWPMVDTIHTHADSAPFRMLQTKHKVVVPSLNTKKRKKPYKTVFVPPPAQMLNRWYFQKEICKTPLVMFTTTAVSLTFPFADPKAKSNNVTVLCINPYIFKNPDFQHYGTTGYSPKSTEDGTPLYLYGSNQPNVTYDQLKDQRNKPLITALVDTKNHTPGIPLNNSSNKTIDKVAGNPFHEEWTSGDQYIYFSLMTPTEMQKLITTNEEPKTQQKKSITNTGEIIYTFRYNPDKDDGSTNKQYIVSTSSGKLIQPPNNENHILSGFPFPYMLWGWTDWIKKLGETPAFDTNKLVVLESKAFNDTTIPLFIPIDPQFVHGFDPYSDMNEQNHTISPYNAKNWFPRYEYQKYTINEICLSGPACPRPPWNHYLQALCKYKMYFKWGGCPKTLEKAYNPCSQSIWPTPDNKYGRSEVQNPNIFPQTELYSWDWNKDYVTEEAIARIKKYTDIDPTMLSITGSKGNPPALQKTQKQNEDEEEEKKLQFQLHQLRFKKVILQLQLQQQLKSLKAK

SEQ ID NO: 2882 - protein, 124 aa, Betatorquevirus sp.
LAERARNLKIYYFTDMFSSWKTPTSSQRQKELQWINIINSTHDQICYCDNPTLHLLYCLNKFSGAQKPEIDIKNIQCLLTGVTTDHTEEPTTKEEETGFIEGELERLFDESNGEEKENSNPDTR

SEQ ID NO: 2883 - DNA, 2901 bp, Betatorquevirus sp.
cgggtgccgaaggtgagtgaaaccaccgaagtcaaggggcaattcgggctatggcagtctggcggaacgggcaagaaacttaaaataatatttattttacagatgcacaaattctctaggaaagaccaaattaaatttattaactgcttggttggagtacatgacttaaaatgtgaatgcaacaaacctgcttaccactcctttgaaatattggcaaaacaactagctccagaattaacaacacaagaaaaagaccaccttaaaaaatgccttggtacaactactacggacgccgccgtcggagaccatggagacgattttggagacgacctagaaaccgttttcgccgacgatattacagaagaagaaactgggtaagaagacgacgttttaaaaagaaacttaaaaaaattaaaataactcaatatcaaccacaatgcattagaaaatgtaaaatatatggacctatatgcttgtttgaaactactaaccaaagacttgaaaatgactttgatctatatgaactcagtgaagttccagaaactttaccggggggaggtggatggggtataaaagcattttctttagaagctttatactcagagcatgaatattgtcataatgtatggactactagtaacaaaaatttacctttagtacgctatttgggatgtaaacttagattttaccaatcagactatgtagattactgtgtaactgtttgtaaccaattacctttacaaagcagcttaggaatgtataatgccatgcaacctagcattcatcacttattacctaaagctattataattccttcaacaaaaacatacaagcgtaaaaaaccatacagacaaatatgggtaggaccaccatctcaactacaaaacaaatggtactttcaacaaaacatagcaaaaactcctttacttatgacaagagcctctgctatgtctctacaaaacttttttataaaccccagaaacataaacaccaacatgacaatacacacattaaatactgaactttttcaaaacagacaattcaaaaacacaacagaatactactgcaaaatacaaagagaaaaaaaagtatacctatacgcttctagagaaatactaacatcatcaacaacaggccttgacaaaaaacaactaataccactaacaaacacagttatatacaaaagaggcaacactgcacaagaagcaggacaaacaacaaaatggacgaactggcaactaagtgccggaaacccattccatgcagactacttacaaaaagaaattaaagtttatcaaatagcagaagacccctcaaatatttttaaagacttaacaaaaacacaaactacatactcagaagtagaagtaacaaaatccataagatacaacccatttaatgaccaaggaaacacaaaccaatgttactttaaaagtaaccaaaaagatgaatttaattggctacccccagacaacccagaactaacaaatgaaggtcttccattttggctactactatggggctttacagactggcacaaaaaaattaaaaaacacctacatttagaaacagactatgctatatgcctaacacaccaaccaactacaataacaaaagaatacttagtaccactaagtgactcatttatgaatggacacagtccatatcaaaatgacggagaaccaaatgacccagatagaacaagctggtacccacaactacaatatcaaaatgaaattataaatgctatttgtgcttcaggcccaggagtagctagacttccagattacttttcagcacaggcactaatgagatacaaattttattttaagtggggtggaagccctcctccaatgtctacagtcaaagaccccaaagaacaaccaacttttattatacccggtaacagaacctcaccaaattcgttacagaatccaacaacagatccaaccaccttgttatggaactttgacgaacgcagacaacaaattaccccaaaagctattgagagaatacaaaaagactcaaaacctgaaacaactcttattacaggtggaagccacttccaagaaccaacaccttactaccaagaagcgacatcggagacgagctccgaggaagaagaagaaacatcactattcgagcagctcaacagacagcgactcaaacaacagcgaatcaagcagcgaatattgagtacactgaaaaaattacaaagtatagaataaaaagacacccagaaccagctttactttttccaccaccaaaaagaaacagaagactaaccccatgggaagaacaagaagagagagaagtagcctacttgtttggtaggccccaaagacgttttatattcgatatgccatattatcatgatataccaattacacctaaagtaaactttgccttaagatttaaagatcaataaacaaataaagggctaggccccattaattcaaactcggtgtctgttcctttaagtctcaacttatttaaatggtcaccgcctccctaaaattagggcgccaaaagggggctctgcccccttaaacccccagggggctccgccccctgcaacccccagggggctccgccccctacaaccccctaattaatatttaacaggaaaaccacctaattaacattgccgaccacaaaccgtcaaccacttcccctttttgccacacttccctttttactcattattattcattaaattaattagtaaacaccgtatatcctgggcgtagcttaataactataaaactaacacacatgacgaatggctgagtttataccgccagacggaggacacatcactttaacacacatgacgaatggctgagtttataccgccagacggaggacacatcacttcagtgactgagtactgccaaaggg

SEQ ID NO: 2884 - protein, 653 aa, Betatorquevirus sp.; identical to SEQ ID NO: 12

SEQ ID NO: 2885 - protein, 91 aa, Betatorquevirus sp.; identical to SEQ ID NO: 13

SEQ ID NO: 2886 - DNA, 2901 bp, Alphatorquevirus sp.
gcaaggctcttaaaaagccatgtttctcggtaaactttacagaaagaaaaggaaagtgcttctgcagactgtgccagacccaaagaaagctaggcggcttctgattatgtggcagccccccgtgcacaatgtccccggcatcgagagaaactggtacgacagttgctttcgatcccatgctgctgtttgtggctgtggcgactttattactcatcttaatcatctggcagctactctgggtcgccctccgcgttctcggcaccccgggggccccggcactccgcagataagaaacctgccagcgctcccggcaccccagggtgagcccggtgacagagcgccatggcctacggatggtggggccggcggcgccgctggagaagatggaggacgcggcggagaccgtggagaaccaggagacgtagaagacgacgtgctcctcgccgctttcgacctcgccgaagagtaaggaggcgcagggggcggtggcgcaggcggtatagaaaatggaggcgacgcaggggcagacggacgcacagaaaaaagataatcataaaacagtggcagccgaactttataagacgctgctacatcataggctacctgcctataatattctgtggcgagaacaccaccgcccagaactttgccacccactcggacgatatgatagccaaaggaccgtggggggggggcatgactactaccaagttcactcttagaatcctgtacgacgagtttaccaggtttatgaacttctggactgttagtaacgaagacctagacctgtgtagatacgtaggctgcaaactcatattctttaaacaccccaccgtagactttatagtgaggataaacacacagcctccattcctagacactaacctgaccgcagcacagatacaccctggcatcatgatgctcagcaaaaaacacatactgataccctcactaaagaccaggcccagcagaaaacacagggtggtcgtcagagtgggcccacctagactttttcaagacaagtggtacccccaatcagacctgtgtgacacagttctgctttccgtgtttgcaacggcctgtgacttgcaatatccgttcggctcaccactaactaacaacccttgcgtcaacttccagattctggggcaccagtacaaaaacaaccttagtattagttccacaaatgatgccactaacaaaacccactatgagaacaatttatttaagaaagtagaactatacaacacctttcaaacaatagctcaattaaaagaaacaggactagttacaaatggttcaggatcagaaaaactgtggaaccaagtacaaaacacacaaccactatcaccaaacggctcaaatgcacttactagcaaagacacttggtacaagggaaacacatacaacgacaaaatatcagagttagctgagaaaaccagagccagattcaaagctgcaacacaggcagccctgccaaactaccctacaattatgaccacagacttgtatgagtaccactcaggcatatactctagcatattcctagcagcaggaagaagctacttcgagaccactggggcctacacagacgttatatacaaccctttcacagacaaaggcactggaaacatggtgtggatagactacctaacaaaatcagactccatatacacaaagaacaaaagcaaatgcgaaatatttgacctgcctctgtgggccaccttcacaggatactcagagttctgttcaaaagtaacaggagacactgccatacacctgactgccagagtagtagtcagatgcccctacaccgaacccatgcttatagaccactcagaccccaacaggggctttgtaccatactcctttaactttggagagggcaaaatgcccggaggctcctccaaagtgcctataagaatgagggccaagtggtacgtgaacatatttcaccagcaagagttcatggaggccatagttcagagcggaccgtttgcttacaagggcgacataaaatcagcggtactcagcatgaaatacagattccactggaaatggggcggaaaccctatatccaaacaggtcgtccggaatccctgctccacctccagcacctccgcgggccatcgaggacctcgcagcgtacaagtcgttgacccgaaacacgttaccccggaagtcacctggcactcgtgggacatcaagcgaggtctctttggcaaagcaggtattaagagaatgcaacaagaatcagatgctctttacattcctacaggaccactcaagaggccgcgcagggataccaacgcccaagacccagaagagcaaaacgaaagctcaggtttcagagtccagcaacgactcccctgggtccactccagccaagaaacgcaaagctcccaagaagagatacaagcggaggggacggtacaggaacaactcctcctccagctccgagagcagcgagtactccgcttccagctccaacagctcgccagccaagtcctcaaagtgcaagcagggcaaggcctacaccccctattatcttcccaagcataaacaaagcctttatgtttgagcccaagggtcctaaagccatacagggctaccacgattggctagaagagtacacctgctgcaaatactgggatagaccccccagaaccctacacacagacatacccttctacccctgggcaccaaaaccccaagaccaagtaagggtctctttcaaactcaacttccaataaagtttcaaggccgtgggagtttcacttgtcggtgtctgcttattaaggtcaccaagcactccgagcgcagcgaggagtgcgaccctgggggtgggtgcaacgccctcggcggccgcgcgctacgccttcggctgcgcgcggcacctcg

SEQ ID NO: 2887 - protein, 739 aa, Alphatorquevirus sp.
MAYGWWGRRRRWRRWRTRRRPWRTRRRRRRRAPRRFRPRRRVRRRRGRWRRRYRKWRRRRGRRTHRKKIIIKQWQPNFIRRCYIIGYLPIIFCGENTTAQNFATHSDDMIAKGPWGGGMTTTKFTLRILYDEFTRFMNFWTVSNEDLDLCRYVGCKLIFFKHPTVDFIVRINTQPPFLDTNLTAAQIHPGIMMLSKKHILIPSLKTRPSRKHRVVVRVGPPRLFQDKWYPQSDLCDTVLLSVFATACDLQYPFGSPLTNNPCVNFQILGHQYKNNLSISSTNDATNKTHYENNLFKKVELYNTFQTIAQLKETGLVTNGSGSEKLWNQVQNTQPLSPNGSNALTSKDTWYKGNTYNDKISELAEKTRARFKAATQAALPNYPTIMTTDLYEYHSGIYSSIFLAAGRSYFETTGAYTDVIYNPFTDKGTGNMVWIDYLTKSDSIYTKNKSKCEIFDLPLWATFTGYSEFCSKVTGDTAIHLTARVVVRCPYTEPMLIDHSDPNRGFVPYSFNFGEGKMPGGSSKVPIRMRAKWYVNIFHQQEFMEAIVQSGPFAYKGDIKSAVLSMKYRFHWKWGGNPISKQVVRNPCSTSSTSAGHRGPRSVQVVDPKHVTPEVTWHSWDIKRGLFGKAGIKRMQQESDALYIPTGPLKRPRRDTNAQDPEEQNESSGFRVQQRLPWVHSSQETQSSQEEIQAEGTVQEQLLLQLREQRVLRFQLQQLASQVLKVQAGQGLHPLLSSQA

SEQ ID NO: 2888 - protein, 149 aa, Alphatorquevirus sp.; identical to SEQ ID NO: 2338

SEQ ID NO: 2889 - protein, 127 aa, Alphatorquevirus sp.; identical to SEQ ID NO: 2339

SEQ ID NO: 2890 - DNA, 2901 bp, Gammatorquevirus sp.
cgggagcccgaggtgagtgaaaccaccgaggtctaggggcaattcgggctagggcagtctagcggaacgggcaagaaacttaaaataaactttattttacagatgaccaactactctgcaagtcacttttttaaaccaactccttacaacaatgacaccaaaaatcaaatgtggatgtccatgatagctgatgggcacgactgtatctgcaactgccatagtccttttggccatttgcttgcttctatttttcctcctggtcatcaagaccgttttcttacaattgaagaaattattaatagagacattaaagaatgcctttctggtggaggagaagaagaaaaccatggtttgggcgctggagacgatataaaaagagatacccaagaagaagaaggcgcccactttataaaagacgaagaactagacgcactaatcgccgcaggagaagacgccgctggaaggtaagaagaaaaaaaaaaagaataaatgtaactcaatggcagcctgaaagtattagaaaatgtaaaataataggaattgaacccctctgtgtaggtgctgaaggctcacaaattgactgctatacagtaactaaaacagactatgtgccacctaaagtaccatggggaggaggcttcggcttagaaaactttaccctaaaatacttatactcagaattccaatatcataacaatatatggactgccagcaatactcaaaaagacctatgtagatacacaggtggaaaatttataatatacagacatccctatcaagactttgtagtatcctatgacatacaaccaccacacaccttaaacaaatttactttccctagctgtcatccacaccaacaactactgtctaaacatcacaaaattatactaagccaagctagtaaaccaaatggtaaatactacaaaaaaataaaatttaaaccaccaaaacaaatgataacaaaatggttttttacaaaaacattctcaccagctagtttaattgtaataaaagctgcagctgcaaatttccaacacattaacctaagtggcaaaaatacaaacatgttagttacactgtactcactaaatttatcattttataaaaacccagcatggggtttatccacagctcatgcaaactactggccatacgcacaagcaccaaacaatttaaaatactttattttagacaagtctggcaacaaaatacaaaaagaaatgaccttaactactagaagcagctactcagacacaattaactacaacactggttggtttaaatcagaatttttacaagctgcaggaattggtgaagttactgcagctacagcaacacatcaagttatagctggtagatacaaccctaatatagatgatggagaaggaaatgaaatatattgtacagccattacaagtacaacttggctaccacctactcatgacaaacaactacttataactaacatgccactatggctaggcttatatggatattactcctttgttagagagtctaaatctgaagacttttggaaactacatgttattgtactaaaatccaaagccattcattgctacccagaaataggtagttgtgatagatatgtttttattgactgggactatatacaaggcaaaaaaccatgggaccaatcaataaccacaaaagaaaagtcctattggtaccctgatatgtcctggcaaagaaaatccatgaatgcaattgtagaatcagggccatttataccaaaactatcagaagaaacatatagcacatgggaactaaacatgagatattatttttatttcaagtggggaggtgcaaacacatctgaagcccaagttgaaaatccagaactcctacccacctatgatgtacccgattcaatgccaaaaacaatacaaattgttaacccagaaaaacaagctccagaaaccatcctgcacccctgggactaccgcaggggatttattaaagaaacagctcttaaaagaatgtgctcaaacatcgaaactgatacagaatttcaactccctacagaacaaacaccaaagaaaaaaagaagagtacaagcaactcttcaaaatccccaagaagaaaaccaagaaatcaaaacatgtctcctctcactctgcgaagaaagtacatgccaagaagaggaggagcaagacctccacaagctcatcctcaagcagcagcgccagcagcaaaagctcaaatacaacatgttcaagctcctcctagacctgaaagaaaaacagagaataatacaacatcacacaggcctactagaatgaaactaacaccatttaaaaaaggatttgaaatagaaacagagcatcaacttgcacaagcattctgtagaccaccaagacactttaaagaagaccccccattttatccatggctacctaaacttgtaccccttgtaaactttcacttaaattttaaaggctaggccaacactgtacacttagcggtgtttgtttatataagtttacaccccaaaaaaattgtaaaataaaaaaaaaaaaaaaaaaaataaaaaatttcaaaaattcggcgctcgcgcgcgctgcgcgcgcgcgagcgccgtcacgcgccggccccccccccccacaccccccgcgggggggggcagagccccccccgcacccccccctacgtcacaggccacgcccccgccgccatcttgggcgtggcagggaggggactaaaatggcgggagccaatcaatttatactttcactttccaattacaacccgccacgtcacacaaaagaggaggagactcaaaaactatataactaaatacagtgacgaatggctgagtttaccccgctagacggtgcagggaccggatcgagcgcagcgaggaggtccccggctgcccatggg

SEQ ID NO: 2891 - protein, 661 aa, Gammatorquevirus sp.
MPFWWRRRRKPWFGRWRRYKKRYPRRRRRPLYKRRRTRRTNRRRRRRRWKVRRKKKRINVTQWQPESIRKCKIIGIEPLCVGAEGSQIDCYTVTKTDYVPPKVPWGGGFGLENFTLKYLYSEFQYHNNIWTASNTQKDLCRYTGGKFIIYRHPYQDFVVSYDIQPPHTLNKFTFPSCHPHQQLLSKHHKIILSQASKPNGKYYKKIKFKPPKQMITKWFFTKTFSPASLIVIKAAAANFQHINLSGKNTNMLVTLYSLNLSFYKNPAWGLSTAHANYWPYAQAPNNLKYFILDKSGNKIQKEMTLTTRSSYSDTINYNTGWFKSEFLQAAGIGEVTAATATHQVIAGRYNPNIDDGEGNEIYCTAITSTTWLPPTHDKQLLITNMPLWLGLYGYYSFVRESKSEDFWKLHVIVLKSKAIHCYPEIGSCDRYVFIDWDYIQGKKPWDQSITTKEKSYWYPDMSWQRKSMNAIVESGPFIPKLSEETYSTWELNMRYYFYFKWGGANTSEAQVENPELLPTYDVPDSMPKTIQIVNPEKQAPETILHPWDYRRGFIKETALKRMCSNIETDTEFQLPTEQTPKKKRRVQATLQNPQEENQEIKTCLLSLCEESTCQEEEEQDLHKLILKQQRQQQKLKYNMFKLLLDLKEKQRIIQHHTGLLE

SEQ ID NO: 2892 - protein, 121 aa, Gammatorquevirus sp.
MTNYSASHFFKPTPYNNDTKNQMWMSMIADGHDCICNCHSPFGHLLASIFPPGHQDRFLTIEEIINRDIKECLSGGGEEENHGLGAGDDIKRDTQEEEGAHFIKDEELDALIAAGEDAAGR

SEQ ID NO: 2893 - protein, 113 aa, Gammatorquevirus sp.
MSPLTLRRKYMPRRGGARPPQAHPQAAAPAAKAQIQHVQAPPRPERKTENNTTSHRPTRMKLTPFKKGFEIETEHQLAQAFCRPPRHFKEDPPFYPWLPKLVPLVNFHLNFKG

SEQ ID NO: 2894 - DNA, 2901 bp, Alphatorquevirus sp.
gcgaccctgggggtgggtgcaacgccctcggcggaggggcaattcgggctcgggactggccgggctatgggcaaggctcttaaaaagccatgtttctcggtaaactttacagaaagaaaaggaaagtgcttctgcagactgtgccaaacccaaagaacgctaggcggcttctgattatgtggcagccccccgtgcacaatgtccccgggatcgagagaaactggtacgagagttgctttcgatcccatgctgctgtttgtggctgtggcgactttgttggccatcttaatcatctggcagctactctgggtcgccctgcgcgttctcggcaccccgggggccccggcactcctcagataagaaacctgccagcgctcccggcaccccagggtgagcccggtgacagagcgccatggcctacggatggtggggccggcgacgccgctggaggagatggagaacgcggcgcagaccgtggagaaccaggagacgtagaagacgacgcgctcctcgccgctttcgacctcgtcgaagagtaaggaggcgcagggggcggtggcgcaggcggtatagaaaatggaggcgacgcaggggcagacggacgcacagaaaaaagataattataaaacagtggcagccgaactttataagacgctgctacatcataggctacctgcctctgatattctgtggcgagaacaccaccgcccagaactttgccacccactcggacgatatgatagccaaaggaccgtggggggggggcatgactacaaccaagtttactctcagaatcctgtacgacgagtttaccaggtttatgaacttctggactgttagtaacgaagacctagacctgtgtagatacgtgggctgcaaactcatattttttaagcaccccaccgtagactttatagttaggataaacacacagcctccattcttagacactaatctcaccgcggcacagatccacccgggcatcatgatgctcagcaaaaaacacatactgattccctcgctaaagaccaggcccagcagaaaacacagggtggtcgtcagggtgggcccacccagactttttcaagacaagtggtacccccagtcagacctttgcgacacagttctgctttctatatttgcaacggcctgtgacttgcaatatccgttcggctcaccactaactgacaacccttgcgtcaacttccagattctggggcaccagtacaaaaaccaccttagtattagttccacaaatgataagactaacaaagagcactatgataagaatttattttgtgaaacacagctatacaacacttttcaaacaatagctcagcttaaagaaacaggactagtcacaaacggtacaggaacacaaaacatgtggaacaaggtacaaaacacaacaacactattaccagatggcacaaatgcacttgaaagcaaagacacctggtacaaaggaaacacatacaaggcagaaattaaaactttagcagaaaaaacaagagccagattcaaagctgcaacagaagcagccctgccaaactactctacaaccatgtccacagacttgtatgagtaccactctggcatatactccagcatattcctagcagcaggcaggagctactttgagaccccaggggcctacacagacgttatatacaaccctttcacagacaaaggtactggaaacatggtctggatagactacctaacaaaagcagactccatatacacaaagaacaaaagcaaatgcgagatatttgacctgcctctgtgggccacattcacaggatactcagaattctgttcaaaagtcacaggagacacagccatacacctgactgccagagtagtagtcagatgcccctacactgaacccatgcttatagaccactcagacccaaacaggggctttgtaccatactccttcaactttggagagggcaagatgcccggaggctcctccaaagtgcctataagaatgagagccaagtggtacgtaaacatgttccaccagcaagagttcatggaggccatagtagagagcggaccgtttgcttacaagggcgacataaaatcagcggtactcagcattaaatacagattccactggaaatggggcggaaaccctatatccaaacaggtcgtccggaatccctgctccacctccagcacctccgcgggccatcgtggacctcgcagcgtacaagtcgttgacccgaagcacgttaccccggaagtcacctggcactcgtgggacatcaagcgaggactctttggcaaagcaggtattaagagaatgcaacaagaatcagatgctctttacattcctacaggaccactcaaaagaccccggagagataccaacgcacaagacccagaagagcaaaacgaaagctcaggtttcagagtccagcagcgactcccgtggatccactccagccaagaaacgcaaagctcgcaagaagagatgcaaacggaggggacggtacaggaacaactcctcctccagctccgagagcagcgagtactccgcttccagctccaacagctcgccagccaagtcctcaaagtccaagcagggcaaggcctacaccccctattatcttcccaagcataaacaaggcctttatgtttgagcccaagggtcctaaacccatacagggctaccacgattggctagaggaatacacctgctgcaagttctgggacagaccccccagaaagctacacaccgacacgcccttctacccctgggcaccaaaacccaaagaccaaataagggtctccttcaaactcaacttccaataaaatttcaaggccgtgggagtttcacttgtcggtgtctgcttcttaaggtcaccaagcactccgagcgcagcgaggagt

SEQ ID NO: 2895 - protein, 739 aa, Alphatorquevirus sp.
MAYGWWGRRRRWRRWRTRRRPWRTRRRRRRRAPRRFRPRRRVRRRRGRWRRRYRKWRRRRGRRTHRKKIIIKQWQPNFIRRCYIIGYLPLIFCGENTTAQNFATHSDDMIAKGPWGGGMTTTKFTLRILYDEFTRFMNFWTVSNEDLDLCRYVGCKLIFFKHPTVDFIVRINTQPPFLDTNLTAAQIHPGIMMLSKKHILIPSLKTRPSRKHRVVVRVGPPRLFQDKWYPQSDLCDTVLLSIFATACDLQYPFGSPLTDNPCVNFQILGHQYKNHLSISSTNDKTNKEHYDKNLFCETQLYNTFQTIAQLKETGLVTNGTGTQNMWNKVQNTTTLLPDGTNALESKDTWYKGNTYKAEIKTLAEKTRARFKAATEAALPNYSTTMSTDLYEYHSGIYSSIFLAAGRSYFETPGAYTDVIYNPFTDKGTGNMVWIDYLTKADSIYTKNKSKCEIFDLPLWATFTGYSEFCSKVTGDTAIHLTARVVVRCPYTEPMLIDHSDPNRGFVPYSFNFGEGKMPGGSSKVPIRMRAKWYVNMFHQQEFMEAIVESGPFAYKGDIKSAVLSIKYRFHWKWGGNPISKQVVRNPCSTSSTSAGHRGPRSVQVVDPKHVTPEVTWHSWDIKRGLFGKAGIKRMQQESDALYIPTGPLKRPRRDTNAQDPEEQNESSGFRVQQRLPWIHSSQETQSSQEEMQTEGTVQEQLLLQLREQRVLRFQLQQLASQVLKVQAGQGLHPLLSSQA

SEQ ID NO: 2896 - protein, 149 aa, Alphatorquevirus sp.
MFLGKLYRKKRKVLLQTVPNPKNARRLLIMWQPPVHNVPGIERNWYESCFRSHAAVCGCGDFVGHLNHLAATLGRPARSRHPGGPGTPQIRNLPALPAPQGEPGDRAPWPTDGGAGDAAGGDGERGADRGEPGDVEDDALLAAFDLVEE

SEQ ID NO: 2897 - protein, 59 aa, Alphatorquevirus sp.
MFEPKGPKPIQGYHDWLEEYTCCKFWDRPPRKLHTDTPFYPWAPKPKDQIRVSFKLNFQ

SEQ ID NO: 2898 - DNA, 2901 bp, Betatorquevirus sp.
cgggtgccgaaggtgagtgaaaccaccgaagtcaaggggcaattcgggctatggcagtctggcggaacgggcaagaaacttaaaataacatttattttacagatgcacaaattctccagaaaagaccaaattaaatttattaactgcttagttggagtacatgacttgaaatgtgaatgcaacaaacctgcttaccactcctttgaaatattggcaaaacaactagctccagaattaacaacagaagaaaaagaccaccttaaaaaatgccttggtacaactactacggacgccgccgtcggagaccatggagacgattttggagacgacctagaaaccgttttcgccgacgatattacagaagaagaaactgggtaagaagacgacgatttaaaaagaaacttaaaaaaattaaaataactcaatatcaaccacaatgcattagaaaatgtaaaatatatggacctatatgcttgtttcaaactactaaccaaagacttgaaaatgactttgatctatatgaactaagtgaagttccagaaacattaccagggggaggtggatggggtataaaagcattttctttagaagctttatactcagagcatgaatattgtcataatgtatggactactagcaacaaaaatttacctttagtacgctacttaggatgtagacttagattttaccaatcagactatgtagattactgtgtaactgtttgtaaccaattacctttacaaagcagcttaggaatgtataatgccatgcagcctagcattcatcacttattacctaaagctattataattccttcaacaaaaacatacaagcgtaaaaaaccatatagacaaatatgggtaggaccaccatctcaactagaaaacaaatggtactttcaacaaaacatagcaaaaactcctttacttatgactagagcctctgctatgtctctacaaaacttttttataaaccccagaaacataaacaccaacatgacaatacacacattaaatactgaactttttcaaaacagacaattcaaaaacacaacagaatactactgcaaaatacaaagagaaaaaaaagtatacctatatgcttctagagaaatactaacatcaacaacagcaggccttgataaaaaacaactaataccactaacaaacacagttatatacaaaagaggcaacactgcacaagaacaaggacaaacaacaacatggcaacactggcagttaagtgccggaaacccattccatgcagactacttacaaaaagaaattaaagtttatcaaatagcagaacaccccacacaactttttcaaaacttatcacagcgacaaactacatacacagaagtagaaataacaaaatctataagatacaacccatttaatgaccaaggaaacacaaaccaatgttactttaaaagtaaccaaaaagatgaatttaattggcaacccccagacaacccagaactaacaaatgaaggtcttccattttggctactactatggggctttacagactggcacaaaaagattaaaaaacacctacatttagaaacagactacgctatatgcctaacacaccaaccaactgcagtaacaaaagaatacttagtacccctaagtgactcatttatgaatggacacagtccatatcaaactgacggggaaccaaatgacccagatagaacaagctggtacccacaactacaatatcaaaatgaaattataaatgctatttgtgcttcaggcccaggagtagctagacttccagattacttttcagcacaggcactaatgagatacaaattttattttaagtggggtggaagccctcctccaatgtctacagtcaaagaccccaaagaacaaccaacttttattatacccggtaacaaaacctcaccaaattcgttacagaatccaacaacagatccaaccaccttgttatggaactttgacgaacgcagacaacaaattaccccaaaagctattgaaagaatacaaaaagactcaaaacctgaaacaactcttattacaggtggaagccacttccaagaaccaacaccttactaccaagaagcgacatcggagacgagctccgaggaagaagaagaaacatcactattcgagcagctcaacagacagcgactcaaacaacagcgaatcaagcagcgaatattgaatacactgaaaaaattacaaagtatagaataaaaagacacccagaaccagctttactttttccacaaccaaaaagaaacagaagactaaccccatgggaagaacaagaggagagagaagtggcctacttgtttggtagaccacagagacgttttatattagatatgccatattaccatgatataccaattgcacctaaagtaaattttgccttaagatttaaagatcaataaagaaataaagggctaggccccattaattcaaactcggtgtctgttcctttaagtctcaacttatttaaatggtcaccacctccctaaaattagggcgccaaaagggggctccgcccccttaaacccccagggggctccgccccctgcaacccccagggggctccgccccctacaaccccctaattaatattcaacaggaaaaccacctaattagaattgccgaccacaaaccgtcaaattaatattcaacaggaaaaccacctaattagaattgccgaccacaaaccgtcaaccagttcccctttttccaacacttccctttttactccttattattcattaaattaattagtaaacaccgcatatcctgggtggagcttaataactataaaactaacacacatgacgaatggctgagtttatgccgccagacggaggacacatcacttcagtgactgaggactgccacaggg

SEQ ID NO: 2899 - protein, 653 aa, Betatorquevirus sp.
MPWYNYYGRRRRRPWRRFWRRPRNRFRRRYYRRRNWVRRRRFKKKLKKIKITQYQPQCIRKCKIYGPICLFQTTNQRLENDFDLYELSEVPETLPGGGGWGIKAFSLEALYSEHEYCHNVWTTSNKNLPLVRYLGCRLRFYQSDYVDYCVTVCNQLPLQSSLGMYNAMQPSIHHLLPKAIIIPSTKTYKRKKPYRQIWVGPPSQLENKWYFQQNIAKTPLLMTRASAMSLQNFFINPRNINTNMTIHTLNTELFQNRQFKNTTEYYCKIQREKKVYLYASREILTSTTAGLDKKQLIPLTNTVIYKRGNTAQEQGQTTTWQHWQLSAGNPFHADYLQKEIKVYQIAEHPTQLFQNLSQRQTTYTEVEITKSIRYNPFNDQGNTNQCYFKSNQKDEFNWQPPDNPELTNEGLPFWLLLWGFTDWHKKIKKHLHLETDYAICLTHQPTAVTKEYLVPLSDSFMNGHSPYQTDGEPNDPDRTSWYPQLQYQNEIINAICASGPGVARLPDYFSAQALMRYKFYFKWGGSPPPMSTVKDPKEQPTFIIPGNKTSPNSLQNPTTDPTTLLWNFDERRQQITPKAIERIQKDSKPETTLITGGSHFQEPTPYYQEATSETSSEEEEETSLFEQLNRQRLKQQRIKQRILNTLKKLQSIE

SEQ ID NO: 2900 - protein, 91 aa, Betatorquevirus sp.
MHKFSRKDQIKFINCLVGVHDLKCECNKPAYHSFEILAKQLAPELTTEEKDHLKKCLGTTTTDAAVGDHGDDFGDDLETVFADDITEEETG

SEQ ID NO: 2901 - DNA, 2900 bp, Gammatorquevirus sp.
aactgccatatgctaattaaaaccaccgaggtctaggggcaattcgggctagggcagtctagcggaacgggcaagaaacttaaattatacccttgtttttagatgagccatctatgtccagctgacttctaccacagaactacatttaaccttgatactcaaaaccaaatatggatgtctcagctagcagacgggcatgacaatttctgtaactgcaaaactccttttggccatttgcttgcttctatttttcctcctggtcataaagaccgtgatctcacaattaatcaaattttgctgcgagactaccaagaacaatgccattctggtggaaaagaagaaggcggccatggtatggcaccttcaggagacgctggagacgcagacaatataaaacaagaaaaagaagaagaagatatcccagaagaagaactagaaaaacttatggccgccgtagaagaagaagaaaacacaaggtaagaagaaaaattcaaaaactaactcttaaagtatggcaaccagactctgttagaaaatgtaaaattaaactactcgggactctagtaaatggagcccaaggaagacaaatgtactgctatacaaatgaaataggtaattacttacctcctaaatcacctgggggagggggatttggctgtgaaataattaccctagaatacttatatgaacaatacttacaaagaaactgcatatggactagaagtaatcaatacagtgacctttgtagatatacaggtggaaaaataacattgtacagacatccaacaatagactttgttttctcatacaacatacaaccaccatttactatagaaaaagacacttatttaaacctacaaccacaactacaattactaagcagaagacacagagtaatactcagcaaagctactaatccaaaaggcagaataaaacacacaataaaatttaaaccacccaaagaaatgtccactaaatggttttttcaaaatgatttttcacatacacccctaatacaattaaatgctagtgcagcagacttccaatatgtaactatgggctgctgcaatgtaagccaaatgtctacattttatgcacttaactcagcacacttctttaaacaatccacatggggacagttcactaacaatccttacaagccatacccaacaatgcagttacctttaacatttgtatacactgaaaaaggaggtaaggaaggcaaatatgttattacagaagactcatttggaaaaggaacaggctcatacacaacaagtgttagcagactaaagggatggtttaataacagagtactactagcaaaagcagtttaccaaggaaactatgaaacaaaagaaccaccaccagaacaaaaacttgctaccttacccatagttacagctagatataacccaatagaagacactggtaaaggcaatgaagtatggctaacatccatatttcatggagcctatgacaaaccaacagttactcctgactacttaatacaaggatacccactatacattgcattctttggctactataactttttacttcaaaaatctaatgataaaggtatcatgtacagccatatgtttgtagttaaaagcaatgcacttagacctttacaatcatctactggccaaacatattaccctatagtagactgggactttttaaatggcaaactaccctatgatgaatacattggagacaatgacagcagaaaatggtttcccacagtagaatctcaactaatatccattaataactttgtacaatcaggaccatacatacctagactagacaatgttaaaaacagtacctgggaacttagatacaaacttaccatgtactttaaatgggggggtcctcaggttacagacccaccaattgatgacccacaacacaaacaagactaccccactccaggtactttccaagaaacattacaaattgctgacccgaaaaaacaaaaacctgaaaccatgtttcatgaatgggactacagaagggggattattacaacagcagctattaaaagaatgtcagaaaacctcgaaactgattcatctatccaatctgatgcttcagaaccaccaaaaaagaaaaaaagaacaaccaaagaactcccctgcctccaaaagaaggaagaaaaaatcaagagatgtctccaggaactctgcgaagaaaatatcttccaagaatcacaagacctccagctcctcatccaacagcagcaccagcaacagcaacagctcaagtcaaacatcctggagctcctcaaagacctcaaacagcagcagagatacctaagtttgcaaacaggaaacctacattaacaagatttaaaccaggctttgaatgggaaacagaaaaacaagtagcaaaagcatttaacagaccccctagattatttaaagaagataaacccttttacccatggcttcctaaaccagaacccattgtaaactttcaccttaattttaaattctaggcctacaatgttcacttagtggagtatgtttatataagttacacccccaataaactgtacataaaaaaaaaaaaaaaaataaaaaattgcaaaaattcggcgctcgcgcgcgctgcgcgcgcgcgagcgccgtcacgcgccggcgctcgcgcgccgcgcgtatgtgcttacactccacgcacctagattggggtgcgcgcgctagcgcgcgcaccccaatgcgccccgccctcgttccgacccgcttgcgcgggtcggaccacttcgggctcgggggggcgcgcctgcggcgcttatttactaaacatactccgagtcgccatttggccccccctaagctccgcccccctcataaatattcataaaggaaaccacaaaattagaattgccgaccaca

SEQ ID NO: 2902 - protein, 676 aa, Gammatorquevirus sp.
MPFWWKRRRRPWYGTFRRRWRRRQYKTRKRRRRYPRRRTRKTYGRRRRRRKHKVRRKIQKLTLKVWQPDSVRKCKIKLLGTLVNGAQGRQMYCYTNEIGNYLPPKSPGGGGFGCEIITLEYLYEQYLQRNCIWTRSNQYSDLCRYTGGKITLYRHPTIDFVFSYNIQPPFTIEKDTYLNLQPQLQLLSRRHRVILSKATNPKGRIKHTIKFKPPKEMSTKWFFQNDFSHTPLIQLNASAADFQYVTMGCCNVSQMSTFYALNSAHFFKQSTWGQFTNNPYKPYPTMQLPLTFVYTEKGGKEGKYVITEDSFGKGTGSYTTSVSRLKGWFNNRVLLAKAVYQGNYETKEPPPEQKLATLPIVTARYNPIEDTGKGNEVWLTSIFHGAYDKPTVTPDYLIQGYPLYIAFFGYYNFLLQKSNDKGIMYSHMFVVKSNALRPLQSSTGQTYYPIVDWDFLNGKLPYDEYIGDNDSRKWFPTVESQLISINNFVQSGPYIPRLDNVKNSTWELRYKLTMYFKWGGPQVTDPPIDDPQHKQDYPTPGTFQETLQIADPKKQKPETMFHEWDYRRGIITTAAIKRMSENLETDSSIQSDASEPPKKKKRTTKELPCLQKKEEKIKRCLQELCEENIFQESQDLQLLIQQQHQQQQQLKSNILELLKDLKQQQRYLSLQTGNLH

SEQ ID NO: 2903 - protein, 125 aa, Gammatorquevirus sp.
MSHLCPADFYHRTTFNLDTQNQIWMSQLADGHDNFCNCKTPFGHLLASIFPPGHKDRDLTINQILLRDYQEQCHSGGKEEGGHGMAPSGDAGDADNIKQEKEEEDIPEEELEKLMAAVEEEENTR

SEQ ID NO: 2904 - protein, 120 aa, Gammatorquevirus sp.
LPPKEGRKNQEMSPGTLRRKYLPRITRPPAPHPTAAPATATAQVKHPGAPQRPQTAAEIPKFANRKPTLTRFKPGFEWETEKQVAKAFNRPPRLFKEDKPFYPWLPKPEPIVNFHLNFKF

SEQ ID NO: 2905 - DNA, 2900 bp, Betatorquevirus sp.
cgggtgctgaaggtgagtgaaaccaccgaaatcaaggggcaactaggggcaattcgggctagttcagtctggcggaacgggcaagaaacttaaaaatatttattttacagatgagcaaactatggaaaccaactaacttttcaacaagacaaaaaaatcttcaacaagtaaattcatacgtgagtattcacgacctaacctgcaactgcaaccaaccactaaaacacataattcaacaaattacagaacaagaaccatcaattaaaaaagaaccatggtatactactaccgacattggagaaaaccatggtggcgtcggcgacgtagacgactttggagacggagaattagaggcccttttcgcagaaccagaagaaaaagaagggtaagaaaaaagtttaaattcttacctttaaaacaatggcaaccctcatgcataagaaaattttgtgtaaaaggaatgtactgtctatatcaagccaaccataaaaaactaaatacaaactgggcacaatacgaagcctctatagtaccagaaaatgtaccaggaggaggaggctacagtttactaagatttacattagacgctttatatgaacaacatcaacttgcaagatgtatatggacaaaatctaataagtatttaccttttgtaagatacactggatgtacatttaaaatttacagaccagatgtaacagatgttgttgttaaatttcaaaactgctatcctatgtccgcgtcaccgctattatacatgggtacacaaccaagtataatgatgatgtcaaaaaacagttataaaataagatgtaaaaaaaataatccaacaggcaaaccatacagaaaatttaaatttccaccacctcaaaatatgataaacaaatggttctttttcgctgatatatcaaaagtaggactaatattaatagcaactaccgcagctagctttgaccaatattatattagtgaaagcgcagaaagcaacaacatcacattacacgctcttaatgtaaaactatttacaaacagaaactttaaaaacataagcacaaacggttatcacccacaaccagacaaatacatgtgggcaaccaatggaaacatagcagacccacaagtaaaagacttaatttatttaggaaacagcatagaataccaaaatggaacaaatttacaagaattcaaaaataaaaatacgaatataaatgaatggtcaaaattaatatctaaatatatggaaactagacaaaactggggaaacccttttcacaataataacacagaacacaaacacagactatggtttcatgcaaacccaccaatacaatcattacaggcaacaacaacatcattatctattgaaaccatgctaaacaaaaaaataacagacttaaatttcacacaaatacatcaagaactatattttagcattagatacaatccacaaaaagacacaggacaagatacaatgctatacctactaccaaactggaaagacgaatttggatgggaacctccaacaaatgaaaaattaatagtgtcaggataccctgcatggttaattatctggggatttttagactaccataaaaaactaggagaaataacacaacaaggaacacactatatacttgtattacaatccaaacatatgtcaccagaattaccatactatgtatttttagatcaaaacttttggcaaggtgattctgaatattttcaaggcagaactgcttttgatgacttaaattggtttccaatgacacgatatcaagacgcttcacaagaaactttatcacaatcaggcccaggtacagctaaattaggaaaaaacaaaaattcagaatgtcattgtgaatataaattttattttaaggcagggggctgcataccaccgatggaaaaaattacagacccttcaaaacaaccaactttccctataccaaataacctcgctaacccacattcgttacagagtacagatgaaccaattgaaacattcctctaccaattcgatgaaaggcgaggtgaaattactgcaaaagctgcagacagaatcacaaaagactacggacttaaaaaatctttatttacagattcaacaacaattggaacagacctcccagtcctccaaacaccacaggaagaaatgtactcgtcggaggaggaggaaaacaaaaaggagacactattccagcagctcctccaccagcgaaacaagcaaaaacaactcagacacagaatcaaccagctcctaatacaactacaacaacaaaatatgtaataagagactctaaagtacgtgtatccatgttttacactgaacctgttaatagacgtatgactccttcagaaatggaggatgaaaagtttattgcaaacttatttaaaagaccatggagacattttattagagataaaccttactatccatatgttcccgttgatgaaaaatacactgtaaactttgatttaaatccccctaaataaacaaggccctattaattcactctcggtgtctgttcctttaagtttcaaactttactaaaccacaccccctacaagtcactagggcgccaaaagggggctccgcccccttaaaccccccagggggctccgccccctgtaacccccaagggggctccgcccccttacaccccctaataaatattcaacaggaaaaccacataattagaattgccgaccacaaaccgtcacttacttcctcattttcacttacttcccttttcactcatacatattcataaaataaattagtaatcaccatcacaaacaggaggagcttaacaactatataactaactacacttccgaatggctgagtttatgccgccagacggagactgcaaaggttactgaagcaggctaaccttggg

SEQ ID NO: 2906 - protein, 670 aa, Betatorquevirus sp.
MVYYYRHWRKPWWRRRRRRLWRRRIRGPFRRTRRKRRVRKKFKFLPLKQWQPSCIRKFCVKGMYCLYQANHKKLNTNWAQYEASIVPENVPGGGGYSLLRFTLDALYEQHQLARCIWTKSNKYLPFVRYTGCTFKIYRPDVTDVVVKFQNCYPMSASPLLYMGTQPSIMMMSKNSYKIRCKKNNPTGKPYRKFKFPPPQNMINKWFFFADISKVGLILIATTAASFDQYYISESAESNNITLHALNVKLFTNRNFKNISTNGYHPQPDKYMWATNGNIADPQVKDLIYLGNSIEYQNGTNLQEFKNKNTNINEWSKLISKYMETRQNWGNPFHNNNTEHKHRLWFHANPPIQSLQATTTSLSIETMLNKKITDLNFTQIHQELYFSIRYNPQKDTGQDTMLYLLPNWKDEFGWEPPTNEKLIVSGYPAWLIIWGFLDYHKKLGEITQQGTHYILVLQSKHMSPELPYYVFLDQNFWQGDSEYFQGRTAFDDLNWFPMTRYQDASQETLSQSGPGTAKLGKNKNSECHCEYKFYFKAGGCIPPMEKITDPSKQPTFPIPNNLANPHSLQSTDEPIETFLYQFDERRGEITAKAADRITKDYGLKKSLFTDSTTIGTDLPVLQTPQEEMYSSEEEENKKETLFQQLLHQRNKQKQLRHRINQLLIQLQQQNM

SEQ ID NO: 2907 - protein, 106 aa, Betatorquevirus sp.
LAERARNLKIFILQMSKLWKPTNFSTRQKNLQQVNSYVSIHDLTCNCNQPLKHIIQQITEQEPSIKKEPWYTTTDIGENHGGVGDVDDFGDGELEALFAEPEEKEG

SEQ ID NO: 2908 - protein, 59 aa, Betatorquevirus sp.
MFYTEPVNRRMTPSEMEDEKFIANLFKRPWRHFIRDKPYYPYVPVDEKYTVNFDLNPPK

SEQ ID NO: 2909 - DNA, 2900 bp, Betatorquevirus sp.
cgggagccgaaggtgagtgaaaccaccgtagtctaggggcaattcgggctagttcagtctggcggaacgggcaagaaactaaaaatatttatttttacagatgagcaaatactataaaaaaccttcatacagcgcccgccatcaacaactacaatggattaatactatggtttctttacatgaccttcattgctactgcgacaaacctcttaaccatataataattgcaatactggaccaagaaccaactatacaatttgataaagaagactccaaaaaaattcaaaaatgccttactattaccgatggagaagacgtcctagacgactttggcgacgcagaactagaaaagctattcgcagaagatatagatactacagacgatacccctggcgcaactactgggtaagaaaacgaaaaagaaaattaaaaaaaattgttattaaacaactgcaacctcgtaccattagaaaacttaaaataacaggaaatattccactttttgaatgtacttctgaaagaataggaaataatatgactcaagtattagaatccagggcaccacacaactatccgggaggtggctcctttagcttaaacttatttacttttgaatctctttatgaattacacagaaaagcaagaaactggtggacaacttctaactgtaatttacctttgttaagatacactggatgtaaatttacactatacagacctataactgctgattatatatttttctacacaacatgtggtaaattagaagcaaacttagacttataccaatcagctcaaccgagtattttaatgctgaacaaaaacaaaagaatcatcacatgcaaagaaaacaataaccacaaaagaccctacaaaacagtacacattaaaccaccagcactatggtctaataaatggtacacacaacaagaaatagcaaaaatgccactactactaacagtaacatctgcagcttcactagacagattttacatatcagcacaagccaaatcaaacactataggctttacgagcctaaatacagatacattccaatttcatgattttaaagtaccaccaacaacaaccggctatgtaccaaatgaaaaacaactattatttacagtacatccatggttaggtgacctaactaaaacatattggggtaacttaatatacttaggaaacacaaatgaagacctaaaaggtacttcagtgaatgaaaaaccatcacacgtaacagagtggaacacttggatagacacctgggcctccaacaaagaatactggggaaacccctttcactcacaatacttacaacaagaccaccaacccatacttattacaaacaaaacaatgtcatacataaaatcaaaactaaaaaccttaggtgcagagagtgtaaaaacaacaacattagaaacagattttgcacaaaagaccattccacagctctgggactgcagatataacccagaagcagacactagtcacaatgcagtattctttgcaaaaataacacagggacatgatacatggaaagaacccacagaagaaagattaatatgtaaaggtttacccttatggtatttattacatggttttgttgactttcatgctaaagcactggacatacaaagacttgaaactgactgggtactatgtattgttagcgacgctataaccccaaaaaaagactactatgtcccacttgactactggtttttaaacggacaaagcccatacgagactgaagaaggacaaaaaacaatttatgacgcctttaactggcacccaaaagtaaactttcaaaaaagtactatatcaaaaattaatggaactgggcctgcaacagtaaaactacctgacaatataagctgcgagggtcatgcaaaatatacattttactttaaacttggtggatgcccaccaccaatggacgaagtgtgcgaccctgcaaagcaacctgactttcccagacctactaatttcctacaaacacctatattacaggacccagaaactcccatacaatactatctccaatcctctgacgaaagacgtggactgcttacaaagacagctgcaaaacgcctcaaaacagactggttcactacagaaactttatttacagctccaaaacagagttcactcgacctcccagggccgcaaaaagaaaccagctcggacgaagagacatcggcagaggaaaaagacccggagacactacagctccaactcaagctccaccgccgaaagcagcgaaaactccagcagcgaatcctcgacctcctaacaatatctcaaactttgtaataaaagaatgtactgttaaagcttacttatttccaaaacctaaaaaaaaccgtagatttacccctgaagaatttcaaactgaactagaaatatcaaaatggttacatagacctcctagaacatttataaatgatcctcctttttacccctggttaccaccagaacctgttgtaaattttgatttaaactaccattaaacaaggccagcattaattcacttaatggtgtctgtttatttaataaaaaactttaataaaccaacaccgcctccctaacacgcaggcgcacaagggggctccgcccccttaaacccccagggggggataccccccctaaacccccccaaaaaccacaaaatttacattgccaaccacaaacgaacaggaaaccgcaaaatttgcattgccgaccacaaacgaatatgcaaattacacttcctaaaaacacttcttaacttcctcaaaaattaattagtaatcagcatcacataggcgtggtttactaactataaaactaactgcactgacgaatggctgagtttatgccgccagacggagacgggatcacttcagtgactccagggg

SEQ ID NO: 2910 - protein, 675 aa, Betatorquevirus sp.
MPYYYRWRRRPRRLWRRRTRKAIRRRYRYYRRYPWRNYWVRKRKRKLKKIVIKQLQPRTIRKLKITGNIPLFECTSERIGNNMTQVLESRAPHNYPGGGSFSLNLFTFESLYELHRKARNWWTTSNCNLPLLRYTGCKFTLYRPITADYIFFYTTCGKLEANLDLYQSAQPSILMLNKNKRIITCKENNNHKRPYKTVHIKPPALWSNKWYTQQEIAKMPLLLTVTSAASLDRFYISAQAKSNTIGFTSLNTDTFQFHDFKVPPTTTGYVPNEKQLLFTVHPWLGDLTKTYWGNLIYLGNTNEDLKGTSVNEKPSHVTEWNTWIDTWASNKEYWGNPFHSQYLQQDHQPILITNKTMSYIKSKLKTLGAESVKTTTLETDFAQKTIPQLWDCRYNPEADTSHNAVFFAKITQGHDTWKEPTEERLICKGLPLWYLLHGFVDFHAKALDIQRLETDWVLCIVSDAITPKKDYYVPLDYWFLNGQSPYETEEGQKTIYDAFNWHPKVNFQKSTISKINGTGPATVKLPDNISCEGHAKYTFYFKLGGCPPPMDEVCDPAKQPDFPRPTNFLQTPILQDPETPIQYYLQSSDERRGLLTKTAAKRLKTDWFTTETLFTAPKQSSLDLPGPQKETSSDEETSAEEKDPETLQLQLKLHRRKQRKLQQRILDLLTISQTL

SEQ ID NO: 2911 - protein, 102 aa, Betatorquevirus sp.; identical to SEQ ID NO: 2702

SEQ ID NO: 2912 - protein, 135 aa, Betatorquevirus sp.; identical to SEQ ID NO: 2703

SEQ ID NO: 2913 - DNA, 2900 bp, Betatorquevirus sp.
cgggagccgaaggtgagtgaaaccaccgtagtctaggggcaattcgggctagatcagtctggcggaacgggcaagtaacttaaatttttattttacagaatgactactcgcataataccaacaaaagatagcattaaacaaaagaatctcaaatggatgaatctcctagtacacagccatgacatcttctgcgattgccccaacccacttcaacacacaattattttaatctgccaacaagaacctgaaattgatttaaaaccaattgaaaaggatataattaaaagatgccttattggagaaactacggataccgctggaaccgccgccgacgatggcgtagaagaaggcgttttggacgcccttttcaaagaagactttggagacgaagacaccgcagggtaagaaagagaaagcttaaatgtcttagactaaaacagtggcaaccacaatttataaaaagactaaaaattattggaactgagccactctttataacaacttcagaaagactaacaaatgaatttacttcttacaaagacagtattgcgcctcatcttgtacctgggggagggggcttttcaataatgaactttactttaaacgcattgtataaaaaacatttagtactagaaaactggtggactacaagcaatgaaaatatgccactaattagattaactggtattacactgtacttttacagacaagcagaatttgactacctagcacaatacataagacaatatccaatgactgcatcacacctaaaatacactagcacacacccacaagtaatgctattacataaaaatacattaaaaattacatgcaaacgaaacaacaaaaacaaaaaaccatacaaaaaaattaaaattaaaccacctacacaaatgcaaaaccgttggtactttcaaaaagatctagcagacataccgctattacaactaataaccactgcaacatcgttagaccgcatgtttcttagctcaacatcagttagctcaactataggtttcacaagtctagattacttaggattttataaccacaattacacaaaagacggaacacaaggatatgtagcaaaaccaggccaactactttttggagtactacaaggctcttataatataaaatcaataaaagcttctcaattaatatatatgggaaacgctatggacttaacagaaggcacacaagcaggatcaataaaagcacaacaatacaatcaatactcacaatattcaaacaccatacaaaaacaactaaaatacatacaactacaccaagacacttggggaaatccatttaatgaccaatttcacagaactggtggcttaataactactagtttacaatgggaacaaataatacaaaaattcacagacggcaacatgaacttaacagatgactttacatggaaaacaacatttacatttccagtaagatataacccatttgcagacaaaggaacaggaaacaaactatatttaatcaaatggaaagatcctgcacacgaaacagactgggacataccagcagcaacaacactttatgaaaacatgcctttatggttaatgctatggggatacttagacttttatagaaaatcaggagaactatcatcaatagatacaacacacttactagtaataaaaacaacatacactcaaccaaaggaaaaacaattacttatacctttagacgacgactttttagaaggtagaagcccttatatgggacaacaagaaacaacagcaagtgacagacaaaactggcacccaaaagtaagatttcaaataagaacagttaacaccataggttcttgtggacctgcaaccattaaacttccacctgaacaatcagcagaagctcatgtaaaatatgtattttattttaagattggaggaacaccaccaccaatggccacactcacagaacctgataaacaacctaaatataccactcccgataacatcctctcgtcaacttcgttgcagagtccaacatctccctttgaatacatgctctacaactttgacgaaagacgaggccaaattacaaaaagagctgcacaaagaatctctaaataccaagaaactgaacaaactgttctcccatttacagaatcagctctatccagttatacaacaccccaaaaagaagcatcgacaccagaaacatcggacgaggaaaaagaagaaatgtcgctccaggaacagctccagctccagcgaaagcagcaaaaactcctccgaaacagaatcaacaaactcctccagcgactagcactattagaatagaaaaatgtaaaattcaagttcaattgtttccaccagatgtaaccccaaatcgtagaatgactaagtgggaatatgaacaagaattagaggatgctaaatggtggtgtagagtccctagaacatttataaaagataaacctacatatccatgggtgccacaagacacaccatactgtgtaaactttgatttaaatgcgccgcaataaatatacaaggcctgcaaactttcaatctcggtgtccatttatataagtataaacttaaataaacatccaccacactcccaaatacgcaggcgcagaagggggctccgcccccttacgggggggctaacgcccccccttacaccccccctaattagcatattcaacaggaaaaccacataattagaattgccgaccacaaactgtcaccaacttccccatattcccttacttcctctttaattaataaatattcattaaattaattagtaatactcgtaaatccggggaggagtcaacaatctatataaccaagtacactgacgaatggctgagtttacaccgccagacggagacggcatcacaacagtgactgcaggctgatcttggg

SEQ ID NO: 2914 - protein, 672 aa, Betatorquevirus sp.; identical to SEQ ID NO: 2445

SEQ ID NO: 2915 - protein, 101 aa, Betatorquevirus sp.; identical to SEQ ID NO: 2446

SEQ ID NO: 2916 - protein, 60 aa, Betatorquevirus sp.; identical to SEQ ID NO: 2447

SEQ ID NO: 2917 - DNA, 2900 bp, Betatorquevirus sp.
ggcgggtgctgaggtgagtgaaaccaccgaatcaaggggcaattcgggctaggacagtctagcggaacgggcaagtaactaaatttattttttacagatgtctgactttgtgaatcctaactattccaaacgccaaattaaccttcaaatggttaattgctacgttggaattcatgatttacactgtcactgcaaatctccccttgaacacatcattaaacaaatagaagaacaagaaccaacaattaaaaaatgccaagatactactatcgccgttactggaaaccaagatggagaagacgctatcgaccaatttggacctggagaactggaccgcctattcgcagaagacgacgccgccgcagacgaagggtaagaagaaaacttccagctattcatttaaaacaataccaaccaaaatacatacataaactatgcgtaaaaggactattttgcttattacaagtacataaagctcattataatcataatttcaacgcttatgctaatacaacaacaagagaaggactccctaacggaggaggatttacaataataagatttacttggaacagtttatttgaacttcatgaaaaagctagaaatgtatggactaaaagtaacagaaacatgccattatttagatatactggatgttgtataaaagtatatagacctgttgatatagatcttgtacttaaatttcaaacttgttatcctatgtgttgtacaaaactaatgtatactggaactcaaccaagcttattaatgatgaatagaggttcaaaaaagattagatgtaaaaataatgcaccaaatgcaaaaccatacaaaaaatttaaattcaaaccaccagatcaaatgatgaacaaatggtattttcaacataatgaaagcaatgctggcttaatcttaatacaagcagcagcagctagctttgaccattattacacaagcaaatatgcagaaagcagttcaataactttatatggaataaacacaagagtttttcaaaacctaaacttccaaacaccacccacttatggatacatgccaaaacataactttggattatgggcctctaatggaacagacactttagacagtttaatatggctaggacaatcaaaactatacaatgtaggagaacctattggtaaaccaccaacaggtacaagctggactgcccacctatcaaaatatatggcagacagcacaaaatggggaaacccatttcaccaagaccatatacacaaaacctggggtcactactggtatagtacaaccccaccattacaagcccttcaaggcacaacagaacaaacgctaattaaagacaaactacatgaatttacccaagaaatatatcttgaatttagatacaacccatttacagacaaaggatacaacaacatatacataaaaccaaactttacaaataacttaataggagaaaattatgacttaggacccccagatgatccagacttacaaaacccaggatttccaaactggctatctgcctttggatttgaagactacctagtaaaattaggtaaaaaaaacagaatacatgaaaactacatgatttttttaacaacaaaacacatacaaccattagaatcatactacttactagtagacaaatactttttacacggagacacagaagaacttataggaagaacaacatgggataatgaacactggtaccccaacataacacaccaaagaggtgcctttaacaccttaacattatgtgcaccaggtgcaccaaaactaggacaaactaaactagcagaagcaaaaattgaatatcaattttattttaaggttggaggctgtgctccaccagtggagaaggttacaaaccctgcagaccaaccaacttatgttacaccaactaacttcactaacacaaattcgttacagagtccagatgaaccaattgaaacgttcctctaccaatttgattggagacgagaccaaattactgaaaaagctgcagacagaatcagtaaagactactcaactagaaaatatttatttacagatgcagcaagcagtacagaagtcccgttcatccaaacatacgaaaaagaactacagtcatcatcggaggaggaagcccaaaaagaaacactattcgagcagctccagcgacagcgaatcaagcagaaagacctccgaaacagaatccgactcctcctagctcaaatacaaaaattagaataaaacaccaacatgtaaaaataaacctttttggtactactcaacaaaacagacgcatgacaccaaaggaacgtgaagaagaaatacaagaagcaaaaatttgggaccattatgttagagactatattctagatatgcctttttacaaaaatatgcctataaccccacttgtaccccgcttaaactttgaattaaactacaaagaataaggcctgcaaacttcccttgtcggtgtccatttattaaatttaaaacttaaataaacatccaccacttctcccaaatacgcaggcgcaaaagggggctccgcccccttaaacccccaagggggctccgcccccttaaacccccaagggggctccgcccccttacaccccccaagggggctccgcccccttaaacccccaagggggctccgcccccttacaccccctaataaatattcaacaggaaaaccacctaattagaatggctgaccacaaaccgtcactaacttctgctttttgcctaacttccctttttacttataaatattcatgtaattaattaatacacaccgtaattccggggcggagctacacaactatataactaagtacacagacgaatggctgagtttatgccgctagacggagagcgcatcacacagtgactgcgagctgtccttg

SEQ ID NO: 2918 - protein, 660 aa, Betatorquevirus sp.
MPRYYYRRYWKPRWRRRYRPIWTWRTGPPIRRRRRRRRRRVRRKLPAIHLKQYQPKYIHKLCVKGLFCLLQVHKAHYNHNFNAYANTTTREGLPNGGGFTIIRFTWNSLFELHEKARNVWTKSNRNMPLFRYTGCCIKVYRPVDIDLVLKFQTCYPMCCTKLMYTGTQPSLLMMNRGSKKIRCKNNAPNAKPYKKFKFKPPDQMMNKWYFQHNESNAGLILIQAAAASFDHYYTSKYAESSSITLYGINTRVFQNLNFQTPPTYGYMPKHNFGLWASNGTDTLDSLIWLGQSKLYNVGEPIGKPPTGTSWTAHLSKYMADSTKWGNPFHQDHIHKTWGHYWYSTTPPLQALQGTTEQTLIKDKLHEFTQEIYLEFRYNPFTDKGYNNIYIKPNFTNNLIGENYDLGPPDDPDLQNPGFPNWLSAFGFEDYLVKLGKKNRIHENYMIFLTTKHIQPLESYYLLVDKYFLHGDTEELIGRTTWDNEHWYPNITHQRGAFNTLTLCAPGAPKLGQTKLAEAKIEYQFYFKVGGCAPPVEKVTNPADQPTYVTPTNFTNTNSLQSPDEPIETFLYQFDWRRDQITEKAADRISKDYSTRKYLFTDAASSTEVPFIQTYEKELQSSSEEEAQKETLFEQLQRQRIKQKDLRNRIRLLLAQIQKLE

SEQ ID NO: 2919 - protein, 92 aa, Betatorquevirus sp.
MSDFVNPNYSKRQINLQMVNCYVGIHDLHCHCKSPLEHIIKQIEEQEPTIKKCQDTTIAVTGNQDGEDAIDQFGPGELDRLFAEDDAAADEG

SEQ ID NO: 2920 - DNA, 2900 bp, Gammatorquevirus sp.
tttacacagtaaaaaggggaagtggggggggtctaggggcaattcgggctagggcagtctagcggaacgggcaagaaacttaaaacaatactttattttacagatgggagatcacttttacagaagaactccctataacaaagaaactcaagaacaaatttggtccactatttttactgattctcatgatgccttttgtggctgctgtcaaccattagctcacctgctaacccaccttattccacctgatcacaaatttagacattggactgttgaccaaattattcaaagagaactactacaaaacaaatgcctttttggtggggcagaagaagccgctggtggtatggcagacgccgccgcaggcccttcagaaaatataaaagaagaagaccaaaaagaagagtttacagacgtacaaatagaagagcttatcgccgccgcagacgccgtggaagaaaggtaagaagaaaaagaaaaaagatacatatacaacaatggcaacctgctactattagaaaatgtaaaattaagggatggacagttaactgcttgggagggcatggtagacaatttgcttgctactcagacaatagatttaattggacaccaccaacaacacctggagggggaggctttggctgtgaaaaatacacacttggctacttatttgatgaatacttaagaggcaacaacatatggacaactagtaacctatacttagatttagctagatacactggctgtaaatttatattttacagacatccaactttagactttatagtatactacaaaagatcttatcccatgaatttagacaaagccacatatgctaactgttatccatatattttattaaaaaaaaaacacaaaagaattatacattcacttaaaagacatccaaaaggcaaaccatatgtaaaaattaaaattaaaccaccacaacaaatgtccactaaatggttttttcaagaatcaatagcagacacaggactagtagaaatacatacatctgtagcagatctttcatactcatatattggctgctgcaacacaaaccaattagtaagctttcctatattaaacagacaattttataccctaacaggttggggaaatgcatcaaatataactacatttggctggtatatgcctagagccactatgccaaaacagtttgaatggaaaggcacagatgtatttttaaaaccacaacaaggacagttaacagtaccatctgaaacaggaggaaaacaatacatgtacaccattaactataaaactggatggtttcaaccaaacttaatttcctgctttaaatttaatgaaccctcctcacaacaagtagccccagtaaaagtttgcagatacaaccctacaagagacactggagaaggtaacaaagtatggcttttgtcaactcttaacacaagctatgaaccaccaaaaacagacaaagaactaataatagaaggtgagcccttatacatattattaaatggctttactgactatgtacaaaaacacaaaaaagatccaacttttttacagtcatactacattgtaatacaaagtaactttatagaaccacacacaggtcttgacaactaccatgtacccattgactggaactttttaaaaggtaaagggccatatggagaaactccaacacaaagaatgctagaaaaatggttccccagattagaatttcaacaagaagttataaacagtatagttaccagtggtccatttgtacctaaattagacaatcaaaaaaacagtacttgggaacttcacagtcaatatacattttactttaagtggggtggagccgagctgccagaccaagaaactgcaaatcctagaacccaaggacagtatgaagtacccgataaaatccagcaggcaatacaaatcgctgatccgcaactacaaaaagcagccaaaaacctccacagctgggactttagaagatcaatccttacaaagtcagctcataaaagaattctcgaagactcagaaactgattcaattgtctcaacagattcacaagaagaaattgccaagaaaaagcaaaagctacaaggaaacagcctacaaattgccagtcaccaagaagaagaagtccagagctctctcctctcactcttcgaagaagattcatcgcaagagccacaagaatcaaacatcaagcagctcatcaagcagcaaaagtacaagcagcagcagctcaagcacaacctcctcacaatcatagcagacttgaaaagaaaacagaaaatgatacaactacaaacaggatttctagactaactccatttaaagatggatttgaaaaagaaactgaataccagttagcacaagcatttaaaagaccccctagactttttaaagaagacacacccttctacccttggctacccagacctgtaccccttgttcaatttaaacttaactttaaaggctaggcctacaactttcacttagtggagtatgtttatataagtcacacccccaaaaaaattgtaaaaataaaaaaaaaaaaaaaaaataaaaaattgcaaaaattcggcgctcgcgcgcgctgcgcgcgcgcgagcgccgtcacgcgccggcgctcgcgcgccgcgcgtatgtgctaacacaccacgcacctagattggggtgcgcgcgctagcgcgcgcaccccaatgcgccccgccctcgttccgacccgcttgcgcgggtcggaccacttcgggctcgggggggggcgcgcctgcggcgcttatttactaaacagactccgagtcgccatttggcccccctaagctccgcccccctcatgaatattcataaaggaaaccacagaattagaattgccgaccacaaactgccatatgctaattacttcccct

SEQ ID NO: 2921 - protein, 668 aa, Gammatorquevirus sp.
MPFWWGRRSRWWYGRRRRRPFRKYKRRRPKRRVYRRTNRRAYRRRRRRGRKVRRKRKKIHIQQWQPATIRKCKIKGWTVNCLGGHGRQFACYSDNRFNWTPPTTPGGGGFGCEKYTLGYLFDEYLRGNNIWTTSNLYLDLARYTGCKFIFYRHPTLDFIVYYKRSYPMNLDKATYANCYPYILLKKKHKRIIHSLKRHPKGKPYVKIKIKPPQQMSTKWFFQESIADTGLVEIHTSVADLSYSYIGCCNTNQLVSFPILNRQFYTLTGWGNASNITTFGWYMPRATMPKQFEWKGTDVFLKPQQGQLTVPSETGGKQYMYTINYKTGWFQPNLISCFKFNEPSSQQVAPVKVCRYNPTRDTGEGNKVWLLSTLNTSYEPPKTDKELIIEGEPLYILLNGFTDYVQKHKKDPTFLQSYYIVIQSNFIEPHTGLDNYHVPIDWNFLKGKGPYGETPTQRMLEKWFPRLEFQQEVINSIVTSGPFVPKLDNQKNSTWELHSQYTFYFKWGGAELPDQETANPRTQGQYEVPDKIQQAIQIADPQLQKAAKNLHSWDFRRSILTKSAHKRILEDSETDSIVSTDSQEEIAKKKQKLQGNSLQIASHQEEEVQSSLLSLFEEDSSQEPQESNIKQLIKQQKYKQQQLKHNLLTIIADLKRKQKMIQLQTGFLD

SEQ ID NO: 2922 - protein, 120 aa, Gammatorquevirus sp.
MGDHFYRRTPYNKETQEQIWSTIFTDSHDAFCGCCQPLAHLLTHLIPPDHKFRHWTVDQIIQRELLQNKCLFGGAEEAAGGMADAAAGPSENIKEEDQKEEFTDVQIEELIAAADAVEER

SEQ ID NO: 2923 - DNA, 2899 bp, Alphatorquevirus sp.
ggtcactaagcactccgagcgccagcgaggatcaaggggcaattcgggctcgggactggccggaccccgggcaaggctcttaaaaacgccatgtttctcggtaggccttggcgaaagaaaagggcactgttactgtctagcttgcgaactccaaagaagaaaccacctgcaatgagccagtggtgcccgcctgtccacagcgttcagggtcgcaaccaccagtggtatgaagcctgctaccgtggccatgctgcttattgtggctgtggcgattttattagtcaccttgttgctctgggtaatcagtttggtttcaggccgggtccccgggctcctggcgcaccgggactagggggactccccgtcccgccccgtagagccctgccggcacccccggctgaggctccggagcaccagcagggcaacaacaacaacaaccagcagctgcagagatggcctggggatggtggaaacgcagacggcgcagatggtggagaggcctctggaggagacgccgctttgccagaagacgacctagacggcctgctcgccgccctagacgacgaagagtaaggaggcgcagacggtggaggagggggcgactaaggaagcgcgtgtacaacaggagacgcagaatcagacgaaagagacgcagacagaaactgacaataagacagtggcagcctgacaaacgcaggatatgtagaattaaaggctaccttcctgccattatatatggagacgggacgttttccaaaaactatacaagtcacttagaggacagaatctccaaaggaccgtttgggggagggcacgggactgctagaatgtctcttaaagtactgtatgacgaccacctaaaaggacttaacatatggacgtatagtaacaaggacttggaactggttagatacatgcacaccacaattacattttacagacacccagacacagactttatagcagtatataacagaaaaacaccactaggtggcaacagatacactgcaccctcactgcaccctggtaacatgatgctgcagagaactaaaatactaattcctagctttaaaaccaaacccagaggtagtggcaaaattagagtagtaataagaccccccactttactagtagataagtggtactttcaaaaggacatatgcgacgttacactgtttaacctcaatattacagcagccagcctgcggtttccgttctgctcaccacaaacgaacaacccttgtgtaacatttcaagttctgcattctgtatatgacaaggcactaggcattaacacattcggtaccaaggaaacagcagatataacacaacaagagaatattaaaaactggataacaaaagcatttcagcaggcaggatgcactatactaaacacatttagatcagaaggcatctactctcatccacaaatacaaaaacctggtgcagacaacaaacccgatgcagagcactactttgcaccaaaagacagcctgtggggagacgccatatatgaaaatactaataatcaaactgcaacaacattaccaacactgctagcaaaaaacgcatatacatattatcaaaaagctaaacaaccaggaattgacaaacacagaggagccatggcacattgccacttaacaggaatatttagccctgcactgctaacacaaggcagattatcacctgaattttttggcctatacaaagaggtaatttacaacccatatgatgataaaggcaaaggtaacaaaatctggatagaccctttaacaaaacctgataacatatttgatgctagaagtaaagtagaactagaagacatgcccctctggatggcatgctttggatacaatgactggtgtaaaaaagagctaaataactggggcctagaagttgaatacagagtactactaagatgcccttacacatatccaaaactgtacaatgaagctaacccaaactacggctatgtacctatatcctacaattttagtgcaggaaaaactgtagaaggagatctttatgttccaataatgtggagaactaaatggtatcctacaatgtataaccaatttccagtattagaagatttatccatgtcagggccctttgcaccaagagataaaatacctagcagcacactcacagtaaaatacaaagctaaatttatattcgggggcaaccctatatctgaacagattgtcaaggacccctgcacccagcccacctacgaaattcccggaggcggtacgctccctcgcagagtacaagtcattaacccggaatacatcgggccacactactcattcaaaagcttcgacatcagacgtgggtactttagcgcgtcgagtgttaaaagagtgtcagaacaatcagacattgctgagtttatattctcaggtccaaaaaagccaaggatcgaccaagacaggtaccaagaagcagaagagcactcagattctcgactccgagaagaaaaaccgtggcagagctcgcaagaaacagagagcgaagcccaagaagaagagatacaagagacaaacatccagctccagctgcagcaccagctcaaagagcaactgcagctcagacggggaatccagtgcctcttcgagcaactaagcaaaacacaacagggagtccacataaacccttcccttgtgtaggcccaaaagcatacatgttcccagagagggcccctaaggctccccccacttcgggggactgggaaacagaatactttgcctgtaaaatgatgaatagaccagccagaaaattccttactgactttccctactatcctcactgcaaaaataattacaatgtaacctttcagcttaactacaaataaacaaggccgtgggagttttacttgtcggtgtctacctcttaa

SEQ ID NO: 2924 - protein, 739 aa, Alphatorquevirus sp.; identical to SEQ ID NO: 2201

SEQ ID NO: 2925 - protein, 160 aa, Alphatorquevirus sp.
MFLGRPWRKKRALLLSSLRTPKKKPPAMSQWCPPVHSVQGRNHQWYEACYRGHAAYCGCGDFISHLVALGNQFGFRPGPRAPGAPGLGGLPVPPRRALPAPPAEAPEHQQGNNNNNQQLQRWPGDGGNADGADGGEASGGDAALPEDDLDGLLAALDDEE

SEQ ID NO: 2926 - protein, 56 aa, Alphatorquevirus sp.
MFPERAPKAPPTSGDWETEYFACKMMNRPARKFLTDFPYYPHCKNNYNVTFQLNYK

SEQ ID NO: 2927 - DNA, 2899 bp, Betatorquevirus sp.
cgggagccgaaggtgagtgaaaccaccgtagtctaggggcaattcgggctagttcagtctggcggaacgggcaagaaactaaaaatatttatttttacagatgagcaaatactataaaaaaccttcatacagcgcccgccatcaacaactacaatggattaatactatggtttctttacatgaccttcattgctactgcgacaaacctcttaaccatataataattgcaatactggaccaagaaccaactatacaatttgataaagaagactccaaaaaaattcaaaaatgccttactattaccgatggagaagacgtcctagacgactttggcgacgcagaactagaaaagctattcgcagaagatatagatactacagacgatacccctggcgcaactactgggtaagaaaacgaaaaagaaaattaaaaaaaattgttattaaacaactgcaacctcgtaccattagaaaacttaaaataacaggaaatattccactttttgaatgtacttctgaaagaataggaaataatatgactcaagtattagaatccagggcaccacacaactatccgggaggtggctcctttagcttaaacttatttacttttgaatctctttatgaattacacagaaaagcaagaaactggtggacaacttctaactgtaatttacctttgttaagatacactggatgtaaatttacactatacagacctataactgctgattatatatttttctacacaacatgtggtaaattagaagcaaacttagacttataccaatcagctcaaccgagtattttaatgctgaacaaaaacaaaagaatcatcacatgcaaagaaaacaataaccacaaaagaccctacaaaacagtacacattaaaccaccagcactatggtctaataaatggtacacacaacaagaaatagcaaaaatgccactactactaacagtaacatctgcagcttcactagacagattttacatatcagcacaagccaaatcaaacactataggctttacgagcctaaatacagatacattccaatttcatgattttaaagtaccaccaacaacaaccggctatgtaccaaatgaaaaacaactattatttacagtacatccatggttaggtgacctaactaaaacatattggggtaacttaatatacttaggaaacacaaatgaagacctaaaaggtacttcagtgaatgaaaaaccatcacacgtaacagagtggaacacttggatagacacctgggcctccaacaaagaatactggggaaacccctttcactcacaatacttacaacaagaccaccaacccatacttattacaaacaaaacaatgtcatacataaaatcaaaactaaaaaccttaggtgcagagagtgtaaaaacaacaacattagaaacagattttgcacaaaagaccattccacagctctgggactgcagatataacccagaagcagacactagtcacaatgcagtattctttgcaaaaataacacagggacatgatacatggaaagaacccacagaagaaagattaatatgtaaaggtttacccttatggtatttattacatggttttgttgactttcatgctaaagcactggacatacaaagacttgaaactgactgggtactatgtattgttagcgacgctataaccccaaaaaaagactactatgtcccacttgactactggtttttaaacggacaaagcccatacgagactgaagaaggacaaaaaacaatttatgacgcctttaactggcacccaaaagtaaactttcaaaaaagtactatatcaaaaattaatggaactgggcctgcaacagtaaaactacctgacaatataagctgcgagggtcatgcaaaatatacattttactttaaacttggtggatgcccaccaccaatggacgaagtgtgcgaccctgcaaagcaacctgactttcccagacctactaatttcctacaaacacctatattacaggacccagaaactcccatacaatactatctccaatcctctgacgaaagacgtggactgcttacaaagacagctgcaaaacgcctcaaaacagactggttcactacagaaactttatttacagctccaaaacagagttcactcgacctcccagggccgcaaaaagaaaccagctcggacgaagagacatcggcagaggaaaaagacccggagacactacagctccaactcaagctccaccgccgaaagcagcgaaaactccagcagcgaatcctcgacctcctaacaatatctcaaactttgtaataaaagaatgtactgttaaagcttacttatttccaaaacctaaaaaaaaccgtagatttacccctgaagaatttcaaactgaactagaaatatcaaaatggttacatagacctcctagaacatttataaatgatcctcctttttacccctggttaccaccagaacctgttgtaaattttgatttaaactaccattaaacaaggccagcattaattcacttagtggtgtctgtttatttaataaaaaactttaataaaccaacaccgcctccctaacacgcaggcgcacaagggggctccgcccccttaaacccccagggggggataccccccctaaaccccccccaaaaaccacaaaatttacattgccaaccacaaacgaacaggaaaccgcaaaatttgcattgccgaccacaaacgaatatgcaaattacacttcctaaaaacacttcttaacttcctcaaaaattaattagtaatcagcatcacataggcgtggtttactaactataaaactaactgcactgacgaatggctgagtttatgccgccagacggagacgggatcacttcagtgactccagg

SEQ ID NO: 2928 - protein, 675 aa, Betatorquevirus sp.; identical to SEQ ID NO: 2910

SEQ ID NO: 2929 - protein, 102 aa, Betatorquevirus sp.; identical to SEQ ID NO: 2702

SEQ ID NO: 2930 - protein, 135 aa, Betatorquevirus sp.; identical to SEQ ID NO: 2703

SEQ ID NO: 2931 - DNA, 2899 bp, Betatorquevirus sp.
cgggagccgaaggtgagtgaaaccaccgtagtctaggggcaattcgggctagttcagtctggcggaacgggcaagaaactaaaaatatttatttttacagatgagcaaatactataaaaaaccttcatacagcgcccgccatcaacaactacaatggattaatactatggtttctttacatgaccttcattgctactgcgacaaacctcttaaccatataataattgcaatactggaccaagaaccaactatacaatttgataaagaagactccaaaaaaattcaaaaatgccttactattaccgatggagaagacgtcctagacgactttggcgacgcagaactagaaaagctattcgcagaagatatagatactacagacgatacccctggcgcaactactgggtaagaaaacgaaaaagaaaattaaaaaaaattgttattaaacaactgcaacctcgtaccattagaaaacttaaaataacaggaaatattccactttttgaatgtacttctgaaagaataggaaataatatgactcaagtattagaatccagggcaccacacaactatccgggaggtggctcctttagcttaaacttatttacttttgaatctctttatgaattacacagaaaagcaagaaactggtggacaacttctaactgtaatttacctttgttaagatacactggatgtaaatttacactatacagacctataactgctgattatatatttttctacacaacatgtggtaaattagaagcaaacttagacttataccaatcagctcaaccgagtattttaatgctgaacaaaaacaaaagaatcatcacatgcaaagaaaacaataaccacaaaagaccctacaaaacagtacacattaaaccaccagcactatggtctaataaatggtacacacaacaagaaatagcaaaaatgccactactactaacagtaacatctgcagcttcactagacagattttacatatcagcacaagccaaatcaaacactataggctttacgagcctaaatacagatacattccaatttcatgattttaaagtaccaccaacaacaaccggctatgtaccaaatgaaaaacaactattatttacagtacatccatggttaggtgacctaactaaaacatattggggtaacttaatatacttaggaaacacaaatgaagacctaaaaggtacttcagtgaatgaaaaaccatcacacgtaacagagtggaacacttggatagacacctgggcctccaacaaagaatactggggaaacccctttcactcacaatacttacaacaagaccaccaacccatacttattacaaacaaaacaatgtcatacataaaatcaaaactaaaaaccttaggtgcagagagtgtaaaaacaacaacattagaaacagattttgcacaaaagaccattccacagctctgggactgcagatataacccagaagcagacactagtcacaatgcagtattctttgcaaaaataacacagggacatgatacatggaaagaacccacagaagaaagattaatatgtaaaggtttacccttatggtatttattacatggttttgttgactttcatgctaaagcactggacatacaaagacttgaaactgactgggtactatgtattgttagcgacgctataaccccaaaaaaagactactatgtcccacttgactactggtttttaaacggacaaagcccatacgagactgaagaaggacaaaaaacaatttatgacgcctttaactggcacccaaaagtaaactttcaaaaaagtactatatcaaaaattaatggaactgggcctgcaacagtaaaactacctgacaatataagctgcgagggtcatgcaaaatatacattttactttaaacttggtggatgcccaccaccaatggacgaagtgtgcgaccctgcaaagcaacctgactttcccagacctactaatttcctacaaacacctatattacaggacccagaaactcccatacaatactatctccaatcctctgacgaaagacgtggactgcttacaaagacagctgcaaaacgcctcaaaacagactggttcactacagaaactttatttacagctccaaaacagagttcactcgacctcccagggccgcaaaaagaaaccagctcggacgaagagacatcggcagaggaaaaagacccggagacactacagctccaactcaagctccaccgccgaaagcagcgaaaactccagcagcgaatcctcgacctcctaacaatatctcaaactttgtaataaaagaatgtactgttaaagcttacttatttccaaaacctaaaaaaaaccgtagatttacccctgaagaatttcaaactgaactagaaatatcaaaatggttacatagacctcctagaacatttataaatgatcctcctttttacccctggttaccaccagaacctgttgtaaattttgatttaaactaccattaaacaaggccagcattaattcacttaatggtgtctgtttatttaataaaaaactttaataaaccaacaccgcctccctaacacgcaggcgcacaagggggctccgcccccttaaacccccagggggggataccccccctaaacccccccaaaaaccacaaaatttacattgccaaccacaaacgaacaggaaaccgcaaaatttgcattgccgaccacaaacgaatatgcaaattacacttcctaaaaacacttcttaacttcctcaaaaattaattagtaatcagcatcacataggcgtggtttactaactataaaactaactgcactgacgaatggctgagtttatgccgccagacggagacgggatcacttcagtgactccaggg

SEQ ID NO: 2932 - protein, 675 aa, Betatorquevirus sp.; identical to SEQ ID NO: 2910

SEQ ID NO: 2933 - protein, 102 aa, Betatorquevirus sp.; identical to SEQ ID NO: 2702

SEQ ID NO: 2934 - protein, 135 aa, Betatorquevirus sp.; identical to SEQ ID NO: 2703

SEQ ID NO: 2935 - DNA, 2899 bp, Betatorquevirus sp.
cgggtgccgaaggtgagtgaaaccaccgtagtcaaggggcaattcgggctaggtcagtctggcggaacgggcaagaaacttaaaataatttattttttagatatgagcgacagatacatccaaccaaaaccttcaaaaagacaacagcaaacaaaatggatgaatatgctagctcacgttcatgattccttctgcgactgctacaatccaatagtacacaccgctgccttaatcttcgaacaagagcctgaccttaaattttcaacaccagaattggatataattaaaaaatgcgttactggagaaactaccgctatcgccgctacagaccacgaaccagacgttattggagacggagaactagaggctttgtttcgagaagattttggagatcaagaagatacagggtaagaaaaaaaaaacttaagactataagactaaaacaatggcaaccgcattatattaaaaaactaagagttaaaggagactatcctctatttttaacgacttcacaaagactctctaataatgttataagttaccttgaaagtactgtacctcatgactggccgggaggcgggggctttagtatagctaactttacattagaaatgttatataaagaaaacttaacagctactaactattggactgtaagcaatgataatatgcctttatttagatacttaggatgctatataacattatttacacaaccagaagtagattacctattttactataacaacacaccaccaatgaaggcaacaaaactaacatacatgagcacacaaccaagcattatgctacaaataaaacatgtaaaagtaataaagtgcagaaaaactaatagaaaaaaaccatacaaaagattttatgtaccacctccaacacaaatgcagaacaaatggtatgcgcaacatgacctagctaacgtaccattattacaaacaatttcaacagtatgctcgttagaccgcaaatttctacatgccaatgcaaaatccactaacattacaatatcaagcattaacacagaagaaatttctaaccactacttttcaattagtcaaggaactacaggttataatccaaagccagaagtaaaactgtttgcagtacataaaatgcctttgaaaagagaaatagacattatagaaataggagatcttatatttctaggacaagtatactcacaagaaccaggaacaccaataaaaaacataaatacagccacttttgcagacaaactcacaaaagcactaacagacacaggataccaaggaaacccattttacaaagactacttaaatccagacacagatatagtaaaaacaaccaaagacctaaacacattgaaaaccacgtacacctccgcagatacaaaattaaaaaaaaatgactttacttttacagcacctctaataaaagaaacaagatacaacccattcaaagacaaaggcgtaggaaacaaagtatacctagtaaaaatactagaacaaactcactcacataactgggatgcaccaacagacgataacatagtttggacagacttacccctatatttactaacatggggttacttagattttcaaagaaaatctggccttgaatcatccatagacacaaacaactgcttagtaatatacagtccatatatggatccaccactaaatacaaaaacatacgtaccagtagacaccacattcttacaaggacacagcccatattcacaaacaacattcccatctgactaccataactttcacccaaaagttagattccaggttgatacagtgaatacaatagcatgtacaggaccaaatacagtaaaactaccagataatataagttgtgaagcacatatgagatataattttaaatttaaaattggaggagaaccagcaccaatgtcagtacttgtggatccacagaaacaaccaccaaacaccttccccaataacttcctacaatcaacttcgttacagaatccaacaaaaccactcgaatatttcctctggaaatttgatgaaagacgaggactgcttactaaaaaagcttcagaacgaatcaaaacacacaaagaaactgaaaaagatattctttcaattacagaaccagcaacaagctgtccgatatggaccaccaaagaaacatcgacaacggactcatcgtcaacggaagaagaggaaacatcgatcgagacacaactcctccacgagcgaagaaagcaaaaactcctccgaaagcgaatcaaccagctcctcaaccgattaaccatattagaatagaaaaatgtaaaattaatgtaaaactttttgaagatgaaccccgtaaaaaccgcagaatgactttatgggaaaggcaggaagaaatagcagatgcagcactatggggcagaactcctaggtggtttatatttgacaaacatttttatccagatgtaccccctgttcctaaatacactgtaaactttgacctaaatgcgccgcaataaaacaaggccagcaaatattcactctcggtgtccatttatataagtttaaacttaaataaacatccaccacactccctaatacgcaggcgtagaagggggctccgcccccttaaacccccagggggggcaaagccccccctttaacccccccccccccccctaattaatattcaacaggaaaaccacctaattagaatggctgaccacaaaccgtcagttacttccctatttcactattacttcctcttttactatttattattcattacattaattaataatcaccgtaattcctgggaggagcctataaactataaaaccaactatacttccgaatggctgagtttatgccgccagacggagacgggatcacttcagtgactccaggctgaccaaggg

SEQ ID NO: 2936 - protein, 667 aa, Betatorquevirus sp.
MRYWRNYRYRRYRPRTRRYWRRRTRGFVSRRFWRSRRYRVRKKKLKTIRLKQWQPHYIKKLRVKGDYPLFLTTSQRLSNNVISYLESTVPHDWPGGGGFSIANFTLEMLYKENLTATNYWTVSNDNMPLFRYLGCYITLFTQPEVDYLFYYNNTPPMKATKLTYMSTQPSIMLQIKHVKVIKCRKTNRKKPYKRFYVPPPTQMQNKWYAQHDLANVPLLQTISTVCSLDRKFLHANAKSTNITISSINTEEISNHYFSISQGTTGYNPKPEVKLFAVHKMPLKREIDIIEIGDLIFLGQVYSQEPGTPIKNINTATFADKLTKALTDTGYQGNPFYKDYLNPDTDIVKTTKDLNTLKTTYTSADTKLKKNDFTFTAPLIKETRYNPFKDKGVGNKVYLVKILEQTHSHNWDAPTDDNIVWTDLPLYLLTWGYLDFQRKSGLESSIDTNNCLVIYSPYMDPPLNTKTYVPVDTTFLQGHSPYSQTTFPSDYHNFHPKVRFQVDTVNTIACTGPNTVKLPDNISCEAHMRYNFKFKIGGEPAPMSVLVDPQKQPPNTFPNNFLQSTSLQNPTKPLEYFLWKFDERRGLLTKKASERIKTHKETEKDILSITEPATSCPIWTTKETSTTDSSSTEEEETSIETQLLHERRKQKLLRKRINQLLNRLTILE

SEQ ID NO: 2937 - protein, 102 aa, Betatorquevirus sp.
MSDRYIQPKPSKRQQQTKWMNMLAHVHDSFCDCYNPIVHTAALIFEQEPDLKFSTPELDIIKKCVTGETTAIAATDHEPDVIGDGELEALFREDFGDQEDTG

SEQ ID NO: 2938 - protein, 122 aa, Betatorquevirus sp.
LSDMDHQRNIDNGLIVNGRRGNIDRDTTPPRAKKAKTPPKANQPAPQPINHIRIEKCKINVKLFEDEPRKNRRMTLWERQEEIADAALWGRTPRWFIFDKHFYPDVPPVPKYTVNFDLNAPQ

SEQ ID NO: 2939 - DNA, 2899 bp, Betatorquevirus sp.
cgggagccgaaggtgagtgaaaccaccggagtctaggggcaattcgggctagatcagtctggcggaacgggcaagaaactaaaaacatattttttttttagatgagcaaacaactacaaaattcactatattctggaaaagcattagaatctcaatggagaaacaacatctttagctctcacgacttgatgtgcggctgcaaagatccagtactacatttattaattattataaacagagaaggaaaagcaccaaaacctgaagaagacgtcaaaaacataaaatgccttattactggagaaggcgccaaagatggagaaaaagatattatcccagacgatttcgaacctggagacctagaccgactgttttcagaacttggagaaacagaagaaaaagacgaaaaccctaccgacgacgggtaagaaaaagactttttaaacgtaaattacaagctataaaacttaaagaatttcagcctgatgttataagacgctgtaatatttttggcaacatttgtttatttcaaggaagtccagaaagagcaaatcataactatgtacaatatatatatagctatgtaccagttaatggacccggagggggcggatggacattaatgatagaaagcttatcctctttatgggaagactggcaacatttaaaaaatgtatggactactagtaatgctggactgccactagtaagatacagaggagcaacactcacattttttcaatcaccatacacagactatatagtaaaagtacacagatgctacccaatgacagacactaaatacacacatgcagactctgcaccaagtagaatgcttttaaaaagaaaaaccataaaagtacctagcttagaaaccagaaaaaaaagaaaaccatataaaaaagttaaaattccaccacctgcacaaatgcaaaataaatggtacttccaaaaagacatttgtgacattccacttgttatgatacaagctacagcagtagacttcagatacccatttgctcctagtagtgcacaaagtaacaatgtaactttactttgcctaaacataagtttatttcaaaatacaaactttgacaacccttctacaacacaaggctactttccaaaaccaggaacatacctatatagcacaaccagcagagcagtatctaaaccagaccaattaaatatggaaaacttaatttacctgggaaacacaaaagactacactctaggtaaagactcagaagacacatttgcaaactggggaaatccgtttatgccagaatacatacacggagaaaaacctgtttttactaaccaagtaaaagtaaataaaaacaactttgaacaagtaaaaaacagctttcacttactagaagaagactacttcttttgggtacgctataacccagaaaaagacacaggagacagtaacacagtatttttacaaaacaactttgtacaaacaagctggcacagaccagaaaatcccaacttaataatggaaggatttccattatatgacatgctctggggatttacagactgggaaagaaaattacatgacacacaggacatagacaacaaatacatactagttatacaaacacagcaatttgacgataaaaaaggatattatgtacttatagatccacactttaaagacggaaaaaacccctatgacacaccacttacaaactataacaaatctcactggaatatatgcactagaatacaagaaaaaccagtaaatgacatttgcttatcaggacccggaagtcctaaaccaccttatggaaactatatgcaagcaaaaatgcactataaatttcactttaattggggaggctgtccaaaaagtatagaaaaaccatatgatccttgttcacagcctacctggaatattccccgtaacctccatgaaggagtacaaatacagaatccagaaacagaaccacaaacagaactacaaaaatgggactggagaagggactacattacacccaaagctatcgaaagaattagtagctacacgtcaattgatgaagatgtacaaatttttacaggaaccaaaagagacgtgccaatatgtcgacaaacaccaccagaggacacgagctcggaagaggaaaaagaggagacaccaccgatccaggagcaaatcaacaagctcaaacgaaagcaacacaaactcaagctccgaatcctcaagcgactgaaaacaacaaatatataattaaaaactgtaaaaacaaagtacaattgtttcctactactcatccctttaaaaatagaagattcacaccagctgagagacaaacagaaaaagaactaagtaaaatattccttagaccagaaagaagcttcttttatgatcctcccttttatccctggcttccctgggaaccgcttgtaaactttgatatgggtaataaattttaaggccaacaaatttcacttagtggagtccatttatttaagttaaaccttaataaacagtcaccgcctcccaatcaataaggcgccaaaagggggctccgcccccttacacccccaagggggctccgcccccttactccgcccccttacacccccaagggggctccgcccccttacacccccaagggggctccgccccctaacccccggaaaaccacctaatttacatggctctccacaaactgctaaacggaaaccacaaaatttgcattgccgaccacaaacgaatatgcaaataaagttcctctaactaccgttaacttccctaaaaattaattagtaatcaccgttaatttacgtcaccacaacaacctatataaccaagtacacttccgaatggctgagtttatgctgccagacggaggcggcaaagcatcagcgacagccggctgatcttggg

SEQ ID NO: 2940 - protein, 650 aa, Betatorquevirus sp.; identical to SEQ ID NO: 2785

SEQ ID NO: 2941 - DNA, 2898 bp, Betatorquevirus sp.
cgggtgccggaggtgagtgaaaccaccgcagtcaaggggcaattcgggctaggccagtctggcggaacgggcaacattcttaaaataatttatattttacagatgagcagcttatggaaacaaccagcatatggtcctaaaggcctagaaaactgctggcacaacttaattcacggaacccatgacactatttgcggctgcaacgacaccactctccatattctccaacttctaagcaaaaataaccaaaagaaaccaacaacaaagcaactaaaagaaataaaatgcctccttactggagaagaagatactacagaagaaactaccggcgtagatggcctagagcctggagacctcgaccttttgttcgccgcagacgacgcagaaaatacagacgccgcaactactgggtaagaagaaaaaaacttttaaatataaaacttaaacaatttcaaccatatactataagaaaatgtagagtaaaaggactaaaatgtttatttcaaggaagtgcagacagactaatatacaactactggcaatatccaactagctatgtaccagaaaaaactccaggaggaggtggatggggactgctagtattcagcctagcaagcttatatgaagactatcaaaaaatacaaaactactggacacaaagtaatgcaggactaccactagtaagagtattaggtgcaaaactaactttctaccaacatccaacaatggactacgtagtacaaatagacagatgttggcctatggtagacacaccacttaaacatgcaaattgccacccacaaagaatgctaatgggaaaaaaatcacttataataccaagtacagaaacaaagaaacttaaacatggaaaaagaaaaatttttgtaccaccaccagcacaaattttaaaccaatggtactttcaaaaagatttatgtaacacaaaactactaatgatagcagccacagcttgcgacttaaaaaactactacataggaccaaactgggaatccaacaatataacattttatagtttaaacacatttcaatttaaaaaccataatttccaacatccatcagaaacatcaggttacaaacctaaaccaaacatatatttatatagccttggaaatggaagtctagcatttccaacatcaccgaaacaactaatatatttaggagactcagaagagtacaaagcaggtatagcaggaaaggtaggcacaaccactataacaaggaaagactggggtagccccttttacacacattacatgcaacaagatattccagtatattacagcacaaaagcacccacagacacagacgcatttaaagattcaactagcataagacaaaacttaacagaaatacatggaaaactatacacagaatgtagatataacccagacagagacacaggagaaggaaatgtaatttactttttaaataactactccggtgttggagacactgcatgggacgaaccccaagacaacaacgtaaaaataacaggcctgccactatgggtagccatttggggatggtcagactggatgaaaaaacttaactatttacctagattagaagacgaccacatattatgcattaaatcctcatttataacaccacaattaccatgttatgtacctttagatgattcatttttacaaggcctctcaccatatgaccaaccactatcaggaaagtatgctttacactattatccacaattaaattggcaaagacaatcagaagaaacaataggagaatgtgggccgggagtatgtagatttgatcactcaaaagcagtacaagcaaaaatgggatatcagtttttatttaagtttgggggatgtccagcaacactagaaaaagtttacgatccttgttcacagccaaaatggcccgttaccagtaacatctctgaaggatatgaaatccagaatccagcaacagacccctctactatcttcaatacctgggacgttagacgtgacatcattacaatgccagctatcaaaagacttaaacaaaacaaagaaactgatgaaactttttcaatcccaacaggatcaaaatccagtcccagtgcagtactcctccaaacacaccaagaagaagacccctcatcgtcagaggaagaagaaacgcaaacattacagtccaagctcctccgactccgagaccagcaacgccagctcaacaagcacctcctcaaattaatcaaaagttcaaaataactaacttaaaatgtagaattaacttgtttaatgatcctattaaaagaccacctagacgatttacacctgaagaaagacaaacagaaaaagaattagctatttggatgaaaagaccccaaagacattggtttgatgacccaccaacatatccctggcttccgctaacaccccttgcaaactttgacttaaatttcaaagaataaaggccaacaaatttcacttgatggtgtctgtttctttaagtttaaccttaataaaccaactccgcctcccaacagtgttggcgccaaaagggggctccgcccccttacacccccaagcgccaaaagggggctccgcccccttacacccccaagggggctccgcccccttaaacccccaagggggctccgcccccttataccccaaagggggctacgcccccttacacccccttataaatattcataaaggaaaccacaaaattagaattgccgaccacaaacgaacatgcaaattaacttccccaaaacacaactttacttccccaaaaattaattaataatcaacgtcacagaaggaggagccacacaactatataaccaacaccacttccgaatggctgagtttatgccgccagacgtagagaagataaaatatcttcgctggactaggg

SEQ ID NO: 2942 - protein, 652 aa, Betatorquevirus sp.
MPPYWRRRYYRRNYRRRWPRAWRPRPFVRRRRRRKYRRRNYWVRRKKLLNIKLKQFQPYTIRKCRVKGLKCLFQGSADRLIYNYWQYPTSYVPEKTPGGGGWGLLVFSLASLYEDYQKIQNYWTQSNAGLPLVRVLGAKLTFYQHPTMDYVVQIDRCWPMVDTPLKHANCHPQRMLMGKKSLIIPSTETKKLKHGKRKIFVPPPAQILNQWYFQKDLCNTKLLMIAATACDLKNYYIGPNWESNNITFYSLNTFQFKNHNFQHPSETSGYKPKPNIYLYSLGNGSLAFPTSPKQLIYLGDSEEYKAGIAGKVGTTTITRKDWGSPFYTHYMQQDIPVYYSTKAPTDTDAFKDSTSIRQNLTEIHGKLYTECRYNPDRDTGEGNVIYFLNNYSGVGDTAWDEPQDNNVKITGLPLWVAIWGWSDWMKKLNYLPRLEDDHILCIKSSFITPQLPCYVPLDDSFLQGLSPYDQPLSGKYALHYYPQLNWQRQSEETIGECGPGVCRFDHSKAVQAKMGYQFLFKFGGCPATLEKVYDPCSQPKWPVTSNISEGYEIQNPATDPSTIFNTWDVRRDIITMPAIKRLKQNKETDETFSIPTGSKSSPSAVLLQTHQEEDPSSSEEEETQTLQSKLLRLRDQQRQLNKHLLKLIKSSK

SEQ ID NO: 2943 - DNA, 2898 bp, Betatorquevirus sp.
caggtaccgaaggtgagtgaaaccaccggagttaaggggcttattgggctaaagcagtcttggcggaacgggcaagaaactaaaataaactattattttacagcaatgagctcctaccttacaccagttatctacagcaagaatgctttagaaaaccagtgggtaaatactattttcaacacacacgatctttgctgtggatgcaacgacgccattaaacacctagccgccattttacaaagaaaaggaacacaactatgcctcccttcaacttctaccggagacgctactacccaaaccgatggagacgccgtagatactttagacgccggagatttagaccttctattcgccgaagattttggagaagacgaacggtaagaagacgccgtttttttaaaaaatataaaagaaaacttactaaaattaaacttaaccaatggcaaccacaaactataaacaaatgccacataaaaggaaatctttgtgcttttacttgtggaagaggtagagaaaaccacaattttattttaacacaagaaagctatgtacctacatctcaacctggagggggatcttggtctatactacaatttaccttaagagtactatatgatgaacataaagcaggcagaaattggtggacaaaaggaaatacaggtttaccacttgtaagatatatactatgcaaacttaaattttacagaagtaaagacacagactacctagtaacaatacaaagaacaccacctttcgaagtaactagagactcatacttaagcacacaaccatctagacacttaatgcaccacaaatctattatagttcctaaactaggaagaggaccaaacaaaaaaacatatataaaaagaaaagttctccctccagcaatgtttcaaaacaaatggtactttcaacaagacatatataatataccattttttatgttaaccatttcagcactagaactagatcaaatgtacgccccagaagaccaaataagctcaaatataacacttatatcactaaatacaaatgcatttcaaatgagtaactgggaacgacaaccatacagcacaaaatcagcaggaacatataacatatacttatggagttaccaaaatggtgacgataaagataaaaaatggcaaaacatatattttttaggaaactgtaaagaatacacagaaggaactaagttaaatacattgcaagactgcaaagaggtagcagaaattaaaaataaacaaaaatggggaaatccatttacacactggtataaccataaagatgcaagaatattttatggtgctataccaacaacagcacaagaatccgataatgctaacatattagaattagaagatttgtttatagaatgcagatacaacccatttaaagacaaaggcacaggaaacaaagtatacttagtacccacagacacaggcctaggtagctttttaacattaccaacaaaaaatgaattattaatagaaaatttaccactatggcttatattttggggttgggcagactggataaaaaagtctaaaccaatagcacacttagaagaagaataccaaataataatacaaactccatatatatttccaaaattaccatgttatgtactaacagacaaatactttctacacccaccaaatgacggaacacacacaaccacactatcacaaacagaccaactacattggcacataaaatacaactttcaagaacaacaatttaacttactagcaaaaacaggaccagcagcaccaaaaataaatgaagttaaacaaatagaagcacactttaactataacttttattttaagtggggaggaagcccagctccaatggaacaaattagtgacccagcagaccaagaaaaattccccacgcccaatacgcaactccaaagacttgagattgagagtccaacaaaacccaaacaacacttcttgtacaccttcgacgaaaagcgacacacactcacactcaaagctgcaaaaagacttaaaaaagactattcaactccaacattttttacagactttggagcaaaagacatcccgctcaaagcacaaacggaaagcgacagctcatcggaggaggaagaaatccaaacatcactccagagagaagacaaactcaagcagtacctccagcgaaagcgactccagtacagacagcgaatccacaacctcctaaaaacaaaaaaattattccccctttaagagacatgtttggacaaccttactataaaaaccgtagatttaatgctaaagaatttgaacaagaattgcttgatgctaaatgctggaaaagacgccccagactgtatatctttgataaacctgattatgaattacctactattgaaccacttgtaaacattggtgtaaatttttcattaaactttaaagagtaggccagcaaatattcacttgtcggtgtcagtttatataagtaataaccttaataaacatccatcacctccctaatacgcaggcgcacaagggggctccgcccccttaaacccccaagggggctccgcccccttaaacccccaagggggctccgcccccttacaccccctaattaatattcaacaggaaaaccacctaattataattgccgaccacaaactgtcaaccgttgcatatacttccctaaattaaactgcacttctgctttttcagaaacactcccactaattcattaataatcagacgctattcctgggaggagcaacacatctatataaccaagtcattaataatcagacgctattcctgggaggagcaacacatctatataaccaagtgcactgacgaatggctgagtttaccccgccagacggagaccagacaggacactgactgggctgcttttggg

SEQ ID NO: 2944 - protein, 659 aa, Betatorquevirus sp.
MPPFNFYRRRYYPNRWRRRRYFRRRRFRPSIRRRFWRRRTVRRRRFFKKYKRKLTKIKLNQWQPQTINKCHIKGNLCAFTCGRGRENHNFILTQESYVPTSQPGGGSWSILQFTLRVLYDEHKAGRNWWTKGNTGLPLVRYILCKLKFYRSKDTDYLVTIQRTPPFEVTRDSYLSTQPSRHLMHHKSIIVPKLGRGPNKKTYIKRKVLPPAMFQNKWYFQQDIYNIPFFMLTISALELDQMYAPEDQISSNITLISLNTNAFQMSNWERQPYSTKSAGTYNIYLWSYQNGDDKDKKWQNIYFLGNCKEYTEGTKLNTLQDCKEVAEIKNKQKWGNPFTHWYNHKDARIFYGAIPTTAQESDNANILELEDLFIECRYNPFKDKGTGNKVYLVPTDTGLGSFLTLPTKNELLIENLPLWLIFWGWADWIKKSKPIAHLEEEYQIIIQTPYIFPKLPCYVLTDKYFLHPPNDGTHTTTLSQTDQLHWHIKYNFQEQQFNLLAKTGPAAPKINEVKQIEAHFNYNFYFKWGGSPAPMEQISDPADQEKFPTPNTQLQRLEIESPTKPKQHFLYTFDEKRHTLTLKAAKRLKKDYSTPTFFTDFGAKDIPLKAQTESDSSSEEEEIQTSLQREDKLKQYLQRKRLQYRQRIHNLLKTKKLFPL

SEQ ID NO: 2945 - protein, 91 aa, Betatorquevirus sp.; identical to SEQ ID NO: 1300

SEQ ID NO: 2946 - protein, 62 aa, Betatorquevirus sp.; identical to SEQ ID NO: 1301

SEQ ID NO: 2947 - DNA, 2898 bp, Betatorquevirus sp.
cgggagccgaaggtgagtgaaaccaccgaagtctaggggcaattcgggctagatcagtctggcggaccgggcaagaaacttaaaaatatatgtattttacagatgtcctccaagaaaccaacaagaagagaattaaaccaactaatcaacgtttgctgtggcgcccacgacctcatctgcgactgcgacgaacccaccaaacacatcatccttcacctattctcccaccaagaaccctaccaagtaacaaaacaacaaaaggataatatacaaaaatgccttattactacagaagaccatggagaaacaaccgctatcgttggagacgatggtataaacgaaggagacctagaggctattttcgcagaagacaaaaatggagaagacgccgaagggtaagaagaaagcttcctaaacttaatattaaagaatggcagccacagactattagaaaatgctgcataaaaggaatgcactgtttatttttatgtacagaagatactattagtagaaactatagaatgtatgaacatagcataataccagaaagatggccaggaggaggaggattttctgtaacaaaatacagcatagatggactatatgaacaacaccaactagatagaaactggtggacaaacagtaacacaaacttaccattatgcagatacacaggatgtaaaattaaattttaccaaagctgggaagtagactatgtagtaaatactagcctaaactatccaatgttagctactcaactactataccacagttgtcaacccagctttatgatgatgaacaaacactgtatatttgtaccatcaaaaataactaaaaaaattccaaaaggctatataactaaaaaatttagaccacctaaccaaatgagtaaccgttggttctttgcaaaagatctttcaaaagtaggtttgctaatgctaaccgcagcagcagcttcctttgaccattactacatagcaacagacaaaacctcaaataactgttcttttaccacacttaacccatacttatggaaaaaacataactttatacaaccaggcattaatggatattcactatccacaactgggactgtagaaaaaagaatgttcacaaccacacaacacatctccaacgacactcaaatatcaaacctaaaaccaagcacaattacatacttaggttggacaaaacaagaccaagaaggaaaaactgtatcacaaagtaacaaacagaactacttaacagaccacaaatactggggaaaccctttttcacatgaaattctaacaggctcacaacctgtattagtaacaactaaagattggactactatcaaagaaaacttaatagacaattttgactctaacatacccacaggatttttaacaacacccacagaaccattactacatgaatgcagatactctccagacagagacacaggagcaggaacaaaagtatatttaaaatctgtactaagagacgaatcaggttgggaaccaccaacaaacgaagaacttataacagagggctttccactatggttagcattatttggctttgtagactggcacaaaaaactagcagtagcaacaagcctatatacaagctacgtaattgtaattgaatccagctttataacaccacaactaccatactacatattattagaccaacactttattgaaggaaaatccagatacatgacagaacatgacacagaccaacaaactcaagcagacaaagattcctggtacccctgtgttaaataccaactagaaagcatagaaaacattgtaaaaacaggcccaggaattcctaaactaggtggaagaaaatcagtagaagctaaaatattctacaaattttattttaagtttggaggatgtccaccaaagatggacacaattaacgaccctactaaacaagagacataccccgttcccggttttcagtctacaacatattcgttacagaatccaacactccctcaagaatcctacttataccaatttgacgtcaaccaagacatccttacaaagaaagctgcaaaaagaattacaagagactgggaaactcaaaaaactttattttcaactacaggacgaatggaaccagcaccatactcggaaaaagaaggagaaatctcgccgacaccctcagactcggaagaggacccggcactcctacaaatcaagctccgaaagctcaagcgacagcgactctacttggagcagcaaatcgagcaactaatgcaacaaccataaactttatgtgcataaaaaaagctctgcttttcgaaccaccgcataaaaaactgagaaaaatgaacaaatatgaactagaaactgaaagactgtgtgctacagcctttaaaagaccacctgtatctatgtggggggaaattccttactggccatggttaaaaactgaacccttagtaaatcaacttccaaaagttaactttgacttaaattttaaaccctaataaaatttcaaggcctacaaaattcacttagtggtgtctgtttatataagtttaaacttaaataaaccaactccgcctcccaaaattgttggcgccataagggggctccgcccccttaaacccccaagggggctccgccccaagggggctccgcccccttacaccccctaataaatattcaacaggaaaaccacataattagaattgccgaccacaaaccgtcagtaacttccccttttagcacttacttcccttttccttcattattattcattacattaattaataatcaccgtaattccggggaggagcataaacactatataactaactacactgacgaatggctgagtttaccacgccagacggagacggcatcacttcagtgactgcaggctgatcttggg

SEQ ID NO: 2948 - protein, 664 aa, Betatorquevirus sp.
MPYYYRRPWRNNRYRWRRWYKRRRPRGYFRRRQKWRRRRRVRRKLPKLNIKEWQPQTIRKCCIKGMHCLFLCTEDTISRNYRMYEHSIIPERWPGGGGFSVTKYSIDGLYEQHQLDRNWWTNSNTNLPLCRYTGCKIKFYQSWEVDYVVNTSLNYPMLATQLLYHSCQPSFMMMNKHCIFVPSKITKKIPKGYITKKFRPPNQMSNRWFFAKDLSKVGLLMLTAAAASFDHYYIATDKTSNNCSFTTLNPYLWKKHNFIQPGINGYSLSTTGTVEKRMFTTTQHISNDTQISNLKPSTITYLGWTKQDQEGKTVSQSNKQNYLTDHKYWGNPFSHEILTGSQPVLVTTKDWTTIKENLIDNFDSNIPTGFLTTPTEPLLHECRYSPDRDTGAGTKVYLKSVLRDESGWEPPTNEELITEGFPLWLALFGFVDWHKKLAVATSLYTSYVIVIESSFITPQLPYYILLDQHFIEGKSRYMTEHDTDQQTQADKDSWYPCVKYQLESIENIVKTGPGIPKLGGRKSVEAKIFYKFYFKFGGCPPKMDTINDPTKQETYPVPGFQSTTYSLQNPTLPQESYLYQFDVNQDILTKKAAKRITRDWETQKTLFSTTGRMEPAPYSEKEGEISPTPSDSEEDPALLQIKLRKLKRQRLYLEQQIEQLMQQP

SEQ ID NO: 2949 - protein, 98 aa, Betatorquevirus sp.
MSSKKPTRRELNQLINVCCGAHDLICDCDEPTKHIILHLFSHQEPYQVTKQQKDNIQKCLITTEDHGETTAIVGDDGINEGDLEAIFAEDKNGEDAEG

SEQ ID NO: 2950 - protein, 139 aa, Betatorquevirus sp.
LGNSKNFIFNYRTNGTSTILGKRRRNLADTLRLGRGPGTPTNQAPKAQATATLLGAANRATNATTINFMCIKKALLFEPPHKKLRKMNKYELETERLCATAFKRPPVSMWGEIPYWPWLKTEPLVNQLPKVNFDLNFKP

SEQ ID NO: 2951 - DNA, 2898 bp, Alphatorquevirus sp.
ctcggggtccggcgctacgccttcggctgcgccaaggggcaattcgggctcgggactggccgggctatgggcaaggctcttaaaaaattcccccgctctgttctccaccaggacattaaaacatgtcgtggagaccgccgagctacaatttacttgaaagagaagaggcctggtactcaacttttgttagctcgcattctacattttgcggttgtactgaccctctgctgcatattactctcattgctggtcgccttgctaaccccgcacccgttacccggcaaccggagacccctcctaacggcctcagggggctgccggcactgccagcgccccctgaaccaccagcaccgccaccacggcctggagatggtaccggagaagaaaatggcgcccgtggagaaggcgaaggtgggcgatacgcagacgaagacctagaagaactgttcgccgccgcggcagaagacgatatgtgagtagatggccgcgccgccgatacaggcgcagacgcagacgaaccagacgtaggaggggacgcaaaaagagacacagacagactcttatactgagacagtggcaaccagatgttataaaaaagtgttttatcactggctggatgcccctcattatatgtggcactggaaacactcaatttaacttcataacccatgaagacgatgtgccaccaaaaggagcctcctatggaggcaacctcactaaccttaccttcaccctagaaggactgtatgacgaacacctgctccacagaaacaggtggtcgagatcaaactttgatctagacctcagcagatacctctacactgtcataaaactatacagacacgagtctgtagactacatagtcacctacaacagaacaggaccctttgagataagcccacttagctacatgaacacacaccccatgctaatgctcctaaacaagcaccacgtagtggtgccaagcctaaaaacaaaccccaaaggcagaaggtccattaaaataaaaataaagccacctaaactaatgttaaacaagtggtactttgcaagagacatgtgcaaaataggcctctttcaactatatgccacaggggctaacctaacaaacccctggctcagatcaggcacaaacagccctgtagtgggattctatgtacttaaaaactctatataccaaaatgcctttgacaacttagcagaccaagaacacacaaaccaaagaaaaaatatctttgaaaacaaactatatcccacttcaacaactaacaaagacaactggcaatacacatacacatccctaatgaaaaacatatactttaaagctaaacaagaagctcaaaaccaaacaatgagccccacatacaactttgacacatacaaaacaaactatgacaaagtcagacccaaatggctaaaaatagctgaagatggctataagctagtatcaaaagaatacaaagaaatatacaccagcacagccacataccccccagagtgggacaatagaaactacttaagccatgactatggcatttacagtccttattttttaacaccacatagatacagcccccagtggcacacagcatggacatatgtcagatacaacccactgacagacaaaggcataggcaacagaatctttgttcagtggtgctcagaaaaaaatagctcatacaacgccacaaaaagcaaatgcatgctacaagacatgcctcttttcatgctaacctatggctacctagactatgtactaaaatgcacaggctctaaatcagcctggacagacatgagagtctgtattagaagcccatacacagaaccacagctcacaggcaacacagatgatattagttttattataatatcagaggccttcatgaacggagacatgccctatctagctccacacatacccgttactctgtggtttaagtggtaccccatgatattacaccaaaaggcagctttagaaaccatagtttcctgtggaccgtttatgcccagagaccaggaagccaactcttgggacataaccgcaggttacaaagcagtttttaagtggggtgggtcccctctgcctccacagcctatcgacgacccctaccaaaaacccacccacgaaatacccgaccccgataagcaccctccaagactacaaattgcagacccgaaaatcctcggaccgtcgacagtcttccacacatgggacatcagacgtggcctctttagcacagcaagtcttaagagagtgtcagaataccaaccgcctgatgaccttttttcaacaggcgtcgcatccaaaagaccccgattcgacaccccagtccaaggccagctcgaaagccaagaagaagaaagctatcgtttactcagagcactccaaaaagagcaagagacaagcagctcggaagaagaacagccaccgaaccaagagatccaagaaaaactactcctccagctccagcagcagcgacagcaacagcgactcctcgcaaagggaatcaagcacatcctcggagatgtcctccgactccgaaaaggagtccactgggacccggtccttacatagcacctccagaacctataccagaccttttgttccccaatactaaaaaaaaaaagaagttttcgcccttagactgggagaacgaggctcaaatagcagggtggttagacaggcctatgaggctgtatcctggggacacccccttctacccgtggctaccccgaaagccacatacccagcctacatgtagagtaaccttcaaaataaagctggatgattaacttgcaaggccgtgggagtttcacttgtcggtgtctacctctaaaggtcactaagcactgcgagcgcaagcgagcagtgcgacccccctgcccggtagcaacttc

SEQ ID NO: 2952 - protein, 669 aa, Alphatorquevirus sp.
LRQWQPDVIKKCFITGWMPLIICGTGNTQFNFITHEDDVPPKGASYGGNLTNLTFTLEGLYDEHLLHRNRWSRSNFDLDLSRYLYTVIKLYRHESVDYIVTYNRTGPFEISPLSYMNTHPMLMLLNKHHVVVPSLKTNPKGRRSIKIKIKPPKLMLNKWYFARDMCKIGLFQLYATGANLTNPWLRSGTNSPVVGFYVLKNSIYQNAFDNLADQEHTNQRKNIFENKLYPTSTTNKDNWQYTYTSLMKNIYFKAKQEAQNQTMSPTYNFDTYKTNYDKVRPKWLKIAEDGYKLVSKEYKEIYTSTATYPPEWDNRNYLSHDYGIYSPYFLTPHRYSPQWHTAWTYVRYNPLTDKGIGNRIFVQWCSEKNSSYNATKSKCMLQDMPLFMLTYGYLDYVLKCTGSKSAWTDMRVCIRSPYTEPQLTGNTDDISFIIISEAFMNGDMPYLAPHIPVTLWFKWYPMILHQKAALETIVSCGPFMPRDQEANSWDITAGYKAVFKWGGSPLPPQPIDDPYQKPTHEIPDPDKHPPRLQIADPKILGPSTVFHTWDIRRGLFSTASLKRVSEYQPPDDLFSTGVASKRPRFDTPVQGQLESQEEESYRLLRALQKEQETSSSEEEQPPNQEIQEKLLLQLQQQRQQQRLLAKGIKHILGDVLRLRKGVHWDPVLT

SEQ ID NO: 2953 - DNA, 2898 bp, Betatorquevirus sp.
cgggtgccgtaggtgagtgaaaccaccgaagtcaaggggcaattcgggctaggtcagtctggcggaacgggcaagaaactaaaataatattttatttcagaatgagcagcagatacatgagaaatccaattctgggcccaagagctcaagaaatacaatggcttaacactattgtaacaactcactccatgatttgctcctgcgacaaaccttgggaacatttacaagacacctttaaaaaccaccaaataagatgccactttattggagacgaccatggtaccgctaccgctacaaaagaagatggagacgccgacgacgtccccttttctcccggagatttagaaaaactattcgcggaagatacagaagacaaccaagggtaagaagatttcgctattatcatagaaaagctaaaaaaataactgttaaacaatggaatccaaacaaaatccttaaatgtaggataaaaggaacacttgcactgtttatatgtggaaggactcgcataaaccatgactttactttatacaaagagtccacatcaccagcaggtgaatctaccggagggggttggagcattcaacaaataaccctacagggcttatttcaagaatatattaaacacaaaaacttttggacaaaatcaaacaaaggcctaccacttacaagatactatggagccactttaaagttttacaaaagcttacacacctcctatattgtaaatatatgcacatgtcccccattttctgtaacaatggacatgtttttaaatacacaaccacaaagacagctcatggaaagaaagagaatcatagttccacaacttaagtcaggaactagaaaaaaatataaaaaaataagaatacatccaccaagcttcatgcaaaacaaatggtattttcaacaagacatatgccaaactccactagtattaataactaccactgcttgttcattagaacaaccatacataccagatgaccaagttagcaaccagataactttaagatccctaaacacaaacatattccaaaacccaaactttgaaacactactagatcaaaaccacggatacataactaaacatgtaggtacacaaaccatgagactatttggacaaaaaaaccatacaggaggacaaaaacctacaaaatggtcagaggttgtacctttaacaaacaccttaaattatacatctggcaatgaacatattgcaaatataaaggattttaacaacaaaaacaactggggaaacccatttagtttaccctggtcacacatagatacacaaatatactactcctttcactggcctacaacaacactagatgctacagaaacatttacagaaatagaagaattgtacaccatatgcagatataacccagatgttgacaaaggcacaggcaacaaagtttttttaaaatccaacaaccatgacacagaaggcaccataggaacattaccaaaagatcctaaacacttaatagaagactttccactatggcttatattttggggatggacagactggatattaaaatcagcagcagcacaacaactagactcaggatactttattgttattatatccccatatattaaaccaaaaagagattactatgtatttttagacagatactttacagatttagactacacaaaactaaatttaagagaccaccttaaatggcatccaaaacaagagatgcagtcagaagtagaatacttctttgcacaaacaggcccatacgcacctaaaataaacacatcacaaagcatacaggctaacatgttttatgactttcgttttaagtggggaggctgcccagctccaatggcagacatcacaaatccctgcgaccaagacagatttcccatccccaattcgggattacaaccatatgaaatcgaaaatccagaaacaaaaaaagaaagctacttgtacgcctgggacgaacgcagaaaccaaattacaaagaaatgtgcaaaaagaattgcagaaaactcagatgctgaactctctcttacagacttttgccccttcgacatccccctccaaacatcacaaaaagaaagcgaccaagagacgacatcggaagaaatccaagaaacatttcagcagcagctcaagcagctcaagcaccaacagcgactactcagacaccaactcctccgactaggcaagagacaaaaattagaataataaaacttaaaaccaccatttttggtgaccctgtaccccaacccaaccgcagactaactccagcagaatttgcagatgacttattagctgcaaaagctttttgcagaccccctagatactacacaaaagaccctcctacctatcctttctttcccatatgccccttggcaaattttgaattaaactataataaaggccagcattaattcactctcggtgtctgtttatttaagtttaaacttatacaaacatccattgcctcccaaatacgcaggcgcagtagggggctccgccccctacaacccccaggggggggcaagccccccctaaacccccccaaaacccacaaaattagcattgccaaccacaaactgacaggaaaaccacataatttgcattgccgaccacaaactgacaggaaaaccacgtaatttgcattgccgaccacaaaccgacctttacttctgctttttcacacaacttcctccttaaaccatgaatattaatataattaattaataatcagcatcacttcccaggaggagcttaaactctatataactaattacacttccgaatggctgagtttatgccgccagacggagacgggatcacttcagtgacggctgagtttatgccgccagacggagacgggatcacttcagtgactccaggctgaccttggg

SEQ ID NO: 2954 - protein, 652 aa, Betatorquevirus sp.
MPLYWRRPWYRYRYKRRWRRRRRPLFSRRFRKTIRGRYRRQPRVRRFRYYHRKAKKITVKQWNPNKILKCRIKGTLALFICGRTRINHDFTLYKESTSPAGESTGGGWSIQQITLQGLFQEYIKHKNFWTKSNKGLPLTRYYGATLKFYKSLHTSYIVNICTCPPFSVTMDMFLNTQPQRQLMERKRIIVPQLKSGTRKKYKKIRIHPPSFMQNKWYFQQDICQTPLVLITTTACSLEQPYIPDDQVSNQITLRSLNTNIFQNPNFETLLDQNHGYITKHVGTQTMRLFGQKNHTGGQKPTKWSEVVPLTNTLNYTSGNEHIANIKDFNNKNNWGNPFSLPWSHIDTQIYYSFHWPTTTLDATETFTEIEELYTICRYNPDVDKGTGNKVFLKSNNHDTEGTIGTLPKDPKHLIEDFPLWLIFWGWTDWILKSAAAQQLDSGYFIVIISPYIKPKRDYYVFLDRYFTDLDYTKLNLRDHLKWHPKQEMQSEVEYFFAQTGPYAPKINTSQSIQANMFYDFRFKWGGCPAPMADITNPCDQDRFPIPNSGLQPYEIENPETKKESYLYAWDERRNQITKKCAKRIAENSDAELSLTDFCPFDIPLQTSQKESDQETTSEEIQETFQQQLKQLKHQQRLLRHQLLRLGKRQKLE

SEQ ID NO: 2955 - protein, 94 aa, Betatorquevirus sp.
MSSRYMRNPILGPRAQEIQWLNTIVTTHSMICSCDKPWEHLQDTFKNHQIRCHFIGDDHGTATATKEDGDADDVPFSPGDLEKLFAEDTEDNQG

SEQ ID NO: 2956 - DNA, 2897 bp, Alphatorquevirus sp.
cggtagcaacttcctcggggtcacaccgcagtctaggggcaattcgggcacgggtctggccgggctatgggcaagattcttaaaaaatttcccacctctgttgttcgccaggacaccaagacatgccgtggtctccgccgagagctaacattagccagagagaggacctgtggatccagtcagttctttactcgcatgatactttttgcggctgtactgacatttctgggcatcttactagcctcctggcttgcatacaaccagctccacctcgagaccctccaccccgtctcgtccggaggctgccggcactgccagcggctccggaacccggtgagcagccacggcctggtggagatacagaagaagaccctggaaacgctggagaaggcgccggtggggcctaccgagaagaagacttagaagaacttttcgccgccgccgaggaagacgatatgtgagtagagggcggcgccgccgatacaggcgcagacggagacgggggcgacgcagaaagggacgcagacgcaggcacagaaaaacccttatcctaagacaatggcagccagacgttgtaaaaagatgcttcatcactggatggctgcccctgatcatctgtggggctggacatactcaattcaactttattacccacatggacgatattcccccaagaaatgcctcctatggaggcaatttcaccaacctaacctttaacctagcctgtttctatgatgaatttatgcaccacagaaacagatggtcagcctcaaaccacgacctagaactagtaaggtacataaaaaccagcataaaactatacagacacgagtcagtagactatgtagtgtcctacaccaccacaggccccttcgagactaatgaaatgtcttacatgctcactcaccctctggccatgcttctcagcaaaaaacacgtagttgtgcccagtttaaaaacaaaggcacatggcagaaagtacaaaagactaactatcaagccccccaaacttatgacaaacaagtggtactttgccaaagacttctgcaacataggcctgttccaaatgtgggccacgggcctagaactaagaaacccctggctcagatcaggcactaacagtccagtcataggattctatgtccttaaaaaccaagtgtaccaaaacaggtacagcaacctcgccacagaaacacaaaaaagaaaagaagcatatgatgaactaaccaaaaaaaatggcacaaagtggtacaattggcagtacacctacactaaagttatgagacctatatactatgccgctgccaatgaacctacaaatacatcatttaaaaacaaaccatataactggaaaaactataaagacaatttctcggcagtacaacaaaaatggacaaacactgtaaaagacgcctacgaattagttgcacaggaatacagacaaatatataccaccacagtcacatatccacctccatgggatcccactgcacaatcagacataaacacaggcagacagtacctagaacatgactgtggtatttacagtccatactttttaacaccacaaatatacagcccagagtggcacacagcatggtcctacataagatataatcccctcacagacaaaggcataggcaacagagtctgcgtacaatactgcagcgaggcctcctctgaatacaacccagtaaaaagcaagtgcatgttacaggacatgccactgtggatgatgctgtatggatacgcagactatgtaattaagagcacaggcatacagtctgcctggacagacatgagagtagcaatcaggagcccctacacagaccccaagcttacaggtagctcagaaaacaccatgtttattccaataggcctagaattcatgaacggagacatgccagacaagaggccctacattccgttaaagtggtggttcaagtggtaccccatgattacacaccaaaaaaccgcacttgaggcaatagtttcctgcagccccttcatgcccagagatcaggaagctgccagttgggacataactgtaggttacaaagcaaccttcttatggggtggctcccccttacctccacagcccatcgacgacccctgccaaaaacccacacacgaacttcccgaccccgatagaaaccctcctagaatacaaatctcagacccgcagcacctcggaccggcgacgctcttccactcgtgggacctcagacgtggatacattagtacaaaaagtattaaaagagtgtcagaacacctcgacactaatgaatatttttcgacaggcgtcgaatccaaaaaaccccgcttcgatactccccaccacgggcagctatcaaaccaagaagaagacgccttacatattctcagacaactccagaaagagcaagaggaaagcagcaccgaagaagaacaagcactccaaaaggaagaagaacaaaaagaaaagctcctacagcaactccgagtccagcgacagcaccagcgagtcctcacacaggggatcaagcacctcatgggagacgtcctccgactcagacagggagtccactggaaccccatcctgtagtgctgccaccggagccaataccagacctacttttccccaatactggtaaaaaaaaaaagttttctcccttcgaatggcagtgcgagcaagaaatagcctgctggatgaagcgacctatgcgtttctttccctcagacaaccccttctacccgtggttaccccccaagcgagatatcccaaatatatgtaaagtaaacttcaaaataaaactcagtgattaacattcgaggccccgggaatttcacttagcggtgtctacctctaaaagtcaccaagcactccgagcgcaagcgaggagtgcgacccccctgcc

SEQ ID NO: 2957 - protein, 660 aa, Alphatorquevirus sp.
LPLIICGAGHTQFNFITHMDDIPPRNASYGGNFTNLTFNLACFYDEFMHHRNRWSASNHDLELVRYIKTSIKLYRHESVDYVVSYTTTGPFETNEMSYMLTHPLAMLLSKKHVVVPSLKTKAHGRKYKRLTIKPPKLMTNKWYFAKDFCNIGLFQMWATGLELRNPWLRSGTNSPVIGFYVLKNQVYQNRYSNLATETQKRKEAYDELTKKNGTKWYNWQYTYTKVMRPIYYAAANEPTNTSFKNKPYNWKNYKDNFSAVQQKWTNTVKDAYELVAQEYRQIYTTTVTYPPPWDPTAQSDINTGRQYLEHDCGIYSPYFLTPQIYSPEWHTAWSYIRYNPLTDKGIGNRVCVQYCSEASSEYNPVKSKCMLQDMPLWMMLYGYADYVIKSTGIQSAWTDMRVAIRSPYTDPKLTGSSENTMFIPIGLEFMNGDMPDKRPYIPLKWWFKWYPMITHQKTALEAIVSCSPFMPRDQEAASWDITVGYKATFLWGGSPLPPQPIDDPCQKPTHELPDPDRNPPRIQISDPQHLGPATLFHSWDLRRGYISTKSIKRVSEHLDTNEYFSTGVESKKPRFDTPHHGQLSNQEEDALHILRQLQKEQEESSTEEEQALQKEEEQKEKLLQQLRVQRQHQRVLTQGIKHLMGDVLRLRQGVHWNPIL

SEQ ID NO: 2958 - DNA, 2897 bp, Betatorquevirus sp.
caggtgccgaaggtgagtgaaaccaccgtagtcaaggggcaatatgggctagttcagtctagcagaacgggcaactaacttaaattatattttacagatgagcaaatttttaaaagaacctgtataccatggaagagcaattgaaaatcaactaaccaacaccttaatttcatgccatgatctttgctgcggctgcctggaaccatttaaacacattcaatttttaattaatcaagcaacatgccgttctactttagaagaaacttctacaaaacaagaaaaagatacccctggagacaacaacgatggtttcgacgaaggagatctacaggccctattcgacgcaagcgacgacgcagaagggtaagaagaaataaacataaatttaaaaaacttaagcttaaaaaaattaaattagttcaatggcaacccagccacataaaaaaatgcagaattaaaggaacctttcaactttttcaatgtggcaaaggcagagcaagccataattaccaactttttaaagaaagcttagtacctccacatgaacccggaggaggaggatggtcttatatatactttagcttaaataacttatatacagaaaacaaaagactacaaaactggtggacacggtccaacaaaggactacctttatgtagatttcaaggtgtaaaatttaaattttatagacaacgttttacagactatattgtaacatacagtaatgaatatccaatggaagtaggaaaataccattaccctagcattcacccacaaagaatgctaacatataaccacagaattatagttcccagctacaatactatgcctttatggaaaaaaacttacaaaaaatgcttcataaaaccaccaaaagaaatgatagataaatggtattttcaaaaccactttcaaagatatccattatgtatgctagcagttaccgcatgtaatttactatcactatatgtatcaccaaatgccttaaacaacaattgtactgtaaatgctttaaataccaatttattcaaaagaaaaagctttcagtacccttcaataacaacaggatactatcctaaagcttctgtatacttatatgcttcacctaatggagaggatgaaattaccaaaattccaattaaagacataacctacctgggaaacccaggcccatattttaaaggagaacctttaggagacaataaagaaactgaatataaaaaaaataaatggggaaacccttttcattatgattatatgaatgaacaaagacacattattatttctgaaaaacaatatacatattggttccaaaacccacaagcaaaacctaaacagggaaacatagcacaaggtgacgctcaattttatacagaacctttatactatgaatgtagatacaatccatctgctgacacaggagatggaaatgaagcttattgggtatcaaacttaattgaagaagatggatgggaaacccaaaaagatcctgacttaattataaggggatttccattatggatattactctggggttggtatgactggacaaaaaaattagacaaaattaagcacgtagagaatgactatgtattagtagttaaaacaaaatttataaaacctgcactaccacattatgtttttttaagtgaaagcttttgtatgggtcttgccccctacaaacaacaattacatactatgtccccatttgagctaaatcattggtatcccagatacaaatttcaagaagaagcaatagaacaaatactaaatacaggaacaggagtttgtagatttgaccatgaagaacaaatacaagctcattgttattatcaattttattttaagtggggcggcaatccagcaacctttgaaacagtcgttgatccaaccacccaaccttactaccctgtgcccgttggaatcgtaccagcaaatgagatcattgatccaagcacctctcccttgtccttcttctacaacttcgactcccgtagaaaccttattaaacaaacatctattgaaagaatacaaaacctcacagaccttgaaaactttgtgttcacagatggaacaaaccattcagagcaaacaacagaaacacaagaaacatcaccgaaaacagcccagaaaaaagaaacgaaaaaggagatactcgtccagctccagcaatacaagctactcaaccaacaactcctgcagcgattccaacaactcagacaattagtggaagatacataatacataaatgtaaaaatgctgtaactctgtttccacctaaagaacccaaaaatagacgcttttacccctatgaactagaaactgaaaaacaattagcaaaattgtttaaaagaccccttagaacctttattagagacccccccttttacccctatatacctcctgaacccttggtaaatcaaactaaagtgtgttttgacttaaactaccaataaactaggccaacagtaattcacttgtggtgtctgtttctttaagtaaaaacttatataaacaaactccgcctccctaaaattcgggcgccaaaagggggctccgcccccttaaacccccgggggggggggtaaaattcgggcgccaaaagggggctccgcccccttaaacccccgggggggggggcacagccccccccataccccccctaaaacttcctcttttactcatgaataataattaaccacaaaattagaattgccgaccacaaactgtcaaaaaaccacaacttcactttttttatagaccactcctactaattaattaataatcatcatcacagcttccttttttctacactgtatataagtaactacactgacgaatggctgagtttatactgctagacggagacgcgaatagacttcgcggctgaacttggg

SEQ ID NO: 2959 - protein, 666 aa, Betatorquevirus sp.
MPFYFRRNFYKTRKRYPWRQQRWFRRRRSTGPIRRKRRRRRVRRNKHKFKKLKLKKIKLVQWQPSHIKKCRIKGTFQLFQCGKGRASHNYQLFKESLVPPHEPGGGGWSYIYFSLNNLYTENKRLQNWWTRSNKGLPLCRFQGVKFKFYRQRFTDYIVTYSNEYPMEVGKYHYPSIHPQRMLTYNHRIIVPSYNTMPLWKKTYKKCFIKPPKEMIDKWYFQNHFQRYPLCMLAVTACNLLSLYVSPNALNNNCTVNALNTNLFKRKSFQYPSITTGYYPKASVYLYASPNGEDEITKIPIKDITYLGNPGPYFKGEPLGDNKETEYKKNKWGNPFHYDYMNEQRHIIISEKQYTYWFQNPQAKPKQGNIAQGDAQFYTEPLYYECRYNPSADTGDGNEAYWVSNLIEEDGWETQKDPDLIIRGFPLWILLWGWYDWTKKLDKIKHVENDYVLVVKTKFIKPALPHYVFLSESFCMGLAPYKQQLHTMSPFELNHWYPRYKFQEEAIEQILNTGTGVCRFDHEEQIQAHCYYQFYFKWGGNPATFETVVDPTTQPYYPVPVGIVPANEIIDPSTSPLSFFYNFDSRRNLIKQTSIERIQNLTDLENFVFTDGTNHSEQTTETQETSPKTAQKKETKKEILVQLQQYKLLNQQLLQRFQQLRQLVEDT

SEQ ID NO: 2960 - protein, 89 aa, Betatorquevirus sp.
MSKFLKEPVYHGRAIENQLTNTLISCHDLCCGCLEPFKHIQFLINQATCRSTLEETSTKQEKDTPGDNNDGFDEGDLQALFDASDDAEG

SEQ ID NO: 2961 - protein, 62 aa, Betatorquevirus sp.
LFPPKEPKNRRFYPYELETEKQLAKLFKRPLRTFIRDPPFYPYIPPEPLVNQTKVCFDLNYQ

SEQ ID NO: 2962 - DNA, 2897 bp, Gammatorquevirus sp.
aaaggggaagtggggggggcatagcccccccacaccgggcaattcgggctagggcagtctagcggaacgggcaagaaacttaaaacaatactcttttacagatgagcaagttcttcaaaccaacaaaatacaacaatgaaacaaaaaatcaactatggatgagtatgatagctgattctcatgatatctgctgtgactgcccaactccctttgctcacttgctagattctatttttccagaaggacacagagacagacataaaccaattgactacataattaaaagagattggacagaatgccattctggtggagaagaagaagaaagccatggtggggccgctggagaaaaaagagatatacaacccgtcaaaaaagaaggagaagattcacaaacagaagatacaaacgtagaagaactactcgccgccgtcgccgccgcagaggcaaggtaagaaaaaaaaaagctaaacttaccttgcaacaatggcaacctgacagaattgtactatgtaaaattaaaggctttagtgaacttatactaggtgctgaaggaactcaatttcaatgctatactaatgagaaatacagcacacccctaccactaaaccctggaggaggtggctttggagtagaaagatttacccttgaatggctatataaacagcatatttttagaaataacatctggacaaagtctaactactggactgatctatgcagatacttaaaagttactttttacttttacagacaccccactgttagctttgttattcaatatagtagacagccaccttttaacattgataagacaacttatccaacatttcacccactactcatgctattatcaaaacaccataaagttataccaagcctacttagaaaaccacatggcaaaccctatgttaaagttacaattaaaccaccaaaacaaatgctaacaaaatggttttttcaaaaagaattctctgaatatgacctttgccaaatagctggctccacaattgctctagactatcctagaattagctgctgtgcagaaaacagagtcattactatctggtacattaatccacaattctatcaaaactcagattgggcacaaacaaagactgatccaaatccatatgaccctataacaggattatcagctaatcctcccactttttttagtaaatatgcacctgccggctatacaccaaactttaaatcaggaaaaggaacatcacatgaatactataactctatttcatgggacaatggatggttctcaacaaaaattttacaagcaactaaaataactagatcaggacaagaatacgagccacatcctttagcagcagcaagatataatcctgctgaagatgatggtaaaggtaatgaagtttggctatgtagcattacttcaggtagctacccaaaaccaactgaagatatattactttttaacaacactccactttggctagtattttggggatacactaacttcttacaaagaataaaaaataagagcttcttttccttatacatgtttgttattaaaagtgactacattagaccaggtcccacagtattaacaaaaaaatactttccatttgtagatgctaaattcactgaaggtaaaaactcacatgactcatacctaacatacgcagacaaaaaactttggtatccaacagtatttagacaaacagacacaattaactccatagttgaatgtggaccctatgtagttaaattaggagcagatagacaaagtacatgggaactagcttacaaatacattttttcatttaagtggggaggacccctcatcaacgaccaacaagttgcagatccaaaaacaaaggacaaatatcctgtacccgatacaatgcaagaggcaatacaaatctgcaacccaaaacaccaagatccaacaaccattttccacgagtgggattatagaaggggatttattacaaacccagctattaaaagaatgtcagaaaacatcatcattgattcagatgtctcatcagattcagaggcttcacagaaaaaaagaaaaagagttacaacagagctcagatacccggaggaaaagaacaaaaagatcaagagatgtctcctctcactctgcgaagaaagtacatgccaagaaacggagaaggcatcagacctcgagcagctcatcctcaaacagcaccaccagcagcagcaactcaagcacaacatcttaatacttctaaaagacctgaaagcaaaacagaaactaatacaacttcaaacaggagtactagagtaaaactcactccctttaaaaaaggctttgaaagagatacagaagatgaactggcaaaagctttttttagaccccctagactttttaaagaagatacccccttttacccttggctacccaaatttaccccccttgtaaactttcacctaaactttaagggctaggcatgcaatgttcacttagtaaaggatgtttaataaagtttgcaccccaaaaaaattgtaaaacaaaaaaaaaaaaaaaaaaataaaaaattgcataaattcggcgctcgcgcgcgctgcgcgcgcgcgagcgccgtcacgcgccggcgctcgcgcgccgcgcgtatgtgctaacacaccacgcacctagattggggtgcgcgcgctagcgcgcgcaccccaatgcgccccgccctcgttccgacccgcttgcgcgggtcggaccacttcgggctcgggggggcgcgcctgcggcgcttatttactaaacagactccgagttgccatttggcccccccctaagctccgcccccttatgaatattcataaaggaaaccacaaaatttgaattgccgaccacaaactgtcatatgcaaatcacttccccttttacacagtaa

SEQ ID NO: 2963 - protein, 668 aa, Gammatorquevirus sp.
LDRMPFWWRRRRKPWWGRWRKKRYTTRQKRRRRFTNRRYKRRRTTRRRRRRRGKVRKKKAKLTLQQWQPDRIVLCKIKGFSELILGAEGTQFQCYTNEKYSTPLPLNPGGGGFGVERFTLEWLYKQHIFRNNIWTKSNYWTDLCRYLKVTFYFYRHPTVSFVIQYSRQPPFNIDKTTYPTFHPLLMLLSKHHKVIPSLLRKPHGKPYVKVTIKPPKQMLTKWFFQKEFSEYDLCQIAGSTIALDYPRISCCAENRVITIWYINPQFYQNSDWAQTKTDPNPYDPITGLSANPPTFFSKYAPAGYTPNFKSGKGTSHEYYNSISWDNGWFSTKILQATKITRSGQEYEPHPLAAARYNPAEDDGKGNEVWLCSITSGSYPKPTEDILLFNNTPLWLVFWGYTNFLQRIKNKSFFSLYMFVIKSDYIRPGPTVLTKKYFPFVDAKFTEGKNSHDSYLTYADKKLWYPTVFRQTDTINSIVECGPYVVKLGADRQSTWELAYKYIFSFKWGGPLINDQQVADPKTKDKYPVPDTMQEAIQICNPKHQDPTTIFHEWDYRRGFITNPAIKRMSENIIIDSDVSSDSEASQKKRKRVTTELRYPEEKNKKIKRCLLSLCEESTCQETEKASDLEQLILKQHHQQQQLKHNILILLKDLKAKQKLIQLQTGVLE

SEQ ID NO: 2964 - protein, 117 aa, Gammatorquevirus sp.
MSKFFKPTKYNNETKNQLWMSMIADSHDICCDCPTPFAHLLDSIFPEGHRDRHKPIDYIIKRDWTECHSGGEEEESHGGAAGEKRDIQPVKKEGEDSQTEDTNVEELLAAVAAAEAR

SEQ ID NO: 2965 - protein, 114 aa, Gammatorquevirus sp.
MSPLTLRRKYMPRNGEGIRPRAAHPQTAPPAAATQAQHLNTSKRPESKTETNTTSNRSTRVKLTPFKKGFERDTEDELAKAFFRPPRLFKEDTPFYPWLPKFTPLVNFHLNFKG

SEQ ID NO: 2966 - DNA, 2897 bp, Alphatorquevirus sp.
gccgggctatgggcaaggctcttaaaaaagacatgtttctcggtaaactttacaggcagaagaggtgcttgttactgtctccactgcacactccacagaaaactcgcaggcttctaactactatgtggagaccccccactcacaatgtacaaggccaagaaagacagtggtacgagtcatgctttcggtctcacgctgctatgtgtggctgtggcgattttattaggcatctttatcatcttgctgataattttggacgccctccaactgttccccggcctccggcacccacacctccagtaaggccactgccagctctcccggcaccccccaacccctccggtagcagagcggcatggcctactggtggtggaaacggagaagacgagccccgtggagaaggagacggcgctggaggactcgcagagctcgcagacgaagagctgctttccgccgccgtggacgtcgccgaagagtaagaaagaggagggggaggtggagaaggacttataaaaaatggcggaggggcaaaaagagacgcaggcacaggagacgcttaatactgactcaatggcaacccgcttttataagacgctgctatatagtgggctacctgccccttataatctgcggagaaaacacctccgccagaaactttgccacccactcagacgacctcatatccaacggaccttacggggggggcatgactaccaccaaatttactctcagaatactgtatgacgaacacctcaggcaccttaactactggactgtcagtaacgaggacctagacctgtgtagatacctggggggcaccttttacgcatacagacaccccactgtagactttatcgtgcagatacacaccagtccccccttcctagacactccccttacaggtcccagcatacacccgggcatgctgatgctgacaaaaaacaaaatactaataccaagcctaaaaaccagacccagcagaaaacacaaagtaaaaattagattcagaccccctaaactttttcaagacaagtggtacccccagtcagaactatgtgacacaacgctactaaccatctttgcaaccgcatgtgacttgcaatttccgttcggctcaccactaacgaacaacgtttgcgtcaacttccaggtgctaggttccgtttacaaacggcacctcagcatacttcctgaaaaactcgtaatatataaagattactatgatgcaaatttatataccaatgtacaactttaccagacattccaaacaatagctcaaattaaacctagtgcccaagaatctgactttactcctacatggcaaaattgtcaaaatacaactaaacttaccgcatcaggcagtaaccaaagtcaatgtaatgacacctggtactatggaaaaacttacacaactaatatagtagaagcagcaaaaaaaattagatgcaaatatttaactgctaccaggtcagctctaccagtcttacaaacacaaggacatgaactactagaataccacacgggtatttacagttctatattcctatctgcaggcagaacatactttgagaccacaggggcctacacagacataatttataaccccctggtagacaaaggcataggaaacaaagtgtggctagaccccctaaataaagaagatgctgtgctaaacagaaaacaggcaaaagtactgctagaagacatacccatatgggcagccctatttggatacacagaatttgcagccaaatacacaggagactctgccatatcagcgaactacagactgacaatacggtgcccctacacagaccccatgctagtagacacaaacaacgaagaccaaggctttgtaccctactctaaaaactttggcaacggaaaaatgccaggagggtcctccaacgttccactaagtatgagaatcaagtggtaccccattttattccaccaactagaactcatggaagaactagtacagtccggaccgtttgcatacaggggcgacgaaaagatgtgtgtactagccataaaatacaacttcagatggaaatggggaggtaaccctgtttctcaccagattgtgcgcaacccctgtaaaggagggtcccgtgcccgtcgagagcctcgctcaatacaagcagttgacccgaaatacgtcacaccgacgctatccttccactcgtgggacttcagacggggactttttggcaaggcaagtattgagagaatgtcaagagaatcagaaactaatatctattctacaggcccaccaagaaaaaggccaaaaagagacacggacccgtacgactcgcagcaagaagaaaactcaatttcaagacacctccagctccagccctgggtccactccagtcaagaagtccaaagcgaagaagaaacgcaagtcccggagaacctacaagaacaactcctccaccagctccgagagcagcagcagctccgagtgcatctccagtccctcgcctcacaagtcctcaaaatcagggcgggatacgggatacaccccctattatcttcccaagcctaaacaaggtctttatgtttgaccctccaggtcccaagcccatacagggctatgaggactggaaggaggagtatacgtgctgtaagttctgggacaggcctcccagaaagtaccacacagacatacccttttacccaaacatccccaaagccccagaccaaataagggtctcctttaagcttggctttcaataaacacacctattcactgtactaggccgtgggagtttcactcgtcggtgtctacctctaaaggtcactaagcactccgagcgccagcgaggagtgcgaccctcccccctgactcaacttcttcggagccgcgcgctacgccttcggctgcgcgcggc

SEQ ID NO: 2967 - protein, 731 aa, Alphatorquevirus sp.
MAYWWWKRRRRAPWRRRRRWRTRRARRRRAAFRRRGRRRRVRKRRGRWRRTYKKWRRGKKRRRHRRRLILTQWQPAFIRRCYIVGYLPLIICGENTSARNFATHSDDLISNGPYGGGMTTTKFTLRILYDEHLRHLNYWTVSNEDLDLCRYLGGTFYAYRHPTVDFIVQIHTSPPFLDTPLTGPSIHPGMLMLTKNKILIPSLKTRPSRKHKVKIRFRPPKLFQDKWYPQSELCDTTLLTIFATACDLQFPFGSPLTNNVCVNFQVLGSVYKRHLSILPEKLVIYKDYYDANLYTNVQLYQTFQTIAQIKPSAQESDFTPTWQNCQNTTKLTASGSNQSQCNDTWYYGKTYTTNIVEAAKKIRCKYLTATRSALPVLQTQGHELLEYHTGIYSSIFLSAGRTYFETTGAYTDIIYNPLVDKGIGNKVWLDPLNKEDAVLNRKQAKVLLEDIPIWAALFGYTEFAAKYTGDSAISANYRLTIRCPYTDPMLVDTNNEDQGFVPYSKNFGNGKMPGGSSNVPLSMRIKWYPILFHQLELMEELVQSGPFAYRGDEKMCVLAIKYNFRWKWGGNPVSHQIVRNPCKGGSRARREPRSIQAVDPKYVTPTLSFHSWDFRRGLFGKASIERMSRESETNIYSTGPPRKRPKRDTDPYDSQQEENSISRHLQLQPWVHSSQEVQSEEETQVPENLQEQLLHQLREQQQLRVHLQSLASQVLKIRAGYGIHPLLSSQA

SEQ ID NO: 2968 - protein, 156 aa, Alphatorquevirus sp.
MGKALKKDMFLGKLYRQKRCLLLSPLHTPQKTRRLLTTMWRPPTHNVQGQERQWYESCFRSHAAMCGCGDFIRHLYHLADNFGRPPTVPRPPAPTPPVRPLPALPAPPNPSGSRAAWPTGGGNGEDEPRGEGDGAGGLAELADEELLSAAVDVAEE

SEQ ID NO: 2969 - protein, 126 aa, Alphatorquevirus sp.
LGPLQSRSPKRRRNASPGEPTRTTPPPAPRAAAAPSASPVPRLTSPQNQGGIRDTPPIIFPSLNKVFMFDPPGPKPIQGYEDWKEEYTCCKFWDRPPRKYHTDIPFYPNIPKAPDQIRVSFKLGFQ

SEQ ID NO: 2970 - DNA, 2897 bp, Alphatorquevirus sp.; identical to SEQ ID NO: 2966

SEQ ID NO: 2971 - protein, 731 aa, Alphatorquevirus sp.; identical to SEQ ID NO: 2967

SEQ ID NO: 2972 - protein, 156 aa, Alphatorquevirus sp.; identical to SEQ ID NO: 2968

SEQ ID NO: 2973 - protein, 126 aa, Alphatorquevirus sp.; identical to SEQ ID NO: 2969

SEQ ID NO: 2974 - DNA, 2897 bp, Betatorquevirus sp.
cgggtgccgaaggtgagtgaaaccaccgtagtcaaggggcaattcgggctagttcagtctagcggaacgggcaagacttttaataataaccttattttacagatgagcaaacagctaaaaccaactttatacaaagacaaatccttggaattacaatggctaaacaacatttttagttctcacgacttatgctgcggctgccatgatccagttttacatttaatgattttaattaacaaaaccggagaagcacctaaaccagaagaagaaattaacaatataaaatgcctccttactggcgccaaacgtactacagaagaagatatagacctttcacctggagaactagaagaattattcaaagaagaagaagatggagataccgcaaaccaaggaaaacatactggagaagaaaactgcgggtaagaaaacgtttttataaaagaaaactaaaaaaaattgtactaaaacaatttcaaccaaaaattattagaagatgtacaatatttggaactatttgcctttttcaaggctccccagaaagagctaataataattatattcaaacaatctacagctacgttccagataaagaaccaggaggagggggatggactttaataactgaaagcttaagtagtttatgggaagactgggaacatttaaaaaatgtatggactcaaagtaatgccggtttaccacttgtaagatacgggggtgtaacattgtacttttatcaatctgcttatactgattatattgctcaagtatttaactgttatcctatgacagacacaaagtacacacatgcagactcagcaccaaacaggatgctattaaaaaaacatgttataagagtacctagcagagaaacacgcaaaaaaagaaagccatacaaaagagtaagagtagcaccaccttctcaaatgcaaaacaaatggtattttcaaagagacatatgtgaaatacccttaataatgatagcagcaacagccgttgactttagatatccattttgtgcaagcgactgtgctagtaacaacttaactttaacatgtttaaacccactactttttcaaaaccaagactttgatcacccatctgacgcacaaggctactttccaaaaccaggagtatacttatactcaacacaaagagctaccaaaccatctagcagcgactgcatatacttaggaaacacaaaagacaaccaagaaggcaaaagtgcaacttcactatcaaatctacaaacacaaaaaatagcagaatggggaaacccattttggcattattatattgacggttctaaaaaaatattttcttatatgaaacccccatcacagctaattgaagatgactttaaaaggatgacagagttagcagaaccaatgttcatacaagttagatacaacccagaaagagacacaggagaaggtaacttaatatacataacagaaaactttagaggacaacactgggaccctccagctagtgaaaacttaaagttagatggctttcctttgtttgacatgtgttggggtttcatagactggatagaaaaagttcatgaaacagaaaacctactaaccaactattgtttttgtattagaacaaacagttttaatgaaaaaaaaacagtatttatacctgtagatcgggcatttttaacaggctttagcccatatgaaaccaccttaaaatcatcagacagggctcactggcatccacaaataagattccaaacaaaatcaataaatgatatatgtttaacaggtccaggttgtgctagatccccatatggaaattacatgcaagcaaaaatgtcttataaatttcatttaaaatggggaggttgtccaaaaacttatgaaaaaccctatgatccttgttcacagcccaattggactattccccataacctcaatgaaacaatacaaatccagaatccaaacacatgcccacaaacagaactccaagaatgggactggagacgcgatattgttacaaaaaaagctatcgaaagaattagacaacacacggaaccttatgaaactttgcaaatctctacaggttccaaacacaacccagcaatactcagacaaacatcaccgtggacggactcagaaacggactcggaagaggaaaaagaccaaacacaggagatccagatccagctcaacaagctccgaaagcatcaacagcacctcaagcagcagctcaagcagtacctaaaaccccgaaatatagaataatagcaagcaatgtaaaagttgaactttttcctagtaagaaaccttttaaaaatagacgctttactgctagtgaaagagaaacagaaaaacaatgtgctaaagcttttcatagacctgaaagacattttttctatgatcctcctttttacccttactgtgtacctgaacctcttgtaaactttgctttaggatataaaatataaggccaacaaaattcacttagtggtgtctgtttattaaagtttaaccttaataagcatactccgcctccctaaattaaggcgccaaaagggggctccgcccccttaaaccccaagggggctccgccccctttaacccccaagggggctacgcccccttacaccccctaattaatattcaacaggaaaaccacctaatttgacttgccgaccacaaaccgtcaactacttccctattttccattacttcccttttaactcatgaatattcataataaacgtcacatatcctgggaggagacatacaactatataacaaagtacacagacgaatggctgagtttatgccgctagacggaggacgcacagctactgctgcgacctgaacttgggcgggtgccgaaggtgagtgaaaccaccgtagtcaaggggcaattcgggcggg

SEQ ID NO: 2975 - protein, 655 aa, Betatorquevirus sp.
MPPYWRQTYYRRRYRPFTWRTRRIIQRRRRWRYRKPRKTYWRRKLRVRKRFYKRKLKKIVLKQFQPKIIRRCTIFGTICLFQGSPERANNNYIQTIYSYVPDKEPGGGGWTLITESLSSLWEDWEHLKNVWTQSNAGLPLVRYGGVTLYFYQSAYTDYIAQVFNCYPMTDTKYTHADSAPNRMLLKKHVIRVPSRETRKKRKPYKRVRVAPPSQMQNKWYFQRDICEIPLIMIAATAVDFRYPFCASDCASNNLTLTCLNPLLFQNQDFDHPSDAQGYFPKPGVYLYSTQRATKPSSSDCIYLGNTKDNQEGKSATSLSNLQTQKIAEWGNPFWHYYIDGSKKIFSYMKPPSQLIEDDFKRMTELAEPMFIQVRYNPERDTGEGNLIYITENFRGQHWDPPASENLKLDGFPLFDMCWGFIDWIEKVHETENLLTNYCFCIRTNSFNEKKTVFIPVDRAFLTGFSPYETTLKSSDRAHWHPQIRFQTKSINDICLTGPGCARSPYGNYMQAKMSYKFHLKWGGCPKTYEKPYDPCSQPNWTIPHNLNETIQIQNPNTCPQTELQEWDWRRDIVTKKAIERIRQHTEPYETLQISTGSKHNPAILRQTSPWTDSETDSEEEKDQTQEIQIQLNKLRKHQQHLKQQLKQYLKPRNIE

SEQ ID NO: 2976 - protein, 107 aa, Betatorquevirus sp.
MSKQLKPTLYKDKSLELQWLNNIFSSHDLCCGCHDPVLHLMILINKTGEAPKPEEEINNIKCLLTGAKRTTEEDIDLSPGELEELFKEEEDGDTANQGKHTGEENCG

SEQ ID NO: 2977 - DNA, 2897 bp, Betatorquevirus sp.
cgggagccgaaggtgagtgaaaccaccgtagtctaggggcaattcgggctagatcagtctgacggaacgggcaagtaacttaaatttatattttacagaatgacaactcgcataattcctacaaaagattctattaaacaaaagaatctaaaatggatgaacctaatggtccacgaccatgatattttctgcgactgcgatactccactgcaacacataattattttaatctgccaacaagaaccaaaacttgaattaaaaccaatagaaaaggatatagttaaaaaatgccttattggagaaactacggataccgctggaaccgccgcagacgatggcgtcgaagaaggccttttagacgcccttttcaaagaagactttggagaagaagacaccgcagggtaagaaagaaaaaactgaaatctattaaactaaaacagtggcaaccacaattcataaaaagactaaaaattgttggaactgagccactttttcttacaacttcagaaagactaactaatgaatttacttcttataaagacagtattgcgcctcactatgtaccagggggaggagggttttcaataatgaactttactttaaatgcattgtataaaaaacatttagtattagaaaactggtggactgcaagtaatgaaaatatgcctttaataagatttactggagtaacattgtactattacagacaagcagaatatgactacttaactcaatatgtaagacaatatccaatgaatgcttcacatctcaaatatactagcacacatccacaagtaatgttactacacaaaaacacacttaaaataacatgtaaaagaaacaataaaaacaagaaaccatacaaaaaaattaaaatacttccaccaacacaaatgcaaaaccgttggtactttcaaaaagatcttgcagacatacctctattacaactaataaccacagccacatcgttagaccgcatgtttctaaattcaagctcaataagctccacaataggtttcacaagccttgaccacctaggattttacaaccacaattacacaaaagacggcacacaaggatatgtagcaaaaccaggacaactgttatttggcattctacaaggaacttataatattaaaacagtaaaattcacacaattaatatatatgggtaatgcacttgacttacttgaaggaacacaagcaggatccataccacaaaacgactacagcacaataactgatagcaaatacacaaacaaaattcaaaaacaacttaaatacatgcaactaaaccaaaaaacctggggaaacccatttaatgatgtctttcatagaacaggagctttaataacaacaagcttagactgggaaagcctaatagaaaaagcaacctcagaaactgccaatttaactgatgacttcacatggaaaaccacttttacatttccagttagatacaacccatttgcagacaaaggaacaggcaataaactatatttaataaaatggaaagacccaggtcacgacacagactgggacatacctgcagccacaaccttatatgaaaacatgccactctggttaatgatatggggttacttagatttttacagaaaatcaggagaacttagcaccatagatactacacatttacttgtaataaaaacaccatacactcaacctaaagacaaaacaatgctaataccattagatgaagactttttagaaggtagaagcccctatatgggacaacaagaaaccactgctagtgacagacaaaactggcaccctaaagtaagatttcaaataagaacagctaacgctataggttcttgtggacccgcaactataaaacttccaccacaagtatctgccgaagctcatgttagatatgcattttattttaagattggaggaacaccaccaccaatggcaacactcacagaaccagacaaacaacctaaatataccactcccgataacatcctcacatcaacttcgttgcagagtccaacatctccctttgaatacatcttgtacaactttgatgaaagacgaggacaacttacaaaaaaagctgcagaaagaatcactaaataccaagaaactgaacaaactattctcccatttacagagtcagctctatccagctttacaacaccccaagaaaaaacacagacaccagaaacatcggacgaggaaaaagaagaaatgtcgctcgaggaacagctccacctccagcgaaagcagcaaaaactcctccgaaacagaatcaacaaactcctcaaccgactagcactattagaatagataaatgtaaagttcatgttcaattatttcctcctgatgtaaaaccaaatcgtagaatgactaagtgggaatatgaacaagaattagaagatgcttatcattggtgtagagtccctagaacttttattaatgacaaacctacttatccttgggtaccccaaaactccccatacactgtaaactttgatttaaatgcgccgcaataaatatacaaggcctgcaaatattcattctcggtgtccatttatataagtataaacttaaataaacatccaccacactcccgaatacgcaggcgcagaagggggctccgcccccttaccccccccccctcaaaccccccctaattaacatattcaacaggaaaaccacataatttgaattgccgaccacaaactgtcaactacttccctattcacacatacttccctttttatcttataaatatttattacataaattagtaatcactgtaattccggggaggagttaaaaaactatataaccaactacactgacgaatggctgagtttacgccgtcagacggagacggcatcacatcagtgactgcaggctgatcttggg

SEQ ID NO: 2978 - protein, 674 aa, Betatorquevirus sp.; identical to SEQ ID NO: 2384

SEQ ID NO: 2979 - protein, 101 aa, Betatorquevirus sp.; identical to SEQ ID NO: 2385

SEQ ID NO: 2980 - DNA, 2897 bp, Betatorquevirus sp.
cgggagccggaggtgagtgaaaccaccgtagtctaggggcaattcgggctagatcagtctggcgtaccgggcaagtaacttaaattttaattacagatgtccaaacttttaaaaccaactaacttcactgaaaatggaattattggacaaaatataaacgcctttgtcaccatccacgacctatcctgttcctgcaacaaccccttgagatgcataattaaacaaatttactcaaaagaaaaaggattaaaatttaagcctgaagaattaaaacaatggcttactggtggagaaactaccgctacaactggagaagaagaagaccctattaccgcagaagacgtagacgcccttttcgccgctatcgatacagaaaatacagggtaaggaacaaaaaacttaaatttttaagacttaaagaatggcaacctaatgtaattagaagactatcagttaaaggaatgtactgtttatttcaatgtaatcataaacttttaaatagaaactatacacaatataaagaagatataccaccagaagggacaccagcgggcggtggatacagcttaaatgtttttaccttagactcattatttactgagcacgaaaaggctagaaacaaatggtctagaggaaacaaaaatttaccacttataagatacaccggatgtgaatttaaaatatacagaccaaaattagtagacgcacttgtaaaatttcaaaactgttaccctatgaaagctacaaatctcacatatacaggaacacaaccatatataatgtcaatgtcattaggaacaaaaagaataaaaagacttgatgacacaaataaaaaaaaaccatacaaaaagttcaaatttaaaccaccacaacaaatgactaacaaatggtttttttcagctgacttagctaaacaaggcctaattcttgtagcagccacagcagcagactttaataatatatatataagcccattttctgaatcagatactatatcctttaaagtactcaacacaaaaatattccaaaacagacactttgctacactgcccacaacaggataccaccccaaagatggtttctggctatgggcctctgaaaacggagaagatgatccacaatttaaatctatgatatttttaggagacacaacacaatataaacaaggacacccaataagactactaccaaacataactgataccacaactataggtgaggcagtaactaaactcacacaaaatacagaacactggggaaatccttttgcagaaccctacatggataaaaaacacagaatatggagaacagctaattcacctacaattacactatctcaatataaacaacaaaaagtaacagaaactatttcaaagctaggatttacagaagtacaccaagaactatactttcaagtaagatacaatccaaacagagacaaaggctataacacacaaatatactttttatcaaactggcaagaaaaagaaggctgggaaccaccactaaacccaaatttaatactaacaggatttccaatatggttaatagtatggggatgggtagattatcacttaaaattagcagaaataacaaacatagacactcactacttaacagtcataaaatcagacgccatagaaccccaagatttacgtttagatgcatgggtaattttagataacacatttacacatggagatagtcaatggcatccagaccatggaagaacagactgggacaacacacattggtaccccatgacacattatcaaatgtcaacattagaaaatatagcacaatcaggaccaatgacagcacacctaggagacaaaaaaactgaagaactacattgtgaatacacattctattttaagacaggaggatgtgtaccaccaatggaaaaaattacagatccaacaaaacaacctatttacccaattccaactaacatcgccaatgcaaattcgttacagagtccaacagaaccaattgaaacctacttatactccttcgacgaaaggagagggcaaattactcaaacagcttcagacagaatcaaacaggactttacaacttcaacatctttattcacagatacaacaacaactggaacagacatccaagccctccaaacattcccgaaaatccaagactcatcggaggaagaggaaacccaagaaacgccactattccagcagctcatcaagcagcgactcaaacaacaacgaatccgacagcgaatccaacagctcctaattcaacttcaacaatcaacctaatctgtataaaaaaggttgaactttttccaacagaaaaaaacagaagaatgaccccatgggaactagctcaagaaaaagaagacgccagaatttggaaaagaccagaaagaagatttattaaagataaaccattttaccctggaataatagaacccttagttaactttgaccttggttacaaatttaaataaagaaataaagggctaggccccattgattcatagctcggtgtctgtttctttaagtgtgaccttattaaactgactccgcctcccaatcactagggcgccaaagggggctccgcccccttaaaccccaagggggctccgccccctaacccccaaagggggatccgcccccttacaccccctaataaatattaaatattcaacaggaaaaccacataattagaattgccgaccacaaaccgtcactaacttccccttatgctaacagttcctctttccctcattattattcattacattaattaataaacaccgtaaatccggggaggagacataaacctatataactaactacactgacgaatggctgagtttatgccgccagacgaagactggatcacagcagtgacttcaggctgatcttggg

SEQ ID NO: 2981 - protein, 668 aa, Betatorquevirus sp.
MAYWWRNYRYNWRRRRPYYRRRRRRPFRRYRYRKYRVRNKKLKFLRLKEWQPNVIRRLSVKGMYCLFQCNHKLLNRNYTQYKEDIPPEGTPAGGGYSLNVFTLDSLFTEHEKARNKWSRGNKNLPLIRYTGCEFKIYRPKLVDALVKFQNCYPMKATNLTYTGTQPYIMSMSLGTKRIKRLDDTNKKKPYKKFKFKPPQQMTNKWFFSADLAKQGLILVAATAADFNNIYISPFSESDTISFKVLNTKIFQNRHFATLPTTGYHPKDGFWLWASENGEDDPQFKSMIFLGDTTQYKQGHPIRLLPNITDTTTIGEAVTKLTQNTEHWGNPFAEPYMDKKHRIWRTANSPTITLSQYKQQKVTETISKLGFTEVHQELYFQVRYNPNRDKGYNTQIYFLSNWQEKEGWEPPLNPNLILTGFPIWLIVWGWVDYHLKLAEITNIDTHYLTVIKSDAIEPQDLRLDAWVILDNTFTHGDSQWHPDHGRTDWDNTHWYPMTHYQMSTLENIAQSGPMTAHLGDKKTEELHCEYTFYFKTGGCVPPMEKITDPTKQPIYPIPTNIANANSLQSPTEPIETYLYSFDERRGQITQTASDRIKQDFTTSTSLFTDTTTTGTDIQALQTFPKIQDSSEEEETQETPLFQQLIKQRLKQQRIRQRIQQLLIQLQQST

SEQ ID NO: 2982 - protein, 96 aa, Betatorquevirus sp.
MSKLLKPTNFTENGIIGQNINAFVTIHDLSCSCNNPLRCIIKQIYSKEKGLKFKPEELKQWLTGGETTATTGEEEDPITAEDVDALFAAIDTENTG

SEQ ID NO: 2983 - DNA, 2896 bp, Alphatorquevirus sp.
cctccggtagcaacgccttcggagccgcgggggggggggcaattcgggctcgggactggccgggccccgggcaaggctcttaaaaaatgcgctttcgcagggttgcccagaaaaggaaagtgcttctgcaaactgtgccagctgcagagaaggctaggcggcttctaggtatgtggcagccccccgtgcacaatgtccccggcatcgagagaaactggtacgagagttgttttcgatcccatgctgctgtttgtggctgtggcgactttgttggccatcttaatcatctggcaactactctgggtcgccctccgcgtcctgggcccccaggcggaccccgcacgccgcagataagaaacctgccagcgctcccggcgcccgagggcgagtccggtgatagagcgccatggcgtggggcttctggggccgacgccgccggtggagacggtggagagcgcggcgcagacggtggagaccccgcagacgtaggagacgacgccctgctcgccgctttcgacctcgtcgaagagtaaggaggcgcggggggcggtggcgcagacgctacagaaaatggcgacgagggagacgcagacggactcacagaaaaaagatagtgataaaacagtggcaaccaaactttattagacgctgctacataataggttacttacctataatattctgtggcgaaaatacaagcgcccagaactatgccactcactctgacgatatgataagcaaaggaccgtacggggggggcatgactaccacaaaatttactctgagaatactgtacgacgagtttaccaggtttatgaacttttggactgtcagtaacgaagacctagacctgtgtagatacgtgggctgcaaactcatattttttaaacatcccactgtagactttatagtacagataaacactcagcctcctttcttggacacgcccctcaccgcggccagcatacacccgggcattatgatgctcagcaagagacacatactaataccctctctaaagacccggccaagcagaaaacacagggtggtcgttagggtgggcgccccaagactgtttcaggacaagtggtacccccagtcagacctgtgtgacacagttctgctttccatattcgcaaccgcctgcgacttgcaatatccgttcggctcaccactaacgaacaacccttgcgtcaacttccagatcctggggccccagtacaaaaaacaccttagtattagctccactatgaatactactaacaaaacccattatgaacaaactttatttaatgaaactagtttatacaacacctttcaaacaatagctcagcttaaagaaactggccaaactacaggtataagtcctagttggaatgatgtacagaacacagaagcacttaataatagtggtacaaatgcaacttcgagcaaagacacttggtacaaaggaaacacatacaagaacaacatttcagagttagcaaagaaaaccagacaaagatttgcagctgcaacaaaagcagcactaccaaactacccaacaataatgtccacagacttatatgaataccactcaggcatatactccagcatatatctatcagctggcagaagctactttgaaaccaccggggcctactctgacattatatacaaccctttcacagacaaaggcacaggcaacataatctggatagactacctcacaaaagaagacaccatttttgtaaaaaacaaaagcaaatgcgagatcatggacatgcccctgtgggcggcctgcacaggatacacagagttctgtgcaaagtatacaggagactctgccattatttacaatgccagagtagtcataagatgcccatacactgaacccatgctaatagaccactcagacccaaacaaaggctttgtaccctactcatttaactttggcaacggaaagatgccgggaggcagctccaacgtgcccataagaatgagagccaagtggtacgttaacatattccaccaaaaagaagttctagaagatatagtacaaagcggaccgtttgggtacaagggcgacataaaatcagctgtactgtccatgaaatacagatttcactggaagtggggtggaaaccctatatccaaacaggtcgtcaggaatccctgctccaactccagctcctccgcggcccatagaggacctcgcagcgtacaagcggttgacccgaaatacaataccccagaggtcacgtggcactcgtgggacatcagacgaggaatctttggcaaagcaggtattaaaagaatgcaacaagaatcagatgctctttacattcctccaggaccactcaagaggcctcgcagagacaccaatgcccaagacccagaagagcaaaacgaaagctcaggtttcagagtccagcagcgactcccgtgggtccactccagccaagagacgcaaagctcccaagaagagacacaagcggaagcgtcggtacaagaccaactactcttccagctccgagagcagcgagttctccgacaccagctccagcacctcgcaacccaagtcctcaaagtccaagcagggcacggcctacaccccctattatcttcccaagcataaacaaggcatttatgtttgagccccagggtcctaaacccatacagggctacaacgattggctagaggaatacacttgttgcaaatactgggacagaccccctagaaaactacacacagatacacccttctacccctgggcaccaaaaccccaagaccaaattaaggtgtccttcaaactaaactttcaataaaaattctaggccgtgggagtttcacttgtcggtgtctgcttcttaaggtcgccaagcactccgagcgctagcgaggagtgcgaccccc

SEQ ID NO: 2984 - protein, 736 aa, Alphatorquevirus sp.
MAWGFWGRRRRWRRWRARRRRWRPRRRRRRRPARRFRPRRRVRRRGGRWRRRYRKWRRGRRRRTHRKKIVIKQWQPNFIRRCYIIGYLPIIFCGENTSAQNYATHSDDMISKGPYGGGMTTTKFTLRILYDEFTRFMNFWTVSNEDLDLCRYVGCKLIFFKHPTVDFIVQINTQPPFLDTPLTAASIHPGIMMLSKRHILIPSLKTRPSRKHRVVVRVGAPRLFQDKWYPQSDLCDTVLLSIFATACDLQYPFGSPLTNNPCVNFQILGPQYKKHLSISSTMNTTNKTHYEQTLFNETSLYNTFQTIAQLKETGQTTGISPSWNDVQNTEALNNSGTNATSSKDTWYKGNTYKNNISELAKKTRQRFAAATKAALPNYPTIMSTDLYEYHSGIYSSIYLSAGRSYFETTGAYSDIIYNPFTDKGTGNIIWIDYLTKEDTIFVKNKSKCEIMDMPLWAACTGYTEFCAKYTGDSAIIYNARVVIRCPYTEPMLIDHSDPNKGFVPYSFNFGNGKMPGGSSNVPIRMRAKWYVNIFHQKEVLEDIVQSGPFGYKGDIKSAVLSMKYRFHWKWGGNPISKQVVRNPCSNSSSSAAHRGPRSVQAVDPKYNTPEVTWHSWDIRRGIFGKAGIKRMQQESDALYIPPGPLKRPRRDTNAQDPEEQNESSGFRVQQRLPWVHSSQETQSSQEETQAEASVQDQLLFQLREQRVLRHQLQHLATQVLKVQAGHGLHPLLSSQA

SEQ ID NO: 2985 - protein, 148 aa, Alphatorquevirus sp.
MRFRRVAQKRKVLLQTVPAAEKARRLLGMWQPPVHNVPGIERNWYESCFRSHAAVCGCGDFVGHLNHLATTLGRPPRPGPPGGPRTPQIRNLPALPAPEGESGDRAPWRGASGADAAGGDGGERGADGGDPADVGDDALLAAFDLVEE

SEQ ID NO: 2986 - protein, 59 aa, Alphatorquevirus sp.
MFEPQGPKPIQGYNDWLEEYTCCKYWDRPPRKLHTDTPFYPWAPKPQDQIKVSFKLNFQ

SEQ ID NO: 2987 - DNA, 2896 bp, Alphatorquevirus sp.
agtttcacttgtcggtgtctacctcttaaggtcactaagcactccgggctcgggactggccgggctatgggcaaggctcttaaaaatgcacttttctaggtgcagtagaaagaaaaggacactgtcactgctaccactgcaccattcacagaaagctaggccatctgtgaaaggtatgtggagacccccgactcgaaatgcattcactattcaacgtgactggttctacagttgctttcactcccactcttctatgtgtggctgtgctgattttattggtcatttcaatcacatcgctgctatgctcggccgtccggaagaccagaaccctcctccgccacccggggctctgagacccctacccgctctcccggccgccaccgaggcgcccggtgatcgagcaccatggcctatgggtggtggtggaggcgacggaggcgcccgtggaggaggaggagatggcgccgctggagacgtcgccggagaccccgcagacgccgacctcgtcgccgctatcgacgccgcagaacagtaaggagacgcggcagggggaggtggactaggagatatagacgatggcgccgcaagggcaaacgcaaaggcaaaaagaaaattattataaagcagtggcagcccaactacacccgcagatgcaacatagtgggctacctacccctactaatttgtgggcaaaatactgttgccagaaactatgctacccactcagacgacagctactaccccggaccctttggggggggaatgactacagacaaatttactttaagaatactgtatgatgagtacaaaaggtttatgaactactggaccgcctcaaacgaggacctagacctgtgtagatacctgggagttactatatatgtgtttagacacccagaggtagactttatactacttataaacacctcccctccattcctagacacagaaataacagggcctagcatacacccaggtatgatggccctcaacaaaagagccaggtggatacctagcctaaaaaacagaccaggcagaaagcactatgtaaaaattaaagtaggagccccccgaatgttcacagataagtggtacccccaaacagacctctgtgacatgacactcctaacgatctttgccagtgcggcggatatgcaatatccgttcggctcaccactaactgacactatagttgtgtcattccaagttctgcaatccatgttcaacgactgcctcagtgtacttccttctaactttacaccatcatcaggcaaaggatacttattatatgagaaaattagaaaacacttaccatactataacacaacacaaacacaagcacaactaaaaagatacatagacaatacaggaaacgcaacacacacatggaattcatacctaaataataaaaaattttcagaaacacaatcaccaaagacagactcagactccataggaggaccatacactaaccacaatgacacatggtataaaggcactgcctatttacaaaacattactaacgtgccaccaaacgcagcaaaactatactatgatcagaccaaatcacttattggcataacattcacaggatctacagaatacctacactataccggaggcttatacacctccatatggctatcagcaggtagatcctactttgaaaccaaaggcccatacacagacatcacttacaaccccttttcagacagaggagaaggtaacatgctttggatagactggctaactaaagatgactcacaatactcaaaaacacagagcaagtgtctcatagagaacttacccctgtgggcctcagtatacggatacacagagtactgcagcaaagtaacaggagactcaaacatagaacacaactgtagatgtgttatcagaagcccctacacagtaccacagctgttagaccacaacaaccccctcagaggctacgtaccttacagctttaactttggaaatggtaaaatgccaggcggtagcagcctagtacctattagaatgagagccaagtggtaccccactctttttcaccaaagagaagtactagaggccatagcacaggcgggcccctttgcataccactcagacattaagaaagtatccctaggcataaagtacagatttaagtgggtgtggggtggcaaccccgtgtcccaacaggttgttagaaacccctgcaagaccacccaaggttcctcgggcaatagagtgcctcgatcaatacaagtcgttgacccgcggtacaacacgccagagctcaccatacacgcgtgggacttcagacatgggttctttggcagaaaagctattaagagaatgcaagaacaaccaatacctcatgacactttttcagcagggttcaagcgcagtcgccgagatacagaagcactccaatccagccaagaagagcaacaaaaagaaaacttacttttcccagtccagcagctcaagcgagtccccccatgggagacctcgcaagagagccaaagcgaggaagaaaactcgcaaaaacaggagaccctctcccagcaactcagagaccagctgcacaagcagcggctcatgggagagcaactccgatcgctcctctaccaaatgcagagggtccaacaaaatcaacacataaaccctatgttattgccaaagggtctggcattaacttctatttctcacaatgtaatatagatatgtttggtgaccccaaaccctacaacccctcctccaatgactggaaggaggagtaccaggccgcaaagtactgggacagaccccccagacgcgacctaaggagcacccccttctacccctgggcccccacccctaaaccatacaatgtcaactttgccctcaactacaaataaacggtggccgtggg

SEQ ID NO: 2988 - protein, 766 aa, Alphatorquevirus sp.
MAYGWWWRRRRRPWRRRRWRRWRRRRRPRRRRPRRRYRRRRTVRRRGRGRWTRRYRRWRRKGKRKGKKKIIIKQWQPNYTRRCNIVGYLPLLICGQNTVARNYATHSDDSYYPGPFGGGMTTDKFTLRILYDEYKRFMNYWTASNEDLDLCRYLGVTIYVFRHPEVDFILLINTSPPFLDTEITGPSIHPGMMALNKRARWIPSLKNRPGRKHYVKIKVGAPRMFTDKWYPQTDLCDMTLLTIFASAADMQYPFGSPLTDTIVVSFQVLQSMFNDCLSVLPSNFTPSSGKGYLLYEKIRKHLPYYNTTQTQAQLKRYIDNTGNATHTWNSYLNNKKFSETQSPKTDSDSIGGPYTNHNDTWYKGTAYLQNITNVPPNAAKLYYDQTKSLIGITFTGSTEYLHYTGGLYTSIWLSAGRSYFETKGPYTDITYNPFSDRGEGNMLWIDWLTKDDSQYSKTQSKCLIENLPLWASVYGYTEYCSKVTGDSNIEHNCRCVIRSPYTVPQLLDHNNPLRGYVPYSFNFGNGKMPGGSSLVPIRMRAKWYPTLFHQREVLEAIAQAGPFAYHSDIKKVSLGIKYRFKWVWGGNPVSQQVVRNPCKTTQGSSGNRVPRSIQVVDPRYNTPELTIHAWDFRHGFFGRKAIKRMQEQPIPHDTFSAGFKRSRRDTEALQSSQEEQQKENLLFPVQQLKRVPPWETSQESQSEEENSQKQETLSQQLRDQLHKQRLMGEQLRSLLYQMQRVQQNQHINPMLLPKGLALTSISHNVI

SEQ ID NO: 2989 - protein, 159 aa, Alphatorquevirus sp.
LAGLWARLLKMHFSRCSRKKRTLSLLPLHHSQKARPSVKGMWRPPTRNAFTIQRDWFYSCFHSHSSMCGCADFIGHFNHIAAMLGRPEDQNPPPPPGALRPLPALPAATEAPGDRAPWPMGGGGGDGGARGGGGDGAAGDVAGDPADADLVAAIDAAEQ

SEQ ID NO: 2990 - protein, 132 aa, Alphatorquevirus sp.
MGDLAREPKRGRKLAKTGDPLPATQRPAAQAAAHGRATPIAPLPNAEGPTKSTHKPYVIAKGSGINFYFSQCNIDMFGDPKPYNPSSNDWKEEYQAAKYWDRPPRRDLRSTPFYPWAPTPKPYNVNFALNYK

SEQ ID NO: 2991 - DNA, 2896 bp, Alphatorquevirus sp.; identical to SEQ ID NO: 2987

SEQ ID NO: 2992 - protein, 766 aa, Alphatorquevirus sp.; identical to SEQ ID NO: 2988

SEQ ID NO: 2993 - protein, 159 aa, Alphatorquevirus sp.; identical to SEQ ID NO: 2989

SEQ ID NO: 2994 - protein, 132 aa, Alphatorquevirus sp.; identical to SEQ ID NO: 2990

SEQ ID NO: 2995 - DNA, 2896 bp, Betatorquevirus sp.
cactacagtgactccaggctgatcttgggcgggaaggggcaattcgggctagatcagtctggcggaacgggcaagaaacttaaaatatactttttttacagatatgtcaacaagatatatacatccaaaatcaactataagacaaaagaaactacaatggatgaatatgcttgttcattgccatgatataatgtgtgaatgcccatctccacttgaacacaccgctgcattaatttttgaacaagaaccagaactccgctttaacccacctgaaaaagatttaattaaaaaatgccttactactacaaccgataccgcagacgccgctggagacccagacggttttggagaaggagatttagaagaccttttcaaagaaaattttggagaagacgacaccgggtaagaaaaagaaaacttaaaagaataagactatctcaatatcaaccacattatataaaaagactaacaataactggatattatcctttagtactatcaactaaggaaagactttctaacaatttaaactgttacttagactctatagcaccagctgaagtacacggagggggaggattttctatatgtaactttagcctttactccttatatcaagaaaacctgcaattaagaaactggtggtccacatctaacgaaaatatgcctcttattagatttttaggatgctcagtaacattatacagacaagcccacctagactatctattttactacagaaactcttaccctatgacagcttctttaacaacataccaaagcaccaacccacaagcaatgttactcacaaaaagaacaaaaataatggcatgcaaaacacacaacaaaaacaaaaaaccatacaaaaaactaaaaattagaccacctgcacaactacaaaacaaatggtattttcaaaaagaaatagcacaagttccactagtccaatttattacaacagcatgctcgttagaccgcatgtaccttaactcaacctcaatttcatcaacactaggctttgttacattagacaccaacggtttcatgcaacgcttccttaaagcaaacacaacagcaccttatcaaccattaacaggacaattaatgtttgcagcaccaaatggaaaagcaataactgacatacttttaacacaaataatattactaggttcagtagaagaagcaacagagggaacaaccataggagcagtacctgcagaactaagttgtcccacagaatggggagttacaagtgacgtggcaaaaaaactatacacagcatacaaccaaagtaaatactggggaaatccatttatgccacattggttttacggagaccaaagaatactaataaccaacatgaatatagaacaactatgtaaacaatttaaaagctcaactattactaattgcaaattaacaactggatttgtagtaaaagaacaaaaatatcaagaattaagatacaatccatttgcagacaaaggagtaaataacatactatatttattacctatagactcacatgtacattcctatggatgggatccacctacagacaaaaatgtattatgcagagacttaccactaaatgttttactatggggataccttgactttcaaagaaaatgtaaagaatacaatgatatagacacaaaatgcatatgtgtatttcaatcaccctatgtaagccctcctggacattgcaaatttatagtagtactagacgatgactttttacatggcaattctccttactttgactcagggagaaaaaccacttcagattatcaaaattggcacccaaaagtaagatttcaaattagaactttaaataaaatagcatgttcaggaccggcaacaacaaaattacctgatgatataagtgtagaatgccatctaaaatatagatttcattttaagattggtggagaaccagcaccaatgtcagttcttaaaaacccagaagaacaacctcaatggaatatacccaataacttcctacaaacaacttcgttacagaatccaacagccccctttgaacacctcctctggaaatttgatgaacgcagaggagaacttacaaaaagagctgcaaaaagaattactgaaaacctccaatctgaaacaaatcttttaccaattgcagaaacagcaacctggtgccctacagcactcagcaaagatcaagaaacatcggagacaacatcctcggaagaagaagaaacatcaacgacggaggagagactccagcagcagcgaagaaagcaaaaactcctccgaaagctcatcaaccgaatgttactcagactaacaacattagaatagacaaatgcattgtaaaagtaaaattatttgatgacaatattaaacctaaccgtagaatgaatgcatgggaatatgaacaagaggtacaagaagcctcaatatggggtagagttcccagaactcacatttttgataaacctacatacccatatgtaccacaaatgtcaaaatactgtgtaaactttgatcttaatgcgccgcaataaatttcaacgccagcaataattcactctcggtgtccatttaataaagtataaacttatataaacatccaccactctcccaaatacgcaggcgcagaagggggctccgcccccttacacccccagggggggctctgccccccctataaccccccctaataaatattcaacaggaaaaccacataattagaatggccgaccacaaactgccacttacttcctctttttacacaacttcctattttacttattattattcattacattaattaataatcaccgtaattccggggaggagactacaatctatataactaagtatacttccgaatggctgagtttatgccgccagacggagacgggat

SEQ ID NO: 2996 - protein, 678 aa, Betatorquevirus sp.
MPYYYNRYRRRRWRPRRFWRRRFRRPFQRKFWRRRHRVRKRKLKRIRLSQYQPHYIKRLTITGYYPLVLSTKERLSNNLNCYLDSIAPAEVHGGGGFSICNFSLYSLYQENLQLRNWWSTSNENMPLIRFLGCSVTLYRQAHLDYLFYYRNSYPMTASLTTYQSTNPQAMLLTKRTKIMACKTHNKNKKPYKKLKIRPPAQLQNKWYFQKEIAQVPLVQFITTACSLDRMYLNSTSISSTLGFVTLDTNGFMQRFLKANTTAPYQPLTGQLMFAAPNGKAITDILLTQIILLGSVEEATEGTTIGAVPAELSCPTEWGVTSDVAKKLYTAYNQSKYWGNPFMPHWFYGDQRILITNMNIEQLCKQFKSSTITNCKLTTGFVVKEQKYQELRYNPFADKGVNNILYLLPIDSHVHSYGWDPPTDKNVLCRDLPLNVLLWGYLDFQRKCKEYNDIDTKCICVFQSPYVSPPGHCKFIVVLDDDFLHGNSPYFDSGRKTTSDYQNWHPKVRFQIRTLNKIACSGPATTKLPDDISVECHLKYRFHFKIGGEPAPMSVLKNPEEQPQWNIPNNFLQTTSLQNPTAPFEHLLWKFDERRGELTKRAAKRITENLQSETNLLPIAETATWCPTALSKDQETSETTSSEEEETSTTEERLQQQRRKQKLLRKLINRMLLRLTTLE

SEQ ID NO: 2997 - protein, 115 aa, Betatorquevirus sp.
LAERARNLKYTFFTDMSTRYIHPKSTIRQKKLQWMNMLVHCHDIMCECPSPLEHTAALIFEQEPELRFNPPEKDLIKKCLTTTTDTADAAGDPDGFGEGDLEDLFKENFGEDDTG

SEQ ID NO: 2998 - protein, 124 aa, Betatorquevirus sp.
LVPYSTQQRSRNIGDNILGRRRNINDGGETPAAAKKAKTPPKAHQPNVTQTNNIRIDKCIVKVKLFDDNIKPNRRMNAWEYEQEVQEASIWGRVPRTHIFDKPTYPYVPQMSKYCVNFDLNAPQ

SEQ ID NO: 2999 - DNA, 2895 bp, Betatorquevirus sp.
cgggagccgaaggtgagtgcaaccaccgtagtctaggggcaattcgggctagatcagtctggcggaccgggcaagaaacttaaaataattattattttacagatatgagcaaacatttaacaccaagtatctacagcaacaaagcattagaaaacaactgggtaaacttaatatggaacagccatgaccttatgtgtggctgcaacaacccctggaaacatctagcagacatcttaaaaacacaaggaacacaactatgcctcccttcaactactaccgacgcttctaccgctacagacccagatataacagaagaactcggtttagaacctggagatctagacaagctattcgaagaagacatcgtagaagacgatgggtaagaaaaagacgctttttaaaactaaaaaaaagaaaactaaaaaagataagactttcacagtggcaaccagatagcataagaaaatgccacataaaaggacagctatgcttgttaacctgtggaattaacagaattaataataactttactttaacctctgaaagctatgtacctatagcagaaccgggagggggaggatggagtataatgcaaataacattaagagctttatttgacgaataccaacattacagaaattggtggacttcaagtaactgtggactgccattagttaaatatatgggatgtaaaattaaattttataatagtaatgactgtgactacatagtgactgtacaaagaacaggaccttttgaagtagatagagacacttatctaaacacacaaccaagtagacacatgatgaacagaaagagttttataataccaaagctaaatccaaacaaaaaaagaaagccatacattaaaaaatactacagaccaccagctctactacaaaacaaatggtacttttcacaagacatattaaacacaccactcatactattcacagtatcttcctgctcactagaccaaatgtacgcaccaaatgaccaaataagcacaaatataacatttacatcattaaatacaacactttttcaaaacccacactgggaattagatgacgatatgccatactatccaaaagtaacaggcacaataaacactggattatacacatttggaaatggtggagacccagaaaagcaaaagaattggtcaaaattaataccactatacgaaacacaattatggaaaaaacaactagaaccacacggaaacgaatacacaaaaaacttccaagaattcaattccaaaaataaatggggaaacccattttcatatacagcacacgaagaaactaatgacatacaaatattttacggaaaagctccagatgaatacacatacacaacaaaacctaacattcaacaagcaacaggcatataccaagaatgtagatacaacccctttaaagacaaaggaacaggaaacatactttaccttaaatcaacaaaacaatcacaaggtagctttttatccttacctacagacaatagaatagttttaaaagactttccaatttggttagccacatggggatggataagctggctacaaaaatctaaaccagtacaccatttagaagaagactatcaattagttatacaatcaccttatatatatccaccactaccatgctacgtaccactagacaaatactttacacacagcgatggaaagaacctaacagaaacagacaaggcacactggcacccaaaactagaaatgcaattagaaacactatcaaaatttgcagaaacaggcccagcagcaactaaaattaacaaacaaaagcaaatacaaatacatgccttttatgacttttactttaagtggggaggctgcccagcaccaatggaaaacatctgcgacccagcagaccaagaaaaattccctaaccccaataacatcctcaaagagcttacgctcgagaatccagaaacaccaaaagaacattacatttacaaatttgacgaacgagacggactccttacaaacacagcttcacaaagacttaaaaaagacattgaacctacaaaatattttacagaatttggagcaaaggacccactcttacaaatccaagcaccacaacaaacacaagcggagacaaccccggaaaaaaccgaagaagagatcaaggagcagctccacctcctcaagcagcagcgagacgagctcagacacagaatcaacagactaacaaaaaaccgaaaattattccctataccgtagacatgtttggtcaatctacagttaaaaatcgtagatttacaccacctgaatttgaagatgagttgttagtgtctagaatatttcgtagacgtcctagaacatacatttttgacccccctgattataaccttggaattattgaaccacttgtaaactttgaattaaactttaaatactaggccagcagtaattcacttgtcggtgtccatttatttaagttttaacttatacaaacatccaccgcctccctaatacgcaggcgcacaagggggctccgcccccttaaacccccaaggggcctccctaatacgcaggcgcacaagggggctccgcccccttaaacccccaagggggctccgcccccttaaacccccaagggggctccgcccccttacaccccctaataaatattcaacaggaaaaccacataattagaattgccgaccacaaaccgtcaaccgttactactacttcttcttttacacacacacttctgcttttttagaaccacgcctaccacttcattattaatccgacgctattccggggaggagacacacatctatataactaagagtactgacgaatggctgagtttatcacgccagacggagacggcatcacatcagtgcaggccggctgatcttggg

SEQ ID NO: 3000 - protein, 681 aa, Betatorquevirus sp.
LQQPLETSSRHLKNTRNTTMPPFNYYRRFYRYRPRYNRRTRFRTWRSRQAIRRRHRRRRWVRKRRFLKLKKRKLKKIRLSQWQPDSIRKCHIKGQLCLLTCGINRINNNFTLTSESYVPIAEPGGGGWSIMQITLRALFDEYQHYRNWWTSSNCGLPLVKYMGCKIKFYNSNDCDYIVTVQRTGPFEVDRDTYLNTQPSRHMMNRKSFIIPKLNPNKKRKPYIKKYYRPPALLQNKWYFSQDILNTPLILFTVSSCSLDQMYAPNDQISTNITFTSLNTTLFQNPHWELDDDMPYYPKVTGTINTGLYTFGNGGDPEKQKNWSKLIPLYETQLWKKQLEPHGNEYTKNFQEFNSKNKWGNPFSYTAHEETNDIQIFYGKAPDEYTYTTKPNIQQATGIYQECRYNPFKDKGTGNILYLKSTKQSQGSFLSLPTDNRIVLKDFPIWLATWGWISWLQKSKPVHHLEEDYQLVIQSPYIYPPLPCYVPLDKYFTHSDGKNLTETDKAHWHPKLEMQLETLSKFAETGPAATKINKQKQIQIHAFYDFYFKWGGCPAPMENICDPADQEKFPNPNNILKELTLENPETPKEHYIYKFDERDGLLTNTASQRLKKDIEPTKYFTEFGAKDPLLQIQAPQQTQAETTPEKTEEEIKEQLHLLKQQRDELRHRINRLTKNRKLFPIP

SEQ ID NO: 3001 - protein, 92 aa, Betatorquevirus sp.
MSKHLTPSIYSNKALENNWVNLIWNSHDLMCGCNNPWKHLADILKTQGTQLCLPSTTTDASTATDPDITEELGLEPGDLDKLFEEDIVEDDG

SEQ ID NO: 3002 - protein, 58 aa, Betatorquevirus sp.
MFGQSTVKNRRFTPPEFEDELLVSRIFRRRPRTYIFDPPDYNLGIIEPLVNFELNFKY

SEQ ID NO: 3003 - DNA, 2895 bp, Alphatorquevirus sp.
gtagcaacttcctcggggtcccacaccgcagtctaggggcaattcgggcacgggtctggccgggctatgggcaagactcttaaaaaatttcctcgctctgtactccgccaggacaccaagtcatgccgtggtctccgccgagacataatatcagaacaagagaagatctctgggtgcaatcggttatttactcacatgacactttttgtggctgtgatagtgttcttcagcatcttactagcctcctgggtggcctacaaccagctccacctagagacccagcaccccctgccatacggagcctgccggcactgccgccagctccgcaaccccctgaagaaccacggcgtggtggagatacagacgaaggccgtggagaagatggaggagacgccgctggggcctacgaaccaggagacctagaagaacttttcgccgccgccgaggaagacgatatgtgagtagagggcggcgccgccgatacaggcgcagacggagacgggggcgacgcagaaggggacacagacgcaggcacagaaagacgctcattgtcaggcagtggcaaccagacgttattaaaagatgctttattactgggtggctacccctaattatctgtggaaacggacacacccaatttaactttataactcatatggacgacattccacccaaaaatgcgtcctatggaggcaactttacaaatgttacctttaaccttgcctgcttctatgaagaattcatgcatcacagaaacagatggtcagcctccaaccatgacctagaactggtcagatacctcagaaccagcctaaaactctacagacacgagtcagtagactatgtagttagctacaccaccacaggcccattcgaaacaaatgaattgtcctacatgctcactcaccctctagccatgcttctcagcaaaaaacatgtagttgtacccagcctaaagacaaaaccacacggcagaaagtacaaaaagataacaatcaaacccccaaaactaatgctaaacaaatggtactttgccaaagacttctgccacataggcctctttcagctctgggccacaggcctagaactaagaaacccatggctcaggtcaggcacaaacagcccagttataggattctatgtccttaaaaatcaggtttatcaaaacaaatacagcaacctaaacacaacagaagcttacacttcaagaaaaagtgcatatgatgaactaacaaaacatagctctgatacaaagtggtacaattggcagtatacatacaacaaaataatgaaacctatttactatgcagctgccaatgaacaaaactcaaattttaaaacccaaacatataattggaaaaattacaaacaaaacttccaagcagtaaaaactaaatgggaaaaaacttgtaaagacgcctatgaattagtatcagaagaatacaaacaaatatacagcacaactgtcacatatccaccaccatgggaacccttgacacaaaacacaggcagacagtacctagaacatgactgtggcatatacagcccatactttctaacaccacaaatatacactcctgaatggcacacagcctggtcctacattagatacaatcccctaacagacaaaggcataggcaacagaatatgtgtgcagtactgcagcgaggccagcagtgactacaacccagtaaaaagcaagtgcatgctacaagacatgcccttgtggatgatgctgtatggctatgcagactatgtagtaaagagcacaggcatacagtcagcctggacagacatgagagtggccattaggagcccctacacagacccaaaactcataggcagctcagaaaacacaatgttcatacccataggcatagaattcatgaacggagacatgccagacaagaggccctacattccgttaaagtggtggttcaagtggtaccccatgattacacaccaaaaaaccgcacttgaggcaatagtttcctgcagcccgttcatgcccagagatcaggaacaagccagttgggacataactgtaggttacaaagcaaccttcttatggggcgggtcccccttacctccacagcccatcgacgacccctgccaaaaatccacacacgaacttcccgaccccgatagaaaccctccaagaatacaaatctcagacccgcagcacctcggaccggcgacgctgttccactcgtgggacctcagacgtggattcattaatacaaaaagtattaaaagagtgtcagaacacctcgactctaatgaatatttttcaacaggcgtcgtgtccaaaaaaccccgattcgacacaccccaccacgggcagctatcaaaccaagaagaagacgccttacatatcctcagacaactccagaaagagcaagaagagagcacctccgaagaagaacaagcactccaaaaagaagaggagcaaaaagaaaagctcctacagcagctccgagtccagcgacagcaccagcgagtcctcaggcagggaatcaaacacctcatgggagacgtcctccgactcagacagggagtccactggaacccaatcctataatacttccagcagaaccaataccagacctcctattccccaatactggtaaaaaaaaaaaattttcgcccttcgattggcagtgcgagcaggagcttgcgactttaatgaaacgacctatgcgtttctatccctcagacagcccgttctacccatggctaccccccaagcgagatatcccaaaaatatgtaaagtaaacttcaaaataaatttcagtgaatgaatctcgaggccccgggagtttcacttagcggtgtctacctctaaaggtcactaagcactccgagcgcaagcgaggagtgcgaccccctgcccg

SEQ ID NO: 3004 - protein, 641 aa, Alphatorquevirus sp.
MDDIPPKNASYGGNFTNVTFNLACFYEEFMHHRNRWSASNHDLELVRYLRTSLKLYRHESVDYVVSYTTTGPFETNELSYMLTHPLAMLLSKKHVVVPSLKTKPHGRKYKKITIKPPKLMLNKWYFAKDFCHIGLFQLWATGLELRNPWLRSGTNSPVIGFYVLKNQVYQNKYSNLNTTEAYTSRKSAYDELTKHSSDTKWYNWQYTYNKIMKPIYYAAANEQNSNFKTQTYNWKNYKQNFQAVKTKWEKTCKDAYELVSEEYKQIYSTTVTYPPPWEPLTQNTGRQYLEHDCGIYSPYFLTPQIYTPEWHTAWSYIRYNPLTDKGIGNRICVQYCSEASSDYNPVKSKCMLQDMPLWMMLYGYADYVVKSTGIQSAWTDMRVAIRSPYTDPKLIGSSENTMFIPIGIEFMNGDMPDKRPYIPLKWWFKWYPMITHQKTALEAIVSCSPFMPRDQEQASWDITVGYKATFLWGGSPLPPQPIDDPCQKSTHELPDPDRNPPRIQISDPQHLGPATLFHSWDLRRGFINTKSIKRVSEHLDSNEYFSTGVVSKKPRFDTPHHGQLSNQEEDALHILRQLQKEQEESTSEEEQALQKEEEQKEKLLQQLRVQRQHQRVLRQGIKHLMGDVLRLRQGVHWNPIL

SEQ ID NO: 3005 - DNA, 2895 bp, Betatorquevirus sp.
cgggtgccgaaggtgagtgaaaccaccgtagtcaaggggcaattcgggctagttcagtctagcggaacgggcaagacttttaataataaccttattttacagatgagcaaacagctaaaaccaactttatacaaagacaaatccttggaattacaatggctaaacaacatttttagttctcacgacttatgctgcggctgccatgatccagttttacatttaatgattttaattaacaaaaccggagaagcacctaaaccagaagaagaaattaacaatataaaatgcctccttactggcgccaaacgtactacagaagaagatatagacctttcacctggagaactagaagaattattcaaagaagaagaagatggagataccgcaaaccaaggaaaacatactggagaagaaaactgcgggtaagaaaacgtttttataaaagaaaactaaaaaaaattgtactaaaacaatttcaaccaaaaattattagaagatgtacaatatttggaactatttgcctttttcaaggctccccagaaagagctaataataattatattcaaacaatctacagctacgttccagataaagaaccaggaggagggggatggactttaataactgaaagcttaagtagtttatgggaagactgggaacatttaaaaaatgtatggactcaaagtaatgccggtttaccacttgtaagatacgggggtgtaacattgtacttttatcaatctgcttatactgattatattgctcaagtatttaactgttatcctatgacagacacaaagtacacacatgcagactcagcaccaaacaggatgctattaaaaaaacatgttataagagtacctagcagagaaacacgcaaaaaaagaaagccatacaaaagagtaagagtagcaccaccttctcaaatgcaaaacaaatggtattttcaaagagacatatgtgaaatacccttaataatgatagcagcaacagccgttgactttagatatccattttgtgcaagcgactgtgctagtaacaacttaactttaacatgtttaaacccactactttttcaaaaccaagactttgatcacccatctgacgcacaaggctactttccaaaaccaggagtatacttatactcaacacaaagagctaccaaaccatctagcagcgactgcatatacttaggaaacacaaaagacaaccaagaaggcaaaagtgcaacttcactatcaaatctacaaacacaaaaaatagcagaatggggaaacccattttggcattattatattgacggttctaaaaaaatattttcttatatgaaacccccatcacagctaattgaagatgactttaaaaggatgacagagttagcagaaccaatgttcatacaagttagatacaacccagaaagagacacaggagaaggtaacttaatatacataacagaaaactttagaggacaacactgggaccctccagctagtgaaaacttaaagttagatggctttcctttgtttgacatgtgctggggtttcatagactggatagaaaaagttcatgaaacagaaaacctactaaccaactattgtttttgtattagaacaaacagttttaatgaaaaaaaaacagtatttatacctgtagatcgggcatttttaacaggctttagcccatatgaaaccaccttaaaatcatcagacagggctcactggcatccacaaataagattccaaacaaaatcaataaatgatatatgtttaacaggtccaggttgtgctagatccccatatggaaattacatgcaagcaaaaatgtcttataaatttcatttaaaatggggaggttgtccaaaaacttatgaaaaaccctatgatccttgttcacagcccaattggactattccccataacctcaatgaaacaatacaaatccagaatccaaacacatgcccacaaacagaactccaagaatgggactggagacgcgatattgttacaaaaaaagctatcgaaagaattagacaacacacggaaccttatgaaactttgcaaatctctacaggttccaaacacaacccagcaatactcagacaaacatcaccgtggacggactcagaaacggactcggaagaggaaaaagaccaaacacaggagatccagatccagctcaacaagctccgaaagcatcaacagcacctcaagcagcagctcaagcagtacctaaaaccccgaaatatagaataatagcaagcaatgtaaaagttgaactttttcctagtaagaaaccttttaaaaatagacgctttactgctagtgaaagagaaacagaaaaacaatgtgctaaagcttttcatagacctgaaagacattttttctatgatcctcctttttacccttactgtgtacctgaacctcttgtaaactttgctttaggatataaaatataaggccaacaaaattcacttagtggtgtctgtttattaaagtttaaccttaataagcatactccgcctccctaaattaaggcgccaaaagggggctccgcccccttaaaccccaagggggctccgccccctttaacccccaagggggctacgcccccttacaccccctaattaatattcaacaggaaaaccacctaatttgacttgccgaccacaaaccgtcaactacttccctattttccattacttcccttttaactcatgaatattcataataaacgtcacatatcctgggaggagacatacaactatataacaaagtacacagacgaatggctgagtttatgccgctagacggaggacgcacagctactgctgcgacctgaacttgggcgggtgccgaaggtgagtgaaaccaccgtagtcaaggggcaattcggggg

SEQ ID NO: 3006 - protein, 655 aa, Betatorquevirus sp.; identical to SEQ ID NO: 2975

SEQ ID NO: 3007 - protein, 107 aa, Betatorquevirus sp.; identical to SEQ ID NO: 2976

SEQ ID NO: 3008 - DNA, 2895 bp, Alphatorquevirus sp.
ggccgtgggaatttcacttgtcggtgtgcagtcaaggggcaattcgggctcgggactggccgggctatgggcaaggctcttaaaaaaagccatgttttttggtcggccttacagaaagaaaagggcactgttactgctacgcgtgcgagctccagaggcgaaaccacctgctatgagctggagacccccggtgcacaaccccaatgggattgagagaaacctgtgggaggcattctttcgcatgcatgcttcagcttgtggttgtggcgatcttgttggccatattactatactggctggtcggtatggtgctcctcctcgtcccccggcccccgggactcccagaccaccgctgagacgccagctggcccttccggcgccccccgctgatccgcagcaggccaacccagcatggcctggtggggacggtggagaagatggcgctgggggccccgccgctggcggcgccgtcgcagacgccgagtaccaagaagacgagctcaacgccctgttcgacgccgtcgagcaagaagagtaaggaggaggcgatgggggaggcggaggtggagacgggggtacagacgcagactgagactcagacgcagacgcagacgaaagcgaaagatagtactgactcagtggaacccagctaaagtcaggagatgtaccattaagggggtactccccatgatcttgtgcggggcaggacgctcagggtttaactatggactgcacagcgacgactacaccacccagaaaccccttggccagaacccccacgggggcggcatgagcacagtgacttttagccttcaggttctctatgaccagtatcagaggtttatgaacaagtggtcgtactctaacgaccaactagacctcgccaggtactttggctgcaccttctggttctacagacacccagaagtggactttgtagctcagtttgacaacgttccccccatgaaaatggacgagaacacagcccctaacactcacccgtcattcttactacaaaacaaacacagggttaaaatccccagctttaaaaccaagccgtttggcagaaaaaaagttagagttaaagtggggccccccaaactgtttgaagacaaatggtacagccaacatgacctgtgtaaggttcccctagtcagttggcggttaaccgcagctgacttcagatttccgttctgctcaccacaaactgacaacccttgctacaccttccaggtattgcatgaagagtattacccagtaataggcacttctgctttagaacagggaactaattacaatgcatcaggcatatctacattagaaacgtttttatatggaaaatgtacccactatcaaacatttgccacagacacaagactaaaccctcaaagacccataacaagcaacaacaacaacacttataatcctagtggagccacagaaacaattatatggagtcaagatgactttaacaagtttaaaaagcacacagacagcaactatggctactgcacctactgcccaaacgaaaacttaattaaaaaaattaaaaactacagagacagaagattccagtggctaactcaaatgccagaaacaaacacctgccacataaatgccacctacgcccgaggaaaaattaaagagtgggaatatcacctaggctggtactcaaatatatttataggcaacctaagacacaacctagcattccgaacagcatacattgacattacctacaaccccattacagacaaaggagaaggcaacattgtatggttccaatatgccaccaaacccaacacacaatacatagacagccaggcaaaatgcactattagagacatacccctatatgctgccttttatggctacgaagactacatacaaagaacactaggcccctaccaagatgtagaaaccctgggtataatctgtgttaaatgtccctacacagatccccctctagttcacaagtctgcagataaaaaagactggggctatgtattttacgacatacactttggcaacggaaaaaccccagaaggacttggccaggtgcacccttactggatgcaaagatggagaccctacgtacagtttcaaaaagacactatgaacaagatagccagaaccggaccgttcagctacagagacgacatgccttccatcactttgactgccgggtacaagtttcgttttaactgggggggcgactctatatttccacagattattaaaaacccctgcccagacagtggggtacgaccttcatccagtagagagcgtcgctcagtacaagtcgttagcccgctcacaatggggccagaatacatattccaccggtgggactggcgacggggcttctttaatcaaaaagctctcaaaagaatgcttgaaaaatcaattaatgatagagagtatccaacaggcccaaaggtccctcgatggtttcccccactcgacaaccaagagcaagaaggcgcctcagattcagaggcgacaagctcgcagtcctcgcaagaagaagccgctcaagaagccctccaagaagtccaagaggcgacgctacagcagcacctcctccagcagtaccgagagcagcgacgaatcggaaagcaactccaactcgtcatgctccaactcaccaaaacgcagagcaacctgcacataaatccccgtgtgcttggccatgcataaataaagtctacatgtttcccccagaaaaacccatgcccatacacgggtaccacgggtgggagacagagtatcaggcctgcaaagcctttgacaggccccctagaaactacctttcagacaaacccatctatccctggcttccccgctctcaacctgaatttaaagtcagttttaagcttggttttcaataaacaa

SEQ ID NO: 3009 - protein, 762 aa, Alphatorquevirus sp.
MAWWGRWRRWRWGPRRWRRRRRRRVPRRRAQRPVRRRRARRVRRRRWGRRRWRRGYRRRLRLRRRRRRKRKIVLTQWNPAKVRRCTIKGVLPMILCGAGRSGFNYGLHSDDYTTQKPLGQNPHGGGMSTVTFSLQVLYDQYQRFMNKWSYSNDQLDLARYFGCTFWFYRHPEVDFVAQFDNVPPMKMDENTAPNTHPSFLLQNKHRVKIPSFKTKPFGRKKVRVKVGPPKLFEDKWYSQHDLCKVPLVSWRLTAADFRFPFCSPQTDNPCYTFQVLHEEYYPVIGTSALEQGTNYNASGISTLETFLYGKCTHYQTFATDTRLNPQRPITSNNNNTYNPSGATETIIWSQDDFNKFKKHTDSNYGYCTYCPNENLIKKIKNYRDRRFQWLTQMPETNTCHINATYARGKIKEWEYHLGWYSNIFIGNLRHNLAFRTAYIDITYNPITDKGEGNIVWFQYATKPNTQYIDSQAKCTIRDIPLYAAFYGYEDYIQRTLGPYQDVETLGIICVKCPYTDPPLVHKSADKKDWGYVFYDIHFGNGKTPEGLGQVHPYWMQRWRPYVQFQKDTMNKIARTGPFSYRDDMPSITLTAGYKFRFNWGGDSIFPQIIKNPCPDSGVRPSSSRERRSVQVVSPLTMGPEYIFHRWDWRRGFFNQKALKRMLEKSINDREYPTGPKVPRWFPPLDNQEQEGASDSEATSSQSSQEEAAQEALQEVQEATLQQHLLQQYREQRRIGKQLQLVMLQLTKTQSNLHINPRVLGHA

SEQ ID NO: 3010 - protein, 160 aa, Alphatorquevirus sp.; identical to SEQ ID NO: 384

SEQ ID NO: 3011 - protein, 147 aa, Alphatorquevirus sp.
MVSPTRQPRARRRLRFRGDKLAVLARRSRSRSPPRSPRGDATAAPPPAVPRAATNRKATPTRHAPTHQNAEQPAHKSPCAWPCINKVYMFPPEKPMPIHGYHGWETEYQACKAFDRPPRNYLSDKPIYPWLPRSQPEFKVSFKLGFQ

SEQ ID NO: 3012 - DNA, 2895 bp, Betatorquevirus sp.
ggcgggtgctgaggtgagtgaaaccaccgaatcaaggggcaattcgggctagttcagtctagcggaacgggcaagaaacttaaaataatttatattttacagatgtctgactttgtaccaccaaaatactcaccaagacaacttaatcttcaaatggtaaatgcttatgtttccatccatgatttaaaatgccactgcaaagaaccacttaaacatattattcaacaaatacaagaacaagaaccaactacaaaatgcctgcctactactaccgaagacgctggagaccacgttggagaaaaagatatcgaccattttggacctggagaattggaacgtcttttcgcagaagacgtagaagaaaaagaagggtaagaagaaaactaccttttatacacttaaaacaatggcaaccgccacatattaacaaaatgacagtaaagggactatactgtttattacaagttcataaaactagatataaccatgactttaatcaatatgaaatttgtgtacctaaagaaggactcccaaatggaggaggatttactataacaaggtttactttacaagctttatttgaacaacatgaaaaagcacataacttatggacaaaaagtaacaaaaatatgcctttatttagatatactggttgtactattaaaatatatagacctgaaaatatagatcttgttgtcaaatttcaaacctgttatcctatgtgctgtagcaaattactgtttacaggcagtcaacctagcataatgatgatgagtaaaggatcaaaactaattagatgcagaaaatctgtacctaataaggccccatacaaaaaatttaaactaaaagtaccatcacaaatgtccaacaaatggtactttcaacacactgaaagccaaacaggattactactaattcaagctgcagctgcatcatttgacaattactatacatcctcagaagcagagagctcaacaataacattacactcattaaatactagaattttcaaaaatatgaacttctccacataccccacatatggttacatgcctaattcaacatatgcactatgggcatcaaatggtaacgacgaactagaaaacttaatttggctaggaaacactaaaaaataccaaaaaggaaaaatgataaaagaaatacagtcagatttaagcacagcacaaaaatggaaagagggtttacaaaagtacatgtcagatgagaaaaactggggaaaccccttttttgaacaacatttacaccaccaaagtacactatggagaggcactaaagcccccttattagacttagcatcaagccttcacagttataccggagcaacaaaagcaaacttagcaggcttacaaaaagtaactgaggacttatttattacagtaagatacaatccatttaaagacaaaggctatgaaaataacatatacatattagcaaactacacctcaaacgaagataacctacaaccactacctgacattgacttacaaaacccaggttttcctaactggcttagctgttttggctttcaagattggcttataaaacttggtaaaaagagcagaataaatgaacattggataatgatatggaaatctaattactttgatcctacactcccatattatatatttatggaccactggtttttacatggagactctgaagaattacagggcagaacaagttgggacgatgtaaattggtatccacaaatacaacaccaacaaggtgaattaaacaccttagcattatgtggccccggagccccaaaactaggccctgttaaactagcagaagccaaatgtgaataccgcttttattttaaggttggaggatgtggtgcccctgttgaaaaggttaaaaaccctgcagaacaaccgacttatgcgacaccaactaacatccttgaccaaaattcgttacagagtccagaggaaccaattgaatcgttcctctaccaattcgattggcgcagagatcaaattacagaaacagctgcaaaacgaatcacacaagacttctcaattggaaaaactttattttcacatgcagaaacaactggaacaacagtacccacactccaaacacacgaaaaagagctgctctcgtcggagacggaggaaacccaaaaagaaacattattccagcagctcctcgaccagcgaatcaagcagaaacaactccgacagcgaatcaagcaactaatgcaaaccatacaaacattagaataaaaaaactaaagtatactgttaatctttttgaacaaaagcctgtaaatagacgaatgactaaatgggaatatgaacaggaattacaagaaagtaaaatatgggatcactatcctagaacacatatttttgataggcctttttacaaaaacatgtttataaccccgcttgtaccaaaattaaactttgacctaaactttaaagaataaagccagcaaatattcacagctcggtgtccatttatttaagtttaaacttatataaacatccaccaccctcccaaatacgcaggcgcacaagggggctccgcccccttaaacccccaagggggctccgcccgcccccttacacccccaagggggctccgcccccttacacccccaagggggctacgcccccttacaccccctaataaatattcaacaggaaaaccacctaatttgaattgccgaccacaaaccgtcagacacttcccctttttacacatacttccctttttcctaattattattcattacattaattattaatcaccgtaaatccggggaggagccacttacctatataactaactacacttccgaatggctgagtttatgccgctagacggagtacgcatcagcacactgactgcggactgaacttg

SEQ ID NO: 3013 - protein, 665 aa, Betatorquevirus sp.
MPAYYYRRRWRPRWRKRYRPFWTWRIGTSFRRRRRRKRRVRRKLPFIHLKQWQPPHINKMTVKGLYCLLQVHKTRYNHDFNQYEICVPKEGLPNGGGFTITRFTLQALFEQHEKAHNLWTKSNKNMPLFRYTGCTIKIYRPENIDLVVKFQTCYPMCCSKLLFTGSQPSIMMMSKGSKLIRCRKSVPNKAPYKKFKLKVPSQMSNKWYFQHTESQTGLLLIQAAAASFDNYYTSSEAESSTITLHSLNTRIFKNMNFSTYPTYGYMPNSTYALWASNGNDELENLIWLGNTKKYQKGKMIKEIQSDLSTAQKWKEGLQKYMSDEKNWGNPFFEQHLHHQSTLWRGTKAPLLDLASSLHSYTGATKANLAGLQKVTEDLFITVRYNPFKDKGYENNIYILANYTSNEDNLQPLPDIDLQNPGFPNWLSCFGFQDWLIKLGKKSRINEHWIMIWKSNYFDPTLPYYIFMDHWFLHGDSEELQGRTSWDDVNWYPQIQHQQGELNTLALCGPGAPKLGPVKLAEAKCEYRFYFKVGGCGAPVEKVKNPAEQPTYATPTNILDQNSLQSPEEPIESFLYQFDWRRDQITETAAKRITQDFSIGKTLFSHAETTGTTVPTLQTHEKELLSSETEETQKETLFQQLLDQRIKQKQLRQRIKQLMQTIQTLE

SEQ ID NO: 3014 - protein, 90 aa, Betatorquevirus sp.
MSDFVPPKYSPRQLNLQMVNAYVSIHDLKCHCKEPLKHIIQQIQEQEPTTKCLPTTTEDAGDHVGEKDIDHFGPGELERLFAEDVEEKEG

SEQ ID NO: 3015 - DNA, 2894 bp, Betatorquevirus sp.
caggtaccgaaggtgagtgaaaccaccgtagttaaggggcaatatgggctgaagcagtctggaggaccgggcaagaaacttaaatatatatttaatttacagatatgagcaactttctaacaccagcagtttacagcaaaaatggccttgaaaactgctggttaaactgcatttggaacacacacgaccttatgtgcggatgtaacaacgccattaaacatctttttgacatcttaaaaaaaagaagtgaactaccatgcctcccttcaacttctaccgaagacgctggcgtccaaactggagatggagacgaagaagacgttttacaacaaggagacttagacgccctcttcgcagacgattttggagacgacactgggtaagaagacgctactttactaaaaaaagaaaaagaaagcttaaaaaaattagactacaccaatggcaaccagaccagattaaaaaatgccacattaaaggacaattatgcttactaacctgcggcaaaggaaaaattaataataactttactctaactgctgaaagctatgtacctaccaaagaatcgggagggggagcatggagtataatgcaattaacattaagagctttgtatgatgaatatttacattttagaaactggtggacaacaagtaattgtggcttatctttaattagatatataggagtaactgtaaaattttataaaagtaatgattgtgactatattgtaactgtacaacacacaggaccatttgaagtaactagagacatttatttaagcacacaacccagcagacacatgatgaatcataaaagctttatagtaccaaaactaaatcctaacaaaaaaaaaagaccatacataaaaaaaagattttatccacctgctatgtggcaaaacaaatggtactttcaacaagacatatttaatcacccacttatactctttatagtaagtgcatgcagcctagatcaaatgtactgccccaacgacggagtaagtacaaatataacatttttatcactaaacacagacctttttcaaaacccacattgggaattagatgacgaacaaccttactacccaaaagtaacaggaacagcaaacacaggactatttactttatataatggagaaaattatgaaaccaaactcaattggcaaaaaataatacttttaggaaacacaactcaatttaaaatcatagatcatagacagcaacaaaccataaacacattggcagaatataacaaaaaacaaaactggggaaacccattttcaataacacacatagacggacacgaatctatacaaatatactatggaacaccaccaacaacaaacaattataattcaaagccaaacatactacccataacaggactataccaagaatgcagatataatccatttcgagacaaaggcaaaaacaacaaagtgtacataaaatcaacaaaaacatttcaaggatcctttacttcactaccaacagacgaaagactattagtgcaagacatgccactatggttaatattctggggatggcaatcatggctacaaaaatctacacctgtacatcacttattagaagactaccaatttgttattcaatcagattacatatacccaccaatgaaaagctatgtaccactagatgcatactttactacacaacaaaaaacaccattaacagaaacagacaaacaacattggcacccaaaagcagaatttcaacaagaagtaatggctgcctttgccgctacaggcccagcagcaccaaaaataaacaaacaaaaccaaatacaaatacactgtttttatgatttttattttaagtggggaggatgcccaacacccatggaaacagtctgtaacccagcagaccaagaaaagttccccacgcccaataacctcatacaagaacctacaatcgagaatccagaaacaccaaaagaattctatttgtacaaattcgacgagcgacagggatttattacagcaccagctgcaaaaagacttaaaacagacattgaaacttcaaaatattttacagaatatggaacaagagacccaatactcgaagtcttcccaccgacggaccaaacacaaaagaaaaagaccacggaagaagaaaaagacccgctacagctccagctccagcagctccagctctaccagcaacacctcagagaacgaatcaacagattaaccaaacgttcaaaattattccctatactgtagatatgtttggacaaactaaaaataaaaaccgtagattaactgcaaaagaaagagcagatgacttagaagatgctataatatggggcagataccctagaacctataaaaatgaaagttactattacaaagatatgaatattgaaccccttgtaaacttttcattaaactttaaattctaagccagcaaatattcacttgtcggtgtccatttatttaagtttaaacttatacaaacatccaccacttctccctaatacgcaggcgcaaagggggctccgcccccttaaacccctagggggggcaaagccccccctaaccccccagggggctacgccccctaacaccccctgggggggcaaagccccccctaaccccccagggggctacgccccctaacaccccctaattaatattcaacaggaaaaccacctaattagaattgccgaccacaaaccgtcaaccgttacacttacttcttctttttacattgcacttctccttttttagaacacacccatctacttcattattagtcagacgcatatcctgggaggagcaacacctctatataactaagtacactgacgaatggctgagtttaccccgccagacggagacgagacaggacactgactcggctgcttcaggg

SEQ ID NO: 3016 - protein, 662 aa, Betatorquevirus sp.
MPPFNFYRRRWRPNWRWRRRRRFTTRRLRRPLRRRFWRRHWVRRRYFTKKRKRKLKKIRLHQWQPDQIKKCHIKGQLCLLTCGKGKINNNFTLTAESYVPTKESGGGAWSIMQLTLRALYDEYLHFRNWWTTSNCGLSLIRYIGVTVKFYKSNDCDYIVTVQHTGPFEVTRDIYLSTQPSRHMMNHKSFIVPKLNPNKKKRPYIKKRFYPPAMWQNKWYFQQDIFNHPLILFIVSACSLDQMYCPNDGVSTNITFLSLNTDLFQNPHWELDDEQPYYPKVTGTANTGLFTLYNGENYETKLNWQKIILLGNTTQFKIIDHRQQQTINTLAEYNKKQNWGNPFSITHIDGHESIQIYYGTPPTTNNYNSKPNILPITGLYQECRYNPFRDKGKNNKVYIKSTKTFQGSFTSLPTDERLLVQDMPLWLIFWGWQSWLQKSTPVHHLLEDYQFVIQSDYIYPPMKSYVPLDAYFTTQQKTPLTETDKQHWHPKAEFQQEVMAAFAATGPAAPKINKQNQIQIHCFYDFYFKWGGCPTPMETVCNPADQEKFPTPNNLIQEPTIENPETPKEFYLYKFDERQGFITAPAAKRLKTDIETSKYFTEYGTRDPILEVFPPTDQTQKKKTTEEEKDPLQLQLQQLQLYQQHLRERINRLTKRSKLFPIL

SEQ ID NO: 3017 - protein, 92 aa, Betatorquevirus sp.
MSNFLTPAVYSKNGLENCWLNCIWNTHDLMCGCNNAIKHLFDILKKRSELPCLPSTSTEDAGVQTGDGDEEDVLQQGDLDALFADDFGDDTG

SEQ ID NO: 3018 - protein, 58 aa, Betatorquevirus sp.
MFGQTKNKNRRLTAKERADDLEDAIIWGRYPRTYKNESYYYKDMNIEPLVNFSLNFKF

SEQ ID NO: 3019 - DNA, 2894 bp, Alphatorquevirus sp.
cccctccggtagcaacgccttcggagccgcgtcaaggggcaattcgggctcgggactggccgggccccgggcaaggctcttaaaaaatgcgctttcgcagggttgcacagaaaaggaaagtgcttctgcaaactgtgcgagcttcaaagaagactaggcggcttctaggtatgtggcagccccccgtgcacaatgtccccggcatcgagagaaactggtacgagagctgtttcagatcccatgctgctgtttgtggctgtggcgactttgttggccatcttaatcatctggcaactactctgggtcgtcctccacgtccggggcccccaggcggaccccgcacgccgcagataagaaacctgccagcgctcccggcgccccagggcgagcccggtgacagagcgccatggcgtggggcttctggggccgacgccgccggtggagacggtggagagcgcggcgcagacggtggagaccccgcagacgtaggagacgacgccctgctcgccgctttcgagctcgtcgaagagtaaggaggcgcggggggcggtggcgcagacgctacagaaaatggcgacgggggcgacgcagacggactcacagaaaaaagatagtcataaaacagtggcaaccaaactttattagacgctgctacataatagggtatctacccttaatattctgtggcgaaaatacaacctcccagaactatgccactcactctgacgatatgataagcaagggaccgtacgggggaggcatgactaccactaaattcactctaagaatactgtacgacgagtttaccaggtttatgaacttttggactgttagcaacgaagacctagacctgtgtagatacgtgggctgcaaactcatattttttaaacaccccacggtagactttatagtacagataaacactcagcctccttttctagacacgcacctcaccgcggccagcatacacccgggcatcatgatgctaagcaagagacacatactaataccctctctaaagacccggccaagcagaaaacacagggtggtcatcagggtgggcgccccaagactttttcaggacaagtggtacccccagtcagacctgtgtgacacagttctgctttccatatttgcaaccgcctgtgacttgcaatatccgttcggctcaccactaactgacaacccttgcgtcaacttccagattctggggccccagtacaaaaaacaccttagtattagctctacaatggatgaaactaaccaacaacattatgagacccacttgtttaatgaaactgcactgtataacacctttcaaaccattgctcagcttaaagaaacaggacaaactacagggatacatacaaattggaatagcgtacaaaatcctactccacttagttcctcaggtactaatgcaactagcagccgagacacttggtacaaaggaaacacatacaatggtagtattagtaagttagcggaagaaaccagaaaaagatttaaagctgcaacactagcagcactaccaaactaccccacaataatatccacagacttatatgaataccactcaggcatatactccagcatattcctatcagctggcagaagctactttgaaacaataggggcctactctgacattatatacaacccttttacagacaaaggcacaggcaacataatctggatagactacctaacaaaagaagacacaatttttgtaaaaaacaaaagcaaatgcgagataacggacatgcccctatgggcggcctgcacaggatatacagagttttgtgcaaagtacacaggagactctgccatcatttacaatgccagagtactaataagatgcccatacactgagcccatgctagtagaccactcagaccctaacaaaggcttcgtaccctactcattcaactttggcaacggaaagatgcccggaggcagctctaacgtgcccataagaatgagagccaagtggtacgtgaacatattccaccaaaaagaagtcttggagagcatagtgcaaagcggaccgtttgggtacaagggcgacataaaatcagcagtactggccatgaaatacagatttcactggaaatggggcggaaaccctatatccaaacaggtcgtcaggaatccctgctccaactccagctcctccgcggcccatagaggacctcgcagcgtacaagcagttgacccgaaatacaataccccagaggtcacgtggcactcgtgggacatcagacgaggactctttggcaaagcaggtattaaaagaatgcaacaagaatcagatgctctttacattcctccaggaccactcaagaggcctcgcagagacaccaatgcccaagacccagaagagcaaaacgaaagctcaggtttcagagtccagcagcgactcccgtgggtccactccagccaagaaacgcaaagctcccaagaagagacggaggcgcaggggtcggtacaagaccaactactcctccagctccgagagcagcgagtactccgactccagctccagcaactcgcaacccaagtcctcaaagtgcaagcagggcacagcctacaccccctattatcttcccaagcgtaaacaaagcctttatgtttgagcccgagggtcctaaacccatacagggctacaacgattggctagaggagtatactgtttgcaaatactgggacagacccccaagaaagctacacacagacatacccttttacccctgggcacctaaacccaaagaccaagtcagggtaacctttaaactcaactttcaataaaaattctaggccgtgggagtttcacttgtcggtgtctgcttcttaaggtcgccaagcactccgagcgccagcgaggagtgcgaccc

SEQ ID NO: 3020 - protein, 736 aa, Alphatorquevirus sp.
MAWGFWGRRRRWRRWRARRRRWRPRRRRRRRPARRFRARRRVRRRGGRWRRRYRKWRRGRRRRTHRKKIVIKQWQPNFIRRCYIIGYLPLIFCGENTTSQNYATHSDDMISKGPYGGGMTTTKFTLRILYDEFTRFMNFWTVSNEDLDLCRYVGCKLIFFKHPTVDFIVQINTQPPFLDTHLTAASIHPGIMMLSKRHILIPSLKTRPSRKHRVVIRVGAPRLFQDKWYPQSDLCDTVLLSIFATACDLQYPFGSPLTDNPCVNFQILGPQYKKHLSISSTMDETNQQHYETHLFNETALYNTFQTIAQLKETGQTTGIHTNWNSVQNPTPLSSSGTNATSSRDTWYKGNTYNGSISKLAEETRKRFKAATLAALPNYPTIISTDLYEYHSGIYSSIFLSAGRSYFETIGAYSDIIYNPFTDKGTGNIIWIDYLTKEDTIFVKNKSKCEITDMPLWAACTGYTEFCAKYTGDSAIIYNARVLIRCPYTEPMLVDHSDPNKGFVPYSFNFGNGKMPGGSSNVPIRMRAKWYVNIFHQKEVLESIVQSGPFGYKGDIKSAVLAMKYRFHWKWGGNPISKQVVRNPCSNSSSSAAHRGPRSVQAVDPKYNTPEVTWHSWDIRRGLFGKAGIKRMQQESDALYIPPGPLKRPRRDTNAQDPEEQNESSGFRVQQRLPWVHSSQETQSSQEETEAQGSVQDQLLLQLREQRVLRLQLQQLATQVLKVQAGHSLHPLLSSQA

SEQ ID NO: 3021 - protein, 148 aa, Alphatorquevirus sp.; identical to SEQ ID NO: 715

SEQ ID NO: 3022 - protein, 59 aa, Alphatorquevirus sp.; identical to SEQ ID NO: 716

SEQ ID NO: 3023 - DNA, 2893 bp, Alphatorquevirus sp.
gtcggtgtctacctctataagtcactaagcactccggggcaattcgggctcgggactggccgggctatgggcaaggctcttaaaaaagctacccccttaactatgtttcttggcagagtttaccgccgccagaaaaggaaagtgtttctgcccctggtgcatactccacagaaaacaccttcctacatgaaccgctggttacccccggcacacgatgcccgcggaattgagaggcagtggtatgactgtgtttggcgcagtcacgctgcttgctgtggctgtggtgattttattagtcatattaatgatctcgcgcatcgttttggacgtcctccgggttccagaccacctgctactccccagccgccggctgtgagagccctcccggcgctgccggcccctgagccatggtctggcgcagggggcgacgctggcgccggtggagatggcgccgcaagccgcggtggaggagatggagacgctggagacgtcgcagacgaagacctgctagacgccgtcgacctcgcagagtaaggagacgcaggggagggtggcggcgctcctacagacggtggaagagacgcagggggcgacgcagacataaaaagaaacttatactgactcagtggcaacccgcggttgtcaaaaaatgcagaatagtgggctacgaccccataataatatgtggactgaacagaaccagccacaactccacaactcacgcagaggactacactacaggcaaccaggcctttggggggggactgtgcaccaccaaatacactctaagaatactgttccaagagtacatggcccaccacaactactggacggccagcaacagagacctggagctggccaggtacctgggggcttctattatattttttaaacaccccacagtagactttgtagccagagtcagaaccatgcctccctttaacgacactgatatcacagccgcatccctgcacccgggaatgcttatgctagctaagaaaaaaataattattcccagtctgaaaaccagaccaagcaaaaaacactatgtaaagataaagataggggcccccaagctatttgaagataagtggtactctcagagagacctctgtgacacaagtcttgtggttatagaggcaacagttgcagacttgcaatatccgttcggctcaccactaacgaacagcatctgttgcaacttccaggttcttaacagcaactatgacaacgccctgagcacccttataggaactcagggagacaaagacagagataaatgctatagatttctgttaaatacaatcacctactataacacctctcaagtactagcacaactaaacaagttcttacctacctccaacacacttaacctctctgaagcaaatgccatccattccattaacccatccaaccaaacagaaaatacatacacaaccacaaggatacagagacacaacaatacactgtatggaggagcagcatactttaccacatcaacacaaaataatttgccaccagacaaaatgaaagaggccaacagagcatacactgcagcagctaaaaaaattctaggcaattggaattttactaacatgaactcatcctcagaacaggacttagcaggcctaaactactttgactattacacaggcatgttttccagcatatttttagccagcggcaggtcaaactgggaggtaaaaggcagctacacagacataacatacaaccccctagtagacaagggagagggcaacatgatctggatagactggatcaccaaaggtgacaccatctactctgaaaataaaagcaaatgcttgatcagagacctgcccatgtgggccctgtgctatggctacgcagactatgtacttaagtgcacaggagtatccagcataaaaaacgaggccagaatagtcatgaggtgtccctacacgtacccccaactaataaaacacacagaccccaagtttggcttcatagtgtacagtgacaactttggacgcggacgcatgccggggggcgaccctgtaccgagcaccagaaacagagtgcactggtacatcaccataacccaccagactgaagtgctagagtgcatctcccagaccggaccgtttgcctaccacagcgacgaacgcaaagcagtactgactataaaatacaacttcagatggaaatggggaggcaaccctgtgttccaacagattcttagagacccctgcacgggatcctccggctccggtccccgtagagtgcctcgctcaatacaagtcgatgacccgaagcaccagacaccagagtacatgtggcacgcgtgggacttcagacgtggactatttagccagaaaggtattaagagagtgtcagaacaaccaacagatgttgaccttcctacaggcaggggcaaaagacccaagagagacacagacggcccgcaagagcaaggccaagaagaaggctcgtgttccatcagacgagtcctccagcagtggctccactccagtcaggagcagagccaagaaagcgaagaagaagcagccccgacgacgctctcgcaagagctacaaaaacaactcaagcagcagcagctcatgggaaagcagctccgacagctcagtctccaactcgcccaagtccaagcggggggacaccttcacccccttttacaatgccatgcataaataaagtatacatgtttccccccatgacctctactccctccagcagagactggaaagaggagtacgaggcctgcagagtctgggacagacctcccagaaacgacctaagaaggccccctttctatccctggatgcctcctacgcacaatgtaagctttaagctctccttcaaataaatgttggccgtgggagtttcactt

SEQ ID NO: 3024 - protein, 761 aa, Alphatorquevirus sp.
MVWRRGRRWRRWRWRRKPRWRRWRRWRRRRRRPARRRRPRRVRRRRGGWRRSYRRWKRRRGRRRHKKKLILTQWQPAVVKKCRIVGYDPIIICGLNRTSHNSTTHAEDYTTGNQAFGGGLCTTKYTLRILFQEYMAHHNYWTASNRDLELARYLGASIIFFKHPTVDFVARVRTMPPFNDTDITAASLHPGMLMLAKKKIIIPSLKTRPSKKHYVKIKIGAPKLFEDKWYSQRDLCDTSLVVIEATVADLQYPFGSPLTNSICCNFQVLNSNYDNALSTLIGTQGDKDRDKCYRFLLNTITYYNTSQVLAQLNKFLPTSNTLNLSEANAIHSINPSNQTENTYTTTRIQRHNNTLYGGAAYFTTSTQNNLPPDKMKEANRAYTAAAKKILGNWNFTNMNSSSEQDLAGLNYFDYYTGMFSSIFLASGRSNWEVKGSYTDITYNPLVDKGEGNMIWIDWITKGDTIYSENKSKCLIRDLPMWALCYGYADYVLKCTGVSSIKNEARIVMRCPYTYPQLIKHTDPKFGFIVYSDNFGRGRMPGGDPVPSTRNRVHWYITITHQTEVLECISQTGPFAYHSDERKAVLTIKYNFRWKWGGNPVFQQILRDPCTGSSGSGPRRVPRSIQVDDPKHQTPEYMWHAWDFRRGLFSQKGIKRVSEQPTDVDLPTGRGKRPKRDTDGPQEQGQEEGSCSIRRVLQQWLHSSQEQSQESEEEAAPTTLSQELQKQLKQQQLMGKQLRQLSLQLAQVQAGGHLHPLLQCHA

SEQ ID NO: 3025 - protein, 155 aa, Alphatorquevirus sp.
MGKALKKATPLTMFLGRVYRRQKRKVFLPLVHTPQKTPSYMNRWLPPAHDARGIERQWYDCVWRSHAACCGCGDFISHINDLAHRFGRPPGSRPPATPQPPAVRALPALPAPEPWSGAGGDAGAGGDGAASRGGGDGDAGDVADEDLLDAVDLAE

SEQ ID NO: 3026 - protein, 62 aa, Alphatorquevirus sp.; identical to SEQ ID NO: 548

SEQ ID NO: 3027 - DNA, 2893 bp, Betatorquevirus sp.
accaccgaaaaggtgagtgaaaccaccgaagtctaggggcaattcgggctagatcagtctggcagaacgggcaagaaacttaaaataatattcttttttacagaaatgagcaccttcttaacaccatcaatctacagcaaaaatggcttagaaaaccaatggctaaactcaatttggaacatacatgaccttatgtgtggatgcaacgactgcttcaaacacttatttgatatacttaaaagaaaaggaaacctaccatgcctcccttcaattactaccgaagacgatactacaaaagaccccaatggagatggcgccgcagacgctggactagaagatggagaactagaccgcttattcgcagaggatacacaagaagacgaagggtaagaagacgaaaatttttaaaatacaaacataaaaaactaaaaactataactgtaagacaatggcaaccagataatataagaaaatgtaaaattaaaggacaactatgcctattaacatgtggacaaaacagaattaacaataactttatattaactgctgaaagtataatacctgttggagaaccgggagggggaggcttttcaataatgcaattaacattaagagctttgtatgacgaatatacacattttagaaactggtggacaacaagcaactgtggactgccattagtaagatactctggttgcagtattaaattttattgtagcaatgacactgactatatagtaacagcacaacacacaggaccgtttgaagtgactgtagactcatatttaaacacacaacctagcagacacataatgaacagaaaatcatttgttataccaaaactaaacccaaacaaaaaaaaaagaccatacataaaaaaaaaatttccacctccagcactattttataacaaatggtactttcaacaagacatactaaacactccactaattctactatacatatcagctacaagctttgaccaaatgtatgctccaaacgaccaaattagcacaaacataacatttttttcactaaacacagacttatttcaaaatccacactgggaaaaagacaataatgaaccatactatccaaaagtagtaggcacacaaaacacaggactatacagctcagaccaacattttagtaacgacagacaaataacatttaatcacttatatccactattaaacacaacacaatacaaagaaataccacacgacaacgcaaactttaccagcatagaacagtataacaacccaaagaactggtacaatccatttacaattacagcacatgaccaacatttagaaacaccaatttattatggaattcaccctacaacagaagatcaactaaaaggaacagggacaccacaaccatcaattttaccaataacaggtttataccaagaatgtagatacaacccctttagagacaaaggaataggaaatattttttatataaaatgcactaaaaaacaagaaggctcatttacaacacttccaacagacagcagattaatactaagagactttccaatatggctagcaacatggggatggactagctggttagaaaaatctaaacctgtatatcacctacatgaagactaccaattagtaatacaatcaaactacatagaaccaaaactaagatgctacgtaccactagacatgtactttacacacaacgacggaaaaaacctaacacaaacagataaagcacactggcacccaaaatttgcttttcaaacagaaacactaagcaaactagcagaaacaggaccagcaactcctaaaattaacaaacaaaaacaaatacaaatacatgcactatacaacttttactttaaatggggaggatgcccagcaccaatggaaactatatgtgatccatccacacaggaaaaattccccacgccctataacatcatacaagaacttaatgtcgaggatccagaaacaccaaaagaaacatacatatacaaatttgacgaacgagacggataccttacaaagacagctacaaaaagacttaaacaagacattgaaactacaaaatattttacagaatatggaagcaaagacccgcaactacaagtctacccaccaacgaatcaaacgcacgaagaaacagaagaaacaacaccgaaaaagaaagaactactccaacagctcgacctcctcagagaccaccagcaacagctccagcgaagaatcaacagattaacaaaaagacaaaaattattccctatagtgtagacatgtttggacaaagaaaagtaaaaaatcgtagatttacacctaaagaatttaaagaggaattagaagaagcaggaatatggcgtagacgacctagatcatacatttttgatccccctgattataaacttgatgttattgaacctattgtaaactttggtgtaaattttgaattaaactttaaattctaggccagcaaatattcacttgtcggtgtccatttatataagtataactttaataaacatccaccacactccctaatacgcaggcgcacaagggggctccgcccccttaaacccccagggggctccgccccctaaaacccccaagggggctccgcccccttacaccccctaattaatattcaacaggaaaaccacataattagaattgccgaccacaaacggtcaaccgttacacttacttctcctttttgctacttacttcccttttttagagccacgcctactaatcaattattaatcagacgctattcctgggaggagcaacatacctatataaacaagtacactgacgaatggctgagtttaccctgccagacgaagacggcatcacatcagtgactgcaggctgatcttgggcgggagccgaaggtgagtgaa

SEQ ID NO: 3028 - protein, 669 aa, Betatorquevirus sp.
MPPFNYYRRRYYKRPQWRWRRRRWTRRWRTRPLIRRGYTRRRRVRRRKFLKYKHKKLKTITVRQWQPDNIRKCKIKGQLCLLTCGQNRINNNFILTAESIIPVGEPGGGGFSIMQLTLRALYDEYTHFRNWWTTSNCGLPLVRYSGCSIKFYCSNDTDYIVTAQHTGPFEVTVDSYLNTQPSRHIMNRKSFVIPKLNPNKKKRPYIKKKFPPPALFYNKWYFQQDILNTPLILLYISATSFDQMYAPNDQISTNITFFSLNTDLFQNPHWEKDNNEPYYPKVVGTQNTGLYSSDQHFSNDRQITFNHLYPLLNTTQYKEIPHDNANFTSIEQYNNPKNWYNPFTITAHDQHLETPIYYGIHPTTEDQLKGTGTPQPSILPITGLYQECRYNPFRDKGIGNIFYIKCTKKQEGSFTTLPTDSRLILRDFPIWLATWGWTSWLEKSKPVYHLHEDYQLVIQSNYIEPKLRCYVPLDMYFTHNDGKNLTQTDKAHWHPKFAFQTETLSKLAETGPATPKINKQKQIQIHALYNFYFKWGGCPAPMETICDPSTQEKFPTPYNIIQELNVEDPETPKETYIYKFDERDGYLTKTATKRLKQDIETTKYFTEYGSKDPQLQVYPPTNQTHEETEETTPKKKELLQQLDLLRDHQQQLQRRINRLTKRQKLFPIV

SEQ ID NO: 3029 - protein, 94 aa, Betatorquevirus sp.
MSTFLTPSIYSKNGLENQWLNSIWNIHDLMCGCNDCFKHLFDILKRKGNLPCLPSITTEDDTTKDPNGDGAADAGLEDGELDRLFAEDTQEDEG

SEQ ID NO: 3030 - protein, 62 aa, Betatorquevirus sp.
MFGQRKVKNRRFTPKEFKEELEEAGIWRRRPRSYIFDPPDYKLDVIEPIVNFGVNFELNFKF

SEQ ID NO: 3031 - DNA, 2893 bp, Betatorquevirus sp.
cgggtgctgaaggtgagtgaaaccaccggaatcaaggggcttaatgggctgaattagtcttggcggaacgggcaactaacttaaaatttttacagatgacagaattatggaaacaaccaccatacggacctagaggatttgaaaaccaattctacaatttaatctttcatggacacgatctttgctgcggctgcaataacaccacccttcatatccttgctttaattaatcaaaaaaacaataaaaacaaactttccttaaaagaactcagaaaaatagaatgccaccttactggagaagaacgtggagacgacgaagacaacgatggcgtagaagaaggccttttagaccaactatttacagaagaagataccgccgctactggagaccctactatggggtaagaaaaaaaaaaaaaactataaaaattaaacagtatcaacctaagtatataagaacttgtaaaataaaaggacttaaatgcttatttaatggaagtgcagaaagaaaaagtaataactactggcaatatcctagaactgtagtacctgaaaaatttccaggaggcggcggctggggtctacaagtaatgagtttaagtagtttatatgaagactatgaatatttagaaaactactggactgtatcaaatgcaggatttccactagctagactgataggaactaaactaacattttatcaacacgaatacgtagactatgtcgtagaagtagaaaactgttggccactagtagatacacctttaaaacatgcaaactctcaaccacaaagaatgcttttaggaaaaaagaaaataattatgcctagcatacaaacaagaccacttaaacgcagaaaaaaaaaaatatttgtaccaccaccatcacaaatgtacaaccactggtattttcaaaaagacatttgcaacacaaaatttctaatgataacagcaacagcttgcgacttagacaactactacatctcaccaacatggcaaagtacctgtattacactatacacattaaacacaaacctatttaaaaatgcagactttcaacacccatcagccacaacaggataccaaccaaaaaactcattttacttatatggcactacaaacggctcaggaacaccaacttcaaaaagccaactagtatacttaggagacagcaaaacatacacacaaggaaaagcaggaaattttggaaaagaaaactggggtaatcctttttatgaacattaccagggaaccataccaacatacacaagcagtaaaccaccaacagattcagcatgggaagagcaagatatatctaaatatttaacaccaactcactatccaccactagttaaaataagatactgtccagcaaaagataacggctctacaaacagagcatattttaaagataactacagaacacgaggagacacctcatgggatccaccacaagataaaaacttaataattgatggattcccattatggttaatgttatggggctggccagactggcaaaaaaaactaggcctcataaacagaatagacaaagattatgtattaataatacaaacagaccaatttacagaaaaatttccatactacatattattagatgaatcctttcaaataggcagaggaccatacgacacagaccaaacaacagaagacttattgaactggtatccaaaattttggtaccaacaaaaatctatagaactcatttgctcatgcggaccaggtgtaagcagagtaccaccagacaaatcaatacaagctaaaatgagctatactagtatatggaaatggggtggatgtcctagtacgctagaaaaagtttatgatccctgttcacagccacgatgggccactcccgataacatcacaccaggacttaaaatccagaatccagaaacagatccctctcactacatctatgactgggacgtcagacgggatattatcaccccaaaagctgctaaaagacttaaaaaataccaaacagatgataacctattacacaaatctacaggaacagcaagcaatgtaccagcagttctgttccaaccaccccaagaaaacagccaaacatcgacatcggaagaagaagaagaagagacactccaagaaaagctcctccgactcagaagacgacaattacagctccacaagcagctcctcaaactagctacaaaataatacacaaacctgtaaaaataaacttatttggtgacccttatcctgtaaaacccagacgctttacgcctgcagaaagagaaacagaaaaacaagtatgtgcttggcttaaacgcccagaaagggcattctttactgatcccccaatctatcctttatttccgcttgctcctcttgctaactttgacctcaaatttaaagatgaataaacaaggccaacaatattcacttgtcggtgtccatttatattagtttaacttaaataaacatccaccactctcccaacattagggcctagcaagggggctttaacttaaataaacatccaccactctcccaacattagggcctagcaagggggctacgcccccttacacccccagggggctccgcccccttaaacccccagggggctctgccccctaacccccggaaaccacataatttgcattgccgaccacaaacgaatatgcaaatttacttccctaaaaacttaaccacaaaatttgcattgccgaccacaaacgaatatttaaatttacttccctaaaactatgaaaactccacctactaattaattaatacacaccatcatagtaggaggagtctaataagtatataacaaagtacacttccgaatggctgagtttatgccgccagacggagcggagatacgaactctacgctaattcaggg

SEQ ID NO: 3032 - protein, 639 aa, Betatorquevirus sp.
MPPYWRRTWRRRRQRWRRRRPFRPTIYRRRYRRYWRPYYGVRKKKKTIKIKQYQPKYIRTCKIKGLKCLFNGSAERKSNNYWQYPRTVVPEKFPGGGGWGLQVMSLSSLYEDYEYLENYWTVSNAGFPLARLIGTKLTFYQHEYVDYVVEVENCWPLVDTPLKHANSQPQRMLLGKKKIIMPSIQTRPLKRRKKKIFVPPPSQMYNHWYFQKDICNTKFLMITATACDLDNYYISPTWQSTCITLYTLNTNLFKNADFQHPSATTGYQPKNSFYLYGTTNGSGTPTSKSQLVYLGDSKTYTQGKAGNFGKENWGNPFYEHYQGTIPTYTSSKPPTDSAWEEQDISKYLTPTHYPPLVKIRYCPAKDNGSTNRAYFKDNYRTRGDTSWDPPQDKNLIIDGFPLWLMLWGWPDWQKKLGLINRIDKDYVLIIQTDQFTEKFPYYILLDESFQIGRGPYDTDQTTEDLLNWYPKFWYQQKSIELICSCGPGVSRVPPDKSIQAKMSYTSIWKWGGCPSTLEKVYDPCSQPRWATPDNITPGLKIQNPETDPSHYIYDWDVRRDIITPKAAKRLKKYQTDDNLLHKSTGTASNVPAVLFQPPQENSQTSTSEEEEEETLQEKLLRLRRRQLQLHKQLLKLATK

SEQ ID NO: 3033 - protein, 114 aa, Betatorquevirus sp.
LAERATNLKFLQMTELWKQPPYGPRGFENQFYNLIFHGHDLCCGCNNTTLHILALINQKNNKNKLSLKELRKIECHLTGEERGDDEDNDGVEEGLLDQLFTEEDTAATGDPTMG

SEQ ID NO: 3034 - DNA, 2893 bp, Betatorquevirus sp.
cgggagccgaaggtgagtgaaaccaccgaagtctaggggcaattcgggctaaatcagtctggcggaacgggcaagaaacttaaatataactttattttttagatatgttctcttcatggaagacacctacatggtcacagagacaacaagaactccaatggatgaacatcattaacgctacacacgaccaattctgcaactgcgacaaccctacatttcaccttatctactgcattaacaaattttcttcagctcctaaacctgaaaaagatcttgctaatattcaatgcctccttactggcgtccccgttactacaaacaaagacaaagaagaagacgaccaaggtggtttcctagacggagaactagaagatttattcaaagaagaaaatggagaaaacatcgccactacttcagacgcaaggtcaaaagacgccttcgttctaaaaaaccaaaaaaagtaactgttaaacaatttcagcctacttctatgcaaagatgtaaaattataggatataaatgcttgtttcagggaagtacaaaaaacttacctaccaactatattcaatatatttacagtactattcctccatactggccagggggaggtggatggagtataattgttttcagtttaacctctttatttgaagactgggaacatctagaaaatatctggactaaatctaatgttggattaccattagtgaaatatagaggctgtgtactaaaattttatcaaagttatgatacagactacatagcagtttatgacagatgctggccaatgatagatacagacttaacacatccagacagctgtccaagtagaatgttacaaaagaaacataaaacagtaataccttccagaaaaacacagacaagaaaaaaaccatacaaaaagattttcattccaccaccagcacaaatggaaactcaatggtactttcaaagagacatatgcaaactacctttatttatgttaacaacaaccagtgttgacttactttacccattttgctcaccacatgccaaatctaacaatattaccataccatgcctaagctcatttgtttttcaaaatttaaactttgttgactacggtacaacaggatactcaccaaaaaataagtctccaacagaaaacacaccactatatttgtatgcatcacataatgataacataactgacttaaaaccaaccagcataaaacaattaattccactgataaacacaagagattatcaaccaggaaatccaatggcaaacactgcttgggaaaataaaccagaaaactggggaaatcccttttactatagctacattacagacaacataactgatgatacatatacaatttacattactaccactaatacagcaaccatgaaaaacggaataggagctgacatttccaaaaataatacaattaccaaattaacaggaccattaatttactactgcagatacaaccctgctaaagacaaaggcgacacaaacaaaatgtacctagttagcaccagtacacaagataaaactataacaccacctgcaaacacaaacttacaaatagaaggcttacctctatttgtactaacatggagttggacagactgggtcattaaagctaaaataaccccagacataaacaaatacagaaccctagttatagaaacaaaaatgctagaaccagaactctcacactatataccaatagacacagactttttgcaaggaaaagacccctacacaccacaacaaacagaaggagtaccacactcacccaacttttacaactcaaaaaactggcacccaaaatttatgtttcaacaacaaacagtaaaaaacatagcaatgtcaggaccagcagtacacagagacaccaaccactcatacattcaagcatactgcaaatacaaatttttatttacatggggaggatgccctaaacaacttccaaaaccatttgaaccttgcttacagccaaaatggaccacagccaataacatctctggaagacttgaaatcacgaatcctaacacacaaccacaaacagaactgtacgcctgggactgggaagaagattttattaaaacacaagctatcaaaagagttacagaatacacagaaactgataaaccaactttcttctctacagcaaacaaaaacaacccaaaagtactcgtcaaagtccaagaaaaagaagacccagcagagaaagaggagaaagagatattccagcagctccagcagctccgactccagcgacagcagctgcagctccaaatcaacaagtgcctaaaattttaataaaagactctaaaatacgagtacacttatttccacccttagcaaaaaataggagaatgacaccatgggaaaaagcacaagaaaaagaagacgcagctatatggaaaagaccacaaagagactttatttttgatctacccttttatcccggtataccccctacacctttagtaaactttgacttaaaatacaaatatgaataaacaaggccaacattaattcactctcggtgtccttttatttaagtaaaaacctatataaacatccaccgcctccctataattcgggcgccaaaattcaaagggggctccgcccccttacacccccaagggggctccgcccccttacaccccctcaacaggaaaaccacataattagaattgccgaccacaaaccgtcacttacttctgctttttaacaaacttcctctttaacttattattattcattacattaattaataatcaccgtaaatccggggcggtaccaccaaactatataaccaactacacttccgaatggctgagtttatgccgccagacggagacaggatcactacagtgattccgggctgattttggg

SEQ ID NO: 3035 - protein, 674 aa, Betatorquevirus sp.
MPPYWRPRYYKQRQRRRRPRWFPRRRTRRFIQRRKWRKHRHYFRRKVKRRLRSKKPKKVTVKQFQPTSMQRCKIIGYKCLFQGSTKNLPTNYIQYIYSTIPPYWPGGGGWSIIVFSLTSLFEDWEHLENIWTKSNVGLPLVKYRGCVLKFYQSYDTDYIAVYDRCWPMIDTDLTHPDSCPSRMLQKKHKTVIPSRKTQTRKKPYKKIFIPPPAQMETQWYFQRDICKLPLFMLTTTSVDLLYPFCSPHAKSNNITIPCLSSFVFQNLNFVDYGTTGYSPKNKSPTENTPLYLYASHNDNITDLKPTSIKQLIPLINTRDYQPGNPMANTAWENKPENWGNPFYYSYITDNITDDTYTIYITTTNTATMKNGIGADISKNNTITKLTGPLIYYCRYNPAKDKGDTNKMYLVSTSTQDKTITPPANTNLQIEGLPLFVLTWSWTDWVIKAKITPDINKYRTLVIETKMLEPELSHYIPIDTDFLQGKDPYTPQQTEGVPHSPNFYNSKNWHPKFMFQQQTVKNIAMSGPAVHRDTNHSYIQAYCKYKFLFTWGGCPKQLPKPFEPCLQPKWTTANNISGRLEITNPNTQPQTELYAWDWEEDFIKTQAIKRVTEYTETDKPTFFSTANKNNPKVLVKVQEKEDPAEKEEKEIFQQLQQLRLQRQQLQLQINKCLKF

SEQ ID NO: 3036 - protein, 119 aa, Betatorquevirus sp.
MFSSWKTPTWSQRQQELQWMNIINATHDQFCNCDNPTFHLIYCINKFSSAPKPEKDLANIQCLLTGVPVTTNKDKEEDDQGGFLDGELEDLFKEENGENIATTSDARSKDAFVLKNQKK

SEQ ID NO: 3037 - DNA, 2892 bp, Betatorquevirus sp.
caggtaccgaaggtgagtgaaaccaccggagttaaggggcttattgggctgaagcagtattgacggaacgggctagaaactaaaaaatatatattttttacagatatgagcagctttcttacaccggcagtatacagcaacaatggattggaaaaccagtggataaactcaatttggaatatacatgacctgttttgcggctgcaacaacgccattaaacacctttttaacatcttaaagaaaaaacaaaccctaccatgcctgccttcaatcgatggcgtcgatactggtacccaaactggaggagatatcgaagacgacgttttagaaccaggagatttagaaaagctattcgaggaagatttcgaagaagaagatgggtaagaagacgctttaaaaactatagaaaaaaagctaaaaaaataactgtaaaagaatggcaacctaaaaaaattagaaaatgtactatcaaaggacctttatgcttatttgcttgcggtagattctgtatagctaataactttactttatttgctgaatcttatataccagaaaaaaactgcggtggtggggcatggtctattatgcagttaacattacaagctctgtgggacgaatatgtaaaatttagaaactggtggacagtatctaacgatggattacctcttgttaaatatatgtactgtaaatttaaattttatagaagcccatttacagactatatagtaataccttctctatgtcctccattttctgtaactagagatgactacctaaacacacaacctttaagagcacttatgaacaaaaacaaaataatagtgcctaaacttagagaaaacagtaaaagaaaatacattaaaagaaagttttacccaccatcattatttcaatctaaatggtactttcaacaagacatttgtaaatttccatttatagtactaaaaacatcagcatgttcatttgaccaattttatcaaccagatgacatgctatcttataatataacattatactcactaagcacattttttgaaaaccctagatttgaagaaaaaacagataatggctactctcctaaaatagcatccggaggcacattagatggtcaacaatactacctatatggaacagaaaacggcacaaataatccaacttgggcacaattaacacaactaacaaatacacaaacatttactaaaggcacaccttatggaatagaccaaaggggaacaccaggaaacccttttcatcctgcatggattgctaatgaggattcaaatatatactactcaacacaacaaccaacaaagataaccaatataaatgcaccagcaactaacataacaaaattaacacacttaatagaaaaatgcagatataacccacttagagatgcaggaaagggcaacaaagtatactttaaaagctcatccttacaacaaggaacaatgaatgacttaccaacaaacttaaatatacttatagaagaccttcctttatggataatattttggggatggattagctggcttagaaaactacatcctataaaccacatagaaacagaatacatgtttatagttaaatcaccatatataacaccagctagaccatggtacttatttctggactactactttttacaaaaaaaacatgacgatccactaacagaaacagaaagagcacactggtttcctagatacgaattccaaaaagaagtagaattctactttgcccaaagtggtccatgtgcaccaaaaattaactatacaaaatgtatacaagtaaactcaatgtattcattttttttaaagtggggaggatgtccagcaccaatggaaacatttacaaacccatgtgaacaagaaagatttcccgtccccggtgcaatcccacagtcagctacaatccaaaatccagaattatcaaagtaccaatacctatatgaatgggacgaaaaagaaggtatcattacaaaaccaactgcaaaaagaattaaaaaagacttctctcctacaaaatatgttacagacagtggagccaaagacgtcccattccaaacacaaacgacagaaagcgacgaaacatcgacagaggaagaaacgaaaacatcgctccagaaccagatctccctcctcaagctccgccagcgaaagctcaagcgaaagctccgaaagtaccgattaatataaaaactattaaactaacacaaaatatttttggagaatcaacagtaaaaaataggagaatgactactaaagaattacaagaagaaaaaatagaagcaaaactgtggggtagaccagaaagaacatttatttttgatattccaggtccatactataacactgtaccagaaccacttgtaaatttcaatctaaacttcaaataaacaaggcccattaattcactaaccggtgtctgttcctttaagtaaaaaccttaataaacatccatgacacgcccaaataatgggcgccaaaatttaaagggggctccgcccccttatacccccaagggggctccgcccccttacacccccaagggggctccgcccccttacacaagggggctccgcccccttacacccccaagggggctccgcccccttacacccccaagggggctccgcccccttaaaccccctaattaatattcaacaggaaaaccacctaattagaattgccgaccacaaactgtcagccgttacaacaacttccctattttacactaaacttcctcttttttagaaccacgcctcctaattcattattaatcagacgcatatcctgggaggaggaacacctgtatataactaagtgtactgacgaatggctgagtttaccccgtcaaacggagacgagaaaagacttctcggctgcttcaggg

SEQ ID NO: 3038 - protein, 645 aa, Betatorquevirus sp.
MPAFNRWRRYWYPNWRRYRRRRFRTRRFRKAIRGRFRRRRWVRRRFKNYRKKAKKITVKEWQPKKIRKCTIKGPLCLFACGRFCIANNFTLFAESYIPEKNCGGGAWSIMQLTLQALWDEYVKFRNWWTVSNDGLPLVKYMYCKFKFYRSPFTDYIVIPSLCPPFSVTRDDYLNTQPLRALMNKNKIIVPKLRENSKRKYIKRKFYPPSLFQSKWYFQQDICKFPFIVLKTSACSFDQFYQPDDMLSYNITLYSLSTFFENPRFEEKTDNGYSPKIASGGTLDGQQYYLYGTENGTNNPTWAQLTQLTNTQTFTKGTPYGIDQRGTPGNPFHPAWIANEDSNIYYSTQQPTKITNINAPATNITKLTHLIEKCRYNPLRDAGKGNKVYFKSSSLQQGTMNDLPTNLNILIEDLPLWIIFWGWISWLRKLHPINHIETEYMFIVKSPYITPARPWYLFLDYYFLQKKHDDPLTETERAHWFPRYEFQKEVEFYFAQSGPCAPKINYTKCIQVNSMYSFFLKWGGCPAPMETFTNPCEQERFPVPGAIPQSATIQNPELSKYQYLYEWDEKEGIITKPTAKRIKKDFSPTKYVTDSGAKDVPFQTQTTESDETSTEEETKTSLQNQISLLKLRQRKLKRKLRKYRLI

SEQ ID NO: 3039 - protein, 92 aa, Betatorquevirus sp.
MSSFLTPAVYSNNGLENQWINSIWNIHDLFCGCNNAIKHLFNILKKKQTLPCLPSIDGVDTGTQTGGDIEDDVLEPGDLEKLFEEDFEEEDG

SEQ ID NO: 3040 - DNA, 2892 bp, Betatorquevirus sp.
cgggtgctgaaggtgagtgaaaccaccgaaatcaaggggcaattcgggctaattcagtctggcggaccgggcaagtgtattaaattaacttattttacagatgagcaagcacctaaaaccttcatactaccaaggaagagcagcagaaactgcctggattggactagttttttcaacacacgaccaaatttgctcctgcaccgaccccgtaaaacaccttaactgccttgtctcccatcaaaaatgcccccattttggagacaaaaatattaccgccgcaactactggggatggaaaagaagacgaaatgcctttcgacgcagaagatctagaaaaacttttcgaggaaaaagaagaagacgaccggtaagaaagactaaatttctaaaaaactttaaaaagaaatttaaaaaactaagacttaatcaatggcaaccttcgtacattagaaaatgttatataaaaggatttctactgttatttgaagcaggacatggattctttgctaataacttttgttgctataaagaaagctacacacctcacaatcaaccttcaggaggcgggtggagcatacaacaactaagtttaggaaacctatttacacaaaatcaatattttatgaatcactggtcacacacaaacaacggtcttaacttggttagatacctaggagcacaaataacattatatagacaacctaacatagactacatatttacattttttaatgaacaacctcaaaattcaggaaaatactggtacccaacatttcaccccatgaaaatgctaaactataaaaacaaagtaacaatacccagcttaaaaacacaaccaaacaaaagaaaaatatacaaaaaaatatttttaagaccaccaaaactactaaaaaaccagtggtactttgcacaacatttatcctcatatccactaataagctttgccgctgttgctactagcctaaaccatatgtttctcagctcaaactcaaacaacaacaactgcactgttataacacttaacacagacttctttaaaagaagcgctttccaatatacaggagacaaaggctacacaccacaagaaaatctatatatatatggacttccaaatggagaaccagacttaaaaaacgaaaaattaaaaaatgttatatacttaggatcctcatacagagagagaggagttccaattggcacacaaccgttctccaattatacaaaagcacaatggggaaacgtattttggcaccaattttttaaccatgatctcattagttttgttataaacaaaagcccagaaacctttttaaaacaaactagaactccaagtgagactatcactgatataccacaaataaaattccacccatatttttacaaagaaagatacaatccatacaaagacaaaggagacggaaacatggcctactggctttcagtctcagacgccacaaaaaacaattgggaaccaccagcagataaagacttaataatatcaggatatccattttggcttatgctatggggctgggaagactacactaagaaatgcggcaaatttagagactttgacaacaatgctatactagtactgcaatccagattcatatcaggaccacacaaattttacgtaccactaagtgacagttttacacaaggattagctccatatgaaaatgacccagaagaaataaccacagaagacaattcacactggtttccaaaatggaaatttcaaaaagaagctataaatgctatactaatgacaggtcccggggtagttaaagctgaaggacaaaaatcaatacaagcatttctaaaataccgctttttttttaagtggggaggcaactcatcaactctcgaaaccatcagtgacccaaactcacaacccattactcccagtccccctggattcctcctacaaaatgaaattactgacccaaaaacacccatcgaaaacctcctctacaaatgggacattagaagacacttccttacacaagcggctacaacacgaattaaagaaatcgaaactcatgatgactgtttgttcacagatggaacaacaacttcaacagactacccaccaccacaaacaacaccacaagagaaaacgaccccgaaagaagaaaagcaagcattactcctccagctccaacagctcgagcaattcaacaccgaactacagcagcgactcctccgactccaacaactaacagcagaccaataaactttactttaattaaaaaagcatacctgtttacacctccaaaaaccaaacttacaccaataaaagggagggactgggaagatgaattgtatatatgtaaatggctaaaaagacctatgcgtagattcctagaagaccccccaatatacccatggtgtgttcctgaaccacttgtaaactttaaccttgtaaaaggtttcaataaaggccagcattaattcaccctcggtgtctgttcctttaagttaaaccttactaaaccaacaccgcctccctaatacgcaggcgcacaagggggctccgcccccttaaaccccccgggggggaaaccccccctaagcccccccaaaaccacaaaattaacatggctaaccacaaactgaacaggaaaccgcaaaatttgcattgcccaccacaaacggtcaacttctgcttttcacaacatacttcctctttatgtcatgaatatttattaacattaattattaaacactgtaattccggggaggagccaaacaactataaaactaactacacttccgaatggctgagtttatgccgccagacggagcagctaacgaagcttagcagctgaatttgggcgggtgctgaaggtgagtgaaaccaccgaaatcaaggggcaattcgggctatggg

SEQ ID NO: 3041 - protein, 670 aa, Betatorquevirus sp.
LPCLPSKMPPFWRQKYYRRNYWGWKRRRNAFRRRRSRKTFRGKRRRRPVRKTKFLKNFKKKFKKLRLNQWQPSYIRKCYIKGFLLLFEAGHGFFANNFCCYKESYTPHNQPSGGGWSIQQLSLGNLFTQNQYFMNHWSHTNNGLNLVRYLGAQITLYRQPNIDYIFTFFNEQPQNSGKYWYPTFHPMKMLNYKNKVTIPSLKTQPNKRKIYKKIFLRPPKLLKNQWYFAQHLSSYPLISFAAVATSLNHMFLSSNSNNNNCTVITLNTDFFKRSAFQYTGDKGYTPQENLYIYGLPNGEPDLKNEKLKNVIYLGSSYRERGVPIGTQPFSNYTKAQWGNVFWHQFFNHDLISFVINKSPETFLKQTRTPSETITDIPQIKFHPYFYKERYNPYKDKGDGNMAYWLSVSDATKNNWEPPADKDLIISGYPFWLMLWGWEDYTKKCGKFRDFDNNAILVLQSRFISGPHKFYVPLSDSFTQGLAPYENDPEEITTEDNSHWFPKWKFQKEAINAILMTGPGVVKAEGQKSIQAFLKYRFFFKWGGNSSTLETISDPNSQPITPSPPGFLLQNEITDPKTPIENLLYKWDIRRHFLTQAATTRIKEIETHDDCLFTDGTTTSTDYPPPQTTPQEKTTPKEEKQALLLQLQQLEQFNTELQQRLLRLQQLTADQ

SEQ ID NO: 3042 - protein, 89 aa, Betatorquevirus sp.
MSKHLKPSYYQGRAAETAWIGLVFSTHDQICSCTDPVKHLNCLVSHQKCPHFGDKNITAATTGDGKEDEMPFDAEDLEKLFEEKEEDDR

SEQ ID NO: 3043 - protein, 134 aa, Betatorquevirus sp.
LFVHRWNNNFNRLPTTTNNTTRENDPERRKASITPPAPTARAIQHRTTAATPPTPTTNSRPINFTLIKKAYLFTPPKTKLTPIKGRDWEDELYICKWLKRPMRRFLEDPPIYPWCVPEPLVNFNLVKGFNKGQH

SEQ ID NO: 3044 - DNA, 2892 bp, Betatorquevirus sp.
caggtaccgaaggtgagtgaaaccaccgtagttaaggggcaatatgggctgaagcagtctggaggaccgggcaagaaactaaaatataattattttacagatatgagcactcttctaactccagcagtatacagcaaaaatggcttagaaaaccaatggcttaactgcatttggaacacccacgacttaatctgtggctgcaacaacgctataaaacacctatttgaaattttaaagaaaaaaggtgaacaactatgcctcccttcaacttctaccgaagacgctggcgtccaaacagaagatggcgatggagaagacgttttacaacaaggagatttagacgccctcttcgcagaagattttggagacgacactgggtaagaagacgctactttactaaaaaaaaaaagagaaaacttaaaaaaattagactacatcaatggcaaccagatcaaataaaaaaatgccgcattaaaggacaactatgtttactaacttgcggcaaaggaaaaataaataataactttactttgactgctgaaagctatgtacctacaagagaatctgggggaggaggttggagtataatgcaattaacattaagagctttatatgatgaatatctacattttagaaactggtggacaagtagtaactgtggtttacctttaactagatatatgggagtaactgttaaattttataaaagtaatgacacagactatattgtaactgtacaacacacaggaccatttgaagttactagagacatatacttaagcacacaaccaagcagacacatgatgaaccacaaaagctttatagttccaaaactaaatcctaataaaaaaaaaagaccatacattaaaaagagattctatccaccagccatgtggctaaacaaatggtattttcaacaagacatttacaaccacccacttatactatttatagtaagtgcatgtagtctagatcaaatgtactgtcctaatgacggagttagcacaaatataacatttttatcactaaacacagacctattccaaaacccttactgggaaacagacaacgaccaaccatactacccaaaagtaacaggaacattaaacacaggtttatttgaacaaggcaatggtggaaatcctaatgaccaacggacttgggaaaaaattgctttattaggaaacacaacacaatttaaaatagtaggtcataatgaaatacaatcatttacaacctatgagatttacagcaaaaaagaaaactggggaaacccatttgccacaacacatagagacagctcagaagacattccaatttattacggaaaccctccaacaattgctacatataataagactcctaacatactacccattacaggactatatcaagaatgtagatacaatccatttaaagacaaaggaaaagacaataaagtttacattaaatgcacaaaaaaatttgaaggctcatttacatcacttcccacagacgaaagactaattgtaaaagacatgcctttatggctaatattttggggctggcaatcatggctacaaaaatcaacaccagtacaccacttactagaagactaccagtttgtaatacaatctaactatatatatccaccaatgcgatgctacgtaccactagatcaatactttactacaccacaaaaaacaccattaacagaaacagacaaacaacactggcatccaaaagcagaataccaacaagaagtattagctgcatttgccgctacagggccagcagcaccaaaaattaataaacaaaaccaaatacaaatacactgtttttatgatttctattttaagtggggaggatgcccaacacccatggaaacagtctgcaacccagcagaccaagaaaagttccccacgcccaataacctcatacaagaacctacaatccagaatccagaaacaccaaaagaattctatttgtacaaattcgacgaacgacagggatttattacagcaccagctgcaaaaagacttaaaacagacattgaaactccaaaatattttacagaatatggagcaagagacccaatactcgaagtcttcccaccgacggaccaaacacaaaaggaaaagaccacggaagaagaaaaagacccgctacagctccagctccagcagctccagctgtaccagcaacacctcagagacagaatcaacagattaagcaaacgttcaaaattattccctatactgtagacatgtttggacaaactaaaaataaaaaccgtaggttaactgcaaaagaaagagcagacgatttacaagatgctataatatggggcagatatcctagaacatataaaaatgaatgttactattacaaagacataaaccctgaacctattgtaaattttgcattaaactttaaattctaagccagcaaatattcacttgtcggtgtccatttattaaagttaaaacttatataaacatccaccacttctccctaatacgcaggcgcaaagggggctccgcccccttaaacccccagggggggctccctaatacgcaggcgcaaagggggctccgcccccttaaacccccagggggggcacagcccccccttaccccccaaggggctccgccccctaacaccccctaattaatatttaacaggaaaaccacctaattagaattgccgaccacaaaccgtcaaccgttaaacttacttctgctttttacactacacttctgcttttacagaacacacccacctactaaattattaatcagacgcatatcctgggaggagcaacacctctatataactaagtaccatgacgaatggctgagtttaccccgccagacggagacgagacaggatactgactcggctgcttcaggg

SEQ ID NO: 3045 - protein, 662 aa, Betatorquevirus sp.
MPPFNFYRRRWRPNRRWRWRRRFTTRRFRRPLRRRFWRRHWVRRRYFTKKKKRKLKKIRLHQWQPDQIKKCRIKGQLCLLTCGKGKINNNFTLTAESYVPTRESGGGGWSIMQLTLRALYDEYLHFRNWWTSSNCGLPLTRYMGVTVKFYKSNDTDYIVTVQHTGPFEVTRDIYLSTQPSRHMMNHKSFIVPKLNPNKKKRPYIKKRFYPPAMWLNKWYFQQDIYNHPLILFIVSACSLDQMYCPNDGVSTNITFLSLNTDLFQNPYWETDNDQPYYPKVTGTLNTGLFEQGNGGNPNDQRTWEKIALLGNTTQFKIVGHNEIQSFTTYEIYSKKENWGNPFATTHRDSSEDIPIYYGNPPTIATYNKTPNILPITGLYQECRYNPFKDKGKDNKVYIKCTKKFEGSFTSLPTDERLIVKDMPLWLIFWGWQSWLQKSTPVHHLLEDYQFVIQSNYIYPPMRCYVPLDQYFTTPQKTPLTETDKQHWHPKAEYQQEVLAAFAATGPAAPKINKQNQIQIHCFYDFYFKWGGCPTPMETVCNPADQEKFPTPNNLIQEPTIQNPETPKEFYLYKFDERQGFITAPAAKRLKTDIETPKYFTEYGARDPILEVFPPTDQTQKEKTTEEEKDPLQLQLQQLQLYQQHLRDRINRLSKRSKLFPIL

SEQ ID NO: 3046 - protein, 110 aa, Betatorquevirus sp.
LKQSGGPGKKLKYNYFTDMSTLLTPAVYSKNGLENQWLNCIWNTHDLICGCNNAIKHLFEILKKKGEQLCLPSTSTEDAGVQTEDGDGEDVLQQGDLDALFAEDFGDDTG

SEQ ID NO: 3047 - protein, 58 aa, Betatorquevirus sp.
MFGQTKNKNRRLTAKERADDLQDAIIWGRYPRTYKNECYYYKDINPEPIVNFALNFKF

SEQ ID NO: 3048 - DNA, 2892 bp, Betatorquevirus sp.
cgggtgccgtaggtgagtgaaaccaccgaagtcaaggggcaattcgggctaggtcagtctggcggaacgggcaagaaactaaaataatattttatttcagaatgagcagcagatacatgagaaatccaattctgggcccaagagctcaagaaatacaatggcttaacactattgtaacaactcactccatgatttgctcctgcgacaaaccttgggaacatttacaagacacctttaaaaaccaccaaataagatgccactttattggagacgaccatggtaccgctaccgctacaaaagaagatggagacgccgacgacgtccccttttctcccggagatttagaaaaactattcgcggaagatacagaagacaaccaagggtaagaagatttcgctattatcatagaaaagctaaaaaaataactgttaaacaatggaatccaaacaaaatccttaaatgtaggataaaaggaacacttgcactgtttatatgtggaaggactcgcataaaccatgactttactttatacaaagagtccacatcaccagcaggtgaatctaccggagggggttggagcattcaacaaataaccctacagggcttatttcaagaatatattaaacacaaaaacttttggacaaaatcaaacaaaggcctaccacttacaagatactatggagccactttaaagttttacaaaagcttacacacctcctatattgtaaatatatgcacatgtcccccattttctgtaacaatggacatgtttttaaatacacaaccacaaagacagctcatggaaagaaagagaatcatagttccacaacttaagtcaggaactagaaaaaaatataaaaaaataagaatacatccaccaagcttcatgcaaaacaaatggtattttcaacaagacatatgccaaactccactagtattaataactaccactgcttgttcattagaacaaccatacataccagatgaccaagttagcaaccagataactttaagatccctaaacacaaacatattccaaaacccaaactttgaaacactactagatcaaaaccacggatacataactaaacatgtaggtacacaaaccatgagactatttggacaaaaaaaccatacaggaggacaaaaacctaaaaaatggtcagaggttgtacctttaacaaacaccttaaattatacatctggcaatgaacatatttcaaatctaacggagtttaacaacaaaaacaactggggaaacccatttagtttaccctggtcacacatagatacacaaatatactactcctttaactggcctacaacaacactagatactacagaaacatttacagaaatagaagaattgtacaccatatgcagatataacccagatgttgacaaaggcacaggcaacaaagtttttttaaaatccaacaaccatgacacagaaggcaccataggaacattaccaaaagatcctaaacacttaatagaagactttccactatggcttatattttggggatggacagactggatattaaaatcatcagcagcacaacaactagactcaggatactttattgttattatatccccatatattaaaccaaaaagagattactatgtatttttagacagatactttacagatttagactacacaaaactaaatttaagagaccaccttaaatggcatccaaaacaagagatgcagtcagaagtagaatacttctttgcacaaacaggcccatacgcacctaaaataaacacatcacaaagcatacaggctaacatgttttatgactttcgttttaagtggggaggctgcccagctccaatggcagacatcacaaatccctgcgaccaagacagatttcccatccccaattcgggattacaaccatatgaaatcgaaaatccagaaacaaaaaaagaaagctacttgtacgcctgggacgaacgcagaaaccaaattacaaagaaatgtgcaaaaagaattgcagaaaactcagatgctgaactctctcttacagacttttgccccttcgacatccccctccaaacatcacaaaaagaaagcgaccaagagacgacatcggaagaaatccaagaaacatttcagcagcagctcaagcagctcaagcaccaacagcgactactcagacaccaactcctccgactaggcaagagacaaaaattagaataataaaacttaaaaccaccatttttggtgaccctgtaccccaacccaaccgcagactaactccagcagaatttgcagatgacttattagctgcaaaagctttttgcagaccccctagatactacacaaaagaccctcctacctatcctttctttcccatatgccccttggcaaattttgaattaaactataataaaggccagcattaattcactctcggtgtctgtttatttaagtttaaacttatacaaacatccatcgcctccccaatacgcaggcgcagtagggggctccgccccctacaacccccagggggggggcaagccccccctaaacccccccaaaacccacaaaattagcattaccaaccacaaactgacaggaaaaccacataatttgcattgccgaccacaaactgacaggaaaaccacgtaatttgcattgccgaccacaaaccgacctttacttctgctttttcacacaacttcctccttaaaccatgaatattaatataattaattaataatcagcatcacttcccaggaggagcttaaactctatataactaattacacttccgaatggctgagtttatgccgccagacggagacgggatcacttcagtgagtttatgccgccagacggagacgggatcacttcagtgactccaggctgaccttggg

SEQ ID NO: 3049 - protein, 652 aa, Betatorquevirus sp.
MPLYWRRPWYRYRYKRRWRRRRRPLFSRRFRKTIRGRYRRQPRVRRFRYYHRKAKKITVKQWNPNKILKCRIKGTLALFICGRTRINHDFTLYKESTSPAGESTGGGWSIQQITLQGLFQEYIKHKNFWTKSNKGLPLTRYYGATLKFYKSLHTSYIVNICTCPPFSVTMDMFLNTQPQRQLMERKRIIVPQLKSGTRKKYKKIRIHPPSFMQNKWYFQQDICQTPLVLITTTACSLEQPYIPDDQVSNQITLRSLNTNIFQNPNFETLLDQNHGYITKHVGTQTMRLFGQKNHTGGQKPKKWSEVVPLTNTLNYTSGNEHISNLTEFNNKNNWGNPFSLPWSHIDTQIYYSFNWPTTTLDTTETFTEIEELYTICRYNPDVDKGTGNKVFLKSNNHDTEGTIGTLPKDPKHLIEDFPLWLIFWGWTDWILKSSAAQQLDSGYFIVIISPYIKPKRDYYVFLDRYFTDLDYTKLNLRDHLKWHPKQEMQSEVEYFFAQTGPYAPKINTSQSIQANMFYDFRFKWGGCPAPMADITNPCDQDRFPIPNSGLQPYEIENPETKKESYLYAWDERRNQITKKCAKRIAENSDAELSLTDFCPFDIPLQTSQKESDQETTSEEIQETFQQQLKQLKHQQRLLRHQLLRLGKRQKLE

SEQ ID NO: 3050 - protein, 94 aa, Betatorquevirus sp.; identical to SEQ ID NO: 2955

SEQ ID NO: 3051 - DNA, 2891 bp, Alphatorquevirus sp.
gccgggctatgggcaaggctcttaaaaaagacatgtttctcggtaaactttacagaaagaaaaggacactgccactgtgcggtctgccagcagcaaagaaaaaaccacctagtgatatgagctattggaggccacccctgcacaatgtcccggggctcgaacacctctggtacgagtccgtgcatcgtggccatgctgctgtttgtggctgtgggaatcttgtacgccatcttgctgctcttgctgaaagatatggttacccgggagggccgagcgctcctggggcaccctcagtagggggcggcggtaaccctcccatccgtcgagcccgctacccggcggccgctccggatcccccggcaggtaaccagcctctgcagctgccatggcatggagatggtggaaacgaaagcggcgctggtggtggagaaaacgatggacccgagggaggtttcgaagacgacggactggacgccctcgtcgccgccctcgacgacgaagagtaaggagaaaaagacagtggaggagggggcgacgcagacgaacttataacagacgtaggagacgcttaaaaaagaaacgtaggccaaaactgactctcagactgtggcagccagacatggtcagaaaccttaaagttagtgggtacatacccataataatcagtggcttcggaacatttagtagaaactttagcagccacctactagacaaagttattaaggagccctttggagggggccacagcacaatgagattctcccttcagatactttttgaggagcacctcaggggtctcaactactggtcctactctaacacagacctagagcttgttagatacaggtactgcaaattcaccttcttcaggcacccagacacagactacattatacagtacaacagaaagaccccccttgggggcaacatactaacagcaccatcactacacccaggctccctcatgctgcaaaaatacagggtgctggttcccagctggaagacaaaacccaagggaaagggcacagtatccattaagattcccccccccaccatgctaactgacaagtggtacttttccaaagacgttgcagaccttacattgctaaacctcaacgcagtgtcagctgacctgcggtttccgttctgctcaccacaaacgaacactacttgcatcactttccaagttctctcttctgtgtacaacaagttcctctctataactgaaattaaccccttaaactcagaagacaaaattaaacagtttttaaacgctgctatgccaaataatgactctgcaaatatattaaatacttttaaatcagaaggtaactatagtcacccttctattaaagtatttaatggatcaaacaggccaacaaatgaagaatacttttcaaaaaaagacagcctatgggctgatgctatttttgtaaatacagctcaaactttagatgacctaaaacaaaaaattcaagacaacattaaaaactataaaaaaaaagtagatgaaaagattacagctgtatcacaaagaggcaccagtgccttttaccacttagtaggtatttatggcagcagctggctaaaccaaggtagaatgagtccagaagtactaggcctatacacagaagttatatacaacccatatactgataaaggagtgggcaacatgctatggatagaccccttaagcaaaacagacaacatatatagacccccacagagcaaatgcgttctaaaagacatgcccatgtggcaaatgtgctttggatacatagactgggtaaaaaaagacctaaatcactgggacgcccctattaactacagaatactactaagaactccctacacatttccaaaactataccatgacacacaaccagaatatggctttgtaatagtatcctacaacttcacagcaggcaaaatgccagacgggtccatgtatgtgcctattatatacagaaccaagtggtacccctacatgctaaaccaagaggcagtaatggaagacataagcagatcagggccctttgcacccaaacaagaaatgcccagcacagaactagttgcaaaatacacatttaagtggaaactcgggggcaaccccatctccgaacaggttgttaaagaccccagcacacaacccacctacgagctgcccgcagccggtacagtccctcgtagagtacaagttatcgacccgaaagtcgtcggacccaacatatcgttcaaaagctgggagatcagacgtggatactttagctcgacaagtattaaaagaatgtcagaacaacaagaaacttctgagtcttatttcccaggtccaaaaagacccagaatcgatctgcccaagtacgagccgccagaagaaagctggagtactctccaaagagaactccggccgtggacggactcggaggcggaaaaagaccaaagctcctcggaagaggaagaagagagacccctccgagagcagctgcagctccagctcaaggagcagcagcacctcagacggggaatccagtgcctgttcgaacaactcctaaaaacccagcagggagtccacgtaaatccctgcctcgcgtaggccccgagcagtggttgtttcccgagagaaagccaaagccaggtcccacgtcccaagactgggccatggagttcctggcctgcaagatatttgataggccccccagaagcaagcttacagattttcctttctatccccgctgcaaaaacaattacaatgtaacctttcagcttaactacaaataaatggcaacttcactgttctaggccgtgggagtttcacttgtcggtgtctacctctaaaggtcactaagcactccgagcgttagcgaggagtgcgacccttccccctgactcaa

SEQ ID NO: 3052 - protein, 735 aa, Alphatorquevirus sp.
MAWRWWKRKRRWWWRKRWTRGRFRRRRTGRPRRRPRRRRVRRKRQWRRGRRRRTYNRRRRRLKKKRRPKLTLRLWQPDMVRNLKVSGYIPIIISGFGTFSRNFSSHLLDKVIKEPFGGGHSTMRFSLQILFEEHLRGLNYWSYSNTDLELVRYRYCKFTFFRHPDTDYIIQYNRKTPLGGNILTAPSLHPGSLMLQKYRVLVPSWKTKPKGKGTVSIKIPPPTMLTDKWYFSKDVADLTLLNLNAVSADLRFPFCSPQTNTTCITFQVLSSVYNKFLSITEINPLNSEDKIKQFLNAAMPNNDSANILNTFKSEGNYSHPSIKVFNGSNRPTNEEYFSKKDSLWADAIFVNTAQTLDDLKQKIQDNIKNYKKKVDEKITAVSQRGTSAFYHLVGIYGSSWLNQGRMSPEVLGLYTEVIYNPYTDKGVGNMLWIDPLSKTDNIYRPPQSKCVLKDMPMWQMCFGYIDWVKKDLNHWDAPINYRILLRTPYTFPKLYHDTQPEYGFVIVSYNFTAGKMPDGSMYVPIIYRTKWYPYMLNQEAVMEDISRSGPFAPKQEMPSTELVAKYTFKWKLGGNPISEQVVKDPSTQPTYELPAAGTVPRRVQVIDPKVVGPNISFKSWEIRRGYFSSTSIKRMSEQQETSESYFPGPKRPRIDLPKYEPPEESWSTLQRELRPWTDSEAEKDQSSSEEEEERPLREQLQLQLKEQQHLRRGIQCLFEQLLKTQQGVHVNPCLA

SEQ ID NO: 3053 - protein, 165 aa, Alphatorquevirus sp.; identical to SEQ ID NO: 2047

SEQ ID NO: 3054 - protein, 132 aa, Alphatorquevirus sp.; identical to SEQ ID NO: 1778

SEQ ID NO: 3055 - DNA, 2890 bp, Betatorquevirus sp.
cgggtgccgaaggtgagtgaaaccaccgaagtcaaggggcaattcgggctaggtcagtctggtggaacgggcaagtgtattaaaatattattttactttacagaatgactacaagactaattttaccaaaagcctcaattagacaaaacaacctaaaatggataaattctatggtacacactcatgatatgttttgcgactgctcaactcctctacaacatattataattttaatttttcaacaagaacctcaacttgattttaaaccaattgaaattgatattattaaaaaatgccttactggagaacgtggagacgttaccgctacagaccacgacgcagatggtttagaagaaggtacactagaagaccttttcaaagaagactttggagaagaagacgccgcacggtaagaaaaagaaaacttaaaaaaattaaaatacaacaatggcaaccacaatatattagaaaactaaaagttgttggatatgaacctctatttctaagcaacgctgaaagactaacaaataactttacttgctacaaagacagtacagcaccttaccacttccctggaggaggtggattttctataatgaactttactttaaatgctctatatgaaaaacatttagtacttcaaaactggtggacaaatagtaatgataatatgccacttataaaatacaatggttgtactatttacttgtataaagaagctgaatttgattacttatttcaatacaacagagcttaccctatgcatgctacactacttacttacacaagcacacacccacaagctatgctactacataaacatactaaaaaaatattgtgcaaacgaaacaatagaaacaaaaaaccatacaaaaaaattaaaattttaccacccacacaaatgtataacaaatggtactttcaaaaagacattgctcatgtaccgttattacaactaatgaccacagcagcatcgttagaccgcatgtttctacactctagcgcaataagtacaacagttggctttacttcacttgacattacaggcatgagaaaccacaattacacaaaaacctcaacaaccggctacatacccttacaaaacacattattatttggagttagaatttggcataatataaaacaactaaaaattacagagctaatatttttaggaaaccctgaagattatacagaaggcacagcaataggagacataacccaaatctcccaatataaagacctcaaaaacaacactgccaaaaaaattaaagctgcacaaatggaacaaaaatactggggaaacccatttgatcccacattccacagacttggaaaactagttaccactaataaaacatggaacgaaataatagaatattacaacaaaactcaatcagacccacaacccactataccagaatcatggtttgtagaaaaaacacacttcactatagaatgtagatataatccatttgcagaccaagctgtaaataacaaactttatttaatagacctcagagacaaaacacacgaatatgattggacatcagctatagcagtaaaagaaacactatatgaaaatttacctgtatggttaatgctttggggatacctagactattgcagaaaatgtggagaattatccgtagttgatactaactatttacttgtaatatatagtccatatatactaccaaaaaatgtaaactactttgtaccattagaccaagactttctagaaggtagaagtccctacgcagaccaagaaattgtatttccctcagattcattacaatggcaccctagagttagaactcaagtaagaactgtaaatatgataggctcaactggaccaggagttataaaactacctggaacaaactcctgtgaagctcatatgaaatacgtttttaattttaagattggaggacaaccaccaccaatggccacccttacaaacccagatcaacaacctaagtacattactcccgataacatcctacaacaaacttcgttacagagtccaacaaccccatttgaatacctcctctacaactttgatgagagacgagggcaaattacaaaagcagctatcaaaagaatgcaaaaacaccaggagactgaaccaactcttttcccaattacagaaacaactcttgcctgccccatcacaacatccaaagaaaaaatacagacatcggactcatcggactcggaaaaagaagaaatgtcgatcgaggagcaactcctccacgagcgaaagcagcaaaaactcctccgaaagcgaatcaaactcatcctcaacagactaacattagaataagtgaatgcacaataaaagtacatttatttgaacccccaaaacctaaaaacagaagaagaaataaatgggaatgggaggaggaattagaagacgcaaaaatatggtgcagggcccctcgaccttatctttttgacaaacctacatacccatgggtgccacaaaacacaccatttactgtaaactttgatttaaatgcgccgcaataaaatttcaaggcctgcaaactttacttgtcggagtccatttatataagttataacttaaataaacatccaccacactccctaatacgcaggcgcagtagggggctccgcccccccccccctaataaatattcaacaggaaaaccacctaattataatggctgaccacaaactgccacttacttcccttttttacaaacacttcctcttttcctaattattattcatataattaattattaaacaccgtaattcctgggaggagcctaaaacctatataatcaactacacttccgaatggctgagtttatgccgccagacggtggacggagcaggacactgactcaggactgacctcggg

SEQ ID NO: 3056 - protein, 677 aa, Betatorquevirus sp.
MPYWRTWRRYRYRPRRRWFRRRYTRRPFQRRLWRRRRRTVRKRKLKKIKIQQWQPQYIRKLKVVGYEPLFLSNAERLTNNFTCYKDSTAPYHFPGGGGFSIMNFTLNALYEKHLVLQNWWTNSNDNMPLIKYNGCTIYLYKEAEFDYLFQYNRAYPMHATLLTYTSTHPQAMLLHKHTKKILCKRNNRNKKPYKKIKILPPTQMYNKWYFQKDIAHVPLLQLMTTAASLDRMFLHSSAISTTVGFTSLDITGMRNHNYTKTSTTGYIPLQNTLLFGVRIWHNIKQLKITELIFLGNPEDYTEGTAIGDITQISQYKDLKNNTAKKIKAAQMEQKYWGNPFDPTFHRLGKLVTTNKTWNEIIEYYNKTQSDPQPTIPESWFVEKTHFTIECRYNPFADQAVNNKLYLIDLRDKTHEYDWTSAIAVKETLYENLPVWLMLWGYLDYCRKCGELSVVDTNYLLVIYSPYILPKNVNYFVPLDQDFLEGRSPYADQEIVFPSDSLQWHPRVRTQVRTVNMIGSTGPGVIKLPGTNSCEAHMKYVFNFKIGGQPPPMATLTNPDQQPKYITPDNILQQTSLQSPTTPFEYLLYNFDERRGQITKAAIKRMQKHQETEPTLFPITETTLACPITTSKEKIQTSDSSDSEKEEMSIEEQLLHERKQQKLLRKRIKLILNRLTLE

SEQ ID NO: 3057 - protein, 102 aa, Betatorquevirus sp.
MTTRLILPKASIRQNNLKWINSMVHTHDMFCDCSTPLQHIIILIFQQEPQLDFKPIEIDIIKKCLTGERGDVTATDHDADGLEEGTLEDLFKEDFGEEDAAR

SEQ ID NO: 3058 - protein, 122 aa, Betatorquevirus sp.
LPHHNIQRKNTDIGLIGLGKRRNVDRGATPPRAKAAKTPPKANQTHPQQTNIRISECTIKVHLFEPPKPKNRRRNKWEWEEELEDAKIWCRAPRPYLFDKPTYPWVPQNTPFTVNFDLNAPQ

SEQ ID NO: 3059 - DNA, 2889 bp, Betatorquevirus sp.
caggtgccggaggtgagtgaaaccaccgtagtcaaggggcttaatgggcaaattcagtcttggcggaccgggctagaaactaaaataaatattattttacagatgtcaaaattccaaaaaccatgtctttacgaaggaagacagctagataaccaatggatgaatttaatttacacttctcatgacctctactgtggatgcctgaaaccaattaaacatctggaagatatagttaatcaacaaaaatgccgttctacaaaagatattggtacaaataccccaaccaaagaagaagatggagacgaagacgatttcaatatcgacgaaggagacctaaacaaacttttcgaagacgcagaaaccgccgatttaaggtaaaaagaaacttttttagaaaatacagactaaaaaaactaaaaaaactaagaatacaacaatggcaaccccgctacataagaaggtgccatattaaaggctacttacaactatttggtggaggaaaagaaaaaatttcctataactttgctatgtataaagacagctatgtacctgaacatgaacctgggggcggcggttggagtattcaacaactaactttgtcaaacttatttactcaaaatagatatttacaaaactggtggactgtatctaacaaaggtttaaatatgtgtcgctatctaagatgtaaactcttactatatagacaaaaagaaactgattatatatttaactatagaactgaaccaccttatgatgtatctaaatattattatgctagtatgcatccttataaaatgttactatttaatcaaagaatagtagtgcctagctttgcaacacagccatggaacaaaaaaaaatacattaaaaaatacatagaaccacccagagaaattaaaaaccaatggtacttccaacaacacttttctacattaccattattagaatttagcacaacagcatgcagcttaaacagtatgtacatgcctacaaatgctattagcaacaacataaccctactatcacttaatacaacattttttcaaaatccaaaattccaatatgcaggaacaccaaccacaggctatacaccaaaaccaaacacaacaccatacatttatggagttcccacagcagaacctaacttagactggaaaaatttacccataaaaaacaatgtaatatatttaggagacaccatgaacaacgacccaggacatccaatatcagacacaaacaaaacaaagtacaactcagcatactggggaaacccattttactttagatacctagacggctcttatttaagctttatttccaatacaccaccaagttcactatgcactttagtaacacaaaataaaaccattaatgaaatgtcaccacaactaaaaacagacccatatatatacaaatgcagatacaatccatggaaagacttaggagaagaaaatatggcctactgggtatcaaacttaaatgcagataactgggaacctcctaaagacccagacttaataattagtaagtttccactatggattctactatggggatggtcagactttacacaaaagattaaaaaaattactattacatcaggaaattacatgctggtagtaagaaccagctgcttagaccaaaaactaggggcctatgtttttctatctgaatcctacgtaaatggcagagccccatatgatagagatgcagaagaaatactacccagagataatggccattggtaccctagatggaaattccaacaggaagcaattgaacatatattaacaacaggccctgctgtatgtaaaagtgagagtaaaaaaagtgtacaagctcacatacattatgatttttcttttaagtggggaggaaacccatcgaaaatggaaaacatcaatgatcccatgtcacaacctgtattccctctccccaataaccagctcttccaaaatgaaatcactaatcctgcaacctcaatcaaaaacatgttatacgccttcgacatcagaagggacatgcttacaaaagcagctgaaaaaagaattaaagaactgtcaactgatgacgaatctttgttctcagatggagaccagactacaacagacccactcctcccgtacaaaaaagcaccaccggaggaaacagcctcggaaaaagaaaaagcgcagacattactcctccagctcaacacaatccagcaccacaacagacaactcaagcacagactccagcaattaatgtcactaaccaacgatatgtaattactggttgtgttaaacatgctttcttgtttcccccgcctgcaaaaaaccgtagattaactcctcaagaggaggaaactgatattcagctttgtaaaatatttcgtagacaacgcacttattatcttaaagataaacctttttatgactatttgccaccaacaccacttgtaaactttgaccttggtttcaaacaataaaggccagcattgattcactctcggtgtccatttatttaagtaaaacttatacaaacatccaccgcctccctaatacgcaggcgcaaagggggctccgcccccttaaacccccagggggggggcaaagccccccccaaacccccccaacattaatattcataaaggaaaccacaaaattagaattgccgaccacaaacgaatatgtaaattaagttccctattccagcacccaacttcctcaaaaattaattagtaatcaccgtcacaaagggaggagccaactctctatataactaagtacacttccgaatggctgagtttatgccgccagacggagacgctatataactaagtacacttccgaatggctgagtttatgccgccagacggagacgagacaacagctctcggctgaatttggg

SEQ ID NO: 3060 - protein, 673 aa, Betatorquevirus sp.
MPFYKRYWYKYPNQRRRWRRRRFQYRRRRPKQTFRRRRNRRFKVKRNFFRKYRLKKLKKLRIQQWQPRYIRRCHIKGYLQLFGGGKEKISYNFAMYKDSYVPEHEPGGGGWSIQQLTLSNLFTQNRYLQNWWTVSNKGLNMCRYLRCKLLLYRQKETDYIFNYRTEPPYDVSKYYYASMHPYKMLLFNQRIVVPSFATQPWNKKKYIKKYIEPPREIKNQWYFQQHFSTLPLLEFSTTACSLNSMYMPTNAISNNITLLSLNTTFFQNPKFQYAGTPTTGYTPKPNTTPYIYGVPTAEPNLDWKNLPIKNNVIYLGDTMNNDPGHPISDTNKTKYNSAYWGNPFYFRYLDGSYLSFISNTPPSSLCTLVTQNKTINEMSPQLKTDPYIYKCRYNPWKDLGEENMAYWVSNLNADNWEPPKDPDLIISKFPLWILLWGWSDFTQKIKKITITSGNYMLVVRTSCLDQKLGAYVFLSESYVNGRAPYDRDAEEILPRDNGHWYPRWKFQQEAIEHILTTGPAVCKSESKKSVQAHIHYDFSFKWGGNPSKMENINDPMSQPVFPLPNNQLFQNEITNPATSIKNMLYAFDIRRDMLTKAAEKRIKELSTDDESLFSDGDQTTTDPLLPYKKAPPEETASEKEKAQTLLLQLNTIQHHNRQLKHRLQQLMSLTNDM

SEQ ID NO: 3061 - protein, 91 aa, Betatorquevirus sp.
MSKFQKPCLYEGRQLDNQWMNLIYTSHDLYCGCLKPIKHLEDIVNQQKCRSTKDIGTNTPTKEEDGDEDDFNIDEGDLNKLFEDAETADLR

SEQ ID NO: 3062 - protein, 57 aa, Betatorquevirus sp.
LFPPPAKNRRLTPQEEETDIQLCKIFRRQRTYYLKDKPFYDYLPPTPLVNFDLGFKQ

SEQ ID NO: 3063 - DNA, 2889 bp, Betatorquevirus sp.
cgggtgccgaaggtgagtgaaaccaccgagtcaaggggcttatcgggctgaatcagtcttggcggaacgggcaactaacttaaatattttattacagaaatgacaacaagatttagaccaactaaatctacattaagacaatcaaaattaaaatggattaaccttatccaccactgccatgatgccttctgcgactgcgacaatggaataactcacaccatacttcacctttttgaacaagaaaaccatcacaactttaccccacctgaaaaagattttattaaatcatgcctttctggagaagatactacaattaccgctggagaccacgaagaaggatttaccgaaggagatttggaagaacttttcaaagaagacgttggagacgaaaacgccgctaccgttgggtaagaaaaagaaaacttaaactactaccattaaagcaatggcaaccccaatatataaaaagactaactgtaataggactctatcccatgataatgggaacaagagaaagaatagctaacaatttaaactgttatttagaatctaaagcgcctcattatgtacctgggggtggatgcttttctatttgtaacttttctttaatgaccttatatcaagaacacctagaaataagaaactggtggacaacaagtaatgataactatcctttaataagatatatgggatgcacaatgtacttatatagagaagaaaatctagactacttattttactacaatagacaacctccaatgaatgcttcactaacaacatatcaaagcacacaacccgcagctatgctattaaacaaacatacagttaaagtgcaatgcaaaaaaactagtaaaagcagaaagccatataaaagaattaaaattaaaccacctacacaactacaaaacaaatggtatttcagttatgatattgccaacacaccactgttacaaactatgaccacagccacatcgtttgaccgcatgtttcttaactcttcaagcatatctaacacaataggctttacaacactcgacaccaacggctttcttaaccaccaatttcgcagaactacaagcccatatacaccaagaccaggtactacactatttaaaactaaaaatggagtagaagacattcaaaaaataccaataggagacttaatactattaggagaagtagaagaactacaagatggcacacaactaaagttagttgaaaaatcctataatacagtgccaggaatagactcaccctcagacttccaaaaacgattttacactgcacgcatgcaagaaaaatactggggaagcgtatttaaatcaacaacattttatagagatgaaagaatgatagaagctaacaaaacaatagatgagctaattaaacaattcaacttagaaaccacacaaataggaacaggatttactgaaaaaacaacaaaatgggcagaaattaggtacaacccatttgcagataaaggaaaaggcaacatggcatatttgttaaaaatagactcaggcctacatagcacagactggtcaccaccaacagacaaagatgtaatagccactgatcttccacttcacacattactatggggttatttagactatcaaagaagatgcaaagaatacagagacatagacacaacatgcgtattagtattacaatgtaaatatgttcaaccaaacaattttaaatttttagtaccactagatccagactttttagatggaacaagcccatacagaccacagggagaaataacaccaagtgacagacaacactggcacccaaaagtagcatttcaagtacaatctataaataatatatgtttatcaggacctggtactgtaaaattaccacctcaaatttcttgtgaagctcatgtaaaatataaatttcattttaagcttggaggacaacctgcaccaatgtccgtccttactaaacccgacgaacaaccaaaatatcccatacccaataatctcctccaaacaccttcgttacagagtccaacaatgccgttcacacaattactgtggaactttgatgaaaggagacaacaaatcactaaaaaagctgcagacagaattacagaataccaagaacctgaaacaacttttttatcaattacagacccaggcagcctatgcccaacactcaaagagacaaaagacccacaagagacaacatcctcggaagaagaagaaacaccgatcgagacacaactcctccaccagcgaagaaaacaacgcaagctcagacacaggatcaacgacctcctcaacagactaactcatttacaataactaactgtgttttcaaagtaaaactatttcctgatgataaaaaaccaaatagacgcatgactgcaaaagaatatgcagacgagttagaggacgccaaaatatggcatagagttcccagagattatatatttgatcaccccacatacccatgggttccccaagtaccaaaatatactgtaaactttgatttaaacgcgccgtaataaactacaaggcctgcaaatttccactctcggtgtccatttattataataaaaacttaaacaaacatccaccacactccctaatacgcaggcgcaaaagggggctccgcccccttaaacccccaggggggggcacccctataacccccctaataaatattcataaaggaaaccacaaaattagaattgccgaccacaaactgatatgctaattaacttcctaaaattatacattccttccctaaaaattaattattaatctgcatcacaatgggaggagctacaacactataaaaataagtgcacttccgaatggctgagtttatgccgccagacggagcgcagatctaagactcagcgctgattcaggg

SEQ ID NO: 3064 - protein, 675 aa, Betatorquevirus sp.
MPFWRRYYNYRWRPRRRIYRRRFGRTFQRRRWRRKRRYRWVRKRKLKLLPLKQWQPQYIKRLTVIGLYPMIMGTRERIANNLNCYLESKAPHYVPGGGCFSICNFSLMTLYQEHLEIRNWWTTSNDNYPLIRYMGCTMYLYREENLDYLFYYNRQPPMNASLTTYQSTQPAAMLLNKHTVKVQCKKTSKSRKPYKRIKIKPPTQLQNKWYFSYDIANTPLLQTMTTATSFDRMFLNSSSISNTIGFTTLDTNGFLNHQFRRTTSPYTPRPGTTLFKTKNGVEDIQKIPIGDLILLGEVEELQDGTQLKLVEKSYNTVPGIDSPSDFQKRFYTARMQEKYWGSVFKSTTFYRDERMIEANKTIDELIKQFNLETTQIGTGFTEKTTKWAEIRYNPFADKGKGNMAYLLKIDSGLHSTDWSPPTDKDVIATDLPLHTLLWGYLDYQRRCKEYRDIDTTCVLVLQCKYVQPNNFKFLVPLDPDFLDGTSPYRPQGEITPSDRQHWHPKVAFQVQSINNICLSGPGTVKLPPQISCEAHVKYKFHFKLGGQPAPMSVLTKPDEQPKYPIPNNLLQTPSLQSPTMPFTQLLWNFDERRQQITKKAADRITEYQEPETTFLSITDPGSLCPTLKETKDPQETTSSEEEETPIETQLLHQRRKQRKLRHRINDLLNRLTHLQ

SEQ ID NO: 3065 - protein, 103 aa, Betatorquevirus sp.; identical to SEQ ID NO: 2241

SEQ ID NO: 3066 - protein, 120 aa, Betatorquevirus sp.; identical to SEQ ID NO: 2242

SEQ ID NO: 3067 - DNA, 2888 bp, Alphatorquevirus sp.
cgcagcgaggagagcgacccttccccctgactcaaggggcaattcgggctcgggactggccgggctatgggcaaggctcttaaaaagccatgtttctcggtaaactttacagaaagaaaaggaaagtgcttctgcagactgtgccagacccaaagaaggctaggcggcttctgattatgtggcagccccccgtgcataatgtacccgggatcgagagaaactggtacgagagttgctatcgatcccatgctgctgtgtgtggctgtggcgactttgttggccatattaatcatctggcaactactctgggtcgccctgcgcgtcctcggcaccccgggggccccggcactccgcagataagaaacctgccagcgctcccggcaccccagggtgagcccggtgacagagcgccatggcctacggatggtggggccggcggcgccgctggagaagatggaggacgcggcgcagaccgtggagaaccaggagacgtagaagacgacgcgctcctcgccgctttcgacctcgtcgaagagtaaggaggcgcagggggcggtggcgcaggcggtatagaaaatggaggcgacgcaggggcagacggacgcacagaaaaaagataatcataaaacagtggcagccaaactttataagacgctgctacataataggctacctgcctctgatattctgtggcgaaaacaccaccgcccagaactttgccacccactcggacgatatgatagccaaaggaccatgggggggaggcatgactactaccaagtttactctgagaatcctctacgacgagtttaccaggtttatgaacttctggactgtcagtaacgaagacctagacctgtgtagatacgtgggctgcaaactcatattctttaaacaccccacagtagactttatagtgaggataaacacacagcctccgttcctagacactaacctcaccgcggcacaaatccacccgggcataatgatgctcagcaagaaacacatactaataccctcactaaagaccaggcccagcagaaagcacagggtggtcgtcagggtgggcccacctagactttttcaagacaagtggtacccccagtcagacttgtgtgacacagttctgctttccgtgtttgcaacggcctgtgacttgcaatatccgttcggctcaccacaaactgacaacccttgcgtcaacttccagatcctggggcaccagtacaaaaaccaccttagtattagttccacaaatgatgactctaacaaaacccactatgacaacaatttatttaataaaaaagagctatacaacacattccaaacaatagctcagcttaaagacacaggattagtctcaaacactacaggaacaggaaacatgtggaccgaagtgcaaaacacaacagcactctcaataaatggctcaaatgcacttgacagcaaagacacttggtacaaaggaaacacatacaataactctattacaaagttagcacaactaaccagagccagatttaaagctgcaacacaggcagccctgccaaactaccccacaataatgtccacagacctctatgaataccactcaggcatatactctagcatattcctagcagcaggcagaagctactttgagactccgggggcctacacagacgtcatatacaacccctttacagacaaaggcactggaaacatggtctggatagactacctaacaaaagcagactccatatacacaaagaacaaaagcaaatgtgagatatttgacctgcctctgtgggccaccttcacaggatactcagagttctgctcaaaagttacaggagacaccgccatacacctaactgccagagtagtagtgagatgcccctacactgaacccatgctcatagaccactcagaccccaacaggggctttgtaccttactcctttaactttggagagggcaagatgccaggaggctcctccaaagtgcctataagaatgagggccaaatggtacgtgaacatatttcaccagcaagagttcatggaggccatagttgagagcggaccgtttgcttacaagggcgacataaaatcagcggtactcagcatgaaatacagattccactggaaatggggcggaaaccctatatccaaacaggtcgtccggaatccctgctccacctccagcacctccgcgggccatcgaggacctcgcagcgtacaagtcgttgacccgaaacatgttaccccggaagtcacctggcactcgtgggacatcaagcgaggcatctttggcaaagcaggtattaaaagaatgcagcaagaatcagatgctctttacattcctacaggaccactcaaaagacctcgcagagacacgaacgcccaagacccagaagagcaaaacgaaagctcaggtttcagagtccagcagcgattcccctggatccactccagccaagaaacgcaaagctcgcaagaagaggtgcaagcggagggcacggtacaggaacaactcctcctccagctccgagagcagcgagtactccggttccagctccaacagctcgccagccaagtcctcaaagtccaagcagggcaaggcctacaccccctattatcttcccaagcataaacaaggcctttatgtttgagccccagggtcctaaacccatacagggctaccacgattggctagaagaatacacctgctgcaaattctgggacagacctcccagaaagctacacacagatacacccttctacccctgggcaccaaaacccctagaccaagtaagggtctcctttaaactcaacttccaataaaatttcaaggccgtgggagtttcacttgtcggtgtctgcttcttaaggtcactaagctctccgag

SEQ ID NO: 3068 - protein, 739 aa, Alphatorquevirus sp.; identical to SEQ ID NO: 686

SEQ ID NO: 3069 - protein, 149 aa, Alphatorquevirus sp.; identical to SEQ ID NO: 687

SEQ ID NO: 3070 - protein, 127 aa, Alphatorquevirus sp.; identical to SEQ ID NO: 688

SEQ ID NO: 3071 - DNA, 2888 bp, Betatorquevirus sp.
cgggagccgaaggtgagtgcaaccaccgtagtctaggggcaacgaaggtgagtgcaaccaccgtagtctaggggcaattcgggctagttcagtctggaggaacgggcaagaaacttaaaattttatatttttacagaatgtccagctaccttaaaccaggactttacaaccaaaaagctctacaaaaacaatggattaacaacgcctgcagttttcatgattctttttgcggatgcgacaccccaattgaacatctaaaagcatacttagaagaaataaaatgcccccctactaccgaaggcccttctaccgccgcaactggtggaacagccgctaccgacgacgacgatttcgacgccggggacttagaaagacttttcgctatagaaaaagaagacaacgaaaggtaaaaagacgctttaaatattacaaaaaatacaaaaaactaaaaagaataccaatacaacaatggcaaccttccgccattagaaacagtagaatacaaggatacctatgcctatttcaagctggtaacggacgagcttctaataactatgttaatactaaagaaagcctcgttccagaacatacaccctccggaggagggtggagtatgcaacaactaactttatctaacctatacactcaaaactgtgaactacaaaatgtatggactaaatctaacaaaagactaaacctttgtagataccgcggagcaaaaataaccttgtttagagaacaatttacagattatgtattttcttggttactagaaactccaaaaacagtagaaaaatacttctattgcagttatcacccaatgaacatgcttagacacaacagaaaagttatagtaccatccttttattcacaaccacacaaacgaaagccatacaaaaaaatttacattccaccaccaaaactactaaaaaaccaatggtttttccaacaacatttaagcacatttccattagtaagctttgtagcatcagcttgtagcctacaaggcatgtatggcagtgacaaatcaataaacaacaactgtacattttggtgcctagacacaaacttcatgaaaattccaacttttcaatatagaacagaaaccactccaaatttcggatacactccacaaagagatatatacctatgggggctttcaaacggaaaagacatattttcagaaaacacaatatcagactccatatacctaggaaactcaatgctaaatcaagcaggtacctatgtaccaaaaactaacccaacacaatacaaaatgtcacaatggggaaaccccttttactggtggtactttacccaccatacacgaacatttattacaactggaacaaatacacccacagaactaatcaaaaccccacaaaaacacttagaagattcatggctaatggaaaaagattacgcctttacagtaagatacaatccttttaaagacaaaggaacaggtaacgaagtatattttataccaaattatgacaaaagtaaactagattgggaacctacatcagatccaagtttattatttacaaacttacctctatacattatattttggggaatagaagatatgcttaaaaaaatgggtaaatgccaacatttagatgatgactggatatgtgtaataagatcaaaatacctatacccaccagaaaaatattatgttccactatcatacaactttgtccatggttcaggaccctatgacacagacagagaaaacatagccccattagacgaagtacactggtatccaaagtacaaatttcaaagagaagccattaacaacattatacaaacaggcccagcagttataagatttgaccactctcaaaatatacaagctaaaataaaatatgatctttattttaagtggggaggaaacccatcacctatggaaaacgcagttgacccaactactcaacccgtcacacccactcccagtggactctactttcaaaatgaaacagatgatccaacacaatcaattgaaaacttcttatactcctgggacactagacgggactttattacgccaaaagctacagaacgaattaaaaaaagcacaactcatgaaaaatatttgttcacagatggaatgccaacttcaacagacctccccctgcaagaaacaacgacacaaaagaaagagaccccggaaacacaagaagcgacactactcctccagctcaacagaatccagcagttcaatcagcaactccagcacagattcacaaaactaaaacaattattttcggacccgtaaactgtgcgttactatttccagaacaaaaacctagaaagaaccgtagacttaacccatatgagagacaaacagacttagaaatagctaaatggttacaccgccctgtaaaaactttctttgacgataccccctattacccatggctacccccagcaccaaaggtgcccagtgttaactttgacattgtatctgcatttaataaaggcctgcattaactcacttaacaagcttgtttatttaagtaaaaacttaactaaacatccaccgcctccctaatacgccggcgcaaagggggctccgccccctttaaccccccgggggggaaacccccccgaaacccccccaactcataaatattcaacaggaaaaccacctaattagaattgccgaccacaaaccgtctccgttaaaccacaacttctccttttcatatctaacttcccttttttaaaactccacctactaattaattaagaatcaccatcacaaacacgcatatcctaggcgtggcctaataactatataaccaagtacacattcgaatggctgagtttatgccgccagacggagacagaatcaccagtgacttctggctgaacttggg

SEQ ID NO: 3072 - protein, 667 aa, Betatorquevirus sp.
MPPYYRRPFYRRNWWNSRYRRRRFRRRGLRKTFRYRKRRQRKVKRRFKYYKKYKKLKRIPIQQWQPSAIRNSRIQGYLCLFQAGNGRASNNYVNTKESLVPEHTPSGGGWSMQQLTLSNLYTQNCELQNVWTKSNKRLNLCRYRGAKITLFREQFTDYVFSWLLETPKTVEKYFYCSYHPMNMLRHNRKVIVPSFYSQPHKRKPYKKIYIPPPKLLKNQWFFQQHLSTFPLVSFVASACSLQGMYGSDKSINNNCTFWCLDTNFMKIPTFQYRTETTPNFGYTPQRDIYLWGLSNGKDIFSENTISDSIYLGNSMLNQAGTYVPKTNPTQYKMSQWGNPFYWWYFTHHTRTFITTGTNTPTELIKTPQKHLEDSWLMEKDYAFTVRYNPFKDKGTGNEVYFIPNYDKSKLDWEPTSDPSLLFTNLPLYIIFWGIEDMLKKMGKCQHLDDDWICVIRSKYLYPPEKYYVPLSYNFVHGSGPYDTDRENIAPLDEVHWYPKYKFQREAINNIIQTGPAVIRFDHSQNIQAKIKYDLYFKWGGNPSPMENAVDPTTQPVTPTPSGLYFQNETDDPTQSIENFLYSWDTRRDFITPKATERIKKSTTHEKYLFTDGMPTSTDLPLQETTTQKKETPETQEATLLLQLNRIQQFNQQLQHRFTKLKQLFSDP

SEQ ID NO: 3073 - protein, 90 aa, Betatorquevirus sp.
MSSYLKPGLYNQKALQKQWINNACSFHDSFCGCDTPIEHLKAYLEEIKCPPTTEGPSTAATGGTAATDDDDFDAGDLERLFAIEKEDNER

SEQ ID NO: 3074 - DNA, 2887 bp, Betatorquevirus sp.
cgggagccgtaggtgagtgaaaccaccgaagtctaggggcaattcgggctagatcagtctggcggaacgggcaagaaatttaaaactatttttattttacagtatgaacttctacaaagaaccagtttatggtccaaaaaggcaagaattaaactggctaaatggctgtattatagctcatgacaacttttgcggctgcaacactccaactgaacatctcctctacattctcgcttccaagagtggatacttaattgttaaaaaccaacaaaaatgccttacttctggaacagaagaaactactggaaaagaagacgactttggcttagaagacggagagctcgagcggctattcgcagaagatacagacaaagaagatactgggtaagacattttaaaaactttcctaaaactttaagactaagacaatggaatccaaaagtacaaaaaagatgttatataaaaggactaataccgttatttttatgcggaaaagacagacaaatatttaactatatacaatataaagaatctatggtaccagaaagtcaatcgggaggaggcggatggtctctaatggtgtttaacttaggaggactatatgacgaatttaaaaaactaaataactggtggacagctgacaatgacggactacctttagtaaaatataaaggatgcgaatttaaattttaccaatcatgggactgtgactatatagtaaattataaaacatgcccaccaatgacagacacagaactacaacacttagattcacaccctagcagaatgctaatgaacaaaagagcaattgtagtacctaacataataagaaaatcaaacaaacgaagaaaatataaaaaaattaaattcccaccaccatctctattaaagaaccaatggttttttcaacaagacctatgcaactataacttactaatgctaacaacatccagttgctccttagaccaaatgtacctaccaaataatgaactttctaacaacataactttaatttctttaaacacaaacatatttcacgatgtaaactttttaatagacggaacaacaggatactcccccaaacctaactttcatttatggggagaaccaacaccatacacaggaacacaacctgcaacaaacgctaaaggacttatatatttaggaaacttaaaaacatacaactatggtacacaaatgaatagctacgaagactttcaaaaacaagaaaactggggaaacccattccactcactacatggacacgcagacacacatatatactatagccaaacattaccaactagcagcacaagccttgacaaagtaaaagtaacaatagcagaagaattattcacaaaatgcagatacaatccactaaaagacacaggagaaggcaatgaagtatactttaaaagcataacaatatcaagaggatatatatacgacccgccaacagacccacaagtacaaatacatggttatcctttatggctaattatgtggggctggacagactggcaagaaaagcttcatgctattaatcaaatacaactaaactatgtactaattgtaaaatctaaatttataacacctacaagagcagcatacttatttttagatgacttcttcacaaaccctcaaataacacaaatgacagacaatgacacaaaacactggcaccctagatttaaataccaactaaaatcaacaaatttaataggcacaacaggacccgcaagccctagagtaaacaaaagtagcagcatacaagctcatgcattttataaatttcagtttatatggggaggatgcccagcaccaatgcacaacatcaaagacccctgcaaccagtccaagttccccgtgcccaattaccagctacaagcagtacaagcaacgcatccagcaaaagaccccaaagaaatgctccacgactgcgacgaaagacgacaaacacttacaaaaaaatgtatcaaaagacttatgtcaatttctgaaactccaaaaactttacttccaggaacaaatgcattcaacccacaaatccaacaagaaacgacatcagaggaaagctcctcggaagaagagaaagagacaaacatcagagagcaactcctccatatccgaaaacagcaccgaaagctcaagcgaaacctcaacagactaaagctataccaattgtaaaaactgtagacctttttccaaaacaaaaacctataaaactaagtccctacgataaagtgggatgggaaactgaactacaatgctgtaaattgtttggtagacccatgagacaatatttaactgatactccattttactatgacttaaaaccagaacccattgtaaactttaaccttaattttactttctaggcctgcattaatacacttaacaagcatgtttaataaagtttcaacttaaataaacagactccgcctccctaaatcgccggcgtagggggctccgccccctacaacccccgggggggggcaaagcccccccctataacacctacaagagcagcatacttatttttagatgacttcttcacaaacccactaaaacgggaactaacacaactaaaccacaaaatttgcattgccaaccacaaactgacaggaaaaccacaaaatttgcattgccgaccacaaactgacaggaaaaccactaaatttgcattgccgaccacaaactgtcactaacttcctcatacactaactacttccttaaaaactacttattattcattacattaattattaaacactgtaattccggggaggagactattaactatataactaactaacatgacgaatggctgagtttatactgccagacggagtcggcatcacttcagtgactgcagactgatcttggg

SEQ ID NO: 3075 - protein, 637 aa, Betatorquevirus sp.; identical to SEQ ID NO: 2285

SEQ ID NO: 3076 - protein, 109 aa, Betatorquevirus sp.; identical to SEQ ID NO: 2286

SEQ ID NO: 3077 - DNA, 2887 bp, Betatorquevirus sp.
cgggtgctggaggtgagtgaaaccaccgaaatcaaggggcaattcgggctatatcagtctaacggaacgggcaagaaacttaaataaatactttttttacagatgagcaacagcaaattatcaaaaagagacaacttacaattagtaaactgctatgttagcatccacgacctaaaatgcaactgcgatcacccacttcaatgcattcttcaacaaattaatactcaagaaccaactctcaacattacctacaaaaaatgccctactggtatcgaaactggagatcaccatggtggaaaagaagaagaaaaaccttttggagaagaagaactcgaggctattttcgaaaaagacgctaccgaaggagacgggtaagaagaaaactaaaaactatctctttaagacaatggcagccttctactattcacaaaaccacagtaaaaggactatactgtttacttatagcccaccataaaagaattaacaaaaactggggacaatatcaaggaactgtggttgccgaaggactaccgggaggagggggatatagtatactaagatttactttagactccttattttctgaacatgaacttgtaagaaatgtatggacaaaatctaacaaacatttaccactgtttagatataatggatgtgaaattaagatatatagacctgaaaatgttgatttagttgtaagatttcaaacatgttacccaatgtcagctagccaatttttatatttaggatgtcaaccaggtataatgatgatgtctaaacatagccatataataccaagtttaaaaacaaaaccatatggaaaacactataaaaaatttagattaccaccacctcaacaaatgcaaaacaaatggtattttcaatcacaagaagcaaaaacaggcttacttttaatacaagcagctgcctgttctttaaaccaatactacatatcacaatacgcagaatcagacaccattacactatatacattaaacacaaaaatatttactaatttaaattttaaaaactttccaccaacaacaggataccaaccaaacccaaacatgtacttttgggcactacgaaacggagacgcaaaatacaaaaacctaatatacttaggaaacacaatagaataccaagaaggaaagacaatcgaagaagtagacacagactttaaaaaagctaaagaaaaatacatgaaaactaggcttaattggggaaacccatttgcacaaaaatatatgcacaaacaagtaaaaatgtactttacaaaaacacacttttctctagcactatcacaagtaaccaatggtgaagaagacatatcaggcaccaaaggctttacagaactaacacaagaactattttttatgctaagatacaaccccagaaatgattcaggaaaaaacgcacaaatataccttaaatcaaattggaaagaaaatgaaaatttagaacccccagaagacgaaaacctaaaagcaacaggttttcctaattggttaggatgctggggatttgtagactatgaaattaaacttggaaaagtaacacaagtacctactcattatatagtagtaatgatatctgaattttttactccaaaactacaatactatttactaatagacaaatacttcacagaaggagacagcgaatatttagaaggccgtacaggctgggaaaatttaaactggtatccaatgataacacatcaagatgactccctaaacacattagcactatcaggcccaggaacacctaaactaggatccattaaatcagcagaatgtaaaatggaatacaaatttcacttaaaggttggcggctgtgcagcaccaatggaaaaagttgcaaacccgtcagaacaaccaacttttccagtcccagataaactcattgactcaaattcgttacagaatccaacaacaccaatcgaatccttcttatggcaattcgatgaaaggcgaaatcaaattactgcaaaagctgcagaaagaatcacaaaagacttcggacttacagaatctttatttacagattcagcaacaactggaacagaagtcccagtccacaaaacattcccggaaaaagacctgtcgtcggaggaggaggaagcccaagaacaaacattattcgagcagctccagcagcacagactacaccaacagcaactcagacaacgaatcaagctcctcctaaacaaactacaaagttcaacataatacatagtaaaataaatgtatctatgttttatgaggaaacaaaaaataggagactaactcctaaagaaatggaggatgaaaaatacatagctaacctttttaaaagaccttataggcattttctaaaagacaaaccattttatccatatgtacctgttgatgaaaaatgcatggtaaactttgatcttaactatccctattaataaaggccctattgattcactctcggtgtctgttcctttaagtttcaaacttatataaaccacacccttctcccaaaatttgggcgccaaaagggggctccgcccccttaaacccccaagggggctccgcccccttaaacccccaagggggctccgcccccttacaccccctaataaatattcatacaggaaaccacaaaattagaattgccgaccacttcatacaggaaaccacaaaattagaattgccgaccacaaacgaatatgcaaattaacttcctaaaaattagtaaaatacttccctaaaaattaattattaaacaccgtcacatcctattatgacgtacaaaacaggcggagctaaaaccctatataactaacacaccagacgaatggctgagtttatgccgttagacggagacgagacaacaagttgactcggctgatattggg

SEQ ID NO: 3078 - protein, 657 aa, Betatorquevirus sp.
MPYWYRNWRSPWWKRRRKTFWRRRTRGYFRKRRYRRRRVRRKLKTISLRQWQPSTIHKTTVKGLYCLLIAHHKRINKNWGQYQGTVVAEGLPGGGGYSILRFTLDSLFSEHELVRNVWTKSNKHLPLFRYNGCEIKIYRPENVDLVVRFQTCYPMSASQFLYLGCQPGIMMMSKHSHIIPSLKTKPYGKHYKKFRLPPPQQMQNKWYFQSQEAKTGLLLIQAAACSLNQYYISQYAESDTITLYTLNTKIFTNLNFKNFPPTTGYQPNPNMYFWALRNGDAKYKNLIYLGNTIEYQEGKTIEEVDTDFKKAKEKYMKTRLNWGNPFAQKYMHKQVKMYFTKTHFSLALSQVTNGEEDISGTKGFTELTQELFFMLRYNPRNDSGKNAQIYLKSNWKENENLEPPEDENLKATGFPNWLGCWGFVDYEIKLGKVTQVPTHYIVVMISEFFTPKLQYYLLIDKYFTEGDSEYLEGRTGWENLNWYPMITHQDDSLNTLALSGPGTPKLGSIKSAECKMEYKFHLKVGGCAAPMEKVANPSEQPTFPVPDKLIDSNSLQNPTTPIESFLWQFDERRNQITAKAAERITKDFGLTESLFTDSATTGTEVPVHKTFPEKDLSSEEEEAQEQTLFEQLQQHRLHQQQLRQRIKLLLNKLQSST

SEQ ID NO: 3079 - protein, 90 aa, Betatorquevirus sp.
MSNSKLSKRDNLQLVNCYVSIHDLKCNCDHPLQCILQQINTQEPTLNITYKKCPTGIETGDHHGGKEEEKPFGEEELEAIFEKDATEGDG

SEQ ID NO: 3080 - protein, 59 aa, Betatorquevirus sp.
MFYEETKNRRLTPKEMEDEKYIANLFKRPYRHFLKDKPFYPYVPVDEKCMVNFDLNYPY

SEQ ID NO: 3081 - DNA, 2887 bp, Alphatorquevirus sp.
gtcggtgtctacctctaaaggtcactaagcaccaaggggcaattcgggctcgggactggccgggctatgggcaaggctcttagggtattcattcttaaaatgtttatcggcagggcctaccgccacaagaaaaggaaagtgctactgtcctcactgcgagctccacaggcgtctcgcagggctatgagttggagacccccggtacacgatgcggccggcatcgagcgcagttggtacgaagcctgttacagagcccacgctggagcttgtggctgtggcaattttattatgcaccttaatcttctggctgggcgttatggttttactccgggttcagcaccaccaggtggtcctcctccgggcaccccgcagataaggagagccagacctagtcccgccgcgcccgagcagcctcaagccctaccatggcatggggatggtggaaacggtggcgcaggtggcccgccagacgctggaggagacgccgtcgccggcgccccgtacggagaacaagagctcgccgacctgctcgacgctatagaagacgacgaacagtaagaaccaggcggaggcggtgggggcgcaaacggtacagacggggctggagacgaaggacttatgtaaggaaggggcgacacagaaaaaagaaaaaaagactaatactgagacagtggcaaccagccaccagacgcagatgcactatcactgggtacctgcccatagtgttctgcggccacactaagggcaataaaaactatgcactacactctgacgactacaccccccaaggacagccatttggaggggctttaagcactacctcattctctttaaaagtactatatgaccaacatcagagaggactgaacaagtggtctttccctaatgaccagctagacctcgccagatacagaggctgcaaattttacttttacagaacaaaacagacggactgggtgggccagtatgacatagcagaaccctacaagctagacaaatatagctgccccaactatcacccgggaaacatgattaaggcaaagcacaaatttttaattccaagctatgacactaaccccaggggcagacaaaaaattatagttaaaatcccccccccagacctctttgtagacaagtggtacactcaagaggatctgtgtaccgttaatcttgtgtcacttgcggtttctgcggcttcctttctccacccattcggctcaccacaaactgacaacccttgctacaccttccaggtgttgaaagacttctactataaggcaataggcttttcctcttctacagaaaaccaaaactcagtattagacacattatactcacaaaactcatactgggaatctaacctaactccttactatgtactacatgcaaaaaaaggcaataacacaggagagaatttaacaaccgatcagccaaccagaaatgattttgtagctaacaaaagcacaaactacaactggtacacctacaaagctagcttacatgcacagaaactacataacatgagacaagcctactttaaacagcttactaaggaagggccccaacaaacaacctctaaggaaggctatgcatcacagtggactactcccacaacagactgttatgaatatcacttaggcatgtttagcccaatatttctagcaccagacagacccgtgccacgctttccttgcgcctaccaagatgttacttacaacccactaatggacaaagggattggcaaccacgtgtggtttcagtacaacacaaaggcagatacccagcttatagtcacaggagggtcctgcaaagcacacatagaaaacatacccctgtgggcagccttctatggctacagtgactttatagagtcagagttaggtccctttgtagatgcagaaacggtgggcctcatctgtacaatctgcccttacacaaaaccccccatgtacaacaaaagcaatccctccatgggctacgtgttctatgacagaaactttggtgacggcaaatggactgacggacggggtaaaatagagccctactggcaagtcaggtggagaccagaaatgcttttccaagagactgtaatggcagacatagtacaaacagggccctttagctacaaagacgaacttaaaaacagcacactagtgtgcaagtacaaattctattttacctggggaggtaacatgatgtttcaacagacaatcaaaaacccgtgcaagacggacggacaacctaccgactccagtagacaccctagaggaatacaagtggcggacccgcaacaagtgggaccccgctgggtgttccactcctttgactggcgaaggggctatcttagcgagaaagctctcaaacgcctgcaagaaaaacctcttgactatgacgaatattttacacaaccgaaaagacctagaatatttcctccaacagaatcagcagagggagagttccgagagcccgaaaaaggctcgtattcagaggaagaaaagtcgcaagcctctgccgaagagcagacggaggaggcgacagtactcctcctcaagcgacgactcagagagcaacagcagctccagcagcaactccaattcctcacccgagaaatcttcaaaacgcaagcgggtctccacctaaaccctatgttattaaaccagcggtaaaccaggtgtacctgtttccagagagggccccaaaaccccctcctagcagccaagactggcagcacgagtacgaggcttgcgccgcctgggacaggcctcccagatacaacctatcctctcctcctttttaccccagctgcccttctaaattctgtgtaaaatttagcctcggcttcaaataaatggcaacttcactgtacaaggccgtgggagtttcactg

SEQ ID NO: 3082 - protein, 746 aa, Alphatorquevirus sp.
MAWGWWKRWRRWPARRWRRRRRRRPVRRTRARRPARRYRRRRTVRTRRRRWGRKRYRRGWRRRTYVRKGRHRKKKKRLILRQWQPATRRRCTITGYLPIVFCGHTKGNKNYALHSDDYTPQGQPFGGALSTTSFSLKVLYDQHQRGLNKWSFPNDQLDLARYRGCKFYFYRTKQTDWVGQYDIAEPYKLDKYSCPNYHPGNMIKAKHKFLIPSYDTNPRGRQKIIVKIPPPDLFVDKWYTQEDLCTVNLVSLAVSAASFLHPFGSPQTDNPCYTFQVLKDFYYKAIGFSSSTENQNSVLDTLYSQNSYWESNLTPYYVLHAKKGNNTGENLTTDQPTRNDFVANKSTNYNWYTYKASLHAQKLHNMRQAYFKQLTKEGPQQTTSKEGYASQWTTPTTDCYEYHLGMFSPIFLAPDRPVPRFPCAYQDVTYNPLMDKGIGNHVWFQYNTKADTQLIVTGGSCKAHIENIPLWAAFYGYSDFIESELGPFVDAETVGLICTICPYTKPPMYNKSNPSMGYVFYDRNFGDGKWTDGRGKIEPYWQVRWRPEMLFQETVMADIVQTGPFSYKDELKNSTLVCKYKFYFTWGGNMMFQQTIKNPCKTDGQPTDSSRHPRGIQVADPQQVGPRWVFHSFDWRRGYLSEKALKRLQEKPLDYDEYFTQPKRPRIFPPTESAEGEFREPEKGSYSEEEKSQASAEEQTEEATVLLLKRRLREQQQLQQQLQFLTREIFKTQAGLHLNPMLLNQR

SEQ ID NO: 3083 - protein, 163 aa, Alphatorquevirus sp.; identical to SEQ ID NO: 1941

SEQ ID NO: 3084 - protein, 56 aa, Alphatorquevirus sp.; identical to SEQ ID NO: 1942

SEQ ID NO: 3085 - DNA, 2887 bp, Alphatorquevirus sp.
gtcggtgtctacctctaaaggtcactaagcaccaaggggcaattcgggctcgggactggccgggctatgggcaaggctcttagggtattcattcttaaaatgtttatcggcagggcctaccgccacaagaaaaggaaagtgctactgtcctcactgcgagctccacaggcgtctcgcagggctatgagttggagacccccggtacacgatgcggccggcatcgagcgcagttggtacgaagcctgctacagagcccacgctggagcttgtggctgtggcaattttattatgcaccttaatcttctggctgggcgttatggttttactccgggttcagcaccgccgggtggtcctcctccgggcaccccgcagataaggagagccagacctagtcccgccgcgcccgagcagcctcaagccctaccatggcatggggatggtggaaacggtggcgcaggtggcccgccagacgctggaggagacgccgtcgccggcgccccgtacggagaacaagagctcgccgacctgctcgacgctatagaagacgaccaacagtaagaaccaggcggaggcggtgggggcgcaaacggtacagacggggctggagacgaaggacttatgtaaggaaggggcgacacagaaaaaagaaaaaaagactaatactgagacagtggcaaccagccaccagacgcagatgcactatcactgggtacctgcccatagtgttttgcggccacactaagggcaataaaaactatgcactacactctgacgactacaccccccaaggacagccatttggaggggctttaagcactacctcattctctttaaaagtactatatgaccaacatcagagaggactgaacaagtggtctttccctaatgaccagctagacctcgccagatacagaggctgcaaattttacttttacagaacaaaacagacggactgggtgggccagtatgacatagcagaaccctacaagctagacaaatatagctgccccaactatcacccgggaaacatgattaaggcaaagcacaaatttttaattccaagctatgacactaaccccaggggcagacagaaaattatagttaaaatcccccccccagacctctttgtagacaagtggtacagtcaagaggatctgtcttccgttaatcttgtgtcacttgcggtttctgcggcttcctttctccacccattcggctcaccacaaactgacaacccttgctacaccttccaggtgttgaaagagttctactataaggcaataggcttttcctcttctacagaaaaccaaaagtcagtattagacacattatacacacaaaactcatactgggaatctaacctaactccttactatgtactacatgcaaaaaaaggcagtaacacagcagacaatttaacaagcgatcagccaaccagaaataactttgtaaataacaaaagcacaaactacaactggtacacctacaaagctaactcatgtaaaaaacaactacataacatgagaatggcctactttgatgagcttactaaacacgggccccaacaaacaaagtctactgacggctatgcatcacagtggactactcccacaacagactcttatgaatatcacttaggcatgtttagcccaatatttctagcaccagacagacccgtgccacgctttccttgcgcctaccaagatgttacttacaacccactaatggacaaagggattggcaaccacgtgtggtttcagtacaacacaaaggcagatacccagcttatactcacaggagggtcctgcaaagcacacatagaaaacatacccctgtgggcagccttctatggctacagtgactttatagagtcagagttaggtccctttgtagatgcagaaacggtgggcctcatctgtacaatctgcccttacacaaaaccccccatgtacaacaaaagcaatccctacatgggctacgtgttctatgacagaaactttggtgacggcaaatggactgacggacggggtaaaatagagccctactggcaagtcaggtggagaccagaaatgcttttccaagagactgtaatggcagacatagtacagacagggccctttagctacaaagacgaacttaaaaacagcacactagtgtgcaagtacaaattctatttcacctggggaggtaacatgatgtttcaacagacaatcaaaaacccgtgcaagacggacggacaacccaccaactccagtagacagcctagaggaatacaagtggcggacccggaacaaatgggaccccgctgggtgttccactcctttgactggcgaaggggctatcttagcgagaaagctctcaaacgcctgcaagaaaaacctcttgactatgacgaatattttacacaaccaaaaagacctagaatgtttcctccaacagaatcagcagagggagagttccgagagcccgaaaaaggctcgtattcagaggaagaaaagtcgcaagcctctgccgaagagcagacggaggaggcgacagtactcctcctcaagcgacgactcagagagcaacagcagctccagcagcaactcgaattcctcacccgagaaatgttcaaaacgcaagcgggtctccacctaaaccctatgttattaaaccagcggtaaaccaggtgtacctgtttccagagagggccccaaaaccccctcctagcagccaagactggcagcaggagtacgaggcttgcgccgcctgggacaggcctcccagatacaacctatcctctcctcctttttaccccagctgcccttctaaattctgtgtaaaatttagcctcggcttcaaataaatggcaacttcactgtacaaggccgtgggagtttcactg

SEQ ID NO: 3086 - protein, 746 aa, Alphatorquevirus sp.
MAWGWWKRWRRWPARRWRRRRRRRPVRRTRARRPARRYRRRPTVRTRRRRWGRKRYRRGWRRRTYVRKGRHRKKKKRLILRQWQPATRRRCTITGYLPIVFCGHTKGNKNYALHSDDYTPQGQPFGGALSTTSFSLKVLYDQHQRGLNKWSFPNDQLDLARYRGCKFYFYRTKQTDWVGQYDIAEPYKLDKYSCPNYHPGNMIKAKHKFLIPSYDTNPRGRQKIIVKIPPPDLFVDKWYSQEDLSSVNLVSLAVSAASFLHPFGSPQTDNPCYTFQVLKEFYYKAIGFSSSTENQKSVLDTLYTQNSYWESNLTPYYVLHAKKGSNTADNLTSDQPTRNNFVNNKSTNYNWYTYKANSCKKQLHNMRMAYFDELTKHGPQQTKSTDGYASQWTTPTTDSYEYHLGMFSPIFLAPDRPVPRFPCAYQDVTYNPLMDKGIGNHVWFQYNTKADTQLILTGGSCKAHIENIPLWAAFYGYSDFIESELGPFVDAETVGLICTICPYTKPPMYNKSNPYMGYVFYDRNFGDGKWTDGRGKIEPYWQVRWRPEMLFQETVMADIVQTGPFSYKDELKNSTLVCKYKFYFTWGGNMMFQQTIKNPCKTDGQPTNSSRQPRGIQVADPEQMGPRWVFHSFDWRRGYLSEKALKRLQEKPLDYDEYFTQPKRPRMFPPTESAEGEFREPEKGSYSEEEKSQASAEEQTEEATVLLLKRRLREQQQLQQQLEFLTREMFKTQAGLHLNPMLLNQR

SEQ ID NO: 3087 - protein, 163 aa, Alphatorquevirus sp.
MGKALRVFILKMFIGRAYRHKKRKVLLSSLRAPQASRRAMSWRPPVHDAAGIERSWYEACYRAHAGACGCGNFIMHLNLLAGRYGFTPGSAPPGGPPPGTPQIRRARPSPAAPEQPQALPWHGDGGNGGAGGPPDAGGDAVAGAPYGEQELADLLDAIEDDQQ

SEQ ID NO: 3088 - protein, 56 aa, Alphatorquevirus sp.
LFPERAPKPPPSSQDWQQEYEACAAWDRPPRYNLSSPPFYPSCPSKFCVKFSLGFK

SEQ ID NO: 3089 - DNA, 2887 bp, Alphatorquevirus sp.; identical to SEQ ID NO: 3085

SEQ ID NO: 3090 - protein, 746 aa, Alphatorquevirus sp.; identical to SEQ ID NO: 3086

SEQ ID NO: 3091 - protein, 163 aa, Alphatorquevirus sp.; identical to SEQ ID NO: 3087

SEQ ID NO: 3092 - protein, 56 aa, Alphatorquevirus sp.; identical to SEQ ID NO: 3088

SEQ ID NO: 3093 - DNA, 2887 bp, Betatorquevirus sp.
cgggtgctgaaggtgagtgaaaccaccgaaatcaaggggcaatatgggctcagtcagtctagcggaacgggcaactaactaaattatattttacagaatgtcaaactactacaaaccaataacatggagcagaaagcactgcgacctaaactggattaacagcattgttactgtacatgaccttcaatgcgcctgcaatgatccactaaaacacacaatactagcaataattaaccaagaaccatcccttcgatttaacaaagaagaatctaaaaaaatacaacaatgccttacttctggagaccaagaagacggagatattttaggaaacattggagacggagacctagaggcctttttcgccgcagactttggagaagaagacgcagaaccacggtaagaaaaagaaaacttaaaaaaataatagtaaaagaatggcaaccaagtactataagaaaactaaaaataagagggatgtacccactatatgaaggaactcgagaaagactaagtaataactttaaccaatgggccgcatcaatagctcctcatggatttcccggaggaggactatggtcaatgataagattttctctaacttctctatatgaactacaccttaaaggcagaaactggtggacaatgtctaactgctctttaccactaataaaataccaaggatgctccatcaaattttacagatctactaacacagactatataacagtgtacacaacatgtggagacatgacagcaaacttagaaacgtatcactcctcacaaccagcaatattaaacttaaacaaaaaaaaagtaataatgacatgtaaagaaaacaaccactacaaaaaaccatacaaaaaaaaatttataagaccacctccactattcgaaaacaaatggtattttcaaagagacatagccaaaatacctttattaatgctaataacatcttcatgcagtttagacagatggtacataaactcaaaagccgaatcaaacacattaggatttatatcattaaacacagacttctttgtttaccataacttcaaaaaaccaccaataaccacaggatatataccaaatgcaacattttcattatacacatcaggaacaaacgttaccttagcagaattaaaatggtcaaacttaatttacttaggtaacacaaaagacatgcaaccaggtaaaacaataggaagtatgactggaacttcaaaagaaaaattaaacaaatatttttctgacataaaaaactggggaaatcccttctttccagcctactttcacccagaataccctaactactatacaacaatgaataaatttgataaaattaaagaactagccgaaacaaatcttgaagcaaaagtaagtgaatttacaaacctatcacaagacttattttgggaatgcagatacaatcccgaaaatgactctagcagaaacgcttactttattacagatatagaaacattaagaccatgggaaaacccatcaaaagataatctaacagaacaaggtttaccactatggctactattacatggtaccatagattatcatcaaaaactaggagacattcaacacctaatgacagatcacatactatgcataacatccgactacattacaccaacaaaagattactatgtaccactagacagagactttttacaaggacacagtccctatacagacatagtaagagaaaatgacaaatttttttggtttcctaaactgaattttcaacaaagaacaattaatgacattgtttcagtaggaccagcaacaccaaaacttccaccagacataagctctgaggctaaaattgaatataaatttcattttaagctgggaggatgtccaccacaaatggacgacgtatgcgaccctaactcaagatcaaaatggcccactcccagtaacctcatatcatcaactttattgcagagtccagaaacaccaatcgaatactaccttagcagctttgaccaaagacgaggactactcacaaacaaagctgcaaaacgaattaaaaaagactttgggcctaaagaaactttgcttgaatttacaggacaaactacaacagaagtgccaatacaaagcccagcaacatcgtcggaagaggaaacaaccgaggaaaaagagaaagaagagatacagctccagttcagacaccacagaagaaagcaaagaaaactccagcagcgaatcctccagctcctagaactactccaggaataataataaaagacagtaaaataagagtacaactctttccaactcctaaacctaacagaccacttacaccgcaagaaaaacaaactgatctagaaatagctaaatggctacatcgcccagtacgctactattttaatgatcctccattttatccctggttagtacctgaacctaaagttaactttaagcttaactatgtagaataaaggcctgcattaattcacttgaggtgtccatttgtattatttaaaacttaaataaacagtcaccgcctcccaaaaaccgccggcgtacagggggctacgccccctgaaacccccagggggggacacccccccctaaacccccccccccgaaaaaccacaaaatttgcattgccaaccacaaactgtcacttacttcctaaaacaacgaacaggaaaaccacaaaatttgcattgccaaccacaaactgtcacttacttcctaaaactttactaacttcctttttttcttataaatattcatctaattaattattaaacccacgtcacaaaggcggagttaacaatactataaaactaactgcactgacgaatggctgagtttatgccgctagacggagacgaaggcaacactgacttcggctgactgaggg

SEQ ID NO: 3094 - protein, 655 aa, Betatorquevirus sp.
MPYFWRPRRRRYFRKHWRRRPRGLFRRRLWRRRRRTTVRKRKLKKIIVKEWQPSTIRKLKIRGMYPLYEGTRERLSNNFNQWAASIAPHGFPGGGLWSMIRFSLTSLYELHLKGRNWWTMSNCSLPLIKYQGCSIKFYRSTNTDYITVYTTCGDMTANLETYHSSQPAILNLNKKKVIMTCKENNHYKKPYKKKFIRPPPLFENKWYFQRDIAKIPLLMLITSSCSLDRWYINSKAESNTLGFISLNTDFFVYHNFKKPPITTGYIPNATFSLYTSGTNVTLAELKWSNLIYLGNTKDMQPGKTIGSMTGTSKEKLNKYFSDIKNWGNPFFPAYFHPEYPNYYTTMNKFDKIKELAETNLEAKVSEFTNLSQDLFWECRYNPENDSSRNAYFITDIETLRPWENPSKDNLTEQGLPLWLLLHGTIDYHQKLGDIQHLMTDHILCITSDYITPTKDYYVPLDRDFLQGHSPYTDIVRENDKFFWFPKLNFQQRTINDIVSVGPATPKLPPDISSEAKIEYKFHFKLGGCPPQMDDVCDPNSRSKWPTPSNLISSTLLQSPETPIEYYLSSFDQRRGLLTNKAAKRIKKDFGPKETLLEFTGQTTTEVPIQSPATSSEEETTEEKEKEEIQLQFRHHRRKQRKLQQRILQLLELLQE

SEQ ID NO: 3095 - protein, 100 aa, Betatorquevirus sp.; identical to SEQ ID NO: 2174

SEQ ID NO: 3096 - DNA, 2887 bp, Alphatorquevirus sp.
ctctaaaggtcactaagcactccgagcgttagcgaggagtgcgtcgggctcgggactggccgggctatgggcaaggctcttaaaaaagacatgtttcttggtaaactttacagaaagaaaaggacactgtcactgtgcggcctgccagcagcaaagaaaaaaccacctagtgatatgagctattggaggccacccctgcacaatgtcccggggctggaacacctctggtacgagtccgtgcatcgtggccatgctgctgtttgtggctgtgggaattttgtacgccatcttgctgctcttgctgaaagatatggctacccgggggggccgagcactcctggggcaccctcagtagggggcggcggtaaccctcccatccgtcgagcccgccacccggcggccgctccggatcccccggcaggtaaccaggctccggcgctgccatggcatggagatggtggaaacgaaagcggcgctggtggtggagaaaacgatggacccgagggaggtttcgaagacgacggactggacgccctcgtcgccgccctcgacgacgaagagtaaggagaaaaagacagtggaggagggggcgacgcagacgaacctataacagacgtaggagacgcttaaaaaagaaacgtaggccaaaactgactctgagactgtggcagccagacatggtcagaaaccttaaagtgagcgggtacataccaattataattagtggctttggaactttcagtagaaactttagcagccacctactagacaaagttataaaagagccctttggagggggccacagcaccatgagattttccctacaaatattatttgaggagcacctcaggggtctcaactactggtcctactctaacacagacctagagcttgttagatacaggtactgcaaattcaccttcttcagacacccagacacagactacattgtacagtataacagaaagaccccccttggaggcaacatactaacagcaccatcactacacccaggctctctaatgctgcaaaaatacagggtcctggtccccagctggaaaacaaaacctaagggaaagggcacagtatccattaagattcccccccccactatgctaactgacaagtggtatttttccaaagacgttgcagacctcacattgctaaacctcaacgcagtgtcagctgacctgcggtttccgttctgctcaccacaaacgaacactacttgcatcactttccaagttctctcttctgtgtacaacaagttcctctctataactgaaattaaccctgctaatgaaaaaacaaaaattgatgagtttttaaacgctgctatgccaaaagacaaatcagcaaacatattaaatacttttaaatcagaaggtaactacagtcacccttctataaaagtatttaatggctctaacagacccacaagtgaacaatattttgctacaaatgacagcctgtggggagatgccatatttgtaaattctgcacaaaagttatgtgacttaaaacaaaaaattaaagcaaacattgaaaactacaaaaaaaaagtactacaagaaataacagcagtaacacaacaaggcacaagtctattttaccacttagttggaatttatggcagcagctggctaaaccaaggcagaatgagcccagaaatactaggcctatacacagaagttatttacaatccatactgtgacaaaggagtaggcaacctcctatggatagatcccttaaacaaatcagacaacctatacaaaccaccacaaagcaaatgcccacttaaagacatgccactgtggcaaatgacctttggctacatagactgggtaaaaaaagaactaaaccactgggacgcccctataaactacagaattcttttaagatctccatatacatttccaaaactataccatgacacacaaccagaatatggctttgtaatagtatcctacaactttacagcaggcaagatgccagacgggtccatgtacgtacccatactttacagaaccaagtggtacccctacatgttaaaccaagaatcagtaatggaagatataagcaggtcagggccttttgcacccaaacaagaaatgcccagcacagaactggttgcaaagtacacatttaagtggaaactcgggggcaaccccatttccgaacaggttgttaaagaccccagcacacaacccacctacgagctgcccgcagccggtacaatccctcgtagagtacaagttatcgacccgaaaatcgtcggacccaacatatcgttcaaaagctgggagatcagacgtggatactttagctcgacaagtattaaaagaatgtcagaacaacaagaaacttctgagtcttatttcccaggtccaaaaagacccagaatcgatctgccaaaatacgagccgccagaagaaagctggagtactctccaaagagaactccggccgtggacggactcggaggcggaaaaagaccaaagctcctcggaagaggaagaagagagacccctccgagagcagctgcagctccagctcaaggagcagcagcacctcagacggggaatccagtgcctgttcgaacaactcctaaaaacccaacagggagtccacgtcaatccctgcctcgcgtaggccccgagcagtggttgttccccgagagaaagccaaagccaggtccctcgtcccaagactgggccatggagtacctggcctgcaaaatatttgataggccccccagaagcaggcttacagattaccctttctatccctactgcaaaaacaattacaatgtaacctttcagcttaactacaaataaatggcagcttcactgttctaggccgtgggagtttcacttgtcggtgtctac

SEQ ID NO: 3097 - protein, 735 aa, Alphatorquevirus sp.
MAWRWWKRKRRWWWRKRWTRGRFRRRRTGRPRRRPRRRRVRRKRQWRRGRRRRTYNRRRRRLKKKRRPKLTLRLWQPDMVRNLKVSGYIPIIISGFGTFSRNFSSHLLDKVIKEPFGGGHSTMRFSLQILFEEHLRGLNYWSYSNTDLELVRYRYCKFTFFRHPDTDYIVQYNRKTPLGGNILTAPSLHPGSLMLQKYRVLVPSWKTKPKGKGTVSIKIPPPTMLTDKWYFSKDVADLTLLNLNAVSADLRFPFCSPQTNTTCITFQVLSSVYNKFLSITEINPANEKTKIDEFLNAAMPKDKSANILNTFKSEGNYSHPSIKVFNGSNRPTSEQYFATNDSLWGDAIFVNSAQKLCDLKQKIKANIENYKKKVLQEITAVTQQGTSLFYHLVGIYGSSWLNQGRMSPEILGLYTEVIYNPYCDKGVGNLLWIDPLNKSDNLYKPPQSKCPLKDMPLWQMTFGYIDWVKKELNHWDAPINYRILLRSPYTFPKLYHDTQPEYGFVIVSYNFTAGKMPDGSMYVPILYRTKWYPYMLNQESVMEDISRSGPFAPKQEMPSTELVAKYTFKWKLGGNPISEQVVKDPSTQPTYELPAAGTIPRRVQVIDPKIVGPNISFKSWEIRRGYFSSTSIKRMSEQQETSESYFPGPKRPRIDLPKYEPPEESWSTLQRELRPWTDSEAEKDQSSSEEEEERPLREQLQLQLKEQQHLRRGIQCLFEQLLKTQQGVHVNPCLA

SEQ ID NO: 3098 - protein, 165 aa, Alphatorquevirus sp.
MGKALKKDMFLGKLYRKKRTLSLCGLPAAKKKPPSDMSYWRPPLHNVPGLEHLWYESVHRGHAAVCGCGNFVRHLAALAERYGYPGGPSTPGAPSVGGGGNPPIRRARHPAAAPDPPAGNQAPALPWHGDGGNESGAGGGENDGPEGGFEDDGLDALVAALDDEE

SEQ ID NO: 3099 - protein, 132 aa, Alphatorquevirus sp.
LEYSPKRTPAVDGLGGGKRPKLLGRGRRETPPRAAAAPAQGAAAPQTGNPVPVRTTPKNPTGSPRQSLPRVGPEQWLFPERKPKPGPSSQDWAMEYLACKIFDRPPRSRLTDYPFYPYCKNNYNVTFQLNYK

SEQ ID NO: 3100 - DNA, 2886 bp, Betatorquevirus sp.
caggtaccgaaggtgagtgaaaccaccggagttaaggggcttattgggctaaagcagtcttggcggaacgggcaagaaactaaaataaactattattttacagcaatgagctcctaccttacaccagttatctacagcaagaatgctttagaaaaccagtgggtaaatactattttcaacacacacgatctttgctgtggatgcaacgacgccattaaacacctagccgccattttacaaagaaaaggaacacaactatgcctcccttcaacttctaccggagacgctactacccaaaccgatggagacgccgtagatactttagacgccggagatttagaccttctattcgccgaagattttggagaagacgaacggtaagaagacgccgtttttttaaaaaatataaaagaaaacttactaaaattaaacttaaccaatggcaaccacaaactataaacaaatgccacataaaaggaaatctttgtgcttttacttgtggaagaggtagagaaaaccacaattttattttaacacaagaaagctatgtacctacatctcaacctggagggggatcttggtctatactacaatttaccttaagagtactatatgatgaacataaagcaggcagaaattggtggacaaaaggaaatacaggtttaccacttgtaagatatatactatgcaaacttaaattttacagaagtaaagacacagactacctagtaacaatacaaagaacaccacctttcgaagtaactagagactcatacttaagcacacaaccatctagacacttaatgcaccacaaatctattatagttcctaaactaggaagaggaccaaacaaaaaaacatatataaaaagaaaagttctccctccagcaatgtttcaaaacaaatggtactttcaacaagacatatataatataccattttttatgttaaccatttcagcactagaactagatcaaatgtacgccccagaagaccaaataagctcaaatataacacttatatcactaaatacaaatgcatttcaaatgagtaactgggaaagacaaccatacagcacaaaatcagcaggaacatataacatatacttatggagttaccaaaatggtgacgataaaaataaaaaatggcaaaacatatattttttaggaaactgtaaagaatacacagaaggaactaagttaaatacattgcaagaatgcaaagaggtagcagaaattaaaaataaacaaaaatggggaaatccatttacacactggtataaccataaagatgcaagaatattttatggtgctataccaacaacaagacaagaaaccgatgatgctaacatattagaattagaagatttgtttatagaatgcagatacaacccatttaaagacaaaggcacaggaaacaaagtatacttagtacccacagacacaggcctaggtagctttttaacattaccaacaaaaaatgaattattaatagaaaatttaccactatggcttatattttggggttgggcagactggataaaaaagtctaaaccaatagcacacttagaagaagaataccaaataataatacaaactccatatatatttccaaaattaccatgttatgtactaacagacaaatactttctacacccaccaaatgacggaacacacacaaccacactatcacaaacagaccaactacattggcacataaaatacaactttcaagaacaacaatttaacttactagcaaaaacaggaccagcagcaccaaaaataaatgaagttaaacaaatagaagcacactttaactataacttttattttaagtggggaggaagcccagctccaatggaacaaattagtgacccagcagaccaagaaaaattccccacgcccaatacgcaactccaaagacttgagattgagagtccaacaaaacccaaacaacacttcttgtacaccttcgacgaaaagcgacacacactcacactcaaagctgcaaaaagacttaaaaaagactattcaactccaacattttttacagactttggagcaaaagacatcccgctcaaagcacaaacggaaagcgacagctcatcggaggaggaagaaatccaaacatcactccagagagaagacaaactcaagcagtacctccagcgaaagcgactccagtacagacagcgaatccacaacctcctaaaaacaaaaaaattattccccctttaagagacatgtttggacaaccttactataaaaaccgtagacttaatgctaaagaatttgaacaagaattgcttgatgctaaatgctggaaaagacgccccagactgtatatctttgataaacctgattatgaattacctactattgaaccacttgtaaacattggtgtaaatttttcattaaactttaaagagtaggccagcaaatattcacttgtcggtgtcagtttatataagtaataaccttaataaacatccatcacctccctaatacgcaggcgcacaagggggctccgcccccttaaacccccaagggggctccgcccccttaaacccccaagggggctccgcccccttacaccccctaattaatattcaacaggaaggctccgcccccttacaccccctaattaatattcaacaggaaaaccacctaattataattgccgaccacaaactgtcaaccgttgcatatacttccctaaattaaactgcacttctgctttttcagaaacactcccactaattcattaataatcagacgctattcctgggaggagcaacacatctatataaccaagtgcactgacgaatggctgagtttaccccgccagacggagaccagacaggacactgactgggctgcttttggg

SEQ ID NO: 3101 - protein, 659 aa, Betatorquevirus sp.
MPPFNFYRRRYYPNRWRRRRYFRRRRFRPSIRRRFWRRRTVRRRRFFKKYKRKLTKIKLNQWQPQTINKCHIKGNLCAFTCGRGRENHNFILTQESYVPTSQPGGGSWSILQFTLRVLYDEHKAGRNWWTKGNTGLPLVRYILCKLKFYRSKDTDYLVTIQRTPPFEVTRDSYLSTQPSRHLMHHKSIIVPKLGRGPNKKTYIKRKVLPPAMFQNKWYFQQDIYNIPFFMLTISALELDQMYAPEDQISSNITLISLNTNAFQMSNWERQPYSTKSAGTYNIYLWSYQNGDDKNKKWQNIYFLGNCKEYTEGTKLNTLQECKEVAEIKNKQKWGNPFTHWYNHKDARIFYGAIPTTRQETDDANILELEDLFIECRYNPFKDKGTGNKVYLVPTDTGLGSFLTLPTKNELLIENLPLWLIFWGWADWIKKSKPIAHLEEEYQIIIQTPYIFPKLPCYVLTDKYFLHPPNDGTHTTTLSQTDQLHWHIKYNFQEQQFNLLAKTGPAAPKINEVKQIEAHFNYNFYFKWGGSPAPMEQISDPADQEKFPTPNTQLQRLEIESPTKPKQHFLYTFDEKRHTLTLKAAKRLKKDYSTPTFFTDFGAKDIPLKAQTESDSSSEEEEIQTSLQREDKLKQYLQRKRLQYRQRIHNLLKTKKLFPL

SEQ ID NO: 3102 - protein, 91 aa, Betatorquevirus sp.; identical to SEQ ID NO: 1300

SEQ ID NO: 3103 - protein, 62 aa, Betatorquevirus sp.
MFGQPYYKNRRLNAKEFEQELLDAKCWKRRPRLYIFDKPDYELPTIEPLVNIGVNFSLNFKE

SEQ ID NO: 3104 - DNA, 2886 bp, Betatorquevirus sp.
cgggagccgaaggtgagtgaaaccaccgaagtctaggggcaattcgggctagatcagtctggcggaacgggcaagaaacttaaaatatatttattttacagatatgttctcatcatggaagacacccacatcatcaaagagacaacaagaacttgcctggattggaataattaactctactcacgaccaaatttgtcactgcgacgatccaacttaccatcttctatactgcttaaacaaattttctggatttcaaaaacctgaagtagatattaaaaatatacaatgcctgcttaccggccattcttcccctaccgcagaaagtggagacaaactagaagacgccggtatactagaaggggagttagaaaaccttttcgcagaagatactacagaagacaaagaaaatacaaaccctatcgcaaggtaaaaaaatttaaatttattaaaagaaaagccaaaaaaataactgttaaacaatttcaaccaactactattaacaaatgtaaatgcaaaggatataaatgtttatttcaaggttctatactaagagctagcaataattttgtacaatatgtatactctattataccagaaaaacaaccaggaggagggggctggagcattcaagttttaagcttagactctgtttttgaagactaccaacatctacaatgtacatggacaaaaggcaatgcaggcctaccacttgtaagatacctaggcactaaatttactttatatcaatcacaagaaacagattatatttttgtttatgataactgctggccaatggtagacacaatacacacacatgcagactctgcaccatttagaatgctacaaaaaaaaaataaaattgtagtacctagtagaaacaccaaaaaaagacacaaaccatacaaaacagtatgggttagaccaccagcacaacttacaaacaaatggtactttcaaaaagacatttgtaaaacacctttagtaatgttcaccgccacagcggtatcattaacaaatccatttacagatcctagagcaaaaagtaataatgttaccattcactgcattaacccatatatttttcaaaacccagactttcaacactggggaacaacaggatactcacctaaaatggcggattcctccacgccattatacttatatggctcacaaatagacaatctaacatatcaaaacctaaaaagcaataaagacacaattatagcactaactaatacaaaagaccacacaccaggacacccattaacaaatgcaactacaacagacatatcaaaactagcaggaaatccttttcatgaaaattacctgtcaggagacatgtatgtatacatttcaaaattaacaccaacagaaatgcaaaactaccttacaaaagaaacacaaccaccattagctcaccaaagcataacatcagctggtgacttaatttacacatttagatataacccagacgcagatgatggcagtacaaacaagcaatacatagtaagtacatcctcaggatctacttttcaacctccagtaaatgaaaactttattttatctggctttccatttccatacatgctttggggatggacagactggataaaaaaactaggagaaacaccacaatttgacacaaacaaactagtagtattagaaacaaaagcctttgatgacaaaacaataccacgctttatacctatagatgaaacatttatacacggatatgatccatacgaaccactagaagacaaaacacacaatataaacccatacaattcaaaaaactggtttcccagatacgaataccaaaaagttaccataaacaacatatgtttatctggccctgcatgtccaagaccaccatgggatcactatttacaagcacaatgtaaatatactatgtactttaaatggggaggctgtcctaaaactttagaaaaagcatataatccttgtttacagtccaagtggcctacacccgataacctctatggaagacttgcagtacagaatcctaacatcttcccacaaacagaactgtacgcctgggactggcaaaaagactatgttactcagtcagctctcgaaagaatcagaagatatacagaaattgatccaaaaatgttctcaattccagccagcaaaaacaacccgccggcgatccaaaagacaccgcaaacagaagacgaagaggaggagaaaaaactcaagctccagctccacaagctcagattcaacaaagtcctcctccagctccaactccaacagcaattaaaatttttaaaaacaaaataaaagttaacctgtttgaagacataaaaccaaaaaatagaagaatgaactcttgggaacaagcccaagaaaaagaagacgcagctatatggtgtagaccacagagacaatttatttttgatactcctacttatccttggtgccccccagaaccatatgtaaactttgaattaaaatacaagtatgaataataaaggccaacattaattcacttagtggtgtccatttatttaagttaaactttaataaacatccaccgcctccctataactagggcgccaaaattcaaaaagggggctccgcccccttacacccccaagggggctccgcccccttacacccccccctaataaatattcaacaggaaaaccacataattagaattgccgaccacaaacagtcacaaacttcccgttttacaccaacttcccttttttctaattattattcattacattaattaataatcaccgtaattccggggaggagcctttaaactatataactaactatacttccgaatggctgagtttatgccgccagacgaagacgggatcactttagtgactccaggctgatcttggg

SEQ ID NO: 3105 - protein, 672 aa, Betatorquevirus sp.
MPAYRPFFPYRRKWRQTRRRRYTRRGVRKPFRRRYYRRQRKYKPYRKVKKFKFIKRKAKKITVKQFQPTTINKCKCKGYKCLFQGSILRASNNFVQYVYSIIPEKQPGGGGWSIQVLSLDSVFEDYQHLQCTWTKGNAGLPLVRYLGTKFTLYQSQETDYIFVYDNCWPMVDTIHTHADSAPFRMLQKKNKIVVPSRNTKKRHKPYKTVWVRPPAQLTNKWYFQKDICKTPLVMFTATAVSLTNPFTDPRAKSNNVTIHCINPYIFQNPDFQHWGTTGYSPKMADSSTPLYLYGSQIDNLTYQNLKSNKDTIIALTNTKDHTPGHPLTNATTTDISKLAGNPFHENYLSGDMYVYISKLTPTEMQNYLTKETQPPLAHQSITSAGDLIYTFRYNPDADDGSTNKQYIVSTSSGSTFQPPVNENFILSGFPFPYMLWGWTDWIKKLGETPQFDTNKLVVLETKAFDDKTIPRFIPIDETFIHGYDPYEPLEDKTHNINPYNSKNWFPRYEYQKVTINNICLSGPACPRPPWDHYLQAQCKYTMYFKWGGCPKTLEKAYNPCLQSKWPTPDNLYGRLAVQNPNIFPQTELYAWDWQKDYVTQSALERIRRYTEIDPKMFSIPASKNNPPAIQKTPQTEDEEEEKKLKLQLHKLRFNKVLLQLQLQQQLKFLKTK

SEQ ID NO: 3106 - protein, 123 aa, Betatorquevirus sp.
LAERARNLKYIYFTDMFSSWKTPTSSKRQQELAWIGIINSTHDQICHCDDPTYHLLYCLNKFSGFQKPEVDIKNIQCLLTGHSSPTAESGDKLEDAGILEGELENLFAEDTTEDKENTNPIAR

SEQ ID NO: 3107 - protein, 59 aa, Betatorquevirus sp.
LFEDIKPKNRRMNSWEQAQEKEDAAIWCRPQRQFIFDTPTYPWCPPEPYVNFELKYKYE

SEQ ID NO: 3108 - DNA, 2885 bp, Betatorquevirus sp.
cgggtgctgaaggtgagtgaaaccaccgaaatcaaggggcaattcgggctaattcagtctggcggactgggcaagaaacttaaaaatatttcttttacagatgagcaaatatcaaactcctgccctttacaatggccgaggtttagacaaccagtggatgaacaacatttatcaatctcacgaccttttttgcggctgcaacaaagttattgaccaccttctagatataattaaaaaccaaaaatgccaccatactacagaaaaagatactaccgtgcaaacttctggaactggagacgcagacgaaatgcctttcgacgccgaagatttagaaaaccttttcgcggaaaatacagacgccgaagggtaagaaaacaaagattttctaagacttttaaaaaaaaactaaagcaactaagagtaactgaatggcaaccatcatatattagaaactgtagaatctcaggaattttagaactgtttgaagcaggacaaggacgctttccaaataactttgctaattataaagaaacttttactcaacataatactcccggaggagggggatggtccttacaagaactaaccttatcaaacttatttactcaaaaccaaaactttatgaattactggtctgtaacaaacagtggactaaacttagttagatacagaggagccaaaattaaactatatagacaaagaaaaatagactacatatttcaatactacacagaagaagctatacgagctggaaaatattggtacccagctttccacccaataaaaatgatactaacaaaaaacaaaataactgtacccagcttacaaacacaacctaataacaaaaaactatacaaaaaactttatttaaaaccaccaaaactactaaaaaacaattggtactttcaacaacacatttgcacatacccactacttagatttgtagcaactgcagtagatttaaactatatgtttatatcaccaaaatctaataacacaaacattactatacacatgttaaacacaggcttctttttaaaacataacttccaatacgccagcccagatgtgggctacacaccaaagtcacaaacatacttatatggcctagaaaatggagaatttgaccttcaaaatgaaccagtaaaaaaccttatatatttaggaggccaaaaatatcaaaaaggagaaccaatacataacacggcatggacagcttacaaagacaaatcactatggggaaatatattttatccaacatactttgactttgaaagaacagtaatcatacatacaaaaaatccaactgatatgtacacaacacttctaaacaaaacattaaaagatacaggttcttacacaacaaaaacaataccattttacttagacgtacgatacaatccatacagagacaaaggtacaggtaacatagcctactggctacgagttctagatgccacaaatgaaaagtgggatccatatgatgacccagacttacaaatttcaggatacccattttggttaatgctatggggatggtcagactatacaaaaaaattaggaaaagcaaaaaatctagataatgattggctactagtattaaaatccccaagcgcatttagctcacctttagcaccatatgtacctataagtgactcatttattagaggacaagcaccttggaacaatgacgcagatgaaattgttcccaatgacttaaatcattggtttccaaaatggaaatttcaagaagaagttataaacgacttattaatgtcaggtccaggaacttgtaaatcacctgaacaaacatctatacaagctaaaatgaaatatcaatttttctttaagtggggaggcaacagcgccagaatggaaaccatcacagaccccatggctcaaccaattaccccccatcccaataaccagctcctatcaaatgaaattattgacccgcaacaaagcatcgaaaacctcctctacaaatgggatgttagacgagaaacaattacagcagcagctgaaaaaagaattaaagaaatcgaaactcatgacaaatctttgttcacagatggaacagaccatccagaaacacaaacatcacaaacggaaacgaccccgcaagaagaaaagcaagcactactcctccagctccagcaactccagcaatacaacgaacaactccaacacaaactcctcagactcagacaactaacaatggaacaataaaatttaccttaattaaaaaagcatacatatttgacccaccaaaaacaaaactaacacctataagggggcgggactgggaagacgagttgtacataagtaaatggttaaaaagacccatgcgtcgttttttagaagatactcctatatacccatggactgttcctgaaccacttgtaaactttgaccttgtaaaaggatttaataaaggccagcattaatccacttaacaagtctgtttacttaagtaaaacttatataaaccatcaccgcctccctaatacgcaggcgcagaagggggctccgcccccttaaacccccggggggggaaacccccccctaagcccccccaaaaaccacaaaattagcattgccaaccacaaacggcacaggaaaccacaaaatttacatagctcaccacaaaccgtcactaacttccccattacctttctacttcccttttagctaattattattcatataattaattagtaatcaccgtacatcctgggaggagactaaacactataaaactaactacactgacgaatggctgagtttatcacgccagacggagacgcgacaacttcgcggctgaatttgggcgggtgctgaaggtgagtgaaaccaccgaaatcaaggggcaattcgggcttggg

SEQ ID NO: 3109 - protein, 661 aa, Betatorquevirus sp.
MPPYYRKRYYRANFWNWRRRRNAFRRRRFRKPFRGKYRRRRVRKQRFSKTFKKKLKQLRVTEWQPSYIRNCRISGILELFEAGQGRFPNNFANYKETFTQHNTPGGGGWSLQELTLSNLFTQNQNFMNYWSVTNSGLNLVRYRGAKIKLYRQRKIDYIFQYYTEEAIRAGKYWYPAFHPIKMILTKNKITVPSLQTQPNNKKLYKKLYLKPPKLLKNNWYFQQHICTYPLLRFVATAVDLNYMFISPKSNNTNITIHMLNTGFFLKHNFQYASPDVGYTPKSQTYLYGLENGEFDLQNEPVKNLIYLGGQKYQKGEPIHNTAWTAYKDKSLWGNIFYPTYFDFERTVIIHTKNPTDMYTTLLNKTLKDTGSYTTKTIPFYLDVRYNPYRDKGTGNIAYWLRVLDATNEKWDPYDDPDLQISGYPFWLMLWGWSDYTKKLGKAKNLDNDWLLVLKSPSAFSSPLAPYVPISDSFIRGQAPWNNDADEIVPNDLNHWFPKWKFQEEVINDLLMSGPGTCKSPEQTSIQAKMKYQFFFKWGGNSARMETITDPMAQPITPHPNNQLLSNEIIDPQQSIENLLYKWDVRRETITAAAEKRIKEIETHDKSLFTDGTDHPETQTSQTETTPQEEKQALLLQLQQLQQYNEQLQHKLLRLRQLTMEQ

SEQ ID NO: 3110 - protein, 103 aa, Betatorquevirus sp.
LADWARNLKIFLLQMSKYQTPALYNGRGLDNQWMNNIYQSHDLFCGCNKVIDHLLDIIKNQKCHHTTEKDTTVQTSGTGDADEMPFDAEDLENLFAENTDAEG

SEQ ID NO: 3111 - DNA, 2885 bp, Betatorquevirus sp.
cgggtgctgaaggtgagtgaaaccaccgaaatcaaggggcaattcgggctaattcagtctggcggactgggcaagaaacttaaaaatatttcttttacagatgagcaaatatcaaactcctgccctttacaatggccgaggtttagacaaccagtggatgaacaacatttatcaatctcacgaccttttttgcggctgcaacaaagttattgaccaccttctagatataattaaaaaccaaaaatgccaccatactacagaaaaagatactaccgtgcaaacttctggaactggagacgcagacgaaatgcctttcgacgccgaagatttagaaaaccttttcgcggaaaatacagacgccgaagggtaagaaaacaaagattttctaagacttttaaaaaaaaactaaagcaactaagagtaactgaatggcaaccatcatatattagaaaatgtagaatctcaggaattttagaactgtttgaagcaggacaaggacgctttccaaataactttgctaattataaagaaacttttactcaacataatactcccggaggagggggatggtccttacaagaactaaccttatcaaacttatttactcaaaaccaaaactttatgaattactggtctgtaacaaacagtggactaaacttagttagatacagaggagccaaaattaaactatatagacaaagaaaaatagactacatatttcaatactacacagaagaagctatacgagctggaaaatattggtacccagctttccacccaataaaaatgatactaacaaaaaacaaaataactgtacccagcttacaaacacaacctaataacaaaaaactatacaaaaaactttatttaaaaccaccaaaactactaaaaaacaattggtactttcaacaacacatttgcacatacccactacttagatttgtagcaactgcagtagatttaaactatatgtttatatcaccaaaatctaataacacaaacattactatacacatgttaaacacaggcttctttttaaaacataacttccaatacgccagcccagatgtgggctacacaccaaagtcacaaacatacttatatggcctagaaaatggagaatttgaccttcaaaatgaaccagtaaaaaaccttatatatttaggaggccaaaaatatcaaaaaggagaaccaatacataacacggcatggacagcttacaaagacaaatcactatggggaaatatattttatccaacatactttgactttgaaagaacagtaatcatacatacaaaaaatccaactgatatgtacacaacacttctaaacaaaacattaaaagatacaggttcttacacaacaaaaacaataccattttacttagacgtacgatacaatccatacagagacaaaggtacaggtaacatagcctactggctacgagttctagatgccacaaatgaaaagtgggatccatatgatgacccagacttacaaatttcaggatacccattttggttaatgctatggggatggtcagactatacaaaaaaattaggaaaagcaaaaaatctagataatgattggctactagtattaaaatccccaagcgcatttagctcacctttagcaccatatgtacctataagtgactcatttattagaggacaagcaccttggaacaatgacgcagatgaaattgttcccaatgacttaaatcattggtttccaaaatggaaatttcaagaagaagttataaacgacttattaatgtcaggtccaggaacttgtaaatcacctgaacaaacatctatacaagctaaaatgaaatatcaatttttctttaagtggggaggcaacagcgccagaatggaaaccatcacagaccccatggctcaaccaattaccccccatcccaataaccagctcctatcaaatgaaattattgacccgcaacaaagcatcgaaaacctcctctacaaatgggatgttagacgagaaacaattacagcagcagctgaaaaaagaattaaagaaatcgaaactcatgacaaatctttgttcacagatggaacacaccatccagaaacacaaacatcacaaacggaaacgaccccgcaagaagaaaagcaagcactactcctccagctccagcaactccagcaatacaacgaacaactccaacacaaactcctcagactcagacaactaacaatggaacaataaaatttaccttaattaaaaaagcatacatatttgacccaccaaaaacaaaactaacacctataagggggcgggactgggaagacgagttgtacataagtaaatggttaaaaagacccatgcgtcgttttttagaagatactcctatatacccatggactgtccctgaaccacttgtaaactttgaccttgtaaaaggatttaataaaggccagcattaatccacttaacaagtctgtttacttaagtaaaacttatataaaccatcaccgcctccctaatacgcaggcgcagaagggggctccgcccccttaaacccccgggggggggaaaccccccctaagcccccccaaaaaccacaaaattagcattgccaaccacaaacggcacaggaaaccacaaaatttacatagctcaccacaaaccgtcactaacttccccattacctttctacttcccttttagctaattattattcatataattaattagtaatcaccgtacatcctgggaggagactaaacactataaaactaactacactgacgaatggctgagtttatcacgccagacggagacgcgacaacttcgcggctgaatttgggcgggtgctgaaggtgagtgaaaccaccgaaatcaaggggcaattcgggcttggg

SEQ ID NO: 3112 - protein, 661 aa, Betatorquevirus sp.
MPPYYRKRYYRANFWNWRRRRNAFRRRRFRKPFRGKYRRRRVRKQRFSKTFKKKLKQLRVTEWQPSYIRKCRISGILELFEAGQGRFPNNFANYKETFTQHNTPGGGGWSLQELTLSNLFTQNQNFMNYWSVTNSGLNLVRYRGAKIKLYRQRKIDYIFQYYTEEAIRAGKYWYPAFHPIKMILTKNKITVPSLQTQPNNKKLYKKLYLKPPKLLKNNWYFQQHICTYPLLRFVATAVDLNYMFISPKSNNTNITIHMLNTGFFLKHNFQYASPDVGYTPKSQTYLYGLENGEFDLQNEPVKNLIYLGGQKYQKGEPIHNTAWTAYKDKSLWGNIFYPTYFDFERTVIIHTKNPTDMYTTLLNKTLKDTGSYTTKTIPFYLDVRYNPYRDKGTGNIAYWLRVLDATNEKWDPYDDPDLQISGYPFWLMLWGWSDYTKKLGKAKNLDNDWLLVLKSPSAFSSPLAPYVPISDSFIRGQAPWNNDADEIVPNDLNHWFPKWKFQEEVINDLLMSGPGTCKSPEQTSIQAKMKYQFFFKWGGNSARMETITDPMAQPITPHPNNQLLSNEIIDPQQSIENLLYKWDVRRETITAAAEKRIKEIETHDKSLFTDGTHHPETQTSQTETTPQEEKQALLLQLQQLQQYNEQLQHKLLRLRQLTMEQ

SEQ ID NO: 3113 - protein, 103 aa, Betatorquevirus sp.; identical to SEQ ID NO: 3110

SEQ ID NO: 3114 - DNA, 2885 bp, Betatorquevirus sp.
cgggtgctgaaggtgagtgaaaccaccgaaatcaaggggcaattcgggctaattcagtctggcgagccgggcaagaaacttaaaaatatttattttacagatgagcaaatttcaaaaacctaccctatacaatggacgcggattagacaaccagtggatgaacaacatatttcaatctcacgacctgtactgcggatgcaacaaagtaattccacaccttttggatattattaacaatcaaaaatgccaccatactaccgaagaagatactaccgtgcaaacttctggaactggaaacgccgacgaaatgcctttcgacgcagaagatttagaaaaccttttcgcggaaaatacagacgccgaagggtaagaaaacaaagattttctaaaacttttaaaagaaaactaaagcaattaagagtaactcaatggcaaccttcatatattagaaactgtagaatttcaggaatcctagaactgtttgaagcaggacaaggacgctttgcaaataattttacaaactataaagaaacttttactcaacataataccccaggaggagggggatggtctttacaagaattaactttatcaaacttatttactcaaaaccaatactttatgaattactggagtgtaacaaacagcggactaaacttagttagatacagaggagccaaaattaaactatatagacaaagaaaagtagactacatatttcaatactacacagaagaagccatacgagcagggaaatattggtacccatcatttcacccaataaaaatgattttaactaaaaacaaaataacagtacccagcttacagacacaacccaataacaaaaaactatacaaaaaagtttatttaaaaccaccaaaactactaaaaaacaattggtactttcaacaacacatttgcacatacccactacttagatttgtagcaacagcagttgatttaaactatatgtttatatcaccaaaatctaacaacacaaacataactatacatatgttaaacacaggcttttttttaaaacataactttcaatacgccagccctgatgttggttacacaccaaaagcacaaacatacttatatggattagaaaatggagaatatgacctaaaaaatgaaccaataaaaaacctaatatatttaggaggccaaaaatatcaaaaaggagatccaatacataccttaaattgggaaaaatacaaagacaaatcactttggggaaatatattctttccaacatattttgactttgaaagaacagtaattatacacacaatacctccaactcaactatatacaacctatttaggcaaaacactaaaagacacaggaagttacacatcaaaaacaacaccattttacatggatgtacgatacaatccatacagagacaaaggaacaggaaacatagcatactggctaagagtactagacgctacaaatgaaaaatgggagccatatgatgatccagatttacaaatttcaggatacccattttggttaatgctttggggttggtcagactacacaaaaaaattaggaaaagcaaaaaatctagacaatgactggctattagtattaaaatcaccaagcgcatttagcacacctttagcaccatatgtacctttaaatgactcctttattagaggacaagcaccatggaacaatgacgcagaggaaattgttccaaatgacttaaatcattggtttccaaaatggaaatttcaagaagaagccataaacgatttattaatgtcaggaccaggaacatgtaaatcacctgaacaaacatctatacaagctaaaatgaaatatcaatttttttttaagtggggaggaaacagcgccagaatggaaaccatcacagaccccatggctcaaccaattaccccccatcccaataaccagctcctatcaaatgaaattattgacccgcaacaaagcatcgaaaacctcctctacaaatgggatgttagacgagaaacaattacagcagcagctgaaaaaagaattaaagaaatcgaaactcatgaccaatctttgttcacagatggagcactccattcagaagcacaaacatcacaaacggaaacgaccccgcaagaagaaaagcaagcactactcctccagctccagcaactccagcaatacaacgaacaactccaacacaagttcctcagactcagacaactaacaatggaaaaataacctttacattaatcaaaaaagcatacatatttgatccaccaaaaacaaaactaacacctataagagggagggactgggaggacgaactattcataagtaaatggttaaaaaggcctatgcgccgctttttagaagatacccctatatacccatggactgttcctgaaccacttgtaaactttgaacttgtaaaaggatttaataaaggccagcattaattcacttaacaagactgtttatttaagtaaaacttatataaaccatcaccgcctccctaatacgcaggcgcagaagggggctccgcccccttaaacccccggggggggaaaccccccctaagcccccccaaaaaccacaaaattagcattgccgaccacaaacggcacaggaaaccacaaaatttacatggctcaccacaaaccgtcactcacatcctcattaccattaaacttcccgttttacaacttattattcatacaattaattaataatcaccgtaaatccggggcggagactaaacactataaaactaactacacagacgaatggctgagtttatcacgccagacggagacgcgacaacttcgcggctgaatttgggcgggtgctgaaggtgagtgaaaccaccgaaatcaaggggcgcggctgaatttggg

SEQ ID NO: 3115 - protein, 661 aa, Betatorquevirus sp.
MPPYYRRRYYRANFWNWKRRRNAFRRRRFRKPFRGKYRRRRVRKQRFSKTFKRKLKQLRVTQWQPSYIRNCRISGILELFEAGQGRFANNFTNYKETFTQHNTPGGGGWSLQELTLSNLFTQNQYFMNYWSVTNSGLNLVRYRGAKIKLYRQRKVDYIFQYYTEEAIRAGKYWYPSFHPIKMILTKNKITVPSLQTQPNNKKLYKKVYLKPPKLLKNNWYFQQHICTYPLLRFVATAVDLNYMFISPKSNNTNITIHMLNTGFFLKHNFQYASPDVGYTPKAQTYLYGLENGEYDLKNEPIKNLIYLGGQKYQKGDPIHTLNWEKYKDKSLWGNIFFPTYFDFERTVIIHTIPPTQLYTTYLGKTLKDTGSYTSKTTPFYMDVRYNPYRDKGTGNIAYWLRVLDATNEKWEPYDDPDLQISGYPFWLMLWGWSDYTKKLGKAKNLDNDWLLVLKSPSAFSTPLAPYVPLNDSFIRGQAPWNNDAEEIVPNDLNHWFPKWKFQEEAINDLLMSGPGTCKSPEQTSIQAKMKYQFFFKWGGNSARMETITDPMAQPITPHPNNQLLSNEIIDPQQSIENLLYKWDVRRETITAAAEKRIKEIETHDQSLFTDGALHSEAQTSQTETTPQEEKQALLLQLQQLQQYNEQLQHKFLRLRQLTMEK

SEQ ID NO: 3116 - protein, 103 aa, Betatorquevirus sp.
LASRARNLKIFILQMSKFQKPTLYNGRGLDNQWMNNIFQSHDLYCGCNKVIPHLLDIINNQKCHHTTEEDTTVQTSGTGNADEMPFDAEDLENLFAENTDAEG

SEQ ID NO: 3117 - DNA, 2885 bp, Betatorquevirus sp.
cgggtgctgaaggtgagtgaaaccaccgaaatcaaggggcaattcgggctagctcagtctggtggaacgggcaagacacttaaaatacattctttttacagatgagcaaacttctaaatccaaccaaactaactgaaaaacaacaaattctacaaaatgtgaacctgtttgtttccattcacgatttatcctgcaaatgcaacaacccactgaagtgcattattctacaaatctataaccaagaaaaaggattaaaatttaaaacagaagaaatacaacaatggcttactactaccgaagatggagaaacaactactggaaaagacgacgatatccttggagaagacttagacgcccttttcgcagacgacgctggcacaagcgctgggtaagaaaaagaaaactttcttaccttaaactaaaacaatggcaacctaaagtaataagaaaaatgtgtgtaaaaggaatgtactgtttatttcaagcaaaccataatttacttactagaaattatactcaatatatggactccataccgccagaaggcataccaagcggaggaggcttttcattaaatagatttactttagactgtttatttaatgaacatgaaaaagcaagaaatgtatggactaaaggaaacaaaaacttacctttaattagatacacaggatgtgaatttaaaatatacagacctaaaaacacagatgctgttgtaaaattccaaaattgctatcctatgacagccacacaactaacctacacttcaactcaaccatacattatgatgatgtctaaaggatcttctaaaataagcagactagacaacacttttaagaaaaaaccatacaaaaaatttaaatttccacctccacaagaaatgacaaacaaatggtttttttccgcagacttagctaacaaaggcttaatacttatagcagcaacagcagcaaactttgaaaacatgtatataagtccctattcagaaagcgacacaatatcagttagatttttaaacactttactttttaaaaacagacattttaataaacttccaacacacggatatcatccaaaagacaacttttggctatgggcatcagtaaatggttccactccaccaaaactaacagaaatggttttcttaggtaacacagtaacttatcaagaaggaaaagagataggcaaaatacaagcaacaggaaaaatatcaatgttactacctaaattcacaaacatagcagactggggaaacccatttcatgaaaaatacatggacaaaaaagtacaaatatactacacaacatcagcacccgctatacacttaaatgcacatggtgacaaagatgtaacaacagcaataaccaatttaggatttacaaccttagatcaagaatttttcttttatggtagatataaccccaacagagacaaaggtgaaaatacctcaatttactttttaaaaaactatcaagaagagtcaggctgggacccaccacaaaacaaaaacctaatactaacaggctttccattatggctaatagtatggggatttttagactaccatttaaaattagcagaaatcccacatatagacgaagactacataatatgtgttaaatcaacagctatagaaccacaaataccacgacaagaagcatttatatttttagacaaagaattcacacacggtagcagtgaatggcatgatgaagagggcagaacaggatgggacaacaaccactggtttcctatgtcacattaccaacacagaactatagaaaacataggaaaatcgggaccagcagtagcaaaactcggaaaatttattaatgctgaactacattgtgaatataaattttattttaaggtgggaggatgtgtaccaccaatggacaaaattacaaacccaagcttacaaccaacttatcccataccaactaacatcgctgacccaaattcgttacagagtccaagagaaccaattgaatcattcttatactgctttgatgaaaggagagggcaaattacggaaacagctgcagaacgaatcacaaaagactttaaaccttcaaaaactttgttcacagattcaattacaactggaacagacgtcccagtcctccaaacattcaaagaaacacaagactcggaggaggaggaggaaaccaaagaagcgacattgttccagcagctccagcagcagcgaatcaaacagcacaacatccgcagacgaatacaacagttattaactcaactacaacaactatcatgaaatgtgtaaaatatgttaaactttttgaggacaaaccaaaaatacgtagactaaatacctgggaattacaagaggaaaaggaagacgccaaacactggtgtcgtcctatgcgtactttttggggggacaaacctacatatccctggtgcccacctgaaccttatgtcaactttgaacttaactatccctttaaataaacaaggcctattcattcacttgacgtgtctgcttctttaagtttaaacttaaacaaacatccatcacctccctaccaataggcgtagcaagggggctccgcccccttaaacccctagggggctccgccccctaaaacccccaagggggctccgcccccttacacccccttattaatattcaacaggaaacaacaggaaaaccacctaattagaattgccgaccacaaaccgtcacttacttcccttttttattaaacttcctttttttataatgaatattcattaaattaattagtaatcaccgtaattccggggaggagcaaaaaaactataaaagtaactacacagacgaatggctgagtttatgccgccagacggagacggtaaaggcaacttcaccggctgagcttggg

SEQ ID NO: 3118 - protein, 664 aa, Betatorquevirus sp.; identical to SEQ ID NO: 2470

SEQ ID NO: 3119 - protein, 96 aa, Betatorquevirus sp.; identical to SEQ ID NO: 2471

SEQ ID NO: 3120 - protein, 66 aa, Betatorquevirus sp.; identical to SEQ ID NO: 2472

SEQ ID NO: 3121 - DNA, 2885 bp, Betatorquevirus sp.
cgggagccgtaggtgagtgaaaccaccgaagtctaggggcaattcgggctagatcagtctggcggaacgggcaagaaatttaaaactatttttattttacagtatgaacttctacaaagaaccagtttatggtccaaaaaggcaagaattaaactggctaaatggctgtattatagctcatgacaacttttgcggctgcaacactccaactgaacatctcctctacattctcgcttccaagagtggatacttaattgttaaaaaccaacaaaaatgccttacttctggaacagaagaaactactggaaaagaagacgactttggcttagaagacggagagctcgagcggctattcgcagaagatacagacaaagaagatactgggtaagacattttaaaaactttcctaaaactttaagactaagacaatggaatccaaaagtacaaaaaagatgttatataaaaggactaataccgttatttttatgcggaaaagacagacaaatatttaactatatacaatataaagaatctatggtaccagaaagtcaatcgggaggaggcggatggtctctaatggtgtttaacttaggaggactatatgacgaatttaaaaaactaaataactggtggacagctgacaatgacggactacctttagtaaaatataaaggatgcgaatttaaattttaccaatcatgggactgtgactatatagtaaattataaaacatgcccaccaatgacagacacagaactacaacacttagattcacaccctagcagaatgctaatgaacaaaagagcaattgtagtacctaacataataagaaaatcaaacaaacgaagaaaatataaaaaaattaaattcccaccaccatctctattaaagaaccaatggttttttcaacaagacctatgcaactataacttactaatgctaacaacatccagttgctccttagaccaaatgtacctaccaaataatgaactttctaacaacataactttaatttctttaaacacaaacatatttcacgatgtaaactttttaatagacggaacaacaggatactcccccaaacctaactttcatttatggggagaaccaacaccatacacaggaacacaacctgcaacaaacgctaaaggacttatatatttaggaaacttaaaaacatacaactatggtacacaaatgaataactacgaagactttcaaaaacaagaaaactggggaaacccattccactcactacatggacacgcagacacacatatatactatagccaaacattaccaactagcagcacaagccttgacaccgtaaaagtaacaatagcagaagaattattcacaaaatgcagatacaatccactaaaagacacaggagaaggcaatgaagtatactttaaaagcataacaatatcaagaggatatatatacgacccgccaacagacccacaagtacaaatacatggttatcctttatggctaattatgtggggctggacagactggcaagaaaagcttcatgctattaatcaaatacaactaaactatgtactaattgtaaaatctaaatttataacacctacaagagcagcatacttatttttagatgacttcttcacaaaccctcaaataacacaaatgacagacaatgacacaaaacactggcaccctagatttaaataccaactaaaatcaacaaatttaataggcacaacaggacccgcaagccctagagtaaacaaaagtagcagcatacaagctcatgcattttataaatttcagtttatatggggaggatgcccagcaccaatgcacaacatcaaagacccctgcaaccagtccaagttccccgtgcccaattaccagctacaagcagtacaagcaacgcatccagcaaaagaccccaaagaaatgctccacgactgcgacgaaagacgacaaacacttacaaaaaaatgtatcaaaagacttatgtcaatttctgaaactccaaaaactttacttccaggaacaaatgcattcaacccacaaatccaacaagaaacgacatcagaggaaagctcctcggaagaagagaaagagacaaacatcagagagcaactcctccatatccgaaaacagcaccgaaagctcaagcgaaacctcaacagactaaagctataccaattgtaaaaactgtagacctttttccaaaacaaaaacctataaaactaagtccctacgataaagtgggatgggaaactgaactacaatgctgtaaattgtttggtagacccatgagacaatatttaactgatactccattttactatgacttaaaaccagaacccattgtaaactttaaccttaattttactttctaggcctgcattaatacacttaacaagcatgtttaataaagtttcaacttaaataaacagactccgcctccctaaatcgccggcgtagggggctccgccccctacaacccccggggggggcaaagccttttggattccattgtcttagtcttaaagttttaggaaagtttttaaaatgtctaacccactaaaacgggaactaacacaactaaaccacaaaatttgcattgccaaccacaaactgacaggaaaaccacaaaatttgcattgccgaccacaaactgacaggaaaaccactaaatttgcattgccgaccacaaactgtcactaacttcctcatacactaactacttccttaaaaactacttattattcattacattaattattaaacactgtaattccggggaggagactattaactatataagtaactaacatgacgaatggctgagtttatactgccagacggagtcggcatcacttcagtgactgcagactgatcttggg

SEQ ID NO: 3122 - protein, 637 aa, Betatorquevirus sp.
MPYFWNRRNYWKRRRLWLRRRRARAAIRRRYRQRRYWVRHFKNFPKTLRLRQWNPKVQKRCYIKGLIPLFLCGKDRQIFNYIQYKESMVPESQSGGGGWSLMVFNLGGLYDEFKKLNNWWTADNDGLPLVKYKGCEFKFYQSWDCDYIVNYKTCPPMTDTELQHLDSHPSRMLMNKRAIVVPNIIRKSNKRRKYKKIKFPPPSLLKNQWFFQQDLCNYNLLMLTTSSCSLDQMYLPNNELSNNITLISLNTNIFHDVNFLIDGTTGYSPKPNFHLWGEPTPYTGTQPATNAKGLIYLGNLKTYNYGTQMNNYEDFQKQENWGNPFHSLHGHADTHIYYSQTLPTSSTSLDTVKVTIAEELFTKCRYNPLKDTGEGNEVYFKSITISRGYIYDPPTDPQVQIHGYPLWLIMWGWTDWQEKLHAINQIQLNYVLIVKSKFITPTRAAYLFLDDFFTNPQITQMTDNDTKHWHPRFKYQLKSTNLIGTTGPASPRVNKSSSIQAHAFYKFQFIWGGCPAPMHNIKDPCNQSKFPVPNYQLQAVQATHPAKDPKEMLHDCDERRQTLTKKCIKRLMSISETPKTLLPGTNAFNPQIQQETTSEESSSEEEKETNIREQLLHIRKQHRKLKRNLNRLKLYQL

SEQ ID NO: 3123 - protein, 109 aa, Betatorquevirus sp.; identical to SEQ ID NO: 2286

SEQ ID NO: 3124 - DNA, 2885 bp, Betatorquevirus sp.
gcgggtgccgaaggtgagtgaaaccaccgagtcaaggggcaattcgggctggttcagtctagcggaacgggcaagaaacttaaaacaattttattttacagaatgacaacttttattaaaccatcactttacaaaggaagatctctggaacacaaatgggtatccagcatttatgaatcccacgacctaatttgcagctgcgaagatccaattgaacacctctcaaaaatattaaatttacaaattaaaaaaccactatgcctcccttctaccgctggagaagaagaccatacacataccgttggagaagacgccgtcgaccaacttttagaaggagaattagacaaacttttcgaagacgaccttacagaagacactgggtaaggagacgtcgatatttaaaaagacttaaaagaaaacttaaaaaaataactgttaaacaatggcaaccataccatattagaaaatgtactataaaaggaaatttactattgctagcatgtggtcaaaaaaggattaatcataactttactttatttgctgaatctattgtacctaaagaagaaccagggggaggaggttggagtataatgcaactaactttaagagctttatatgacgaatataaaaaatatagaaactggtggacggcaagcaaccaaggcctgccattagtaaaatatttaggatgccagtttaaattctatagaagcgcacaaacagattatatagtcacaccacaactctgtccaccatttgatgtgacagaacacacatatttaaacacacaacctagcagacaaatgatgaacaaacatagtattattataccaagactagacagaccttacatgaaaaaaccttataaaaagagaagattcaatccaccttccatgtttcaaacaaaatggtactttcaacaagacatttataacaacccatttatagtattaacaaccgtagcatgtagtttagatgaaatgtttcaacccgaagaccaactaagctataacctaactctaatatcgctaaacacagacttttttcaaaacccaaaatggcaaaacttaccagacacaaagggatacgcaccaaaagtaacaggcacatacaatgtatacttatttactacagaaaatggcacaacaacaccaccaacatggaaagaattactaccattaactaacacagctagatacatagatggaaatctacaaaccaaaactaagtcgtatgaagaataccaaaaaacagaaactagcggaaatccattcacagaaaaaaacatacatatagatgctagatattactatggacaattcccaacaaaagaccaatttgacaaaaaccaaccagcagctgttaccagactatatgatgtctactggacatgcagatacaaccctctaaaagatgcaggcaaagacaacaaagtatattttaaatccattagtttatcacaaggcagctttcttacattaccagacaaaccagaattattaattacagactttcctttatggatagtcttttgggcatggcaagactggcaagaaaaactaaaacaaatacatcaaatagaccaaaattatcaaatagtagtgcaaagtccatacatatatcctaaaaaacaatgttatgtttttttagacaactactttacacaaccaaataaaggaagattaaatgaaacagatctagcaaactggcatcctaaactagaaatgcaacaagaaatgttcttttatatagcacaatcaggccctgcagcaccaaaaattaacaaaacaaaggcaatagaagcacattgtaactatagattctttttaaagtggggaggctgcccagcaccaatggaaacgatcacagaccccggaacgcaagaaaaattccccatccccaataacctcattcaaacaaatgaaatccaagatccaaccactgccaaagaaagctacatatactgctgggactcaaaaagagacattattacagaaaaatgctcaaaaagactcaaatcagctgaaccaactgaaatttcttttacagaatttggaacaaaggacctccccaaaaaaacacaagaaacacaggagacctcgtccgaggaagaaagcgaaacatcacaagagagaatcctccacctcaagctccagcgacacctactcaagcagcgactccacagactcctaaactcaaaaaaattattccccttacaataaatatgtttggtgacaatgtatcaaaaaatagaagattaactgtaaaagaactagaggacgaaatacaagaagcctctatttggcgtagacctgtacgttcttttattaaagacagacctacttatccttactgtaaaccagaaccacttgtaaatcaacctctcattaacttttcattaaactttaaattttaaggcctgcaaaatttcactctcggtgtccatttatataagtaataacttaaataaacatccaccacactccctaatacgcaggcgcaaagggggctccgcccccttaaacccccagggggggcaagccccccctaaccccccctccctaatacgcaggcgcaaagggggctccgcccccttaaacccccaggggggggcaagccccccctaaccccccagggggctccgccccctaacacccccttattaatattcataaaggaaaccacaaaattagaattgccgaccacaaacgaatatgctaattacacttcctcaaacaacactgaacttccctaaaaattaattattaaacaccgtcactataggcggagacataacactatataactaagtacacagacgaatggctgagtttatgccgctagacggaggacgcatcacatcagtgactgcggactgaacttgg

SEQ ID NO: 3125 - protein, 654 aa, Betatorquevirus sp.
MPPFYRWRRRPYTYRWRRRRRPTFRRRIRQTFRRRPYRRHWVRRRRYLKRLKRKLKKITVKQWQPYHIRKCTIKGNLLLLACGQKRINHNFTLFAESIVPKEEPGGGGWSIMQLTLRALYDEYKKYRNWWTASNQGLPLVKYLGCQFKFYRSAQTDYIVTPQLCPPFDVTEHTYLNTQPSRQMMNKHSIIIPRLDRPYMKKPYKKRRFNPPSMFQTKWYFQQDIYNNPFIVLTTVACSLDEMFQPEDQLSYNLTLISLNTDFFQNPKWQNLPDTKGYAPKVTGTYNVYLFTTENGTTTPPTWKELLPLTNTARYIDGNLQTKTKSYEEYQKTETSGNPFTEKNIHIDARYYYGQFPTKDQFDKNQPAAVTRLYDVYWTCRYNPLKDAGKDNKVYFKSISLSQGSFLTLPDKPELLITDFPLWIVFWAWQDWQEKLKQIHQIDQNYQIVVQSPYIYPKKQCYVFLDNYFTQPNKGRLNETDLANWHPKLEMQQEMFFYIAQSGPAAPKINKTKAIEAHCNYRFFLKWGGCPAPMETITDPGTQEKFPIPNNLIQTNEIQDPTTAKESYIYCWDSKRDIITEKCSKRLKSAEPTEISFTEFGTKDLPKKTQETQETSSEEESETSQERILHLKLQRHLLKQRLHRLLNSKKLFPLQ

SEQ ID NO: 3126 - protein, 111 aa, Betatorquevirus sp.
LVQSSGTGKKLKTILFYRMTTFIKPSLYKGRSLEHKWVSSIYESHDLICSCEDPIEHLSKILNLQIKKPLCLPSTAGEEDHTHTVGEDAVDQLLEGELDKLFEDDLTEDTG

SEQ ID NO: 3127 - DNA, 2884 bp, Betatorquevirus sp.
cgggtgctgaaggtgagtgaaaccaccgaaatcaaggggcaattcgggctaattcagtctggcggactgggcaagaaacttaaaaatatttcttttacagatgagcaaatatcaaactcctgccctttacaatggccgaggtttagacaaccagtggatgaacaacatttatcaatctcacgaccttttttgcggctgcaacaaagttattgaccaccttctagatataattaaaaaccaaaaatgccaccatactacagaaaaagatactaccgtgcaaacttctggaactggagacgcagacgaaatgcctttcgacgccgaagatttagaaaaccttttcgcggaaaatacagacgccgaagggtaagaaaacaaagattttctaagacttttaaaaaaaaactaaagcaactaagagtaactgaatggcaaccatcatatattagaaactgtagaatctcaggaattttagaactgtttgaagcaggacaaggacgctttccaaataactttgctaattataaagaaacttttactcaacataatactcccggaggagggggatggtccttacaagaactaaccttatcaaacttatttactcaaaaccaaaactttatgaattactggtctgtaacaaacagtggactaaacttagttagatacagaggagccaaaattaaactatatagacaaagaaaaatagactacatatttcaatactacacagaagaagctatacgagctggaaaatattggtacccagctttccacccaataaaaatgatactaacaaaaaacaaaataactgtacccagcttacaaacacaacctaataacaaaaaactatacaaaaaactttatttaaaaccaccaaaactactaaaaaacaattggtactttcaacaacacatttgcacatacccactacttagatttgtagcaactgcagtagatttaaactatatgtttatatcaccaaaatctaataacacaaacattactatacacatgttaaacacaggcttctttttaaaacataacttccaatacgccagcccagatgtgggctacacaccaaagtcacaaacatacttatatggcctagaaaatggagaatttgaccttcaaaatgaaccagtaaaaaaccttatatatttaggaggccaaaaatatcaaaaaggagaaccaatacataccacggcatggacagtttacaaagacaaatcactatggggaaatatattttatccaacatactttgactttgaaagaacagtaatcatacatacaaaaaatccaactgatatgtacacaacacttctaaacaaaacattaaaagatacaggttcttacacaacaaaaacaataccattttacttagacgtacgatacaatccatacagagacaaaggtacaggtaacatagcctactggctacgagttctagatgccacaaatgaaaagtgggatccatatgatgacccagacttacaaatttcaggatacccattttggttaatgctatggggatggtcagactatacaaaaaaattaggaaaagcaaaaaatctagataatgattggctactagtattaaaatccccaagcgcatttagctcacctttagcaccatatgtacctataagtgactcatttattagaggacaagcaccttggaacaatgacgcagatgaaattgttcccaatgacttaaatcattggtttccaaaatggaaatttcaagaagaagtcataaacgacttattaatgtcaggtccaggaacttgtaaatcacctgaacaaacatctatacaagctaaaatgaaatatcaatttttctttaagtggggaggcaacagcgccagaatggaaaccatcacagaccccatggctcaaccaattaccccccatcccaataaccagctcctatcaaatgaaattattgacccgcaacaaagcatcgaaaacctcctctacaaatgggatgttagacgagaaacaattacagcagcagctgaaaaaagaattaaagaaatcgaaactcatgacaaatctttgttcacagatggaacacaccatccagaaacacaaacatcacaaacggaaacgaccccgcaagaagaaaagcaagcactactcctccagctccagcaactccagcaatacaacgaacaactccaacacaaactcctcagactcagacaactaacaatggaacaataaaatttaccttaattaaaaaagcatacatatttgacccaccaaaaacaaaactaacacctataagggggcgggactgggaagacgagttgtacataagtaaatggttaaaaagacccatgcgtcgttttttagaagatactcctatatacccatggactgtccctgaaccacttgtaaactttgaccttgtaaaaggatttaataaaggccagcattaatccacttaacaagtctgtttacttaagtaaaacttatataaaccatcaccgcctccctaatacgcaggcgcagaagggggctccgcccccttaaacccccggggggggaaaccccccctaagcccccccaaaaaccacaaaattagcattgccaaccacaaacggcacaggaaaccacaaaatttacatagctcaccacaaaccgtcactaacttccccattacctttctacttcccttttagctaattattattcatataattaattagtaatcaccgtacatcctgggaggagactaaacactataaaactaactacactgacgaatggctgagtttatcacgccagacggagacgcgacaacttcgcggctgaatttgggcgggtgctgaaggtgagtgaaaccaccgaaatcaaggggcaattcgggcttggg

SEQ ID NO: 3128 - protein, 661 aa, Betatorquevirus sp.
MPPYYRKRYYRANFWNWRRRRNAFRRRRFRKPFRGKYRRRRVRKQRFSKTFKKKLKQLRVTEWQPSYIRNCRISGILELFEAGQGRFPNNFANYKETFTQHNTPGGGGWSLQELTLSNLFTQNQNFMNYWSVTNSGLNLVRYRGAKIKLYRQRKIDYIFQYYTEEAIRAGKYWYPAFHPIKMILTKNKITVPSLQTQPNNKKLYKKLYLKPPKLLKNNWYFQQHICTYPLLRFVATAVDLNYMFISPKSNNTNITIHMLNTGFFLKHNFQYASPDVGYTPKSQTYLYGLENGEFDLQNEPVKNLIYLGGQKYQKGEPIHTTAWTVYKDKSLWGNIFYPTYFDFERTVIIHTKNPTDMYTTLLNKTLKDTGSYTTKTIPFYLDVRYNPYRDKGTGNIAYWLRVLDATNEKWDPYDDPDLQISGYPFWLMLWGWSDYTKKLGKAKNLDNDWLLVLKSPSAFSSPLAPYVPISDSFIRGQAPWNNDADEIVPNDLNHWFPKWKFQEEVINDLLMSGPGTCKSPEQTSIQAKMKYQFFFKWGGNSARMETITDPMAQPITPHPNNQLLSNEIIDPQQSIENLLYKWDVRRETITAAAEKRIKEIETHDKSLFTDGTHHPETQTSQTETTPQEEKQALLLQLQQLQQYNEQLQHKLLRLRQLTMEQ

SEQ ID NO: 3129 - protein, 103 aa, Betatorquevirus sp.; identical to SEQ ID NO: 3110

SEQ ID NO: 3130 - DNA, 2884 bp, Betatorquevirus sp.
cgggagccgaaggtgagtgaaaccaccgtagtctaggggcaattcgggctaggccagtctagcggaacgggcaagaaacttaatttattttattttacagatgcaaaaaccattatacacagacaaagcattaaaaaaccaatggattaaccacctagtttctgctcacgacctggtatgtggatgccctgaacccctcaaacacaccgtacaagaaatctgcagaaaagaaccagaaattaaaaaatgccttactacagaagaagatacccctaccgctggagacgccgtcgatggtttaagccccggagatctagatttgcttttcgcagaagacactggagaagatactgggtaagaaactcttataaaaagagaaaactttctaagataaacttaaaacaatttcaacctctaactattagaagaagctatgttaaaggaatgtatccatgctttttgactaactctcacagactggaccataacatgactcaatttattgacagtatcgctccatatcattttaatggaggaggaggctttgctataactcaatttactcttgacggactttacgaactatttcttaaaggaatgaactggtggactcatagtaactgtaatttacctttaataagatatggtggctgtaacataaagttttataaagctgaaaattatgattatgtagctataatccatagatgcttacctttaaaagcaacaaatgaattatatatgtcttcacaacctcaaattatgatgctaacaaaacattgtatacacattccttgtagaaaagctaatagaaataagaaaaactataaaaaagtatttataaaacctccaacacaatttacaaacaaatggatgttccaggcagacatatgcaaacaaccactactagtaatacaaacatgcatagctagctttgatagaatgtttctcgctgcagactctcaaagtacaacaatgggctttatttctttaaacactcaaagctttcaactacataactggaacacaccacccacaacaggctacaaaccacaagataaacaatggctatatggtacagaaaatggtcaatcaaacccaaatgaggaacctataaaaaatttaatatatttaggaggcacagggcctgcaaacacaggaattcctatacaaaataaggatggcctagaccgtttacccacaacaaccacaatgtggggaaacatattcataccacattacttcagtggagaaggagcagtttatgtctcaaccaaagggccgttagatctaaagcaatactactctgggccaacagccacaaaactacaaacagacaaagtttcaacagtagaattcattacaccaaaatcaactcctaactatataaactgtagatataatccattagcagacaaaggtaccggaaacaaagtatatctagtttctataactaaagaacaatcaccatgggcacccccaacatctccactactaattagacaagacctgccactatggatattactttggggatttctagactgggaaaaaaaactagcagaaacttcacaaatagacacaaccaaagtagttgtaatagaatcaccatacataacaccaaaactggacaaatacgtacccttagaccaatcatttatagatggtaacagtcctcataaagtaggaatgacagattatgatgaaaaaaactggttcccaaaagctgcatttcaataccaaagcataacagatatatgtaactcaggaccaggtactgcaaaattacctaaagaaacatcagcagaggctcactataaatatactttttattttaagttcggaggatgcccacctcctatggaaaaaatatgtaacccgaccacccaagctgtgtatcccgtccccaataaccagccatcaacaccttcgttacagagtccaacaaacccaatccaaacctacttatatgacttcgacgaaagacgtggacaaattacagctaaagctgcaaaacgcctcaaaaaagactatgagactgaaaaaactgttttacaaattacaggatcaagcccaatggacctcaaagcccacgtcgaaacaccgacatcagacccggaggactcggaagaagaggaagagaccctccacctcaagctccagcgactccgaagaaagcaaaaactactccgacagcgaatcctccagctgttagacacacaaagcttagaatgataaaatgcaactttaaagtaaacatgtttggagaccctactcctaacagacgacttaccgcagcagaatttgaacaagaacttatagactctaaaatttggaaacatagacctagacagtatattaaagataaacctttctatgacttcttaccacctacacctattattccccgtataaactttgatcttggttatcaataaaggcctgcatacttcaacttgaggtgtccatttatttaagtttaaactaatataaacatccaccactctcccaaatacgcaggcgcaaaagggggctccgcccccttaaacccccaagggggctccgcccccttaaacccccaagggggctccgcccccttacaccccctaataaatattcatacaggaaaccacaaaattagaattgccgaccacaaactgatatgctaattaacttccccaaaataccactttacttccctaaaaattaattaataatcagcgtcacaataggaggagtcaacacactataaagctaactacacttccgaatggctgagtttatgccgctagacgaagagcagaacagagtctctgcgctggactagggcgggagccgaaggtgagtgaaaccaccgtagtctaggggcaattcgggctagggg

SEQ ID NO: 3131 - protein, 662 aa, Betatorquevirus sp.
MPYYRRRYPYRWRRRRWFKPRRSRFAFRRRHWRRYWVRNSYKKRKLSKINLKQFQPLTIRRSYVKGMYPCFLTNSHRLDHNMTQFIDSIAPYHFNGGGGFAITQFTLDGLYELFLKGMNWWTHSNCNLPLIRYGGCNIKFYKAENYDYVAIIHRCLPLKATNELYMSSQPQIMMLTKHCIHIPCRKANRNKKNYKKVFIKPPTQFTNKWMFQADICKQPLLVIQTCIASFDRMFLAADSQSTTMGFISLNTQSFQLHNWNTPPTTGYKPQDKQWLYGTENGQSNPNEEPIKNLIYLGGTGPANTGIPIQNKDGLDRLPTTTTMWGNIFIPHYFSGEGAVYVSTKGPLDLKQYYSGPTATKLQTDKVSTVEFITPKSTPNYINCRYNPLADKGTGNKVYLVSITKEQSPWAPPTSPLLIRQDLPLWILLWGFLDWEKKLAETSQIDTTKVVVIESPYITPKLDKYVPLDQSFIDGNSPHKVGMTDYDEKNWFPKAAFQYQSITDICNSGPGTAKLPKETSAEAHYKYTFYFKFGGCPPPMEKICNPTTQAVYPVPNNQPSTPSLQSPTNPIQTYLYDFDERRGQITAKAAKRLKKDYETEKTVLQITGSSPMDLKAHVETPTSDPEDSEEEEETLHLKLQRLRRKQKLLRQRILQLLDTQSLE

SEQ ID NO: 3132 - protein, 85 aa, Betatorquevirus sp.
MQKPLYTDKALKNQWINHLVSAHDLVCGCPEPLKHTVQEICRKEPEIKKCLTTEEDTPTAGDAVDGLSPGDLDLLFAEDTGEDTG

SEQ ID NO: 3133 - DNA, 2884 bp, Betatorquevirus sp.
cgggagctgaaggtgagtgaaaccaccgaaatctaggggcaattcgggctagatcagtctggcggaacgggcaagaaacttaaataatattatttttcagatgagcaaatttctacaagaacctatttactccaaaagaggactacaaaatcaatggattaacctaatttacacttcgcatgatatgatctgtggatgcaacaatccaattgatcacctacaagacatcttaaaacaacaaaaatgcctcccttcaaccgccgccgctacggctacagaagatggtggaactacagaaaacctagagcctactatcgacgaaggagatttggaaaagctgttttcagaagaaaacgacgtagacgaagggtaagaagaaaaaacttttttaaacataaaaaaactaaaactgttaaaataagacaatggcaacctactagcattaaaaaatgtaaaatacaaggctacctatgcatgtttcaagcaggcccaggtagatatggaaataactatgctctatggaaagaatcattctttccacaacattatcccggaggcggaggatggagtatacaacaattaagtttgggaactttatttagagaacacacagaatatatgaactattggactaaaagtaatgatagaatgaacctatgtagatatatgggatgcagtatacaactgtttagagaaccatatactgactggatatttacatactttgataatattcctaaaactgtaaacaaatggttttatgcttcacaccaccctataaaacttttaacaacaaaaagaaaaagaacaatccctagctttcaaacccaaccacataaaagaaagccatataaaaccatgtttataccacctccaaaactaatgaaaaaccaatggttttttcaatctaacctagcagactatccccttataacatttgccgcctcagcatgcagtttaacaggaatgtttggcagcacaaaatcaattagtaacaacgcaacattttactgcctagacactaaacaatttacaacaccaacatttcaatggagatccacaacaccagaaacagaatggggatacacatacggcacaaactacctatacggcctacaacatgcatatgaaacatggacacaaaataaagacatagatggaacatatttaggaaacacaatgaaacaacaaagtggaataccaatgacacaacaaacaacagccacatatacagtagacaaatggggaaaccccttttactggcaatatgcatcaggagactatccactttttacctcaacaaacacaccaaaacaaataatagaaagtaaaggaaaacccctaacagaaggccaaaagaaggactcacactatatatttaaagctagatacaatccatttcatgacaaaggaaaaggcaatgtagtatactttttaccaacttatgacaaatccaaaacagactgggaaccactatcagaccctgacttaaaatttgaaaactttccactatggttaacatgctggggaattgaagacattttaaaaagaatgggaaaatgtcataatttagatatggactgggtaatggtaataaaatccagctatattttaccacctgaaaaagcatatgttatattaagctatgactttgtacacggaaggggaccatatgatacagaaaaagaatttatgactactgatgacttaacacactggtacccaagatttaaatatcaaagacaagctatagacaacttaataagaactggtccagctgtagctactggagataatgtacaaaatatacaagctaaaattaaatacaactttttctttaagtggggaggcaactcatcaccacaagaaactattcgagatcccaacagccaacccatcacccctagtcccgataacatctacagcaacaatgaaatcattgatccgtcaacagacattacatcagaaatatacccatgggactttagacgacatctccttacagaaacagctacagaaagaattaaacaaagcccaactaatgaacaaattatgtttacagatggaagacaaactgcaacggacctccccctgcaaacaaaaacacaagagaaagagacccaggaaacacaagaaaagacattactccagcagctcaaccagctccaacaatacaacctgcaactccagcaccgactccgaaagctaaaacaattatctatggacctataaaccgtgtagaattgtttaaaactaaacgtaaaaataggagactaactccttatgaagcagaaacagatctgcaattagcaaaatggttacatagacctgtaagacaatattttgatgatccccctttttacccatggttaccgccagcaccaaaagtttgctttgaccttgtaaaaggatttaataaaggccagcattaattcacttttggagtctgtttatttaagtttaaacttatacaaacatccaccgcctccctaatacgcaggcgcacaagggggctccgcccccttaaaaggaacatccaccgcctccctaatacgcaggcgcacaagggggctccgccccccttaaacccccgggggggaaaccccccccctaaccccccccaaaaaaccacaaaattagcattgccgaccacaaacggtacaggaaaccacaaaatttgcattgccgaccacaaaccgtcatttacttctcctttttacaaaacttccttttttactaattattattcattaaattaattaataaacaccgtaattccggggaggagcaaacactgtatataactaactacacttccgaatggctgagtttatgccgccagacggagacaggatcactttagtgactccgggctgatcttggg

SEQ ID NO: 3134 - protein, 662 aa, Betatorquevirus sp.
MPPFNRRRYGYRRWWNYRKPRAYYRRRRFGKAVFRRKRRRRRVRRKNFFKHKKTKTVKIRQWQPTSIKKCKIQGYLCMFQAGPGRYGNNYALWKESFFPQHYPGGGGWSIQQLSLGTLFREHTEYMNYWTKSNDRMNLCRYMGCSIQLFREPYTDWIFTYFDNIPKTVNKWFYASHHPIKLLTTKRKRTIPSFQTQPHKRKPYKTMFIPPPKLMKNQWFFQSNLADYPLITFAASACSLTGMFGSTKSISNNATFYCLDTKQFTTPTFQWRSTTPETEWGYTYGTNYLYGLQHAYETWTQNKDIDGTYLGNTMKQQSGIPMTQQTTATYTVDKWGNPFYWQYASGDYPLFTSTNTPKQIIESKGKPLTEGQKKDSHYIFKARYNPFHDKGKGNVVYFLPTYDKSKTDWEPLSDPDLKFENFPLWLTCWGIEDILKRMGKCHNLDMDWVMVIKSSYILPPEKAYVILSYDFVHGRGPYDTEKEFMTTDDLTHWYPRFKYQRQAIDNLIRTGPAVATGDNVQNIQAKIKYNFFFKWGGNSSPQETIRDPNSQPITPSPDNIYSNNEIIDPSTDITSEIYPWDFRRHLLTETATERIKQSPTNEQIMFTDGRQTATDLPLQTKTQEKETQETQEKTLLQQLNQLQQYNLQLQHRLRKLKQLSMDL

SEQ ID NO: 3135 - protein, 104 aa, Betatorquevirus sp.
LAERARNLNNIIFQMSKFLQEPIYSKRGLQNQWINLIYTSHDMICGCNNPIDHLQDILKQQKCLPSTAAATATEDGGTTENLEPTIDEGDLEKLFSEENDVDEG

SEQ ID NO: 3136 - protein, 62 aa, Betatorquevirus sp.
LFKTKRKNRRLTPYEAETDLQLAKWLHRPVRQYFDDPPFYPWLPPAPKVCFDLVKGFNKGQH

SEQ ID NO: 3137 - DNA, 2884 bp, Betatorquevirus sp.
gaaggtgagtgaaaccaccgtagcaccgtagtctaggggcaattcgggctagttcagtctggcggaacgggcaagaaatttaaaaaaatattattttacagatgcaaatacaaccacccattagaaccttcaaacaaaccatctccgattggaaaaacttaattgttcacgtccacgataatatttgcaaatgcaacaaaccattggaacatacaattgatacctgcaccaacaatcctgctgaattaagattaaataaatctactaaacaacaactacaacaatgcctttctacggcagaagaagatggccccgcagacgttatcgatggtttcgaagatggcgaactagacgcccttttcgcccaagataccgaagaagatactgggtaagaaaatattctcgaaagagaaaactttataaactaactgaaaaacaatggcaaccaaaagttataagaaaaactcatattaggggtacataccccttatttctttgtacaaagcacagaatagcaaacaatatgatacaatacctagactctgtagctccagaacactactatggtggaggaggattttctataatgcaattttctttacaagctttatacgaagaatttgtaaaagctaaaaactggtggactcatacaaactgttttttaccacttgtaagatatatgggttgcagctttaaattttataaaactgaatactatgattatgttgtacttattgaaagatgttatccccttcattgtacagatgaaatgtacttatctactcaacctagtattatgatgcttacaaaaaaatgtatatttgtaccctgtaaacaaaatagcaaaggtaaaaaaccatataaaaaagtaagagtaaagccaccatcacaaatgactaccggatggcacttttctcaagaattagcaaacatgccattagtagtaataaaaacttcagtatgtagctttgacagatactatacagacagcacagcaaaatctaccacaataggatttaaaaccttaaacacacagacatttaaataccacgactggcaagacccacctacaacaggctataaaccacaagactcactatggttttatggagcagaaaatggaacacctgtagacccaaatgacacagtagtaagtaatttaattttcttaggaggcacaggaccttataacaaaggtatgccaatcaaagaaaatatagctacatattttacaaatcccaaacaatggggaaacatatttcacgatgactacacatcaggcacctcaccagtgtttgtaacaaacaaaccaccctcagaaataacaacattatggccaaatattaaaacaaaaaaagtaaaagagtcagaagtctttacaccaagaacaataccattatggctaccttgcagatataacccatttgctgacaaaggaacaggtaacaaaatttggttagtatcaatacatgctgatcacacacaatggaaaccaatagataatcctttactacaaagaaatgacttaccaatatggctactagtttggggatggcaagactggcaaaaaaaaaaccaacaaacatcacaacctgatattaactacttaacagtaatttcttcaccatatatatcttgctatcctaaattagactattatgtcctactagacgactcattttgggatggacactctacatacatagaatcaattacagattcagataaaaaacactggtatccaaagaacagatttcaaatagaaactttaaacctaatagcaaatacaggtccaggtactgtaaaattaagagaaaatcagtcagcagaagctcacatggtttatcgctttaatttaaagcttggaggatgtccagcaccaatggaaaaaatatgtgaccctagcaaacaatccaaatatcctattcccaataaccagcaacaaacaacttcgttgcagagtccagaaaacccaattcaaacctatctctacgacttcgacgaaaggaggggcctacttacagaaagagctacaaaaagaatcaaacaagatcacacatctgaaaaaactgttttgccatttacaggagcagcaacagacctccccatactccaaacaatatcacaggaggaaagctcctcggaagaagaagaagagcaacaagcggagaaaaaactactccagctccgaagaaagcagcagcgactccgagacagaatcctccagctcttagacatacaaaatatgtaataaaacatagcactgtaaaaattgatatgtttggtgaaacacctatacctaaccgtagaatgactccagaagaatttgaacaggaattaattcttgctcgtatatttaaaagacctccttgttactttataaaagatagacctacttatccttgggtacctaaacctactgatgaaaaattcatggtaaactttgacttaaacccccctcaataaactaagcctgcaaactttcactctcggtgtccatttatataagtttaaacttaaataaacatccaccacactccctaatacgcaggcgtaaaagggggctccgcccccttacacccccaagggggctccgcccccttaaaccccaagggggctccgcccccttacaccccctaattaatattcaacaggaaaaccacctaattagaattgccgaccacaaaccgtctgctacttcctctttttacacacacttccctttttactaattattattcattacattaattaataaacaccgtaaatccggggaggggcttaacaactatataaccaagtatacttccgaatggctgagtttatgccgccagacggagacgggatcactacagtgactccaggctgaacttgggcgggagcc

SEQ ID NO: 3138 - protein, 655 aa, Betatorquevirus sp.
MPFYGRRRWPRRRYRWFRRWRTRRPFRPRYRRRYWVRKYSRKRKLYKLTEKQWQPKVIRKTHIRGTYPLFLCTKHRIANNMIQYLDSVAPEHYYGGGGFSIMQFSLQALYEEFVKAKNWWTHTNCFLPLVRYMGCSFKFYKTEYYDYVVLIERCYPLHCTDEMYLSTQPSIMMLTKKCIFVPCKQNSKGKKPYKKVRVKPPSQMTTGWHFSQELANMPLVVIKTSVCSFDRYYTDSTAKSTTIGFKTLNTQTFKYHDWQDPPTTGYKPQDSLWFYGAENGTPVDPNDTVVSNLIFLGGTGPYNKGMPIKENIATYFTNPKQWGNIFHDDYTSGTSPVFVTNKPPSEITTLWPNIKTKKVKESEVFTPRTIPLWLPCRYNPFADKGTGNKIWLVSIHADHTQWKPIDNPLLQRNDLPIWLLVWGWQDWQKKNQQTSQPDINYLTVISSPYISCYPKLDYYVLLDDSFWDGHSTYIESITDSDKKHWYPKNRFQIETLNLIANTGPGTVKLRENQSAEAHMVYRFNLKLGGCPAPMEKICDPSKQSKYPIPNNQQQTTSLQSPENPIQTYLYDFDERRGLLTERATKRIKQDHTSEKTVLPFTGAATDLPILQTISQEESSSEEEEEQQAEKKLLQLRRKQQRLRDRILQLLDIQNM

SEQ ID NO: 3139 - protein, 96 aa, Betatorquevirus sp.
MQIQPPIRTFKQTISDWKNLIVHVHDNICKCNKPLEHTIDTCTNNPAELRLNKSTKQQLQQCLSTAEEDGPADVIDGFEDGELDALFAQDTEEDTG

SEQ ID NO: 3140 - protein, 62 aa, Betatorquevirus sp.
MFGETPIPNRRMTPEEFEQELILARIFKRPPCYFIKDRPTYPWVPKPTDEKFMVNFDLNPPQ

SEQ ID NO: 3141 - DNA, 2884 bp, Betatorquevirus sp.
cgggtgccgaaggtgagtgaaaccaccgtagtcaaggggcaattcgggctagatcagtctggcggaacgggcaagaaacttaaaataatatttattttacagatatgagttctgtttggaagagacccacatcatcaccgagacaactagaactaggctggagaaaccttattttccaaagccacgatcaattttgccactgtgaagatgttgatctacactttattcttttaatgaataaatttggaaacgcacccaaaccagaatcagagataaaaaatatcaaatggcttattaccggcaaaccagataccgaagaagaagatacagacaaaaaagacgaccctggttttctagatggagaactagaaatccttttcaacgaaaacaatggagaagaaaaagacaaagaaaacccaagtacaaggtaaaaaaatatagactgcctaagaaaaagaaagctataattgtaaaacaatttcaaccgtatactgttaaaagatgtaaagttaaaggatataaatgtttgtttcaaggagggccagatagaacaaataataactatattcaatatgtatacagctttataccggaaaaacaaccaggagggggaggctggagtttacttgtattttctttagactctctatttgaagactataaacacttagaaaatgtgtggacaactagcaatgctggactaccacttattagatacagaggatgtcaatttaaattttatcaaagcaaagaaactgactatgttgttacctatgataactgctggcctatggtagacacaccacataaacacgcagacagcgcaccatttagaatgctaatgaaacaccacaaaataattatacccagtagagatacacaaaaaagaaagaaaccatacaaaaaagtttttattaaaccaccagcacaaatgatgacaaagtggtatttccaaaaggatatctgtaaaacaccactagttatgcttactactacatcctgctctttaacatatccatttacagcaccagaagcagaaagtaacaacatatcctttaaaatactaaatccatatatatttaagaactcaaacttccaacactttgacacctccggatacttttgtaaatacgccaacccaccagacaaagatcctctatacctatatgcatcgacgactgaaaacttaacatatgacaaattaaaaaagccagaaactacagacattatagcattagcaaacacaaaacaacataccccaggctacagcttaaaaggcaaaccaataaccgacttacaaaaatgtctaggaaatccatttcatgaagactatagtcacgatgatatgtacatttacatttcaaaaataaccccattagaaatgataaaacatctgggaaatgaaaaccaaccaccagaagaaaataaaagatcaataactaactcaggtcctatctactacacagtaagatataacccccaaaaagatgatggaagtacaaacaaagcttatttagtaaacaatgaattagggggcaacatacaaccaccaacaaacacaaattttataattgaaggatttcctttacacaccatgctatggggatggacagactttataagaaaactaggagaagccatacattttgacacaaactactttgtatgtatagaaacaaaagttaccaataatgacaaactaccatatttaataccagtagatgacacatttgtacacggactaaatccatacagtaaaattcacgtagatatagatcaccaaatacccattgatgactataacaaagaaaactggtatcctagacatgaataccaaaaagtaacaattaataaaatatgtatgacaggacctgcgtgtcctagacaaccatggaaccattatatgcaagctcactgttcttataaattttactttactcttgggggatgtccaaaaacattagaaaaaatatacaatccttgttcacagcctaaatggcccacagccgataacctccttggaagatttgaagtgcaggatcctaacacacaccccgcaacagaactctacaactgggactggcaaaaagactatgttacagaatcagctttacaaagaattagaaaatacacagaaattgatccaaaaattttctcaattccagaaagcaaaaaccaaccgatcgtcctccaaagaccacaagaaaaagacacatcgaaagaggaggagaaggagctccagctccagctccaacacatcagataccaacgactcctcttacaactccaactccgacaattaaaataactaaatctaaatttaaagtaagtttatttgaagaaccaaagaaaaacagaagaatgactccatgggaaaaagaacaagaaaaacaagacgcagctatatggaaaagacctcaaagagactttatttttgacataccattttatcccggtatacccccaacacctttagtaaactttgatttaaaatacaaatatgaataaacaaggccaacagtaatccacttgaggtgtccatttatttaagtcttaacttatataaacatccaccgcctccctaaaattcgggcgccaaaatttaaagggggctccgcccccttacacccccaagggggctccgctaataaatattcaacaggaaaaccacctaattagaattgccgaccacaaaccgtcgcttacttcctctttttagacatacttccctttttactaattattattcattacattaattaataatcaccgtaattccggggaggagactattatctatataactaactacacttccgaatggctgagtttatgccgccagacgaagacaggatcactttagtgactccaggctgatcttggg

SEQ ID NO: 3142 - protein, 673 aa, Betatorquevirus sp.
MAYYRQTRYRRRRYRQKRRPWFSRWRTRNPFQRKQWRRKRQRKPKYKVKKYRLPKKKKAIIVKQFQPYTVKRCKVKGYKCLFQGGPDRTNNNYIQYVYSFIPEKQPGGGGWSLLVFSLDSLFEDYKHLENVWTTSNAGLPLIRYRGCQFKFYQSKETDYVVTYDNCWPMVDTPHKHADSAPFRMLMKHHKIIIPSRDTQKRKKPYKKVFIKPPAQMMTKWYFQKDICKTPLVMLTTTSCSLTYPFTAPEAESNNISFKILNPYIFKNSNFQHFDTSGYFCKYANPPDKDPLYLYASTTENLTYDKLKKPETTDIIALANTKQHTPGYSLKGKPITDLQKCLGNPFHEDYSHDDMYIYISKITPLEMIKHLGNENQPPEENKRSITNSGPIYYTVRYNPQKDDGSTNKAYLVNNELGGNIQPPTNTNFIIEGFPLHTMLWGWTDFIRKLGEAIHFDTNYFVCIETKVTNNDKLPYLIPVDDTFVHGLNPYSKIHVDIDHQIPIDDYNKENWYPRHEYQKVTINKICMTGPACPRQPWNHYMQAHCSYKFYFTLGGCPKTLEKIYNPCSQPKWPTADNLLGRFEVQDPNTHPATELYNWDWQKDYVTESALQRIRKYTEIDPKIFSIPESKNQPIVLQRPQEKDTSKEEEKELQLQLQHIRYQRLLLQLQLRQLK

SEQ ID NO: 3143 - DNA, 2883 bp, Betatorquevirus sp.
caggtaccgaaggtgagtgaaaccaccgaagttaaggggcaatatgggctgtagcagtctggaggaacgggcaagaaacttaaaaaaatattatattttacagatatgagctcttttttatcaccctgcatttactcaaaaaaaggattagaaaaccaatgggtaaactgcatttggaacacccatgaaatgttctgcggctgcaacaaaccttggaaacatttagaagacatactaaaaagacaaggagcacaactatgcctcccttctactaccgtagacgttggaaccgctacagaaccagacgttacagaagacgaccatggattagagcctggagacctagacaaacttttctcagaagatttcaccgaagaagacgggtaagaaaaagacgttttattactaagagaaaaagaaaactaaaaaaaataactgtaagacaatggcaaccttctcatataagaaaatgccacattaaaggacaactatgcttgctaacatgtggtataaatagaattaacaataattatacattaacttctgaaagctatgtaccagtgtctgaaccgggaggtgggggatggagtataatgcaattaactttaagagccttatatgacgaatacgaacactatagaaactggtggacaaacagtaactgtggactacctttagtaagatacaacggatgtaaatttaaattttataatagtaatgactgtgactatatagtaactccacaacacacaggaccgtttgaagtaacaagagacacatacttaaacacacaacccagtagacacatgatgaaccaccttagctttatagtaccaaaactaaaccctaataaaaaaaaaagaccatatataacaaagcgatttccaccaccagcactatttcaaagcaaatggtactttcaacaagacatactaaacacaccactaatactattaacagtatcatcatgctcactagaccaaatgtacgcaccaaacgatcaaataagcactaacataacatttaattctttaaacacaaccatgtttcaaaacccatactgggaaacagaacaaccatactattgtaaagtaacaggcacaatacaaacaggactatatacatatggaaatggaaacgaaaacgaagcaaaaaacaattggaaatatttacaaccactagcaaacacaactagatttattccaccaaactacaccacagcaaaacaaatagacaactatacaaagtttacacagaatacaaattttgcaaacccttttgctaccttggacgaagacacaccacatacagacataaaaatattttacggacagcaaccaaaagaacaagaataccagaaaccagctaccattttagaaacaactttatttcaacaatgcagatataacccatttaaagacaaaggaataggtaacaaagtatacttaaaatgcacaaaaacacaacaaggaagctttctctccataccaacagaccccagactaaccattacagactttccactatggctaatattttggggctggccctcctggctagaaaaatcaaaaccagtacaccacatagcagaagactatcaatttgtaatacaatcaccatatatatacccaccaatgccatgctacgtaccactagacaactactttacacatccaaaacacacaatactaaatgaaacagacaaacaacactggcacccaaaagcagcataccaaacagaagtactagcaaaatttgcagaaacaggaccagcagctacaaaaataaacaaacaaaaacaaattcaaatacacgcattttataacttttattttaagtggggaggatgcccagcaccaatggaaacaatatgcaatccagcagaccaagaaaaattccccatgcccaatcacatcttacaagaacttacgctcgagaatccagaaacacacaaagaacactacatatacagatttgacgaacgagacggacagcttacagagccagctgcaaaaagacttaaaaaagactatgaatctccaaaatattttacagaatttggaacaaaagacccaatactacaaatcttcccaccgatacaagaaacacaagagaaaacaaccccgaaaaaaacggaagaactacagcagcagctccagctcctccgagaccaccaacaccaactcagagagcgaatcaacagactaaaaaaaagatcaaaatattaccctataacatagatatgtttggtgaaagaaaaattaaaaaccgtagatttaatgcaaaagagtatgaacaagaattacaggaaagcaaaatatggaaacgtagacctagacagtatatttttgatccccctgattatgaactaaatataattgaacctcttgtaaactttgatgtaaacttttcattaaactttaaattctaggccagcaaatattcacttgtcggtgtccatttattaaagttaaaacttatataaacatccaccactctcccaaatacgcaggcgcacaagggggctccgcccccttctcccaaatacgcaggcgcacaagggggctccgcccccttaaacccccagggggctccgccccctaaaacccccagggggctccgccccctataaccccctaattaatattcaacaggaaaaccacataattagaattgccgaccacaaactgtcaaccgttacatttacttcctcatttttactactacttcccattttctagaccactcccacctacttcattaataatcagacgtatatcctgggaggaggaacaccactatataactaactacactgacgaatggctgagtttaccccgccagacggagacgagacaggacactgactcggctgctacaggg

SEQ ID NO: 3144 - protein, 681 aa, Betatorquevirus sp.
LRLQQTLETFRRHTKKTRSTTMPPFYYRRRWNRYRTRRYRRRPWIRAWRPRQTFLRRFHRRRRVRKRRFITKRKRKLKKITVRQWQPSHIRKCHIKGQLCLLTCGINRINNNYTLTSESYVPVSEPGGGGWSIMQLTLRALYDEYEHYRNWWTNSNCGLPLVRYNGCKFKFYNSNDCDYIVTPQHTGPFEVTRDTYLNTQPSRHMMNHLSFIVPKLNPNKKKRPYITKRFPPPALFQSKWYFQQDILNTPLILLTVSSCSLDQMYAPNDQISTNITFNSLNTTMFQNPYWETEQPYYCKVTGTIQTGLYTYGNGNENEAKNNWKYLQPLANTTRFIPPNYTTAKQIDNYTKFTQNTNFANPFATLDEDTPHTDIKIFYGQQPKEQEYQKPATILETTLFQQCRYNPFKDKGIGNKVYLKCTKTQQGSFLSIPTDPRLTITDFPLWLIFWGWPSWLEKSKPVHHIAEDYQFVIQSPYIYPPMPCYVPLDNYFTHPKHTILNETDKQHWHPKAAYQTEVLAKFAETGPAATKINKQKQIQIHAFYNFYFKWGGCPAPMETICNPADQEKFPMPNHILQELTLENPETHKEHYIYRFDERDGQLTEPAAKRLKKDYESPKYFTEFGTKDPILQIFPPIQETQEKTTPKKTEELQQQLQLLRDHQHQLRERINRLKKRSKYYPIT

SEQ ID NO: 3145 - protein, 93 aa, Betatorquevirus sp.
MSSFLSPCIYSKKGLENQWVNCIWNTHEMFCGCNKPWKHLEDILKRQGAQLCLPSTTVDVGTATEPDVTEDDHGLEPGDLDKLFSEDFTEEDG

SEQ ID NO: 3146 - protein, 62 aa, Betatorquevirus sp.
MFGERKIKNRRFNAKEYEQELQESKIWKRRPRQYIFDPPDYELNIIEPLVNFDVNFSLNFKF

SEQ ID NO: 3147 - DNA, 2883 bp, Alphatorquevirus sp.
ttcacttgtcggtgtctacctctataagtcactaaggggcaattcgggctcgggactggccgggctatgggcaaggctcttaaaaaagctacccccttaactatgtttctcggcagagtttaccgccgcaagaaaaggaaagtgcttctgtccctggtgcatactccacagaaaacaccttcctccatgaaccgctggttacccccggcacacgatgcccgcggaattgagaggcagtggtatgactgtgtttggcgcagtcacgctgcttgctgtggctgtggtgattttattagtcatattaatgatctggcgcatcgttttggacgtcctccgaattccagaccacctgctactccccagccgccggctgtgagagccctcccggcactgccggcccctgagccatggtctggcgcagggggcgacgctggcgccggtggagatggcgccgcaagccgcggtggaggagatggagacgctggagacgtcgcagacgaagacctgctagacgccgtcgacctcgcagagtaaggagacgcaggggagggtggcggcgctcctacagacggtggaagagacgcagggggcgacgcagacataaaaagaaacttatactgactcagtggcaacccgcggttgtcaaaaaatgcagaatagtgggctacgaccccataataatatgtggactgaacagaaccagccacaactccacaactcacgcagaggactacactacaggcaaccaggcctttggggggggactgtgcaccaccaaatacactctaagaatactgttccaagagtacatggcccaccacaactactggacggccagcaacagagacctggagctggccaggtacctgggggcttctattatattttttaaacaccccacagtagactttgtagccagagtcagaaccatgcctccctttaacgacactgacatcacagccgcatcccttcacccgggaatgcttatgctagctaagaaaaaaataattattcccagtctgaaaaccagaccaagcaaaaaacactatgtaaagataaagataggggcccccaagctatttgaagataagtggtactctcagagagacctctgtgacacaactcttgtggttatagaggcaacggttgcagacttgcaatatccgttcggctcaccactaacgaacagcatctgttgcaacttccaggttcttaacagcaactatgacaacgccctgagcacccttataggaactcagggagacaaagacagagatcaatgctataaatttctgttaaatacaatcacctactataacacctctcaagtactagcacagctaaacaagttcttacctgcctccaacacagttaacctctctgaatcaaatgccgcaaattccattaacccatccaaccaaacacaaaatacatacacatccacaaatatacagatacacaacaatacactgtatggaggagcagcatactttagcacatcaggacaaaataatccaccaaagaaaatgaaagaggccaacaaagcatacactaaagcagctataaaaattctaggcaattggaattttactagcatgaactcatcctcagaatcggagttatcagagctaaactactttgactattacacaggcatgttttccagcatatttttagccagcggcaggtcaaactgggaggtaaaaggcagctacacagacataacatacaaccccctagtagacaagggagagggcaacatgatctggatagactggatcaccaaaggtgacaccatctactctgaaaataaaagcaaatgcttgctcaaagacctgcccatgtgggccctgtgctatggctacgcagactatgtacttaagtgcacaggagtctccagcataaaaaacgaggccagaatagtcatgaggtgtccctacacgtacccccaactaataaaacacacaaaccccaactttggcttcgtagtgtacagtgacaactttggacgcggacgcatgccggggggcgaccctgtaccgagcaccagaaacagagtgcactggtacatcaccataacccaccagactgaagtgctagagtgcatctcccagaccggaccgtttgcctaccacagcgacgaacgcaaagcagtactgactataaaatacaacttcagatggaaatggggaggcaaccctgtgttccaacagattcttagagacccctgcacgggatcctccggctccggtccccgtagagtgcctcgctcaatacaagtcgatgacccgaagcaccagacaccagagtacatgtggcacgcgtgggacttcagacgtggactctttagccagaaaggtattaagagagtgtcagaacaaccaacagatgttgaccttcctacaggcaggggcaagagacccaagagagacacagacggcccgcaagagcaaggccaagaagaaggctcgtgttccatcagacgagtcctccagcagtggctccactccagtcaggagcagagccaagaaagcgaagaagaagcagccccgacgacgctctcgcaagagctacaaaaacaactcaagcagcagcagctcatgggaaagcagctccgagagctcagtctccaactcgcccaagtccaagcggggggacaccttcacccccttttacaatgccatgcataaataaagtatacatgtttccccccatgacctttactccctccagcagagactggaaagaggagtacgaggcctgcagagtctgggacagacctcccagaaacgacctaagaaggccccctttctatccctggatgcctcctacgcacaatgtaagctttaagctctccttcaaataaatgttggccgtgggagt

SEQ ID NO: 3148 - protein, 760 aa, Alphatorquevirus sp.; identical to SEQ ID NO: 591

SEQ ID NO: 3149 - protein, 155 aa, Alphatorquevirus sp.
MGKALKKATPLTMFLGRVYRRKKRKVLLSLVHTPQKTPSSMNRWLPPAHDARGIERQWYDCVWRSHAACCGCGDFISHINDLAHRFGRPPNSRPPATPQPPAVRALPALPAPEPWSGAGGDAGAGGDGAASRGGGDGDAGDVADEDLLDAVDLAE

SEQ ID NO: 3150 - protein, 62 aa, Alphatorquevirus sp.; identical to SEQ ID NO: 593

SEQ ID NO: 3151 - DNA, 2882 bp, Betatorquevirus sp.
gcgggagccgaaggtgagtgaaaccaccgaagctaggggcaattcgggctagatcagtctggcggaacgggcaagaaacttaaaatgtctttcttttacagatgagcaaactattaaaaccaacaaaacttactgaaaaacaacaaattctacaaaatgtaaatctatttgtgtctattcacgacttatcctgtacttgctccaaccccttgaagtgtattattctacaaatttacaaccaagaaaaaggattacaaattaaaccagaagaaattcaacaatggcttactactaccgccgctggagaaataactactggaaaagaagaaactttcgatggcgaagacctagacgcccttttcgcagacgacgctggcacaagcgctgggtaaggaaaaaaaaactctcttatttaaaacttaaagaatggcaaccaaaagttataagaaaacttgttataaaaggaatgtactgcttatttgaatgtaaccataacctactaacaagaaactatacacaatacatggaatctattccaccagaaggaactccttcaggaggaggattttcactaaataaatttacattagactgtttatacagcgaacacgaaaaggcaagaaatgtatggacaaaaggtaataaaaacttgccacttataagatacacaggatgtgaatttaaaatatacagaccaacaaatacagacgcagttgttaaatttcaaacatgctatccaatgtcagcaacaccattaacatacactagtacacaaccatatataatgatgatgtcttatggaagcaaaaaaataagtagattagaaaacacaaaaaacaaaaaaccatataaaagatttaaatttaaaccaccacaacaaatgacaaacaaatggtttttttcaacagatttagcaaacaaaggactaataatgttagcagccacagcagctaactttgaaaatatatacataagtaaatatgcagaaagcaacacaatatcactcagattcttaaacaccttagtatttgaaaacagacatttcaacaaattacccacatcaggctaccacgcaaaagacaacatgtggctatgggcagcagacaatggtgcagagccacctgaattcaaagacatgatatttttaggtaacacagtacaataccgcctaggaacaccaataaaaaactatgccccctcaggaacaataggaagcgcaataacaaaaactgactttacaaaactagaaaattggggcaacccattccatgaaaactacttaaatcataaacaccaactatggtggacaacaactagcccaaccacacatttatcagcacacaaagcacaatcagtatcacaaaaagtaacaaacttaggatttaacaaacttcaacaagaactatttttttatggcagatacaacccaaatagagacaaaggagaaaacacacaattatattatttaaaaaactatgaagaagaaaagggttggcaaccaccaccaaacaaaaacttaatactaacaggatttccattatggctactagtatggggtaaccttgattatcaactaaaactagcagaaataaaccacatagacacaaactacattgcatgcataaaaaccgacaaaatagaaccaacaataccaccacaacaagcatacatactacttgacaataactttacacacggagacagtgaatggcatgatgaccacggcagaacagactatgataacatacactggtttccacaagtaaattaccaaaaaagaacacttgaaaacataggaaaatgtggaccagcaactgccaaactaggacaatacaaaaatgcagaactacattgtgaatataaattttattttaaggtgggaggatgtgtaccaccaatggacaaaattacaaacccaagcttacaaccaacttatcccataccaactaacatcgctgacccaaattcgttacagagtccaagagaaccaattgaatcattcttatactgctttgatgaaaggagagggcaaattacggaaacagctgcagaacgaatcacaaaagactttaaaccttcaaaaactttgttcacagattcaattacaactggaacagacgtcccagtcctccaaacattcaaagaaacacaagactcggaggaggaggaggaaaccaaagaagcgacattgttccagcagctccagcagcagcgaatcaaacagcacaacatccgcagacgaatacaacagttattaactcaactacaacaactatcatgaaatgtgttaaacatgtaaaattgtttgaagataaaccaaaaattcgtaggctaaataaatgggaattacaagaagaaaaagaagacgccaaacactggtgtcgccctatgcgtacattttggggggatacacctatttacccatggtgcccacctgaaccttatgtaaattttgaacttaactacccctttaaataaacaaggcctattaattcacttgacgtgtctgcttctttaagtttaaacttaaataaacgtccaccacctcccaaacaataggcgtagcaagggggctccgccccctttaaccccagggggctccgccccctacaacccccaagggggctccgcccccttacaccccctaataaatattcaacaggaaaaccacaaaattagaattgccgaccacaaaccgtcactaacttctgctttttacagcacttccccttttgctacttattattcatatgattaattattaaacagcataattccggggaggagactaaacactatataactaagtacacttccgaatggctgagtttatgccgccagacggagacgggatcacttcagtgactccaggctgatcttgg

SEQ ID NO: 3152 - protein, 666 aa, Betatorquevirus sp.
MAYYYRRWRNNYWKRRNFRWRRPRRPFRRRRWHKRWVRKKKLSYLKLKEWQPKVIRKLVIKGMYCLFECNHNLLTRNYTQYMESIPPEGTPSGGGFSLNKFTLDCLYSEHEKARNVWTKGNKNLPLIRYTGCEFKIYRPTNTDAVVKFQTCYPMSATPLTYTSTQPYIMMMSYGSKKISRLENTKNKKPYKRFKFKPPQQMTNKWFFSTDLANKGLIMLAATAANFENIYISKYAESNTISLRFLNTLVFENRHFNKLPTSGYHAKDNMWLWAADNGAEPPEFKDMIFLGNTVQYRLGTPIKNYAPSGTIGSAITKTDFTKLENWGNPFHENYLNHKHQLWWTTTSPTTHLSAHKAQSVSQKVTNLGFNKLQQELFFYGRYNPNRDKGENTQLYYLKNYEEEKGWQPPPNKNLILTGFPLWLLVWGNLDYQLKLAEINHIDTNYIACIKTDKIEPTIPPQQAYILLDNNFTHGDSEWHDDHGRTDYDNIHWFPQVNYQKRTLENIGKCGPATAKLGQYKNAELHCEYKFYFKVGGCVPPMDKITNPSLQPTYPIPTNIADPNSLQSPREPIESFLYCFDERRGQITETAAERITKDFKPSKTLFTDSITTGTDVPVLQTFKETQDSEEEEETKEATLFQQLQQQRIKQHNIRRRIQQLLTQLQQLS

SEQ ID NO: 3153 - protein, 96 aa, Betatorquevirus sp.; identical to SEQ ID NO: 2442

SEQ ID NO: 3154 - protein, 66 aa, Betatorquevirus sp.; identical to SEQ ID NO: 2443

SEQ ID NO: 3155 - DNA, 2882 bp, Betatorquevirus sp.
cgggtgctgaaggtgagtgaaaccaccgaaatcaaggggcaattcgggctagatcagtctggcggaacgggcaagaaactaaaaatgtgttttattttacagaaatgacctcttactactcaaaaccagcatactcaccttctgctttagaactacaatggctaaacaacactgtatctagccacgaccttttctgcggctgccctaaaccttggaaacatttgcaagaaattcttaaatgtaaaggaacccaactatgccttggtggtaccgtagacgaccgcgacgctggaacacaaactggagaagacgacctagacctttcccctggagaactagagcgcttattcgcagaagaagacaccgccgataccgggtaagaagatggcgccgctacaaacgcttttttaaaaagaaacttacaaaaattagacttaaccaatggcaaccgtccactataagaaactgctcaatcaaaggacacttgcctttattactatgtggacaaggaagaatagctcataactttactatatgggcagaaagtactgtaccaattggagaaccctcgggaggcgggtggtcttatatacaaataaccttaagagctctttgggatgaatatagaaaatacagatcatggtggacaaaaggcaacgaaggactaccactagtaagatttagatactctaaacttacattttatagaagccaacacacagactatatagtagtaataaaaagatgtccaccatttagtgtaactagagaagattacttagacacacaaccaggaagaatgctaatgaatataagaaaaatactagtaccacacttaggaagaaaacaatataaaaaaacatatataacaaaaaaaatattaccaccagctctatggcaaaacaaatggtactttcaacaagacatgtgtaacttaccattatttatacttaaaacatcagcaacaaacttagatcaattttaccaaccagacacacaaatatcaaataacataactatatggagcctaaacacagacatgtatcaaaacccacaatggcactatgacgacacaacaggctacattccaaaatacacacaaccaccagaaggaggacaaaaaccagtatacatatacggtacagaaaatggacacaatgaaataacacaatggacacaattagttagattagcacaaacaaaactactaacaaaaggaaaacaggtaaacgacacaagtcaaatgaacaaagaagaaaactggggaaacccatttcacccagcatacctaacaccagaagccagattattttactcatttgaattaccaaacacaacaaacacaaaaccaaagatatcacaattttactatacatttgaaccatgtagatacaaccccttaaaagacacaggagaaggtaacaaagtatattttaaaagtacaaaactacaacaaggcccatttactaaactaccagacaaagaagacattataatagtagaatacccactatggttagtcttctgggcctgggcagattggatacaaaaaagcaaacctatacaacacatagatgaagactaccaaattgtagtacaatcaaaatttattacaccaaaaagaaattgctatgtttttgtagacaaatatatgtggggagcagacacattacatactgaatttacagaaacagacaaaactaactggcatccaaaatatgcattccaatcagaaatagaaaactcatttgcagaaacaggcccagctacaccaaaactaaaccatactaaatcttttgaagtaaacatgaaatataacattaaattaaaatggggaggatgtcctgctccaatggaaaatgtttctaatccttgcgaacaggaaaaattccccacgcccagtaacgtcaacagcagatatgagatcacgaatccagaaaaacaaaaagaaacctatttgtatagatgggacgaaagaaactgctttcttacagcaacagctgcaaaaagacttaaaacagaccactcaactccaacatcttttacagactttccaagcctcaacccaccacaccaaatccaagaggcagaaacaccggagacatcgtccgaggaagaagaacaaacaccactactcaagcagctccacaaactccacaagcgaaaacgactcctccgagacagactccgacaactaataaaatcaaaattgtaaaactaagatacaacatatttggagaaccaacatttaaaaacagacgactaactccatacgaaagaaaagaagacctacaggaggcaaaaatatgggacagataccctaaagactatatttttgacagaccgttttacaaaaacattgttccagaacccatagttaactttcgcttaaactatgtagactaaaccctttaataaacaaggcctgcaatgattcacttctcggtgtccatttattaaagttttaacttatataaacatccaccacactccctaatacgcaggcgcacaagggggctccgcccccttaaaccccccagggggctccgccccctgaaacccccaagggggctccgcccccttacaccccctaattaatattcaacaggaaggctccgcccccttacaccccctaattaatattcaacaggaaaaccacctaattagaattgccgaccacaaactgccaaccgttgcaaacacttccctaaattataccttacttccctatttacagaactccacctactaattcattaatagtcagacgctattcctgggaggagctaactatctatataaccaagtggagtgacgaatggctgagtttacgccgccagacggaggactgatcactttagtgactcaggactgatcttggg

SEQ ID NO: 3156 - protein, 652 aa, Betatorquevirus sp.
MPWWYRRRPRRWNTNWRRRPRPFPWRTRALIRRRRHRRYRVRRWRRYKRFFKKKLTKIRLNQWQPSTIRNCSIKGHLPLLLCGQGRIAHNFTIWAESTVPIGEPSGGGWSYIQITLRALWDEYRKYRSWWTKGNEGLPLVRFRYSKLTFYRSQHTDYIVVIKRCPPFSVTREDYLDTQPGRMLMNIRKILVPHLGRKQYKKTYITKKILPPALWQNKWYFQQDMCNLPLFILKTSATNLDQFYQPDTQISNNITIWSLNTDMYQNPQWHYDDTTGYIPKYTQPPEGGQKPVYIYGTENGHNEITQWTQLVRLAQTKLLTKGKQVNDTSQMNKEENWGNPFHPAYLTPEARLFYSFELPNTTNTKPKISQFYYTFEPCRYNPLKDTGEGNKVYFKSTKLQQGPFTKLPDKEDIIIVEYPLWLVFWAWADWIQKSKPIQHIDEDYQIVVQSKFITPKRNCYVFVDKYMWGADTLHTEFTETDKTNWHPKYAFQSEIENSFAETGPATPKLNHTKSFEVNMKYNIKLKWGGCPAPMENVSNPCEQEKFPTPSNVNSRYEITNPEKQKETYLYRWDERNCFLTATAAKRLKTDHSTPTSFTDFPSLNPPHQIQEAETPETSSEEEEQTPLLKQLHKLHKRKRLLRDRLRQLIKSKL

SEQ ID NO: 3157 - protein, 91 aa, Betatorquevirus sp.; identical to SEQ ID NO: 2722

SEQ ID NO: 3158 - DNA, 2882 bp, Betatorquevirus sp.
gcgggagccgaaggtgagtgaaaccaccgaagctaggggcaattcgggctagatcagtctggcggaacgggcaagaaacttaaaatgtctttcttttacagatgagcaaactattaaaaccaacaaaacttactgaaaaacaacaaattctacaaaatgtaaatctatttgtgtctattcacgacttatcctgtacttgctccaaccccttgaagtgtattattctacaaatttacaaccaagaaaaaggattacaaattaaaccagaagaaattcaacaatggcttactactaccgccgctggagaaataactactggaaaagaagaaactttcgatggcgaagacctagacgcccttttcgcagacgacgctggcacaagcgctgggtaaggaaaaaaaaactctcttatttaaaacttaaagaatggcaaccaaaagttataagaaaacttgttataaaaggaatgtactgcttatttgaatgtaaccataacctactaacaagaaactatacacaatacatggaatctattccaccagaaggaactccttcaggaggaggattttcactaaataaatttacattagactgtttatacagcgaacacgaaaaggcaagaaatgtatggacaaaaggtaataaaaacttgccacttataagatacacaggatgtgaatttaaaatatacagaccaacaaatacagacgcagttgttaaatttcaaacatgctatccaatgtcagcaacaccattaacatacactagtacacaaccatatataatgatgatgtcttatggaagcaaaaaaataagtagattagaaaacacaaaaaacaaaaaaccatataaaagatttaaatttaaaccaccacaacaaatgacaaacaaatggtttttttcaacagatttagcaaacaaaggactaataatgttagcagccacagcagctaactttgaaaatatatacataagtaaatatgcagaaagcaacacaatatcactcagattcttaaacaccttagtatttgaaaacagacatttcaacaaattacccacatcaggctaccacgcaaaagacaacatgtggctatgggcagcagacaatggtgcagagccacctgaattcaaagacatgatatttttaggtaacacagtacaataccgcctaggaacaccaataaaaaactatgccccctcaggaacaataggaagcgcaataacaaaaactgactttacaaaactagaaaattggggcaacccattccatgaaaactacttaaatcataaacaccaactatggtggacaacaactagcccaaccacacatttatcaccacacaaaaacaaacaagtatcagaaaaagtaacaaacttaggatttaacaaacttcaacaagaactatttttttatggcagatacaacccaaatagagacaaaggagaaaacacacaattatattatttaaaaaactatgaagaagaaaaaggttggcaaccaccaccaaacaaaaacttaatactaacaggatttccattatggctactagtatggggtaaccttgattatcaactaaaactagcagaaataaaccacatagacacaaactacattgcatgcataaaaaccgacaaaatagaaccaacaataccaccacaacaagcatacatactacttgacaataactttacacacggagacagtgaatggcatgatgaccacggcagaacagactatgataacatacactggtttccacaagtaaattaccaaaaaagaacacttgaaaacataggaaaatgtggaccagcaactgccaaactaggacaatacaaaaatgcagaactacattgtgaatataaattttattttaaggtgggaggatgtgtaccaccaatggacaaaattacagacccaagcctacaaccaacttatcccataccaactaacatcgctgacccaaattcgttacagagtccaagagaaccaattgaatcattcttatactgctttgatgaaaggagagggcaaattacggaaacagctgcagaacgaatcacaaaagactttaaaccttcaaaaactttgttcacagattcaattacaactggaacagacgtcccagtcctccaaacattccaagaaacacaagactcggaggaggaggaggaaacccaagaagcgacattgttccagcagctccagcagcagcgaatcaaacagcacaatatccgcagacgaatacaacagttattaactcaactacaacaactatcatgaaatgtgttaaacatgtaaaattgtttgaagataaaccaaaaattcgtaggctaaataaatgggaattacaagaagaaaaagaagacgccaaacactggtgtcgccctatgcgtacattttggggggatacacctatttacccatggtgcccacctgaaccttatgtaaattttgaacttaactacccctttaaataaacaaggcctattaattcacttgacgtgtctgcttctttaagtttaaacttaaataaacgtccaccacctcccaaacaataggcgtagcaagggggctccgccccctttaaccccagggggctccgccccctacaacccccaagggggctccgcccccttacaccccctaataaatattcaacaggaaaaccacaaaattagaattgccgaccacaaaccgtcactaacttctgctttttacagcacttccccttttgctacttattattcatatgattaattattaaacagcataattccggggaggagactaaacactatataactaagtacacttccgaatggctgagtttatgccgccagacggagacgggatcacttcagtgactccaggctgatcttgg

SEQ ID NO: 3159 - protein, 666 aa, Betatorquevirus sp.
MAYYYRRWRNNYWKRRNFRWRRPRRPFRRRRWHKRWVRKKKLSYLKLKEWQPKVIRKLVIKGMYCLFECNHNLLTRNYTQYMESIPPEGTPSGGGFSLNKFTLDCLYSEHEKARNVWTKGNKNLPLIRYTGCEFKIYRPTNTDAVVKFQTCYPMSATPLTYTSTQPYIMMMSYGSKKISRLENTKNKKPYKRFKFKPPQQMTNKWFFSTDLANKGLIMLAATAANFENIYISKYAESNTISLRFLNTLVFENRHFNKLPTSGYHAKDNMWLWAADNGAEPPEFKDMIFLGNTVQYRLGTPIKNYAPSGTIGSAITKTDFTKLENWGNPFHENYLNHKHQLWWTTTSPTTHLSPHKNKQVSEKVTNLGFNKLQQELFFYGRYNPNRDKGENTQLYYLKNYEEEKGWQPPPNKNLILTGFPLWLLVWGNLDYQLKLAEINHIDTNYIACIKTDKIEPTIPPQQAYILLDNNFTHGDSEWHDDHGRTDYDNIHWFPQVNYQKRTLENIGKCGPATAKLGQYKNAELHCEYKFYFKVGGCVPPMDKITDPSLQPTYPIPTNIADPNSLQSPREPIESFLYCFDERRGQITETAAERITKDFKPSKTLFTDSITTGTDVPVLQTFQETQDSEEEEETQEATLFQQLQQQRIKQHNIRRRIQQLLTQLQQLS

SEQ ID NO: 3160 - protein, 96 aa, Betatorquevirus sp.; identical to SEQ ID NO: 2442

SEQ ID NO: 3161 - protein, 66 aa, Betatorquevirus sp.; identical to SEQ ID NO: 2443

SEQ ID NO: 3162 - DNA, 2881 bp, Gammatorquevirus sp.
cgggagcccgaggtgagtgaaaccaccgaggtctaggggcaattcgggctagggcagtctagcggaatgggcaagaaacttaaaactatttattttttagatgtcaagatttataaagaatacaaactacaatggagatacaaaaaaccaaatgtggatgtccatgatatcagatggccatgatatgttttgtggatgtacacagccatttgctcacctcctagacagcatttttcctgaaggtcacaaagacagaggtctaccaattgcttacattattaaaagagatctacaacaatgcctttctggtggagacgtagaagaaaaagatggtatggccgcaggtacaagcgccgctaccctacaactcgtcaaagaagaagaagaagaacctggtacagaaggagacatagaagaccttatcgccgccgtagaaaacgcagaaaaaaggtaaaaaaaaaaaaacctactttgattgttagacagtggcaacctgattcaattaagctatgcaaaatcaaaggctttgacagcctaatatggggagcacaaggaactcaaggaatgtgttccaccttacaaatgtttgaatatactagatacaaatatccaggtggtggatcattttgtgctcaagtatatactcttgaatacttatatgaccaatacaaactaagaaataacatatggacagctactaaccaatggaaagacttgtgtagatacctaaaaacatattttaccttttatagacaccaaaaagttgactttgttgtttgttattatagacaaccaccatttgacatcaatgtagatacctatatgaattttcacccatacatgctactacaacaaaaacacaaaataatactacctagcaaacaaacaaatcctagaggtaaatccaagaaaactaaattaattaaaccaccgaagcagatgctctcaaaatggttttttcaaaaagaattctctcattttgacttagttatgatagcagccagtgcctgcagcctttcatacccaagaataggctgctgtaatgaaaatagaatgataaccttaacatgcttaaatgctaggtttttccaagacagcaattggggccacacacttacaggcgacaactactttaaaccatatccattaatctcaactgagctagtttattactcaggaaacactcaaaggcccacaatgtataaccctatcaaagactacattgaaaaaacaccaacaatagaaactgaaagtggcagatattatagatcaattagctgggaaggaggcttcttttcacccagaattctttcagcttgggatattcagatgggctcaagaaagattaggccactacccatagtcctagctagatataacccagcagtagacgatggtaaaggtaataagatatggcttacatcaatttttggtggacactatgaccctccatcaaaaacaccagattttattatagaaggcaaaccactttggctagccttttggggatactatgactacttaaaacaatcaaaaggtgaaggaatttttcctgttcatatgtttgttgttaaaagcccctacatacaaacatctcaaacagaaacagccacagactactatgcttttatagacagagacatactccaaggaaaactaccatatgatacaccaataactaaatcagaaaaaacactgtggtatccaacagtagaatggcaactaaaaacaatctcagccatatgtcaatcaggaccatatgtgcctaaattggataatcaaacagaaagtacatgggagctacctattcactattcctttcattttaagtggggaggcccccacattacagacacaccagttgatgatccctccaaaaagaacaaatatcctgtgcccgatacaatccaagaagcaatacaaatctatgatcctgcaaaaaacattgcaaccacaatgttccatgactgggactacagacgaggttgccttacatcaacagctattaaaagaatgcaacaaaacctccaaactgattcatctctcgaatctaattcagacacagagccaccacaaaagaaaagaagactcctaccaaccctacacgacccagagaagaaaacggaaaagatccgcaaatgtctcctctcactctgcgaagaaaataccttccaagaaatccaagaagaggagaacctcctcaacctcatcaagcagcagcagcagcagcaaaacaagctcaagcagcagctcctcacactgatcaaagacctgaaacaaagacaaacatccctgcaactacaaacagggatgtacgagtaacccttaccagatttcaaccaggatttgaacaagaaacagaaagagagctagcacaagcatttaaaagaccccccagactttttaaagaagacaaacccttttacccctggttacctagatttacaccccttgtaaactttcacttaaattttaaaggctaggcctacacctttcacttagtggtgtatgtttatataagttcacaccccaaaaaaattgtaaaaaataaacataaaaaaaaaaaataaaaaattgcaaaaattcggcgctcgcgcgcgctgcgcgcgccgcggggggggcagagcccccccccgcaccccccctacgtcacaaaccacgcccctgccgccatgttgggtgcggcagggcgggggctaaaatggcgggaaccaataaatttatacttttactttccaattaaaaactgccacatcacaacaaaggggcggagacttttaaactatataaccaagtgtagtgacgaatggctgagtttaccccgctagacggtgcagggaccagatcgagcaccgcgaggaggtccccggctgcccgtggg

SEQ ID NO: 3163 - protein, 674 aa, Gammatorquevirus sp.
MPFWWRRRRKRWYGRRYKRRYPTTRQRRRRRTWYRRRHRRPYRRRRKRRKKVKKKKPTLIVRQWQPDSIKLCKIKGFDSLIWGAQGTQGMCSTLQMFEYTRYKYPGGGSFCAQVYTLEYLYDQYKLRNNIWTATNQWKDLCRYLKTYFTFYRHQKVDFVVCYYRQPPFDINVDTYMNFHPYMLLQQKHKIILPSKQTNPRGKSKKTKLIKPPKQMLSKWFFQKEFSHFDLVMIAASACSLSYPRIGCCNENRMITLTCLNARFFQDSNWGHTLTGDNYFKPYPLISTELVYYSGNTQRPTMYNPIKDYIEKTPTIETESGRYYRSISWEGGFFSPRILSAWDIQMGSRKIRPLPIVLARYNPAVDDGKGNKIWLTSIFGGHYDPPSKTPDFIIEGKPLWLAFWGYYDYLKQSKGEGIFPVHMFVVKSPYIQTSQTETATDYYAFIDRDILQGKLPYDTPITKSEKTLWYPTVEWQLKTISAICQSGPYVPKLDNQTESTWELPIHYSFHFKWGGPHITDTPVDDPSKKNKYPVPDTIQEAIQIYDPAKNIATTMFHDWDYRRGCLTSTAIKRMQQNLQTDSSLESNSDTEPPQKKRRLLPTLHDPEKKTEKIRKCLLSLCEENTFQEIQEEENLLNLIKQQQQQQNKLKQQLLTLIKDLKQRQTSLQLQTGMYE

SEQ ID NO: 3164 - protein, 117 aa, Gammatorquevirus sp.
MSRFIKNTNYNGDTKNQMWMSMISDGHDMFCGCTQPFAHLLDSIFPEGHKDRGLPIAYIIKRDLQQCLSGGDVEEKDGMAAGTSAATLQLVKEEEEEPGTEGDIEDLIAAVENAEKR

SEQ ID NO: 3165 - protein, 114 aa, Gammatorquevirus sp.
MSPLTLRRKYLPRNPRRGEPPQPHQAAAAAAKQAQAAAPHTDQRPETKTNIPATTNRDVRVTLTRFQPGFEQETERELAQAFKRPPRLFKEDKPFYPWLPRFTPLVNFHLNFKG

SEQ ID NO: 3166 - DNA, 2881 bp, Alphatorquevirus sp.
agcgtgccggaggtgagtttacacaccgcagtcaaggggcaattcgggctcgggactggtcgggctatgggcaaggctcttaaaaagatgcgtttctctaatatcgcccgcagaaagaaaaggaaactgtcactgctacctgtgcaccctccacaggagacacctaccatgagctttgtagaacccttactgagcagcaaccacagagagatagcatactaccatggctgtgttcagatgcacaaagccttctgtggctgtgacaactttctcacccacctgcaacgcatagcaacatacatctctgttaaccagcacactccacccagcacaccctcaaacaccctccgtagagcccgggccctacccgcggctccggagccggctccatggcgtggtcctggtggtggcagaggaggcgccgaaggtggccgtggagacgcagaaggtggaggagactacgcacaagaagacctagacgccctgttcgacgccgtcgcaagagatacagagtaaggagacggaggcggtggggaaggaaacgtgggcgacgcacataccttagacgcagacttaaaaagagaaagagacgaaaaaagctcagactgactcagtggaaccctagcacaataaggggatgtacaattaaaggtatggcccccctaataatatgcggccacaccatggccggcaataactttgccatccgaatggaggactatgtatctcaggttagaccattcggagggtccttcagtaccaccacctggagcctaaaagtactgtgggacgagcacacgagattccacaacacctggagctaccccaacactcagctagatctagcaagatttaaaggagtaaccttctacttctacagggacaaagacacagactttatagtaacatacagctcagttccaccatttaaaatagacaaatactcctcagccatgctacacccaggcatgctcatgcaaagaaaaaaaaagatattaatacccagctatacaaccagaccaagaggccgaaagaaaattaaagtacacataaaacctcctgtattatttgaagacaaatggtacacccagcaggacctgtgcgacgttaatcttttgtcacttgcggtttctgcggcttcctttagacatccgttctgcccaccacaaactgacaacatttgcataaccttccaagtgttgaaagacttttactatgaacaaatgtcagttacaccagacgaggagaacaaacaaaaagatgacagtatacttagaaaattatacacaaatccagaatattatcaaactgttcacacaacaggcattattaacaaaacacaaagactagctaagtttgaaacctctaaaaatacacttggagatgcaagcggaatacaaaactatttaaatccaccatccgctactacacaaacccaaacattagcaactggtaacaactcaatctatggctttccatcatacaatccacagtatgacaaattgaagatcatagcagagtggttctggcaacaagaaactaacaaagaaaatgttgttacaggctcatattcaatgcctactaactcagcagtaagctatcacctaggaaaatacagtccaatatacttaagttcatacagaactaacctacaatttaaaacagcatacacagatgtcacatacaatccactaaatgacaaaggtaaaggaaaccaaatatgggtacaatatgtaacaaaaccagatacaaaattcaatgccacacaatgcaaatgtcacatagtagacatacccctctgggcagcattccatgggtacatagactttatacaaagtgaattaggcatacaagaagaaatactaaacattgccattatagtagttatatgcccatacacaaaacctaaactaattcacaatcctccaaatgaaaaccaagggtttgtattctatgacacacaatttggagatggtaaaatgccagaaggcacaggcctagtccccatctactaccaaaacaggtggtatcccagaataaagttccagagccaagtagtgcatgactttgtactaacaggcccctttagctacaaagatgaccttaaaagcacagtactaacagtagaatacaagttcaaattcttatggggcggcaatatgattcccgaacaggttatcagaaacccttgtaaaacagaaggacacgatctccctcacaccagtagattccatcgcgacttacaagttgttgacccacagaccgtgggcccccaatgggcgctccacacctgggactggcgacgtggactctttggttcagaggctatcaaaagagtgtctgaacaacaaatacatgatgagctgtattaccaaccttcaaagaaacctcgattcctccctccagtatcaggcctccaagagcaagaaagagactacagttcgcaggaggagaaaatccagtcctcctcagaagaagaggaggaccagaagaaaaaagaacaaaaacagcagcagcgactccacctccagttccaagagcagcagcgactcggaaaccaactccgactcatcttccgagagctacagaaaacccaagcgggtctccacataaatcctatgttatcaaaccggctgtaaataaagtttacctttttcctcccgaggggcctaaacccatctctggctacagagcatgggaagacgagttcacctgctgtaagtactgggacaggcctagtagaattaaccacacagacccccctttctacccctggatgcctaagtacaatgtaacctttaaacttggctggaaataaaatttcaaggccgtacactgttcacctgtcggtgtctacctctataagtcactaagcactccg

SEQ ID NO: 3167 - protein, 749 aa, Alphatorquevirus sp.; identical to SEQ ID NO: 1238

SEQ ID NO: 3168 - protein, 149 aa, Alphatorquevirus sp.; identical to SEQ ID NO: 1239

SEQ ID NO: 3169 - DNA, 2880 bp, Betatorquevirus sp.
cgggtgccgaaggtgagtgaaaccaccgtagtcaaggggcttatcgggctgaagcagtcttggcggaacgggcaagaaacttaaaatatacttttattttacagaatgtcttctatgtatacacctacagaacaaagtggtagatacctgacacaacaatggattaacagcgtgttatccattcatgatactttttgtcagtgtaaaaagccacttgttcacctactaaaaggaattaaagaaacaacaataggattaacagaagaagaaaaaaaacttactgaaaaatgccttacggccgttactaccgaagatactaccgaccgagatggaccagacccagaagatattttagatggcgtagacctagaggctttcttcgccggagacattacagaagaagaagataccgggtaaggaaaaaacttaaatatttacctttaagagaatggcaacctaagactattagaaactgtagcattaaaggaactaaatgcctatttatggcaggccaacaaagattctggaataactatggacaatatcaaaaaagcatagtaccagaacactggccagggggaggaggatgtagtatacttgtatttagcttaactgctctatatgaagaatatgaaaacctaagaaacaaatggactacatctaacaaaggactgcctttagtaagatatagaggatgtactttaaaattttaccgtgacgactggatagactatgttgtgactgtacagacttgctttccaatgactgctacagaggacatgtacctaagcttacaaccatatataatgctacaaaacacacataagataatagtacctgctaaaaagactttaccaaacagaaaaccctatataaaaagacgctttggaccaccaaaactcatgacaaacaaatggtactttcaacaagatatttgcagaactaacttactgttaatttctacatcagcctgttcgttaaaccaccccttcctgtctccaactgcggttagcaactgtgtcacaattcttgcattagatgccaacgtctttaagaacaaaggttggcaacatcctgaatcaaccacaggctatcaacctaataataacctaaacttatttggccttataaatggacacatatcagaacaacaaataaaatttggagacctagtatttttaggcaacccaaaagacaaaacaccaggcagacccagaaaaacaacaggtcccaatcaaacttttaaaccagaagattggggaaacccattttatccaacatacataacattaacccaaacagtttacaaaactaacaaaacattaaaagaaatagaagacgttaatacaactgccaaaattaaagaaacacaatatagcacatggtttacaaaaacagaagctcctcttttaataagatgcagatactgtccagacaatgacgatggcacaggtaacatagcatacctactatctaactatagaaacgacggaggaattaatcctccaggagaccctcacacaaaagtagagggatatcctctatggttactactatggagctggacagactggataaaaaaactagcagaaatacaccatgtagacacctcatactttttagtagtacaaacagataaaattgacccaaaaatgccatactatatattctgggacgaatccttaacagaaggaaaaggcccctatggaatagaaacagaattaatttcactttcagacaatgccaactggtacccaaaactaagatttcaagtagaaaacataaacaacatactaatgtcaggacctgcagctccaaaaacacaaagcaaaagcatagaagcccacatgtactataatttcaaatttaaatggggaggctgtccagcaccaatgcaagaaatttatgatccttgttcacagacaaaatatcccatccccaattcgctcgtacaaggacctgagatcacgcatccagaaacatcaaaatttacagaaatctatgactttgacgaacgccgacagacccttactaaaaaagcagcaaaaagacttgctgaaagccattgtacttcactcacaggaaagaaacccaaaagatgcctatcagatgtactaccgtacgaagaatacacagagtcacagagctcacaagaggcgtcatccgaggaagaagagaaagcacagacagcagacatcctcaagcagtaccagtactacaagcgaaagctccacagacgattaaaaaagacccaataccgctaacagtatctatgtttcaccaagatgaaaagccaaacagaagaatgagaccagacgaatatgaaactgaactgtggttagcaaaactttttaaaagaccacctaatacctttattaaagatttacctttttacccatatgttccacaccatcccctaaataataaatggagtgtaaattttgaccttaacttcaatcaataaaggccagcattaattcactctcggtgtccatttatttaagtattaacttatataaacagcctccgcctccctaatacgcaggcgccaaaatggcgcctgctaacaaaatggccgccacaaatttaaaatggcggcaaattaacatacccttatttaaatatttaaatatttaaataaggcccccccccccccccccccctaaccccccccgaaaaccattaaaaaaggcgccaaaaaaaaacacgcccactaatacatattcatacatactttaaacagaccaatcacatactactacgtacacttcctgggctggccttaccaatgcatataactaactgcacttccgaatggctgagtttatgccgccagacggaggtgaatacacaccgaaggagtattcagctgcttcaggg

SEQ ID NO: 3170 - protein, 658 aa, Betatorquevirus sp.
MPYGRYYRRYYRPRWTRPRRYFRWRRPRGFLRRRHYRRRRYRVRKKLKYLPLREWQPKTIRNCSIKGTKCLFMAGQQRFWNNYGQYQKSIVPEHWPGGGGCSILVFSLTALYEEYENLRNKWTTSNKGLPLVRYRGCTLKFYRDDWIDYVVTVQTCFPMTATEDMYLSLQPYIMLQNTHKIIVPAKKTLPNRKPYIKRRFGPPKLMTNKWYFQQDICRTNLLLISTSACSLNHPFLSPTAVSNCVTILALDANVFKNKGWQHPESTTGYQPNNNLNLFGLINGHISEQQIKFGDLVFLGNPKDKTPGRPRKTTGPNQTFKPEDWGNPFYPTYITLTQTVYKTNKTLKEIEDVNTTAKIKETQYSTWFTKTEAPLLIRCRYCPDNDDGTGNIAYLLSNYRNDGGINPPGDPHTKVEGYPLWLLLWSWTDWIKKLAEIHHVDTSYFLVVQTDKIDPKMPYYIFWDESLTEGKGPYGIETELISLSDNANWYPKLRFQVENINNILMSGPAAPKTQSKSIEAHMYYNFKFKWGGCPAPMQEIYDPCSQTKYPIPNSLVQGPEITHPETSKFTEIYDFDERRQTLTKKAAKRLAESHCTSLTGKKPKRCLSDVLPYEEYTESQSSQEASSEEEEKAQTADILKQYQYYKRKLHRRLKKTQYR

SEQ ID NO: 3171 - protein, 103 aa, Betatorquevirus sp.; identical to SEQ ID NO: 2068

SEQ ID NO: 3172 - protein, 132 aa, Betatorquevirus sp.; identical to SEQ ID NO: 2069

SEQ ID NO: 3173 - DNA, 2880 bp, Betatorquevirus sp.
cgggagccgaaggtgagtgaaaccaccgtagtctaggggcaattcgggctagatcagtctggcggaacgggcaagaaacttaaaagtctaggggcaattcgggctagatcagtctggcggaacgggcaagaaacttaaatatatttttttacagatgagcaaattctacaaaccaacaaacaactcaccaagaagaaatgaactacaaattatgaacctggttttctcctcacacgacagcctttgttcctgcaacgaaccatctgaacacctccgctatcttctaaccaaagaaaaatgcctccatttcaaagacgccgctactactacagaaactactggaactaccgaaagccaagatcttattatagacgcaggagatttagaaaatctattttccgaagaaaacgacgtcgacgaagggtaagaagaaaaagattttctaaacatactagaaaactaaaaacaattaaaattaatcaatggcagccatcctccattaaaaaatgcaaaatacaagggtacctatgcttatttcaagctggacccggacgatatggaaataactatccattatggaaagaatcatactttcctgaacattatccaggaggaggaggatggagcatacaacaactttctttaggaatactttttaaagaacataaagactatatgaattactggactcgtagtaatagtagactaaatatgtgtagatactatggttgtagaatacaattgtttagagaaccatatactgattatatctttagctggtttgatggtttaccaaaaactgttaataatatgttttatgcttcataccatccattaagattattaacacacaatagaaaaaagatactaccaagcaaccaaacacaaccacataaaagaaagccatacaaaaccgtattcataccaccaccaagattaatgaaaaaccaatggttttttcaacagcaattatcagactttccactagtaacatttgtagcctcagcttgcagtctaacaggaatgtttggaagtacaaaatctattagcaataatgcaacacttttttgtttagacacagacataatgccatctccaacattccaatacaaaaacacagctccaccaaaatggggttataccttaggaacacaatacttatatggccttccacaaccacaacacccatttacacaaaacaaacaaggagactgcatttacttaggaaacacaatgcagcaacaagaaggagacgaaattacacacacaacaactttagattttgaaagtaaatacacaaaagacaaatggggtaacccattttactggatgtacacctcaggaaacgcagctttagttcaaaactcagaaaacccaacaaagatgagtacaaacagaactacaagcttagacgcatcctgggaaaaacaaactcattacatatttaaagccagatacaatccatttcacgacaaaggtataggaaatgtagtttactttatacctacatatgacaaaggcacaaccacttgggaccccccaaaagacccggaccttatatggagagacaaaccactatggctaatattttggggactagaagatatagtaaaaagaatgggaaagtgcacaaacctagatatggactggatattagtatttaaatcctcatatttactaccaccacaaaaacactatgttattttaagctatgattttgtacatggtagagggccatatgacacagacaaagaatttatgacaaaagatgatttaacacactggttccccagatataaatatcaaagacaagcagtagacaacataattagaacaggaccagcagtagcaacaggagataatgtacaaaatatacaagctaaatgtaaatataccttttatttcaagtggggaggaaatacagaaccacaagaaacaatattcgacccaaacagccaacccatcactcccactcccaataacttcagcttcagcgatgaaatcattgatccgtcaacagacattacatcagaaatatacccatgggactttagaagacacattcttacagaaacagctgcaaaaagaattaaagagagcccaatcactgaccaaactctattcacagatggaaggcagagctcaacggacatccccctgtggaaagaaacaacacaagaggaagagaccccgaaaacgcaaacagaagagatattccagcagctccagcacctccagcaatacaaccgggacctgctccagcgactcagatcaataaaggaattatcttaaaaactgttaataacattcaattgtttccaaaacctagaaaaaaccgtagactaactccatatgaactacaaactgaaaaagaaatttgtaaatggctacatagaccccccaggcattatattgatgaccctccattttacccttggttaccccctactccaaaagtaccgtctgtaaactttgatcttatatctgcatttaataaaggccaacattaattcacttaacaagtctgtttatttaagtaaaaacttatataaacatacaccacctcccaatcaataaggcctacagggggctccgccccctaaaacccccagggggggtaaaccccccctaaacccccccaaattaacatattcaacaggaaaaccacaaaattagaattgccgaccacaaaccgtcactaacttctgctttttgtacaacttcctctttacctcataaatatttattaaattaattaataatcaccgtaattccggggaggagctacaaaactatataaccagcatacgtgacgaatggctgagtttatgctgccagacggagactgaagagcaacagcaacttcaggctgatcaaggg

SEQ ID NO: 3174 - protein, 664 aa, Betatorquevirus sp.
MPPFQRRRYYYRNYWNYRKPRSYYRRRRFRKSIFRRKRRRRRVRRKRFSKHTRKLKTIKINQWQPSSIKKCKIQGYLCLFQAGPGRYGNNYPLWKESYFPEHYPGGGGWSIQQLSLGILFKEHKDYMNYWTRSNSRLNMCRYYGCRIQLFREPYTDYIFSWFDGLPKTVNNMFYASYHPLRLLTHNRKKILPSNQTQPHKRKPYKTVFIPPPRLMKNQWFFQQQLSDFPLVTFVASACSLTGMFGSTKSISNNATLFCLDTDIMPSPTFQYKNTAPPKWGYTLGTQYLYGLPQPQHPFTQNKQGDCIYLGNTMQQQEGDEITHTTTLDFESKYTKDKWGNPFYWMYTSGNAALVQNSENPTKMSTNRTTSLDASWEKQTHYIFKARYNPFHDKGIGNVVYFIPTYDKGTTTWDPPKDPDLIWRDKPLWLIFWGLEDIVKRMGKCTNLDMDWILVFKSSYLLPPQKHYVILSYDFVHGRGPYDTDKEFMTKDDLTHWFPRYKYQRQAVDNIIRTGPAVATGDNVQNIQAKCKYTFYFKWGGNTEPQETIFDPNSQPITPTPNNFSFSDEIIDPSTDITSEIYPWDFRRHILTETAAKRIKESPITDQTLFTDGRQSSTDIPLWKETTQEEETPKTQTEEIFQQLQHLQQYNRDLLQRLRSIKELS

SEQ ID NO: 3175 - protein, 90 aa, Betatorquevirus sp.
MSKFYKPTNNSPRRNELQIMNLVFSSHDSLCSCNEPSEHLRYLLTKEKCLHFKDAATTTETTGTTESQDLIIDAGDLENLFSEENDVDEG

SEQ ID NO: 3176 - protein, 65 aa, Betatorquevirus sp.
LFPKPRKNRRLTPYELQTEKEICKWLHRPPRHYIDDPPFYPWLPPTPKVPSVNFDLISAFNKGQH

SEQ ID NO: 3177 - DNA, 2879 bp, Alphatorquevirus sp.
taagtcactaagcactccgagcgtcagcgaggagtggggcaattcgggctcgggactggccgggctatgggcaaggctcttagggttatcactctttaaaacatgtttctcggcaggcattacagaaagaagaggcaactgccactgcctggcgtgcaccatccaccggacccacggcctagcatgagccaccactggcgggagcccatcgacaatgtccccaaccgggaaaagcactggctcaactcggtcctcagaagccaccgagctttttgtggttgttgggatcctgtgcttcattttactaatctggttgcacgtcacaatcttcaagacggtggtccctcggcgggtagttttaggaatccgccaccgctgagaagggcgctgccgccaccgccgtcccctagaccaccatgtcctggtggagatggcgccgccgatggtggtggaagccacggagacgatggagacgcaggagggcgcgccgcccgagacgagtaccgcgaagacgatatacaagacctgctcgccgctatcgaggcagacgagtaaggaggcgccgcgcggggggctggcgggggcgacgtagatactcccgacgctatagcagacgactgactgtcaggcgaaagaaaaagaaactaactcttaagatctggcagccacaaaatatcaggaaatgtagaataaggggtctcctgcccctcctgatatgcggacacacccggtcggcctttaactatgccatccactcggatgacaagaccccccaacaagagagtttcgggggcggccttagcaccgtcagcttctccttaaaagtactgtttgaccagaaccaaaggggacttaacaggtggtcggccagcaacgaccagctggaccttgctcggtacctggggtgcactttctggttctacagagacaaaaagactgattttatagtgcagtatgatatcagcgcccccttcaagctggacaaaaacagcagtcccagctaccaccccttcatgctcatgaaggcaaaacacaaggtgctaattcccagctttgacactaaacccaagggcagggaaaaaattaaagttagaatacagccccccaaaatgttcatagacaagtggtacacacaagaggacctgtgtcccgttattcttgtgtcacttgcggttagcgcagcttcctttacacatccgttctgctcaccacaaactgccaatccttgcatcacgttccaggttttgaaagagttctattacccagccatgggctatggggcccctgaaacaactgttaattctgtatttaacactttatataccacagccacctactggcagtctcaccttaccccccagtttgtcagaatgcccaccaaaaacccagacaatactactaactcagaagcttcagaatttaatgattgggtagaaaagaccttcaaaacaggcaagttggtaaagtataactttccccagtatgctcctgctatagacaaactaaaccagttaagacaatactactttaagtgggaaactcaacacactggggtcgcagtaccacctacctggaccacccctacctcagacagatacgagtaccatgtgggaatgttcagtcccattttcctcacaccgttcaggtcagctggcctagactttcccagagcctatcaggacgtcacctacaatcccctcacagacaagggggtgggcaacagaatgtggttccaatacaacactaagatagacacccagttcgacgccaggtcctgcaagtgcgtactagaggacatacccctgtacgccatggcctacggatatgcagactttttagagcaagagataggagagtaccaggacctagaggccaacgggtacgtctgtgtaataagcccctacaccaaacccgcaatgttcaacaaacacaacccacaacaggggtacgtgttctatgactctcagtggggcaacggcaaatggatagacggaaccgggtttgtgcccgtatactggctgaccagatggagagtagaactgctatttcagaaaaaagtactgtcagacatcgccatgtcaggccccttcagctatccagacgaacttaagaacactgtactgacggccaaatacagatttgactttaagtggggtggcaatctcttccaccagcagaccattagaaacccctgcaaaccagaagagacctcgaccagtagagtccctcgcgatgtacaagtcgttgacccggtcaccatgggccccagattcgtctttcactcctgggactggagacgagggttccttagtgacagagctctcaaaagaatgtttgaaaaaccgctcgatgttgagggatttgcagcgtctccaaaacgacctcgcatattccctcccacagagggacagctcgcccgagagcaaaaagagcaagaagaaagctcagattcgcaggaagaaagcagccttacctcgctcgaagaagtcccggaagagacgaagctacgagtccacctcagaaagcagttcagagagcagcgaagtatcagacagcaactccgaaccatgttccagcaacttgtcaagacgcaagcgggcctacacctaaacccccttttatcttcccagctgtaaacagggccttcctgttcccagagagagcccccaagccgcctccctcctcgggagactgggccacagagtatctgtgcgccaagatattcgacaggccccccaggtccatcctttcagacacccccttctatccctggatacctaagagcaccccccagttccaggtctctttcaaacttggatttaaaccctaaataaaattttcaaggccgtgtcacatacgcttgtcggtgtctacctcta

SEQ ID NO: 3178 - protein, 739 aa, Alphatorquevirus sp.
MSWWRWRRRWWWKPRRRWRRRRARRPRRVPRRRYTRPARRYRGRRVRRRRAGGWRGRRRYSRRYSRRLTVRRKKKKLTLKIWQPQNIRKCRIRGLLPLLICGHTRSAFNYAIHSDDKTPQQESFGGGLSTVSFSLKVLFDQNQRGLNRWSASNDQLDLARYLGCTFWFYRDKKTDFIVQYDISAPFKLDKNSSPSYHPFMLMKAKHKVLIPSFDTKPKGREKIKVRIQPPKMFIDKWYTQEDLCPVILVSLAVSAASFTHPFCSPQTANPCITFQVLKEFYYPAMGYGAPETTVNSVFNTLYTTATYWQSHLTPQFVRMPTKNPDNTTNSEASEFNDWVEKTFKTGKLVKYNFPQYAPAIDKLNQLRQYYFKWETQHTGVAVPPTWTTPTSDRYEYHVGMFSPIFLTPFRSAGLDFPRAYQDVTYNPLTDKGVGNRMWFQYNTKIDTQFDARSCKCVLEDIPLYAMAYGYADFLEQEIGEYQDLEANGYVCVISPYTKPAMFNKHNPQQGYVFYDSQWGNGKWIDGTGFVPVYWLTRWRVELLFQKKVLSDIAMSGPFSYPDELKNTVLTAKYRFDFKWGGNLFHQQTIRNPCKPEETSTSRVPRDVQVVDPVTMGPRFVFHSWDWRRGFLSDRALKRMFEKPLDVEGFAASPKRPRIFPPTEGQLAREQKEQEESSDSQEESSLTSLEEVPEETKLRVHLRKQFREQRSIRQQLRTMFQQLVKTQAGLHLNPLLSSQL

SEQ ID NO: 3179 - protein, 150 aa, Alphatorquevirus sp.
MFLGRHYRKKRQLPLPGVHHPPDPRPSMSHHWREPIDNVPNREKHWLNSVLRSHRAFCGCWDPVLHFTNLVARHNLQDGGPSAGSFRNPPPLRRALPPPPSPRPPCPGGDGAADGGGSHGDDGDAGGRAARDEYREDDIQDLLAAIEADE

SEQ ID NO: 3180 - protein, 60 aa, Alphatorquevirus sp.
LFPERAPKPPPSSGDWATEYLCAKIFDRPPRSILSDTPFYPWIPKSTPQFQVSFKLGFKP

SEQ ID NO: 3181 - DNA, 2878 bp, Alphatorquevirus sp.
tcgggactggccgggctatgggcaaggctcttaaaaaagcatgtttctcggtaaaatttacagaaagaaaaggaaagtgccactgtacggcctgccagctacaaagaaaaaattacctactgctatgagccactggagcagacctgtccaccatgcaacggggatcgaacacctctggtaccagtctgttattaacagccattctgctagctgcggttgtggcgatcctgtacgccactttacttatcttgctgagaggtatggttttgccccaactccccgcgccccgccagtagccccgacgcccaccatccgtagagccaggcctgcgcctgccgctccggagccccgtgccctaccatggcatggggatggtggagaagaaggcgcaagtggtggtggagacgccggttcgcccgaggcagagttcgcagacgacggattagacgccctcgtcgccgcactcgacgaagaacagtaaggagacgcagacaatggaggagggggcgactaagacgcagactgtttaagcgaaaaagacgctttaagagacgcagacgaaaagctaagataaaaataactcagtggcaacctagctcagttaagagatgttttgttataggatactttccattagtaatatgtggccccggaaggtggtcagagaactttaccagtcacatagaggacaagataagcaaaggaccctttgggggagggcacagcactagtagatggtccctaaaagtactctacgaagagttccaaagacaccacaacttttggactagaagcaacaaagaactagaattagttagattctttggaagcagttggagattttacagacacgaggacgttgactatatagtatactactctagaagggctcccctgggaggtaacatactgacagcacccagcctacacccaggggcagccatgctcagcaaacacaagataatagttcccagctttaaaaccagacccggtggaaaacccaccgtaaaaattaatattaagccccctacaacactaatagacaaatggtacttccagaaagacatttgtgacacaacctttttaaacttgaacgttgtactctgcaacctgcggtttccgttctgctcaccacaaactgacaacatttgtgtaaccttccaggtattgcatgaggtttaccacaattacattagcataactgccaaagaattacttacaccttcaggctggaaaaactactatgaaaagtttttaaatgctgcctttccaaataacagatcaattaataaattaaacacttttagcacagaaggagcctacagccacccacaaataaaaaaatatacagaaaacataacaacttcagattcgaaatactttagagataaagacggacagtggggagatgctatttatataacagacagccaaagtcgagcagaagtaataaagttaataataaaaaatgcagaaaactacctaaaaaaagtacagcaagaatatgcaggacaagagaatttaaaaaacctaatacatccagttttctgtcagtacgtaggcatatttggcagtccactactaaacttccacagaataagtccagaaattccaggcctgtacaaagacataatatataatcccttaatagacaaaggcataggaaacagagtgtggatagactacctcagcaaagataacacaaagtacaaccccacacaaagtaaatgttacatagcagaccttccaatgtggatggcctgctttggcctagtagactggtgcaaaaaagaaacaggcaactggggaataccagcctgggctagagtagtaatgatatgtccatacacctatcccaaattatacaacacaccagacccagaaagtggattcataccaataggatacaactttagccaaggtttcatgccagacggcaccaaatacacacccatacagatgagacacagatggtatccaaacttactaaaccagcaagcagtattagaagacataagtcagtcagggcccttctcatacagagaaaaaacaaacacagcaaacataaacgcaaaatacaaatttagatttcactttgggggcaaccctgtgtccgaacagattgttgcagacccatgcaaacaacccacctttgaaatgcccggaaccagtacactccctcctcgactacaagtcacggacccgaaactcctcggaccgcactacacattccacagctgggacaaaagacgtgactattataacggaaaaactattaagagaatgtcagaacaacaagaaacttctgagtttttattcccaggcccgaaaaaacccagagtcgatctggacgcagtgcagcctgtcgaaaaagactctttgccccagcaaagagaacagagaccctgggagacgagcgagagcgagaaagagacagaagccctctcggaagaagaagagacgggctccgtccaccagcagctcaggcagcagctcaaggagcaaaagcagctcagacagggaatcgagtgcctcttcgagcagctaataaaaacccagcagggagtccacctagatccttccctcttgtaggccccagacagtggctgtttcccgagagaaagccagcccctgcccctacctcgggagactgggccacagaatatttagcagctagagtgtttgacagacccccgagaagcaaccttaaagatacaccctactacccctacgttaaaaaccaatacaatgtgtactttgacctaacctttgaataaagtgcagcttcaaatttgcaaggccgtgggagtttcactggtcggagtctacctctaaaggtcactaagcactccgagcgttagcgaggagtgcgaccctt

SEQ ID NO: 3182 - protein, 743 aa, Alphatorquevirus sp.
MAWGWWRRRRKWWWRRRFARGRVRRRRIRRPRRRTRRRTVRRRRQWRRGRLRRRLFKRKRRFKRRRRKAKIKITQWQPSSVKRCFVIGYFPLVICGPGRWSENFTSHIEDKISKGPFGGGHSTSRWSLKVLYEEFQRHHNFWTRSNKELELVRFFGSSWRFYRHEDVDYIVYYSRRAPLGGNILTAPSLHPGAAMLSKHKIIVPSFKTRPGGKPTVKINIKPPTTLIDKWYFQKDICDTTFLNLNVVLCNLRFPFCSPQTDNICVTFQVLHEVYHNYISITAKELLTPSGWKNYYEKFLNAAFPNNRSINKLNTFSTEGAYSHPQIKKYTENITTSDSKYFRDKDGQWGDAIYITDSQSRAEVIKLIIKNAENYLKKVQQEYAGQENLKNLIHPVFCQYVGIFGSPLLNFHRISPEIPGLYKDIIYNPLIDKGIGNRVWIDYLSKDNTKYNPTQSKCYIADLPMWMACFGLVDWCKKETGNWGIPAWARVVMICPYTYPKLYNTPDPESGFIPIGYNFSQGFMPDGTKYTPIQMRHRWYPNLLNQQAVLEDISQSGPFSYREKTNTANINAKYKFRFHFGGNPVSEQIVADPCKQPTFEMPGTSTLPPRLQVTDPKLLGPHYTFHSWDKRRDYYNGKTIKRMSEQQETSEFLFPGPKKPRVDLDAVQPVEKDSLPQQREQRPWETSESEKETEALSEEEETGSVHQQLRQQLKEQKQLRQGIECLFEQLIKTQQGVHLDPSLL

SEQ ID NO: 3183 - protein, 146 aa, Alphatorquevirus sp.
MFLGKIYRKKRKVPLYGLPATKKKLPTAMSHWSRPVHHATGIEHLWYQSVINSHSASCGCGDPVRHFTYLAERYGFAPTPRAPPVAPTPTIRRARPAPAAPEPRALPWHGDGGEEGASGGGDAGSPEAEFADDGLDALVAALDEEQ

SEQ ID NO: 3184 - protein, 123 aa, Alphatorquevirus sp.; identical to SEQ ID NO: 562

SEQ ID NO: 3185 - DNA, 2878 bp, Alphatorquevirus sp.
ataagtcactaagcactccgagcgtcagcgaggagtgggcaattcgggctcgggactggccgggctatgggcaaggctcttagggttatcactctttaaaacatgtttctcggcaggcattacagaaagaagaggcaactgccactgcctggcgtgcaccatccaccggacccacggcctagcatgagccaccactggcgggagcccatcgacaatgtccccaaccgggaaaagcactggctcaactcggtcctcagaagccaccgagctttttgtggttgttgggatcctgtgcttcattttactaatctggttgcacgtcacaatcttcaagacggtggtccctcggcgggtagttttaggaatccgccaccgctgagaagggcgctgccgccaccgccgtcccctagaccaccatgtcctggtggagatggcgccgccgatggtggtggaagccacggagacgatggagacgcaggagggcgcgccgcccgagacgagtaccgcgaagacgatatacaagacctgctcgccgctatcgaggcagacgagtaaggaggcgccgcgcggggggctggcgggggcgacgtagatactcccgacgctatagcagacgactgactgtcaggcgaaagaaaaagaaactaactcttaagatctggcagccacaaaatatcaggaaatgtagaataaggggtctcctgcccctcctgatatgcggacacacccggtcggcctttaactatgccatccactcggatgacaagaccccccaacaagagagtttcgggggcggccttagcaccgtcagcttctccttaaaagtactgtttgaccagaaccaaaggggacttaacaggtggtcggccagcaacgaccagctggaccttgctcggtacctggggtgcactttctggttctacagagacaaaaagactgattttatagtgcagtatgatatcagcgcccccttcaagctggacaaaaacagcagtcccagctaccaccccttcatgctcatgaaggcaaaacacaaggtgctaattcccagctttgacactaaacccaagggcagggaaaaaattaaagttagaatacagccccccaaaatgttcatagacaagtggtacacacaagaggacctgtgtcccgttattcttgtgtcacttgcggttagcgcagcttcctttacacatccgttctgctcaccacaaactgccaatccttgcatcacgttccaggttttgaaagagttctattacccagccatgggctatggggcccctgaaacaactgttaattctgtatttaacactttatataccacagccacctactggcagtctcaccttaccccccagtttgtcagaatgcccaccaaaaacccagacaatagtagtaacacagacgcttcaaaatttaatgagtgggtagaaaagaccttcaaaacaggcaagttggtaaagtataactttccccagtatgctcctgctatagacaaactaaaccagttaagacaatactactttaagtgggaaactcaacacactggggtcgcagtaccacctacctggaccacccctacctcagacagatacgagtaccatgtgggaatgttcagtcccattttcctcacaccgttcaggtcagctggcctagactttcccagagcctatcaggacgtcacctacaatcccctcacagacaagggggtgggcaacagaatgtggttccaatacaacactaagatagacacccagttcgacgccaggtcctgcaagtgcgtactagaggacatacccctgtacgccatggcctacggatatgcagactttttagagcaagagataggagagtaccaggacctagaggccaacgggtacgtctgtgtaataagcccctacaccaaacccgcaatgttcaacaaacacaacccacaacaggggtacgtgttctatgactctcagtggggcaacggcaaatggatagacggaaccgggtttgtgcccgtatactggctgaccagatggagagtagaactgctatttcagaaaaaagtactgtcagacatcgccatgtcaggccccttcagctatccagacgaacttaagaacactgtactgacggccaaatacagatttgactttaagtggggtggcaatctcttccaccagcagaccattagaaacccctgcaaaccagaagagacctcgaccagtagagtccctcgcgatgtacaagtcgttgacccggtcaccatgggccccagattcgtctttcactcctgggactggagacgagggttccttagtgacagagctctcaaaagaatgtttgaaaaaccgctcgatgttgagggatttgcagcgtctccaaaacgacctcgcatattccctcccacagagggacagctcgcccgagagcaaaaagagcaagaagaaagctcagattcgcaggaagaaagcagccttacctcgctcgaagaagtcccggaagagacgaagctacgagtccacctcagaaagcagttcagagagcagcgaagtatcagacagcaactccgaaccatgttccagcaacttgtcaagacgcaagcgggcctacacctaaacccccttttatcttcccagctgtaaacagggccttcctgttcccagagagagcccccaagccgcctccctcctcgggagactgggccacagagtatctgtgcgccaagatattcgacaggccccccaggtccatcctttcagacacccccttctatccctggatacctaagagcaccccccagttccaggtctctttcaaacttggatttaaaccctaaataaaattttcaaggccgtgtcacatacgcttgtcggtgtctacctct

SEQ ID NO: 3186 - protein, 739 aa, Alphatorquevirus sp.
MSWWRWRRRWWWKPRRRWRRRRARRPRRVPRRRYTRPARRYRGRRVRRRRAGGWRGRRRYSRRYSRRLTVRRKKKKLTLKIWQPQNIRKCRIRGLLPLLICGHTRSAFNYAIHSDDKTPQQESFGGGLSTVSFSLKVLFDQNQRGLNRWSASNDQLDLARYLGCTFWFYRDKKTDFIVQYDISAPFKLDKNSSPSYHPFMLMKAKHKVLIPSFDTKPKGREKIKVRIQPPKMFIDKWYTQEDLCPVILVSLAVSAASFTHPFCSPQTANPCITFQVLKEFYYPAMGYGAPETTVNSVFNTLYTTATYWQSHLTPQFVRMPTKNPDNSSNTDASKFNEWVEKTFKTGKLVKYNFPQYAPAIDKLNQLRQYYFKWETQHTGVAVPPTWTTPTSDRYEYHVGMFSPIFLTPFRSAGLDFPRAYQDVTYNPLTDKGVGNRMWFQYNTKIDTQFDARSCKCVLEDIPLYAMAYGYADFLEQEIGEYQDLEANGYVCVISPYTKPAMFNKHNPQQGYVFYDSQWGNGKWIDGTGFVPVYWLTRWRVELLFQKKVLSDIAMSGPFSYPDELKNTVLTAKYRFDFKWGGNLFHQQTIRNPCKPEETSTSRVPRDVQVVDPVTMGPRFVFHSWDWRRGFLSDRALKRMFEKPLDVEGFAASPKRPRIFPPTEGQLAREQKEQEESSDSQEESSLTSLEEVPEETKLRVHLRKQFREQRSIRQQLRTMFQQLVKTQAGLHLNPLLSSQL

SEQ ID NO: 3187 - protein, 150 aa, Alphatorquevirus sp.; identical to SEQ ID NO: 3179

SEQ ID NO: 3188 - protein, 60 aa, Alphatorquevirus sp.; identical to SEQ ID NO: 3180

SEQ ID NO: 3189 - DNA, 2878 bp, Alphatorquevirus sp.
tcacttgtcggtgtctacctctataagtcactcaaggggcaattcgggctcgggactggccgggccctgggcaaggctcttaaaaatgcacttttctaaaataagcagaaagaaaaggaaactgctactgcaaactgtgccgcttgcaaagaacgaacggactaccatgagctggtccagacccgtccaaaatgtttctatacttgaacaacactggtttgaatcctgccttagatcacacgcatgcttttgtggctgtaataatcctgttattcattttaataacattgctactcgctttaactatttgcctactgccaatccgcctgtgggacccccccaaccgcccacacgcccgccgtcccgcttgagatcccttcccgctctccccgcgcctcccgctgatccacaagcaccatggcctggggctggtggctcaagcggtggaggagaagaaagaaaccagcgtggaagaagtggagaacgcgcagatggagaagatttcgacgcagaagacctaaacgcacttatggccgccgtcgaagaagacgaacagtaaggaggcgccgcggtagacgacttaggaggagggggtggactaggagacggtacataagacgcagacgcagaaagaaaaagctagtactgacccagtggaacccccaagacgttaggagatgcacaataaggggcataataccccttatcatgtgcggtgcaaacactgccagttttaattatggcatgcacagcgatgacagcaccccccagccagaaaagttcgggggaggcatgagcacagtaacattcagtttgtttgtactatatgaccagtacaccagacacctaaacaggtggtcgtacccaaacgaccagctagacctagccagatacagaggctgcaaatttaaattctacagagacacctcaacagactttatagtcacctatgacattaatccacccatgaaaaacacagaacttagcagcgctaacacacacccaggcatgcttatgcagcaaaaaagaaagatactcgtccctagctgggacacgtatcccagaggcagaaaatatgtcatagctaagataccaccccccaaactgtttgaagaccactggtacactcagccagacttgtgcaaagttcctcttgtaactttgcggtcaactgccgctgacctcaaacatccgttctgctcaccacaaacgaacaacccttgcaccaccttccaggtgttgcgcagccagtataacagtatgataggcttcccctttaactataacccatcagacaaagatcaagaaactaagttaaaaacatttgaaaaatggctatattcatctagcacacactatcaaacatttgccactgaagctaaccttagacccagacagtacaatgcagacggaactgcaaatactaactacagaaatttacaatccacgtggacaactacaatatattctaaaaaaacagacagcaactttggctacacatcatacaacttttcaggagacactggctatacgtatgtaacacaaattagacagtggtactggacacaactaacatcctggacacaaacagtccctcacataaacaccaccttttccaatgccatacacccagagtttgaataccacgcgggctggtactcaaacatatttataggccccaacagatttaatatacagtttagagcagcctacatggatgttacctacaacccattaaatgacaaaggccacctaaacagagtgtggttccaatacagcacaaaacccaccacagactttgtagaaaagcaggccaaatgtttactgcaaaatctacctttgtggagcatgctgtttggctactcagaatatatagaaagtcagctaggcccctttcaggaccacgaaacagtaggcctagtaatagtacagtgcccatacacagtaccccccatgtatgacaaagacaatccagacatggggttcgtgttctatgacacacactttggcaacggaaagctaggcaacggactgggccaggtacccagatactggcagcagagatggtaccccatcttaaagagacagaaacaagtcatgaatgacatctgcaagacgggaccatttgcgtacagagacgagagactgcaagctgacttgactgcaggatactcctttaagtttaactggggtggcgacttaatctaccaccaggttgtcaaaaacccatgtgactcaggaggactggtgccttccgactccagtagattcaagcgggacgtacaagttgttagcccgctcaccatgggacccagactcatcttccactcgttcgaccaaagacgggggctctttactgacagagctatcaaaagaatgtacgatgaacagattaatgttccagactttacagaacagcctaaaatcccccgacttttccccccagtcgagctcaaagaaagggaagaaaaagactcagattcggagacagagacgatcagcagctcccaagaaaaagaagcgaaaaggcaagaggcgctaccagtccagcagcagctccgactccaactgcgagaacaacagcgactccgagtccacttgcagcacctcttcctccaactccagaaaaccaaagcaaatttacatttaaacccactatcttttcagcaagagataagctagacatgtttggtaacattatagatagaaagcctacctcccaggactgggagaccgagtacgtaacctgtaaaatatttgacaggccccccagacagcaccttacagaccctcctttctatccttggatgcctaagcctaaacctgcatgccgtgtaacctttaagcttggctttcaataaacaaggccgtgggagtt

SEQ ID NO: 3190 - protein, 754 aa, Alphatorquevirus sp.
MAWGWWLKRWRRRKKPAWKKWRTRRWRRFRRRRPKRTYGRRRRRRTVRRRRGRRLRRRGWTRRRYIRRRRRKKKLVLTQWNPQDVRRCTIRGIIPLIMCGANTASFNYGMHSDDSTPQPEKFGGGMSTVTFSLFVLYDQYTRHLNRWSYPNDQLDLARYRGCKFKFYRDTSTDFIVTYDINPPMKNTELSSANTHPGMLMQQKRKILVPSWDTYPRGRKYVIAKIPPPKLFEDHWYTQPDLCKVPLVTLRSTAADLKHPFCSPQTNNPCTTFQVLRSQYNSMIGFPFNYNPSDKDQETKLKTFEKWLYSSSTHYQTFATEANLRPRQYNADGTANTNYRNLQSTWTTTIYSKKTDSNFGYTSYNFSGDTGYTYVTQIRQWYWTQLTSWTQTVPHINTTFSNAIHPEFEYHAGWYSNIFIGPNRFNIQFRAAYMDVTYNPLNDKGHLNRVWFQYSTKPTTDFVEKQAKCLLQNLPLWSMLFGYSEYIESQLGPFQDHETVGLVIVQCPYTVPPMYDKDNPDMGFVFYDTHFGNGKLGNGLGQVPRYWQQRWYPILKRQKQVMNDICKTGPFAYRDERLQADLTAGYSFKFNWGGDLIYHQVVKNPCDSGGLVPSDSSRFKRDVQVVSPLTMGPRLIFHSFDQRRGLFTDRAIKRMYDEQINVPDFTEQPKIPRLFPPVELKEREEKDSDSETETISSSQEKEAKRQEALPVQQQLRLQLREQQRLRVHLQHLFLQLQKTKANLHLNPLSFQQEIS

SEQ ID NO: 3191 - protein, 184 aa, Alphatorquevirus sp.
LSVSTSISHSRGNSGSGLAGPWARLLKMHFSKISRKKRKLLLQTVPLAKNERTTMSWSRPVQNVSILEQHWFESCLRSHACFCGCNNPVIHFNNIATRFNYLPTANPPVGPPQPPTRPPSRLRSLPALPAPPADPQAPWPGAGGSSGGGEERNQRGRSGERADGEDFDAEDLNALMAAVEEDEQ

SEQ ID NO: 3192 - protein, 58 aa, Alphatorquevirus sp.
MFGNIIDRKPTSQDWETEYVTCKIFDRPPRQHLTDPPFYPWMPKPKPACRVTFKLGFQ

SEQ ID NO: 3193 - DNA, 2877 bp, Betatorquevirus sp.
cgggtgccgaaggtgagtgaaaccaccgtagtcaaggggcttaatgggcagaatcagtcttggcggaacgggcaactaacttaaatatatttgttttagaatgactacaagatacaaaccagcaaaatgctcacccagacaaacaactttaaaatggatgaatatgatctgcgccgttcatgacaacttctgcgaatgcccacatccagtagaacacacttctatacttcttttccaacaagaacctgaacaaaagttttcaccaatagaaaaagatataattaaaaaatgccttggtggagaagttaccgctacagaaaatacagaccaagatggagacgttcttggagacggagatttagacgcccttttcgctacagattttggagacccagaagacaaagggtaagaaaaagaaaacttaaaactttaaaacttaaagtatggcaaccgcactatataagacgctgtaaaatcataggattttatccaatggctttagcaacaacagaaagaacttctaataatttgaacttatacttagaaactgccgcttctcactatttacctggaggaggttcatttagtattgacaattttagcttagaatctctatataaagaacatatgatattaagaaatgtatggacttctagtaatgacaatttaccacttgtaagatacatgggatgcacaatgtacctatatagaaatgcaaccgctgactggttattcttttacaataatcaatatcctatgaaagcagatttaacaatgtatcaaagctgtcaaccttatataatgttactaaacaacaaaactattgttataccatgtaaacaatataatagaaacaaaaaaaactatgtaaaaataagaataagaccaccaacattaatgcaaaacaactggtattttcaaagaaaattttcagatattcctatattacaaactatgtctacactatgctcgttagaccgcatgtacacatcagccaccgctatttcaacaacaataggtttctacactttagacatactatactggcaaaaccaccaatttacacaacaaccaacatcaggctacttcccaaaacaagatgctataatatttggcttagaaaacggagacatagatatatctaacaaaaaattagagaatttaatatttttaggaaacacagacgactacacactaggaacacctgctaaacacgtaccagaagacaccaaaagccctcaattaactaacactttacaaaaaaaattatctaaaatgagacaagataaacaatactggggaaatccatttataacagactattttaatggacacagaaccatgctcactactaacatgaattggaataccttaatacaatatgcaaaagacaataccacatgtggaaacaaatttcaaaaactatcaagtccatactttgaagttagatacaatccttacaaagacaaaggaataggcaacaaaatatacatgctaccaatatacacatcagaaaatcaatacaactggacatctacaatagcagacaaagaatctatagcacaagacttacccctttgggtattatttcatggatacctagatttccacagaaaatgggcacaaatacaatcaatagacacaaaacatatagtagtaatatacagcacttatatgcaaccaacagacaaacattactttgtacctttagactgggactttataaatggaacatcaccatacagaccagaacacgaaagaacaccatcagatacacacttttggcacccaaaaacatcattccaactacaatcaataaataatattgtacaatcaggaccagcaaccataaaactccctaaagatatatcagcagaatgtaagataaaatataaattttcttttaagttcggaggatcaccagcacccatggccaccattaaagacccagatgatcaaccacaatttattacacccagtaacatcttacaaacaacttcgttacagaatccaacacaaccactccaatactatctcagcagcttcgatgaaagacgaggaatgcttactaaaaaagctgcaaaaagaatcagtgaatacaaagaaactgaaacaagtgttattccaattacagaaacaagctgcagcccatggggaccaccctaccaagaaacacagacaccggacacatcggacacggaagaagaggaaacaccacaagaggcaatcaagcgactcagaaaagagcagcacctcctccgacaccgaatcaacaagctcctcaaccaactagctcaataaaaatacataaatgtacatttaatgtaaagctatttgatgatgatcccccaaaaaatcgtagaatgaccgcatgggaatttaaagaagaattagaggacgctgccttttggcatagagcgcctagaatgtttattaaagatagacctacatatccctgggtaccccaagacactccattcactgtaaactttgatcttaatgcgccgaaataaaaattcaaggcctgcaaacattccttctcggtgtccatttatataagttcaacttaaataaacatccaccactctcccaaatacgcaggcgcactagggggctccgccccctaaaacccccagggggggggacccctaataaatattcataaaggaaaccacaaaattagaattgccgaccacaaacagacatatgcaaattacttccccaaattttcacttaacttccctaaaaattaattaataatcagagtcacagtgggcggagacaacacactatatattcaactacacttccgaatggctgagtttatgccgccagacgaagagagcatcacaacagtgactgcgcgctgattctggg

SEQ ID NO: 3194 - protein, 670 aa, Betatorquevirus sp.
MPWWRSYRYRKYRPRWRRSWRRRFRRPFRYRFWRPRRQRVRKRKLKTLKLKVWQPHYIRRCKIIGFYPMALATTERTSNNLNLYLETAASHYLPGGGSFSIDNFSLESLYKEHMILRNVWTSSNDNLPLVRYMGCTMYLYRNATADWLFFYNNQYPMKADLTMYQSCQPYIMLLNNKTIVIPCKQYNRNKKNYVKIRIRPPTLMQNNWYFQRKFSDIPILQTMSTLCSLDRMYTSATAISTTIGFYTLDILYWQNHQFTQQPTSGYFPKQDAIIFGLENGDIDISNKKLENLIFLGNTDDYTLGTPAKHVPEDTKSPQLTNTLQKKLSKMRQDKQYWGNPFITDYFNGHRTMLTTNMNWNTLIQYAKDNTTCGNKFQKLSSPYFEVRYNPYKDKGIGNKIYMLPIYTSENQYNWTSTIADKESIAQDLPLWVLFHGYLDFHRKWAQIQSIDTKHIVVIYSTYMQPTDKHYFVPLDWDFINGTSPYRPEHERTPSDTHFWHPKTSFQLQSINNIVQSGPATIKLPKDISAECKIKYKFSFKFGGSPAPMATIKDPDDQPQFITPSNILQTTSLQNPTQPLQYYLSSFDERRGMLTKKAAKRISEYKETETSVIPITETSCSPWGPPYQETQTPDTSDTEEEETPQEAIKRLRKEQHLLRHRINKLLNQLAQ

SEQ ID NO: 3195 - protein, 102 aa, Betatorquevirus sp.; identical to SEQ ID NO: 2475

SEQ ID NO: 3196 - protein, 123 aa, Betatorquevirus sp.; identical to SEQ ID NO: 2476

SEQ ID NO: 3197 - DNA, 2876 bp, Alphatorquevirus sp.
tcggtgtctacctctaaaggtcactaagcactcaaggggcaattcgggctcgggactggccgggctatgggcaaggctctgaaaaaagttatgtttctcggtaaactttacagaaagaaaaggacactgtcactgtgcggcctgccagcagcaaagaaaaaaccacctagtgatatgagctattggaggccacccctgcacaatgtcccggggcttgaacacctctggtacgagtccgtgcatcgtggccatgctgctgtttgcggttgcgggaattttgtacgccatcttgctgctcttgctgaaagatatggctacccgggggggccgagcgctcctggggcaccctcagtagggggcggcggtaaccctcccatccgtcgagcccgccacccggcggccgctccggatcccccggcaggtaaccaggctcccgctctgccatggcatggagatggtggaaacgaaagcggcgctggtggtggagaaaacgatggacccgagggaggtttcgaagacgacggactggacgccctcgtcgccgccctcgacgacgaagagtaaggagaaaaagacagtggaggagggggcgacgcaaacgaacttataacagacgtaggagacgcttaaaaaagaaacgtaggccaaaactgactctgagactgtggcagccagacatggtcagaaaccttaaagtgagcgggtacatacccataataatcagtggcttcgggacattcagtagaaactttagcagccacctactagacaaagttattaaggagccctttggagggggccacagcacaatgagattctcccttcagatactttttgaggaacacctcaggggtcttaactactggtcctactctaacgcagacctagagcttgttagatacaggtactgcaaattcaccttcttcagacacccagacacagactacattgtacagtacaacagaaagacccccctggggggcaacatactaacagcaccatcactacacccaggatccctcatgctgcaaaaatacagggtcctggtccccagctggaaaacaaaacccaagggaaaaggcacagtaaccattaagattcccccccccaccatgctaactgacaaatggtacttttccaaagacgttgcagacctcacattgctaaacctcaacgcagtgtcagctgacctgcggtttccgttctgctcaccacaaacgaacactacttgcataactttccaagttctctcttctgtatacaacaagttcctctctataactgaaattaactctagtaatgaagatgaaaaaattatggagtttttaaatgctgctatgccaaaagacaaatcagcaaatgttttaaatacttttaaatcagaaggcaactatagtcacccttctattaaagtatttaatggctctaacagacccacaaatgatgaatactttgcccaaaaagatagcctgtggggagatgccatctttgtaaactcaacacaaactttagacaagttaaaagagaaaattaaacagaacataaaaaactataaaaaaaaagtacaacaaacaataacagcggtaacacaacaaggctcatctattttttatcatttagttggaatatatggcagcagctggctaaaccaaggtagaatgagcccagaaatactaggcctatacacagaagttatttacaatccatacaccgacaaaggagtaggcaaccttctatggatagaccccttaaacaaatcagacaacctatacaaaccaccacaaagcaaatgcccactaaaagacatgccactgtggcaaatgacctttggctacatagactggataaaaaaagaattaaaccactgggatgctcccataaactacagaatactactaaggtccccctacacatttccaaaactataccatgagacacaaccagagtatggctttgtaatagtatcctacaacttcacagcaggcaaaatgccagacgggtccatgtatgtgcccatactgtatagaactaagtggtacccttacatgttaaaccaagagtcagtaatggaagatataagcagatcagggccctttgcacccaaacaagagatgcccagcacagaactagttgcaaagtacacatttaagtggaaactcgggggcaaccccatctccgaacaggttgttaaagaccccagcacacaacccacctacgagctgcccgcagccggtacaatccctcgtagagtacaagttatcgacccgaaaatcgtcggacccaacatatcgttcaaaagctgggagatcagacgtggatactttagctcgacaagtattaaaagaatgtcagaacaacaagaaacttctgagtcttatttcccaggtccaaaaagacccagaatcgatctgcccaagtacgagccgccagaagaaagctggagtactctccaaagagaactccggccgtggacggactcggaggcggaaaaagaccaaagctcctcggaagaggaagaagagagacccctccgagagcagctgcagctccagctcaaggagcagcagcacctcagacggggaatccagtgcctgttcgaacaactcgtaaaaacacagcagggagtccacgtgaatccctgcctcgcgtaggccccgagcagtggttgttccccgagagaaagccaaagccaggtcccacgtcccaagactgggccatggagtacctggcctgcaaaatatttaataggccccccagaagcaagcttacagattaccctttctatccttactgcaaaaacaattacaatgtaacctttaagcttaactacaaataaatggcagcttcactgttctaggccgtgggagtttcacttg

SEQ ID NO: 3198 - protein, 735 aa, Alphatorquevirus sp.; identical to SEQ ID NO: 576

SEQ ID NO: 3199 - protein, 165 aa, Alphatorquevirus sp.; identical to SEQ ID NO: 577

SEQ ID NO: 3200 - protein, 132 aa, Alphatorquevirus sp.; identical to SEQ ID NO: 578

SEQ ID NO: 3201 - DNA, 2876 bp, Betatorquevirus sp.
gcgggagccgaaggtgagtttaccaccgtagtctaggggcaattcgggctagatcagtctagcggaacgggcaagaaatttaaaatatttattttacagatgaaaattgtcgatccaaaatggacaaccaaacagaaaattaacaactggatgaacctactagctcacatccacgacactaactgcaactgcgacgaaccacttcaacacaccattcaccttattttagaaaaagaaccaaacctaccattatctgaagatacaaaacaactaatgaaaaaatgccttggttcagaagatacaaaagaagatggagacgccgtagacggccttggtataggagaactagagcgccttttcgcagaagatactggagaagatactgggtaagcaaaagaaaaagaaaacttaaaaaaataactgtaaaacaatttcaaccagaaaaaattaacaaactaagtgtaaaaggaatttatcctttatttttaactactcatgacagaatatctcacaacttaattcaagtaatagacagcaccacgcctcacagaggccccggaggcggtggattctctataatgcaattttctttacaaggactatatgaactctttttaaaatcacaaaactggtggacaaaaagtaattgtaacttaccgctaataaggtttaatggtgttactttaaaattgtatagaactgaacatgtagactatattgtaacaattcaacaatgctatccaatgtgctgtaatgatataatgtttatgagtactcaaccaagtataatgctaatgacaaaaggatccatcaaagtatcatgcagacaaaacacaagaaacaaaaaaccatataaaatactaagaatatcccctccggcacaaatgctaacaaaatggtactttcaatccttacttgctaaaacaggcttactcctcataaaagctacagcagcctcctttgatagattttacacccactcctttgcatcatcaacaacaatgggctttacttctctaaatacaacaacttttcaataccacaattttaaacaatttccacaaacagcaggctacaaaccacaaaacaatttatacttatggggtgctgtaaaagcaacaattccaaatcctatgaaaacaaaagtatcacaacttatatacttaggacaaacttgtttactgcaagaaggccaatccttagaaaactttaaagacaatatagagggctatttaacagcaaaagacaaatggggaaatccctttcaccctagattttttacatatgattaccaagtattttcaacaaatcaatcattacaagctataataaacaaagctaaactaagtgataatataaacaaaacaatacaggacgtatttccaacagaatttacacctagaacaattccactacaaacacaatgcagatataatccacttgcagacaaaggaactggaaacaaaatatttcttgttagcattgttagtgaccaagaaacctggcatgaacctaaagatgaaagactaatgagacaaaatttacctttatggctattaacttggggatggtcagactggcaaaaaaaattagcccaaatacatcattttgactatgactatgtaacagttataaaaagcccctatatagaacctactttaaacttttatataccgttagatgacagttttacaaattggcctccatcttccccatatggaacagaccttaatcaaagtgactctcaaaactggtttcctaaaaacaattttcaagttgtagcactaaataatatagctgcttcagggcctggaactgtaaaacttagaaaagatcaaagttgtgaagctcatgtattttataaatttcactttaagcttggagggtgcccagcacccatggaaaccatctgtaacccaattaacgaaccagtgtatcccgtccccgataaccagcttcaaacaccttcgttgcagagtccagaaacacccctacaaaccttcctatacgcattcgacgaaagacggggacaaattacaactaaagctgcaaagcgcctcaaaacagactttacaactagagaaccttttatctcaactacaggaacagccatggaagtcccatccgaccaaagacaaccggaggaggactcatcgacatcggaagaagagaaagaagagatgcagctccagctcgagtacctccagcgaagacaacgcaagctccgcaagcgagtcctccagctattagacatacaaaatatgtaataaaacatcaaaaatgtagaattaacctgtttaatgattacaaacctaaaaatcgtagaatgactcctaaagaatttgaggaggagctatggcaagctagcatttttaaacgtcctcctagaacaatgttacatgatactccattttatccctggctacctgtaaccccccttgctaatcaaccatttgttaatttcaagcttaactatactgaataaaggcctgcaaacttccacttgacgtgtccatttattaaagtttaaacttatataaacatccaccactctccctaatacgcaggcgcacaagggggctccgcccccttaaacccccaagggggctccgcccccttacaccccccccttacaccccctaattaatattcaacaggaaaaccacataattagaattgcccaccacaaaccgtcacttacttccccattttacaaaacttcctttttttttcataaatattcattaaattaattaataatcaccgtaaatccggggaggagttagcaaactatataactaactacacagacgaatggctgagtttatgccgctagacggagagcacatcacacagtgactgggcgctgatcttgg

SEQ ID NO: 3202 - protein, 661 aa, Betatorquevirus sp.
MPWFRRYKRRWRRRRRPWYRRTRAPFRRRYWRRYWVSKRKRKLKKITVKQFQPEKINKLSVKGIYPLFLTTHDRISHNLIQVIDSTTPHRGPGGGGFSIMQFSLQGLYELFLKSQNWWTKSNCNLPLIRFNGVTLKLYRTEHVDYIVTIQQCYPMCCNDIMFMSTQPSIMLMTKGSIKVSCRQNTRNKKPYKILRISPPAQMLTKWYFQSLLAKTGLLLIKATAASFDRFYTHSFASSTTMGFTSLNTTTFQYHNFKQFPQTAGYKPQNNLYLWGAVKATIPNPMKTKVSQLIYLGQTCLLQEGQSLENFKDNIEGYLTAKDKWGNPFHPRFFTYDYQVFSTNQSLQAIINKAKLSDNINKTIQDVFPTEFTPRTIPLQTQCRYNPLADKGTGNKIFLVSIVSDQETWHEPKDERLMRQNLPLWLLTWGWSDWQKKLAQIHHFDYDYVTVIKSPYIEPTLNFYIPLDDSFTNWPPSSPYGTDLNQSDSQNWFPKNNFQVVALNNIAASGPGTVKLRKDQSCEAHVFYKFHFKLGGCPAPMETICNPINEPVYPVPDNQLQTPSLQSPETPLQTFLYAFDERRGQITTKAAKRLKTDFTTREPFISTTGTAMEVPSDQRQPEEDSSTSEEEKEEMQLQLEYLQRRQRKLRKRVLQLLDIQNM

SEQ ID NO: 3203 - protein, 96 aa, Betatorquevirus sp.; identical to SEQ ID NO: 2778

SEQ ID NO: 3204 - protein, 63 aa, Betatorquevirus sp.; identical to SEQ ID NO: 2779

SEQ ID NO: 3205 - DNA, 2875 bp, Alphatorquevirus sp.
cccccctgcccggtagcaacttcctcggggtccaaggggcaattcgggctcgggactggccgggctatgggcaaggctcttaaaaaattcccccgctctgttctccgccaggacattaaaacatgtcgtggagaccgccgagccaaaatttactcgaaagagaagacgcttggtactcagcttttcttagctcgcatactacattttgcggttgcactgaccctctgctgcatattactctcattgctggtcgccttgctaaccccatacccgttacccggcaaccggaaacccctcctaacggcctcagggggctgccggcactgccagcgccccctgaaccaccagcaccgccaccacggcctggggatggtaccggagaagaagatggcgcccgtggagaaggcgaaggtgggcgatacgcagacgaagacctagaagaactgttcgccgccgcggcagaagacgatatgtgagtagatggccgcgccgccgatacaggcgcagacgcagacgaacaagacgtaggaggggacgcaaaaagagacacagacagactcttatactaagacagtggcaaccagatgttataaaaaagtgttttatcactggctggatgcccctcattatatgtggcactggaaacactcaatttaacttcataacccatgaagacgatgtgccacccaaaggagcctcctatggaggcaacctcactaacctcaccttcaccctagaaggactgtatgacgaacacctgctccacagaaacaggtggtccagatcaaactttgatctagacctcagcagatacctgtacactgtcataaagctatacagacacgagtctgtagactacatagtcacctacaacagaacaggaccctttgagataagcccactaagctacatgaacacacaccccatgctaatgctcctaaacaaacaccacatagtggtgcccagcctaaaaacaaagcccaaaggcagaaggtccattaaaataaaaataaagccacctaaactaatgctaaacaagtggtactttgcaagagacatgtgtagaataggcctctttcaactatatgccacaggggctaacctaacaaacccctggctcagatcaggcacaaacagcccagtagtgggattctatgtacttaaaaactccatataccaagatgcctttgacaacttagcagaccaaacacacacaacagccagaaaaaatgtgtttgacaaaaaactatacccaattacaaataacccaacagacatatggcaactaacatacacctcactaatgaaaaacatatactttaaagccaaacaagaaacagctaatacaaacatgcccaatcaatataactttaaaacttacaaagaacaatatggcaaagtacatacaaaatggatgaccatagcagaagatggctacaagttagttttagaagaatacaaaaatatatacaccagcacagccacataccccccacagtgggacaatagaaactacttaagccatgactatggcatctacagtccttactttttaacaccacaaagatacagtccacagtggcacacagcatggacatatgtcagatacaacccactcacagacaaaggcataggcaacagaatctttgttcagtggtgctcagaaaaaaacagctcatatgacagcacaaaaagcaaatgcatgctacaagacatgcccctcttcatgctaacctatggctacctagactatgtactaaaatgcacaggctctaaatcagcctggacagacatgagagtctgtatcagaagtccatacacagaaccacagctcacaggcaacacagatgatattagttttgttataatatcagagaccttcatgaacggagacatgccatacttagctccacacatacccgttagtttgtggtttaagtggtaccccatgatattacaccagaaggcagctttagaaaccatagtttcctgtggaccgtttatgcccagagaccaggaagccaactcttgggacataaccgcaggttacaaagcagtttttaagtggggtgggtcccctctgcctccacagcctatcgacgacccctaccaaaaacccacccacgaaatacccgaccccgataagcaccctccaagactacaaattgcagacccgaaaatcctcggaccgtcgacagtcttccacacatgggacatcagacgtggcctctttagcacagcaagtcttaagagagtgtcagaataccaaccgcctgatgaccttttttcaacaggcgtcgcatccaaaagaccccgattcgacacaccagtccaagggcagctcgaaagccaagaagaagaaagctatcgtttactcagagctctccaaaaagagcaagagacaagcagctcggaagaagaacagccaccgaaccaagagatccaagaaaaactactcctccagctccagcagcagcgacagcaacagcgactcctcgcaaagggaatcaagcacatcctcggagatgtcctccgactccgaaaaggagtccactgggacccggtccttacatagcacctccagaacctatcccagaccttttgttccccagtactaaaaaaaaaaagaagttttcgcccttagactgggagaacgaggctcaaatagcacggtggttagacaggcctatgaggctgtatcctggggacacccccttctacccgtggctaccccgaaagccacctacccagcctacatgtagagtaagcttcaaaataaagctgaatgattaacttgcaaggccgtgggagtttcacttgtcggtgtctacctctaaaagtcactaagcactgcgagcgcaagcgagcagtgcga

SEQ ID NO: 3206 - protein, 652 aa, Alphatorquevirus sp.; identical to SEQ ID NO: 809

SEQ ID NO: 3207 - DNA, 2874 bp, Gammatorquevirus sp.
cgggagcccgaggtgagtgaaaccaccgaggtctaggggcaattcgggctagggcagtctagcggaacgggcaagaaacttaaaacaatgctttgttttacagatgtcaaaagttcaagctaaagacttttatactcccacaccctacaatcaagaaacgaaaaatcaaatatggatgtctcaaattagtgattctcacgataatttctgcaattgtcacactccctttgctcacttacttgccagtatctttcctgttggtcaccaagataggaatctcacaattaatcaaattcttctcagagattacagagaaaaatgccgttctggtggaatagaagaagaaagccctggtggggccgttggagaaaaagatggacctacaaaagaaaaaacaccagaagaagaagacctagaaaacggagacatagaagaacttttagacgccgtcgccgccgcagaagaacatacaaggtaagaagaaaaagaaaattaataactgtaaagcaatggcaaccagataaaattttaaactgtaaaattaaaggatatgatactttagttttaggagcagaaggaaaacaattggtatgctataccaatgttaaacaagcttggacacctccaaaaactcctgggggagggggatttggtgtacagcaatactcacttggatacttgtatgaacaatatatttttagaaaaaatatatggactaaatcaaatatagcactagacctagtaagatatataagagccaaatttacattttacagacacccagaaacagactttattgtacggtatgatagacaaccaccatttacaatagatgaattgacataccctttaacacacccagctcaacttatgctcgcaaaacataaattctttgtactcagtacagctacaaaaccacttggtagactaacaaaaaggaaaataattaaaccacctaaacaaatgctaactaaatggttttttcaagaagactttagcaaagcaggactactacaactaacagcagctgcagcaaatttaaggtatgcaaacctaggctgctgcaacacaaaccaaattattacagcattctccataaacacttcatttttccaacaaggaaactgggcaataggcacaggagacagatacaaaccctacctagcaatacctaccacactatactactggccagaaaaaccaccaagcaaggaagacgagagaagagaatacaacaagaaatacatgttcacacaacaaataacttcatataatgactcagttagctatgaaaaaggctactttagcactaaagtactaacagccaaattttactcacaagaccaaatggataacacaggccttgccaatttaccactactttcatttagatataatccagccttagactcaggaaaaggaaatgcaatttggctacacaactcactaactacatcatatgataaaccagcaatagacaaaacccttatactacaaggcctacccctgtggcaaatgctatggggctggcttagctatgtacaatacattaaaaaagccactgacttttttacatcccacattataatactacaaagtcctgctattaaacctgcaccaacagcctcaccacaaacatactacattccactatcaacagactttgtaaatggcaagcctccttacaatgagccacttaccacctggtggagagcacactggtatcccaacatatatgaccaactacctgtactaaatgctattgtagaatctggcccttttgtacctaaatactcacaaactaaaaacagtacatgggaactaaaatacacttacaattttttctttaagtggggaggtccagacattacagaaccagcagtggctgaccccagccaacaacaaacatatcctgtacccgataaaatgtcagaggcagtacaaattagggaccctgccaaacaaaagtttgaatcaatcctgcatccctgggactacagacgtggcctcattaaagaatcagctcttaaaagaattcgagacaacctctcaattgattcaactttccaaccagatgaaacacctaaaaaaaaaagaaaaacagttggtccctgtcttacagtgccaggagaggaagaacaagaaatacagaaatgtctccaagaactcttcgaagaaagtacctaccaagaaatccaagaagaaacatcaatccagcagctcatccaacagcagcaccagcaccagcagcagctcaagtggaacatgctcagactaatatcagacttgaaagaaaaacagagacaattacaactacaaacgggttttataagttaacaccattcaaaccaggttttgaacaacaaacagagagagaacttgctatagcttttaaaagaccacccagattatttaaagaagacaaacccttttatccatggctacccaaaccaacacctattgttaactttcaccttaactacaaattctaggccaacactgttcacttagcggtgtttgtttaataaagtttgcaccccaaaaaaaattgtaaaattaaaaaaaaaaaaaaaaataaaaaattgcaaaaattcggcgctcgcgcgcgctgcgggcaaagccccccccgcaccccccctacgtcacaagccacgcccccgccgccatcttgggtgcggcagggcggggtttcaaatggcgggacccaatcattttatactttcaatttccaattaaaacctgccacgtcacaacaaaggggaggagactttaaaactatataaccaagtgacgtgacgaatggctgagtttaccccgctagacggtgcagggaccggatcgagcgcagcgaggaggtccccggctgcccgtggg

SEQ ID NO: 3208 - protein, 672 aa, Gammatorquevirus sp.; identical to SEQ ID NO: 875

SEQ ID NO: 3209 - protein, 124 aa, Gammatorquevirus sp.; identical to SEQ ID NO: 876

SEQ ID NO: 3210 - protein, 126 aa, Gammatorquevirus sp.; identical to SEQ ID NO: 877

SEQ ID NO: 3211 - DNA, 2874 bp, Alphatorquevirus sp.
gcgaggagtgcgacccccctgcccggtagcaactaggggcaattcgggcacgggtctggccgggctatgggcaagattcttaaaaaatttcccacctctgttgttcgccaggacaccaagacatgccgtggtctccgccgagagctaacattagccagagagaggacctgtggatccagtcagttctttactcgcatgatactttttgcggctgtactgacatttctgggcatcttactagcctcctggcttgcatacaaccagctccacctcgagaccctccaccccgtctcgtccggaggctgccggcactgccagcggctccggaacccggtgagcagccacggcctggtggagatacagaagaagaccctggaaacgctggagaaggcgccggtggggcctaccgagaagaagacttagaagaacttttcgccgccgccgaggaagacgatatgtgagtagagggcggcgccgccgatacaggcgcagacggagacgggggcgacgcagaaagggacgcagacgcaggcacagaaaaacccttatcctaagacaatggcagccagacgttgtaaaaagatgcttcatcactggatggctgcccctgatcatctgtggggctggacatactcaattcaactttattacccacatggacgatattcccccaagaaatgcctcctatggaggcaatttcaccaacctaacctttaacctagcctgtttctatgatgaatttatgcaccacagaaacagatggtcagcctcaaaccacgacctagaactagtaaggtacataaaaaccagcataaaactatacagacacgagtcagtagactatgtagtgtcctacaccaccacaggccccttcgagactaatgaaatgtcttacatgctcactcaccctctggccatgcttctcagcaaaaaacacgtagttgtgcccagtttaaaaacaaaggcacatggcagaaagtacaaaagactaactatcaagccccccaaacttatgacaaacaagtggtactttgccaaagacttctgcaacataggcctgttccaaatgtgggccacgggcctagaactaagaaacccctggctcagatcaggcactaacagtccagtcataggattctatgtccttaaaaaccaagtgtaccaaaacaggtacagcaacctcgccacagaaacacaaaaaagaaaagaagcatatgatgaactaaccaaaaaaaatggcacaaagtggtacaattggcagtacacctacactaaagttatgagacctatatactatgccgctgccaatgaacctacaaatacatcatttaaaaacaaaccatataactggaaaaactataaagacaatttctcggcagtacaacaaaaatggacaaacactgtaaaagacgcctacgaattagttgcacaggaatacagacaaatatataccaccacagtcacatatccacctccatgggatcccactccacaatcagacataaacacaggcagacagtacctagaacatgactgtggtatttacagtccatactttttaacaccacaaatatacagcccagagtggcacacagcatggtcctacataagatataatcccctcacagacaaaggcataggcaacagagtctgcgtacaatactgcagcgaggcctcctctgaatacaacccagtaaaaagcaagtgcatgttacaggacatgccactgtggatgatgctgtatggatacgcagactatgtaattaagagcacaggcatacagtctgcctggacagacatgagagtagcaatcaggagcccctacacagaccccaagcttacaggtagctcagaaaacaccatgtttattccaataggcctagaattcatgaacggagacatgccagacaagaggccctacattccgttaaagtggtggtttaagtggtaccccatgattacacaccaaaaaaccgcacttgaggcaatagtttcctgcagccccttcatgcccagagatcaggaagctgccagttgggacataactgtaggttacaaagcaaccttcttatggggtggctcccccttacctccacagcccatcgacgacccctgccaaaaacccacacacgaacttcccgaccccgatagaaaccctcctagaatacaaatctcagacccgcagcacctcggaccggcgacgctcttccactcgtgggacctcagacgtggatacattagtacaaaaagtattaaaagagtgtcagaacacctcgacactaatgaatatttttcgacaggcgtcgaatccaaaaaaccccgcttcgatactccccaccacgggcagctatcaaaccaagaagaagacgccttacatattctcagacaactccagaaagagcaagaggaaagcagcaccgaagaagaacaagcactccaaaaggaagaagaacaaaaagaaaagctcctacagcaactccgagtccagcgacagcaccagcgagtcctcacacaggggatcaagcacctcatgggagacgtcctccgactcagacagggagtccactggaaccccatcctgtagtgctgccaccggagccaataccagacctacttttccccaatactggtaaaaaaaaaaagttttctcccttcgaatggcagtgcgagcaagaaatagcctgctggatgaagcgacctatgcgtttctttccctcagacaaccccttctacccgtggttaccccccaagcgagatatcccaaatatatgtaaagtaaacttcaaaataaaactcagtgattaacattcgaggccccgggaatttcacttagcggtgtctacctctaaaagtcaccaagcactccgagcgcaa

SEQ ID NO: 3212 - protein, 660 aa, Alphatorquevirus sp.
LPLIICGAGHTQFNFITHMDDIPPRNASYGGNFTNLTFNLACFYDEFMHHRNRWSASNHDLELVRYIKTSIKLYRHESVDYVVSYTTTGPFETNEMSYMLTHPLAMLLSKKHVVVPSLKTKAHGRKYKRLTIKPPKLMTNKWYFAKDFCNIGLFQMWATGLELRNPWLRSGTNSPVIGFYVLKNQVYQNRYSNLATETQKRKEAYDELTKKNGTKWYNWQYTYTKVMRPIYYAAANEPTNTSFKNKPYNWKNYKDNFSAVQQKWTNTVKDAYELVAQEYRQIYTTTVTYPPPWDPTPQSDINTGRQYLEHDCGIYSPYFLTPQIYSPEWHTAWSYIRYNPLTDKGIGNRVCVQYCSEASSEYNPVKSKCMLQDMPLWMMLYGYADYVIKSTGIQSAWTDMRVAIRSPYTDPKLTGSSENTMFIPIGLEFMNGDMPDKRPYIPLKWWFKWYPMITHQKTALEAIVSCSPFMPRDQEAASWDITVGYKATFLWGGSPLPPQPIDDPCQKPTHELPDPDRNPPRIQISDPQHLGPATLFHSWDLRRGYISTKSIKRVSEHLDTNEYFSTGVESKKPRFDTPHHGQLSNQEEDALHILRQLQKEQEESSTEEEQALQKEEEQKEKLLQQLRVQRQHQRVLTQGIKHLMGDVLRLRQGVHWNPIL

SEQ ID NO: 3213 - DNA, 2874 bp, Betatorquevirus sp.
cgggtgccggaggtgagtgaaaccaccgtagtcaaggggcaattcgggctgggtcagtctagcggaacgggcaactaacttaaattgttttacagatgaacattataaaaccaacaatatcaattaaacatcaaaaaaaagaatggattaacctactagtacacgttcatgatctacaatgccgctgtgataaacctttggaacatacagccgacattatatttgaagaacctgccctgcgattagaaaaatcaacaattgataacattaaaaaatgccaagatactaccgctattacccccgtcgccgacgctttagatggtatagacgaaggagacctttcagctttattcgccgaagattttacagaagaaaatgggtaagaaacagacgctttaaaagaaaactttctaaaataactgaaaaacaatggcaacctcaaaaaattcaaaaatgtactgttaaaggcttatacccattatttttttgtaaccatgatagacttgtaaataatgccattcaatatatagactcagtagcccctctacactttccaggtggaggaggattttctataatacaatttacattgcaagctttatatgaacaatttataaaagctactaactggtggacaaaatctaactgtataatgcctttaataagatataatggggttacttttaaattttatgctacagaaaactttgactatgttgtaaatattgatagatgttatcctttaaaagcttctgacttactatatatgtctactcaaccatctattcaaatgttacagagaaaagctatactagtaccttgtaagaaaaattctggatataaaaaacaatacaaaaaagttagagttagaccacctacacaatttaaaacttcatggatgttccaacaagacctagcgaattttcctttagtattattaacagcttctgtagcttcctttgatagatattacttaagtagtacagctaaaagctccacaatgggttttgtatctctaaatacaaaaacatttttactacatgactggcaagacccaccaacaacagggtatcacccacaagaaaaaatttggttttggggaacagataatggagccgcacaattagaaaacacaaaactaaaagacttaatttatttaggaggcacaggaccctaccaaaaaggacatcctataaattatccagtaactgaaaattacacatcttcaccacatctctggggaaacatatttcacccagattacctaactggcactagtggtgtattctggagcaatatatcaccaaatgaactagctgcaaaagtaacaaactcaaacgtaactgtagcaacaaccacaggtattacaccaagaacattaccacaaacagtagaatgtagatacaatccatttgcagataaaggtaaaggcaatgctatttacttagtaagcaatcattcagatcatacagcttggaaacctatagaaaaacctgaattacaaagaaatgatctaccactatggcttttagtatggggatggctagattggcaaaaaaaattagcacaaacttcacaaccagacattaactacatgacagtaataaaatctaactacataagcagcaaccccacattagattactatgtagtgctagatgataactttttaactggcgaatccccttacagagaaggcctatctgctagcgatgaaaaacacttttatcctaagaatacatttcaaataaaaacattaaatgaaataggaagtgtgggacctggggtagtaaaattacaaaaagaccaatcatgtgaagctcactttaaatacaactttcactttaagcttggaggatgtccagctaaaatggaaacaatatgtaacccctctgatcaacctaaatatcccattccaagtactgaacaaaacacaacttcgttacagagtccaacaacagccttgcaaacctatttgtacgactttgatgaaagaaaaggactgctcacaaaaccggctgcaaaaagaattaaaaaagactatggaactgaaacaactcttttgccgtttacaggagcagcaacagacctgccaccccccaaagaaataccgacagaaaacgaaacgtcatcggaagaagaggagacatcgcagcaggagctcctcagactccgaagaaagcaaaaacagctcaagcagcgaatcctccagctactagacatacaaaattcagaataataaacagtgaggttaaaattgatttatttggtgacacaccaacaccaaatagacgtatgactcctcaagaaaaagaggacgaattattttgggcaaaactctttagacgcccacctagagaatatattaaagacaaaccattttatccttatgtaccaactctttcaaaatactgtgtaaactttgacctaaatgcgccgcaataaaaattcaaggcatgcaaaatttcactctcggtgtccatttatataagtaaaaacttaaataaacatccaccactctcccaattactgcaggcctacaagggggctccgcccccttacacccccaagggggctccgcccccttaaacccccaagggggctccgcccccttacaccgcccccttacaccccctaattaatattcaacaggaaaaccacataattagaatggccgaccacaaactgtcaaaaacttccccttttgtactaaacttccccttttactaattattattcattacattaattaataaacaccgtcattccggaaaggacctaaaatactatataagtaactacactgacgaatggctgagtttacgccgctagacggagaacacatcacttcagtgactgtggactgaccctggg

SEQ ID NO: 3214 - protein, 654 aa, Betatorquevirus sp.
MPRYYRYYPRRRRFRWYRRRRPFSFIRRRFYRRKWVRNRRFKRKLSKITEKQWQPQKIQKCTVKGLYPLFFCNHDRLVNNAIQYIDSVAPLHFPGGGGFSIIQFTLQALYEQFIKATNWWTKSNCIMPLIRYNGVTFKFYATENFDYVVNIDRCYPLKASDLLYMSTQPSIQMLQRKAILVPCKKNSGYKKQYKKVRVRPPTQFKTSWMFQQDLANFPLVLLTASVASFDRYYLSSTAKSSTMGFVSLNTKTFLLHDWQDPPTTGYHPQEKIWFWGTDNGAAQLENTKLKDLIYLGGTGPYQKGHPINYPVTENYTSSPHLWGNIFHPDYLTGTSGVFWSNISPNELAAKVTNSNVTVATTTGITPRTLPQTVECRYNPFADKGKGNAIYLVSNHSDHTAWKPIEKPELQRNDLPLWLLVWGWLDWQKKLAQTSQPDINYMTVIKSNYISSNPTLDYYVVLDDNFLTGESPYREGLSASDEKHFYPKNTFQIKTLNEIGSVGPGVVKLQKDQSCEAHFKYNFHFKLGGCPAKMETICNPSDQPKYPIPSTEQNTTSLQSPTTALQTYLYDFDERKGLLTKPAAKRIKKDYGTETTLLPFTGAATDLPPPKEIPTENETSSEEEETSQQELLRLRRKQKQLKQRILQLLDIQNSE

SEQ ID NO: 3215 - protein, 95 aa, Betatorquevirus sp.
MNIIKPTISIKHQKKEWINLLVHVHDLQCRCDKPLEHTADIIFEEPALRLEKSTIDNIKKCQDTTAITPVADALDGIDEGDLSALFAEDFTEENG

SEQ ID NO: 3216 - DNA, 2874 bp, Betatorquevirus sp.
cgggagccgaaggtgagtgaaaccaccgaagtctaggggcaattcgggctaaatcagtctggcggaacgggcaagaaacttaaatataactttattttttagatatgttctcttcatggaagacacctacatggtcacagagacaacaagaactccaatggatgaacatcattaacgctacacacgaccaattctgcaactgcgacaaccctacatttcaccttatctactgcattaacaaattttcttcagctcctaaacctgaaaaagatcttgctaatattcaatgcctccttactggcgtccccgttactacaaacaaagacaaagaagaagacgaccaaggtggtttcctagacggagaactagaagatttattcaaagaagaaaatggagaaaacatcgccactacttcagacgcaaggtcaaaagacgccttcgttctaaaaaaccaaaaaaagtaactgttaaacaatttcagcctacttctatgcaaagatgtaaaattataggatataaatgcttgtttcagggaagtacaaaaaacttacctaccaactatattcaatatatttacagtactattcctccatactggccagggggaggtggatggagtataattgttttcagtttaacctctttatttgaagactgggaacatctagaaaatatctggactaaatctaatgttggattaccattagtgaaatatagaggctgtgtactaaaattttatcaaagttatgatacagactacatagcagtttatgacagatgctggccaatgatagatacagacttaacacatccagacagctgtccaagtagaatgttacaaaagaaacataaaacagtaataccttccagaaaaacacagacaagaaaaaaaccatacaaaaagattttcattccaccaccagcacaaatggaaactcaatggtactttcaaagagacatatgcaaactacctttatttatgttaacaacaaccagtgttgacttactttacccattttgctcaccacatgccaaatctaacaatattaccataccatgcctaagctcatttgtttttcaaaatttaaactttgttgactacggtacaacaggatactcaccaaaaaataagtctccaacagaaaacacaccactatatttgtatgcatcacataatgataacataactgacttaaaaccaaccagcataaaacaattaattccactgataaacacaagagattatcaaccaggaaatccaatggcaaacactgcttgggaaaataaaccagaaaactggggaaatcccttttactatagctacattacagacaacataactgatgatacatatacaatttacattactgccactaatacagcaaccatgaaaaacggaatacaagatgacatttccaaaaataatacaattaccaaactaacaggaccattaatttactactgcagatacaaccctgctaaagacaaaggcgacacaaacaaaatgtacctagttagcaccagtacacaagataaaactataacaccacctgcaaacacaaacttacaaatagaaggcttacctctatttgtactaacatggagttggacagactgggtcattaaagctaaaataaccccagacataaacaaatacagaaccctagttatagaaacaaaaatgctagaaccagaactctcacactatataccaatagacacagactttttgcaaggaaaagacccctacacaccacaacaaacagaaggagtaccacactcacccaacttttacaactcaaaaaactggcacccaaaatttatgtttcaacaacaaacagtaaaaaacatagcaatgtcaggaccagcagtacacagagacaccaaccactcatacattcaagcatactgcaaatacaaatttttatttacatggggaggatgccctaaacaacttccaaaaccatttgaaccttgcttacagccaaaatggaccacagccaataacatctctggaagacttgaaatcacgaatcctaacacacaaccacaaacagaactgtacgcctgggactgggaagaagattttattaaaacacaagctatcaaaagagttacagaatacacagaaactgataaaccaactttcttctctacagcaaacaaaaacaacccaaaagtactcgtcaaagtccaagaaaaagaagacccagcagagaaagaggagaaagagatattccagcagctccagcagctccgactccagcgacagcagctgcagctccaaatcaacaagtgcctaaaattttaataaaagactctaaaatacgagtacacttatttccacccttagcaaaaaataggagaatgacaccatgggaaaaagcacaagaaaaagaagacgcagctatatggaaaagaccacaaagagactttatttttgatctacccttttatcccggtataccccctacacctttagtaaactttgacttaaaatacaaatatgaataaacaaggccaacattaattcactctcggtgtccttttatttaagtaaaaacctatataaacatccaccgcctccctataattcgggcgccaaaattcaaagggggctccgcccccttacacccccaagggggctcaacaggaaaaccacataattagaattgccgaccacaaaccgtcacttacttctgctttttaacaaacttcctctttaacttattattattcattacattaattaataatcaccgtaaatccggggcggtaccaccaaactatataaccaactacacttccgaatggctgagtttatgccgccagacggagacaggatcactacagtgattccgggctgattttggg

SEQ ID NO: 3217 - protein, 674 aa, Betatorquevirus sp.
MPPYWRPRYYKQRQRRRRPRWFPRRRTRRFIQRRKWRKHRHYFRRKVKRRLRSKKPKKVTVKQFQPTSMQRCKIIGYKCLFQGSTKNLPTNYIQYIYSTIPPYWPGGGGWSIIVFSLTSLFEDWEHLENIWTKSNVGLPLVKYRGCVLKFYQSYDTDYIAVYDRCWPMIDTDLTHPDSCPSRMLQKKHKTVIPSRKTQTRKKPYKKIFIPPPAQMETQWYFQRDICKLPLFMLTTTSVDLLYPFCSPHAKSNNITIPCLSSFVFQNLNFVDYGTTGYSPKNKSPTENTPLYLYASHNDNITDLKPTSIKQLIPLINTRDYQPGNPMANTAWENKPENWGNPFYYSYITDNITDDTYTIYITATNTATMKNGIQDDISKNNTITKLTGPLIYYCRYNPAKDKGDTNKMYLVSTSTQDKTITPPANTNLQIEGLPLFVLTWSWTDWVIKAKITPDINKYRTLVIETKMLEPELSHYIPIDTDFLQGKDPYTPQQTEGVPHSPNFYNSKNWHPKFMFQQQTVKNIAMSGPAVHRDTNHSYIQAYCKYKFLFTWGGCPKQLPKPFEPCLQPKWTTANNISGRLEITNPNTQPQTELYAWDWEEDFIKTQAIKRVTEYTETDKPTFFSTANKNNPKVLVKVQEKEDPAEKEEKEIFQQLQQLRLQRQQLQLQINKCLKF

SEQ ID NO: 3218 - protein, 119 aa, Betatorquevirus sp.; identical to SEQ ID NO: 3036

SEQ ID NO: 3219 - DNA, 2873 bp, Alphatorquevirus sp.
gaggagtgcgaggtgagtttacacaccgcagtctaggggcaattcgggcacgggtctggccgggcaatgggcaagattcttaaaaaatttccccgttctgtgctccggcaggacaccaagtcatgccgtggtctccgccgagacataacatcagaacgagagaggatctgtggattcaatcagttatttattcacatgacactttttgtggctgtaataatattcttgagcatattactggcctcctgggtggcctacaaccagctccacctagagacccagcaccccctaccatccggagcctgccggcactgccgccagctccgcaaccccctgaacaactacggcgtggtggagatacagacggaggccttggagaagatggaggagacgcaggtggcgcctaccaagaacaagatctagaagaacttttcgccgccgcaagagaagacgatatgtgagtagatggcggcgccgccgatacaggcgcagactcagacgggggcgacgaaaaaggggacgcagacgcagacgcagaaagactttaatattaagacaatggaacccagacgttatcaggagatgctttataacagggtggatgccactcataatatgtggcaccggacacatacaatataactttatcacccaccaagacgatctgcctcccgccaagagcggatacggaggcaacttcacaaacatcacattctcactagccagcctctatgaggagctcatgcaccacagaaaccactggtctaaatccaactatgacctagaactagtcagatacctcagcactactataaagctatacagacacgaatcagtagactacatagtcagctacaccaccacaggccccttcgagacaaatgaactctcctacatgtccacacatccactgttcatgctactcagtaaaaaacatgtagtagtacccagcttaaaaactaaacccaaaggcagacggtggataaagctaaagatatcaccaccaaaactaatgctaaacaagtggtactttgcccatgacttttgtaaaataggcctcttccagctgtgggccacagcctgtaacctttcaaacccctggctcagatcaggcacagacagcccctgcataaccttctatgttctaaaaaaccaagtgtacggaaacagaatgtccaacctagcacaagactctagtaaagacgaaagaaaaaacgcatataaagagctgtggccaacaactacatcaactgataacaattggtaccaatggcaatatacatacctaaaacctatgaaaaatatttactatcaagccgccaacgaacaaactaataaaagtgagatgcaaggcaaaacatataactggcaaaactataaaaactactttacaaaagtaaaaactaaatgggatagtatacaagaaagtaactatgaattagtaagaaaagaatacaataacatatacacaaccagcgccacatggcctcccagttgggacaacagacaatacttagaacatgactgtggcatattcagcccctactttctatcccctgacaactacacaccagaatggcacacagcatactcatctgtcagatacaatcctctaacagacagaggcataggcaacagaatctgtctgcagtggtgcagcgaggccagcacagactaccagcccaccaaaagcaaatgcatgatacaagacctgcctttatacataatgtgctatggttacctagactactgcatcaaagagctaggcataaagtcagcctggacagacctcagagtagccattagaagcccctacactgatccaaaactaataggatcttcagacaaaaccatgtttattccaatatcagaaacattcatgagaggagacatgccccacaaactaccctacataccagtaaagtggtggtttaagtggtatcctatgtgcacacaccaggcttccgttcttgaagcaatagtttcctgtagtccgttcatggtcagagatcaagatgccaacagttgggacataaccatgggctacagctcaaaattcttatggggcggctcccccttaccttcacagcctatcgacgacccctgccaaaaaaccacccacgaccttcccgaccccgatagaaaccctccacgaatacaaatcgcagacccgcaagtgctcggaccggcgacgctcttccactcgtgggacatcagacgtggactcattaacactagagctattaaaagagtgtcagaatacgcggatactaacgaacatttttcaacaggcgtcgagttcaaaagaccccgactggacactccccaccaaggacagcagctatcaaaccaagaagaagacgccttgtctatccttcgccaactccaagcagaacaagaagagaacacgtcgtcggaagaagaacaagcaccccaaagccaagaggtacaaaaagagaaaatactcaagcagctcagagtccagcgacagcagcaacacctcctcagacagggaatcaaacagctcctgggagacgtgctcagactccggaaaggagtccactggaaccccagcctataataattccagcagatcctataccagatctcttgttccccagtactaaaaaaaaacgcaaattttctcccttagactgggagaacgaggctcaaatagcagggtggttagacagacctatgaggctgtatcctggggacacccccttctacccgtggctaccccgcaagcccgttacccaacctacatgtaaagtaaccttcaaaataaagctagatgattaacttgcaaggccgtgggagtttcactggtcggtgtctacctcttaaggtcactaagcactccgagcgccagc

SEQ ID NO: 3220 - protein, 659 aa, Alphatorquevirus sp.; identical to SEQ ID NO: 1046

SEQ ID NO: 3221 - DNA, 2873 bp, Betatorquevirus sp.
cgggagctgaaggtgagtgaaaccaccgaaatctaggggcaattcgggctagatcagtctggcggaacgggcaagaaacttaaataatattatttttcagatgagcaaatttctacaagaacctatttactccaaaagaggactacaaaatcaatggattaacctaatttacacttcgcatgatatgatctgtggatgcaacaatccaattgatcacctacaagacatcttaaaacaacaaaaatgcctcccttcaaccgccgccgctacggctacagaagatggtggaactacagaaaacctagagcctactatcgacgaaggagatttggaaaagctgttttcagaagaaaacgacgtagacgaagggtaagaagaaaaaacttttttaaacataaaaaaactaaaactgttaaaataagacaatggcaacctactagcattaaaaaatgtaaaatacaaggctacctatgcatgtttcaagcaggcccaggtagatatggaaataactatgctctatggaaagaatcattctttccacaacattatcccggaggcggaggatggagtatacaacaattaagtttgggaactttatttagagaacacacagaatatatgaactattggactaaaagtaatgatagaatgaacctatgtagatatatgggatgcagtatacaactgtttagagaaccatatactgactggatatttacatactttgataatattcctaaaactgtaaacaaatggttttatgcttcacaccaccctataaaacttttaacaacaaaaagaaaaagaacaatccctagctttcaaacccaaccacataaaagaaagccatataaaaccatgtttataccacctccaaaactaatgaaaaaccaatggttttttcaatctaacctagcagactatccccttataacatttgccgcctcagcatgcagtttaacaggaatgtttggcagcacaaaatcaattagtaacaacgcaacattttactgcctagacactaaacaatttacaacaccaacatttcaatggagatccacaacaccagaaacagaatggggatacacatacggcacaaactacctatacggcctacaacatgcatatgaaacatggacacaaaataaagacatagatggaacatatttaggaaacacaatgaaacaacaaagtggaataccaatgacacaacaaacaacagccacatatacagtagacaaatggggaaaccccttttactggcaatatgcatcaggagactatccactttttacctcaacaaacacaccaaaagaaataatagaaagtaaaggaaaacccctaacagaaggccaaaagaaggactcacactatatatttaaagctagatacaatccatttcatgacaaaggaaaaggcaatgtagtatactttttaccaacttatgacaaatccaaaacagactgggaaccactatcagaccctgacttaaaatttgaaaactttccactatggttaacatgctggggaattgaagacattttaaaaagaatgggaaaatgtcataatttagatatggactgggtaatggtaataaaatccagctatattttaccacctgaaaaagcatatgttatattaagctatgactttgtacacggaaggggaccatatgatacagaaaaagaatttatgactactgatgacttaacacactggtacccaagatttaaatatcaaagacaagctatagacaacttaataagaactggtccagctgtagctactggagataatgtacaaaatatacaagctaaaattaaatacaactttttctttaagtggggaggcaactcatcaccacaagaaactattcgagatcccaacagccaacccatcacccctagtcccgataacatctacagcaacaatgaaatcattgatccgtcaacagacattacatcagaaatatacccatgggactttagacgacatctccttacagaaacagctacagaaagaattaaacaaagcccaactaatgaacaaattatgtttacagatggaagacaaactgcaacggacctccccctgcaaacaaaaacacaagagaaagagacccaggaaacacaagaaaagacattactccagcagctcaaccagctccaacaatacaacctgcaactccagcaccgactccgaaagctaaaacaattatctatggacctataaaccgtgtagaattgtttaaaactaaacgtaaaaataggagactaactccttatgaagcagaaacagatctgcaattagcaaaatggttacatagacctttaagacaatattttgatgatccccctttttacccatggttaccgccagcaccaaaagtttgctttgaccttgtaaaaggatttaataaaggccagcattaattcacttttggagtctgtttatttaagtttaaacttatacaaacatccaccgcctccctaatacgcaggcgcacaagggggctccgcccccttaaccaccgcctccctaatacgcaggcgcacaagggggctccgcccccttaaacccccgggggggaaaccccccccctaacccccccaaaaaaccacaaaattagcattgccgaccacaaacggtacaggaaaccacaaaatttgcattgccgaccacaaaccgtcatttacttctcctttttacaaaacttccttttttactaattattattcattaaattaattaataaacaccgtaattccggggaggagcaaacactgtatataactaactacacttccgaatggctgagtttatgccgccagacggagacaggatcactttagtgactccgggctgatcttggg

SEQ ID NO: 3222 - protein, 662 aa, Betatorquevirus sp.
MPPFNRRRYGYRRWWNYRKPRAYYRRRRFGKAVFRRKRRRRRVRRKNFFKHKKTKTVKIRQWQPTSIKKCKIQGYLCMFQAGPGRYGNNYALWKESFFPQHYPGGGGWSIQQLSLGTLFREHTEYMNYWTKSNDRMNLCRYMGCSIQLFREPYTDWIFTYFDNIPKTVNKWFYASHHPIKLLTTKRKRTIPSFQTQPHKRKPYKTMFIPPPKLMKNQWFFQSNLADYPLITFAASACSLTGMFGSTKSISNNATFYCLDTKQFTTPTFQWRSTTPETEWGYTYGTNYLYGLQHAYETWTQNKDIDGTYLGNTMKQQSGIPMTQQTTATYTVDKWGNPFYWQYASGDYPLFTSTNTPKEIIESKGKPLTEGQKKDSHYIFKARYNPFHDKGKGNVVYFLPTYDKSKTDWEPLSDPDLKFENFPLWLTCWGIEDILKRMGKCHNLDMDWVMVIKSSYILPPEKAYVILSYDFVHGRGPYDTEKEFMTTDDLTHWYPRFKYQRQAIDNLIRTGPAVATGDNVQNIQAKIKYNFFFKWGGNSSPQETIRDPNSQPITPSPDNIYSNNEIIDPSTDITSEIYPWDFRRHLLTETATERIKQSPTNEQIMFTDGRQTATDLPLQTKTQEKETQETQEKTLLQQLNQLQQYNLQLQHRLRKLKQLSMDL

SEQ ID NO: 3223 - protein, 104 aa, Betatorquevirus sp.; identical to SEQ ID NO: 3135

SEQ ID NO: 3224 - protein, 62 aa, Betatorquevirus sp.; identical to SEQ ID NO: 1309

SEQ ID NO: 3225 - DNA, 2873 bp, Gammatorquevirus sp.
ttccccttttacacagtaaaaaggggaagtgtctaggggcaattcgggctagggcagtctagcggaacgggcaagaaacttaaatataaatttgttttacagatgaccaactactctgcctcacacttttttaaaccaactccttacaacaatgacaccaaaaaccaaatgtggatgtccatgatagctgatgggcatgactgtatttgcaactgccctagtccttttggccacttgcttgcatctatttttcctcctggtcatcaagaccgtgatcttacaattgaagctattattaatcgagatatacaagaatgcctttctggtggaacagaagaaagaggtggtggaggggtcgccgcagaccatactacaaacgcagatttaactacaaaaagagaagaccaagaagaagattttacagaagaaaacatagaagaactcatcgccgccgcagaaagcgcttcacaaaggtaaggagaaaaagaaaaaccttacctctcaaacaatggcaaccagagactatcagaaaatgtaaagttaaaggcatagctgttaatacattgggtgtagagggtacacaatatagatgctatactcctaacaaatatgaatatacaatagctaaacaaccatcaggtgggggtataggagtagagagatataccttagaatacttatataaagaacacaaagctggaaataacatatggacagcctccaatgtaaacttagatcttgtaagatatacaggctgttgctttaaattttggagacacccacatatagactttattggtatgtacagtagaaactacccaatgcaactacaaaaatatacatatccagactcacatccacaacaaataatgctatccaaacacaaattttttatacctagcttactatctaagccaacaggcaaaagatatgttaaggtaaaaattaaaccacccacacaaatgatcaacaagtggttttttcaagaaggattctctgacacaggactagttcaaatacacactgctgcagctgactttagatatccacacttaggctgctgcaacaccaatcagttagcaagctttctaacattaaatactgacttctaccaatatgcagcctggggcaacaataccaatccatatatatcaactgaattagacaaatggtacagaccatatagaatggctgaaccagtaacagaagtagaagatgtcaaaggtaacaaaaaagaaattacaactaaatttacaccatacaaggacacaattaactatacaacaggttggtttcaaccagcattactacaagctaaatctataacaaaacctcaacaagcaaatccacctctaaaaggagccagatacaaccctaccttagacacaggtgaaaacacatctgtatggttaactagtgtactaaacaaatcatactatcctccaaaaacagacttagatctatacttagacggcctgccactgtggcaattactactaggatttttagactgggttagacaaaagaaaagagacccaacatttttacagtcatattacctatgctttcactgtgattctattgaacccaaaccaggaatacaccaagtatttattccagtagattacagttttgtacaaggcaaaggaccttatgattctttactaagcacctgggacacagaacactggtatccaacattaaaacaccaaatcaaatctattaactctatagttgaaacagggccctttattccaaaattagacacactaaaaaactctacatgggaattatattcaaactacacattttactttaagtttggaggtgcatccttacctgaagcagaaacaaaagatccagccacacaaggaactcatgaggtacccgataaacaatccaaaacaatacaaattattaacccgcaaaaaaacactgcagcagctgccatacactgctgggactttagaagagggcacattacaagcagagcttttaagagaatgtgcgaaaacgcagaaactgattcagatttccaagcagatgtgccatcaaaaaagaaaaagacatcactccaagaaaacacactgccatgcatcagcaaagaagcagaagaagtccaggaatgtctccagagtctctacaaagaagatatctcccaagaattccaagagccacacaacatccagcagttcctacagcagcagcagcaacaacagcagcaaacaaagctccagctcctccagctcatcaacaacctaaagaaaaaacagaaactaatacaacttcaaacaggcatcctagactaactccctttaaaccaggctttgagcaacaaacagaacaagagttagcatgtgcttttaaaagacctgcaagaaaatttaaagaagataccccattttacccatggttaccacaaatcactccccttgtaaactttcatttaaattacaaattctaggccggcaactttcacttagtaactgatgtttaataaagtttaatccccaaaaaaaaaaaaaaaaaaaaaaataaaaaattgcaaaaattcggcgctcgcgcgcgctgcgcgcgcgcgagcgccgtcacgcgccggcgctcgcgcgccgcgcgtatgtgctaacacaccacgcacctagattggggtgcgcgcgctagcgcgcgcaccccaatgcgccccgccctcgttccgacccgcttgcgcgggtcggaccacttcgggctcgggggggcgcgcctgcggcgcttatttactaaacagactccgagtcgccatttggccccccctaagctccgcccccctcatgaatattcataaaggaaaccacaaaattagaattgccgaccacaaactgccatatgctaattag

SEQ ID NO: 3226 - protein, 664 aa, Gammatorquevirus sp.; identical to SEQ ID NO: 2808

SEQ ID NO: 3227 - protein, 124 aa, Gammatorquevirus sp.; identical to SEQ ID NO: 2809

SEQ ID NO: 3228 - protein, 123 aa, Gammatorquevirus sp.; identical to SEQ ID NO: 2810

SEQ ID NO: 3229 - DNA, 2873 bp, Betatorquevirus sp.
cgggtgctgaaggtgagtgaaaccaccgaaatcaaggggcaattcgggctatggcagtctagcggaacgggcaagaaacttaaaatataactctttttacagatatgagcaaatatagatgtccacctttatataatggaagagctttagatcaacaatggcttaatactatttttcaaactcacgacttacactgcggctgcaacaaagtaattgatcaccttagatcaattttaccaccacaagaatgccattccgttggaactacaaccgaaattactggagacgccgataccaatatggacgccgcccttacagaaaaagatttagaagaaatcttcgcaaaagacgataccgccgacgaaactgggtaaggagacgccgtcgaaaattttataaaaagaaaaaactaagaaaaattaaaataactcaatggcaacctaatcacattagaaaatgtacaattactggattttatcccctatttcaagcagcgcatggacgcttttcaaataattttacaacgtggagagaaagctatactccagaatatgaacctggtgggggtggctggagtgcatttcaatttactttagactgtttgtatacagaaaaccaattgttaaataactggtggtccactagtaacaaaggtttaaatttatgcagatttagaggtgtaaaagtaaaattttacagacaacctgaagttgactatgtagtaacatacaataatgaatggccttttgatatgactaaatatcactatatgagtgcccatccacaacgtttactaacctacaatcataaagtaatagtacctagcataaaaacaatgccaactaacaaaaaaccatactataaaaaatttattagaccacctaaagaactcatagatgaatggtactttcaacaaaaatttgcaaaaacacccctagtaatgtttattgcaagtgcatgcagcttacaacacttttacatagcaaacaatgtagagagtataaatattacagtacactcattaaatactaaaaaatttgtatacaaagattttaacacagaaaatacacaaggatatcaaccacaaccaggatactacttatatgcatctcaagacatacaaaattctgcttcaaacatacttcaacaaaacacaatatatttaggaaactcaaaacaatttacagaaggtgaaacaattaaaaaatcaggtgtacagaccgtaactaattacaccaaaaactactggggtaatccttttcacccagattatatgctaggagaaattaaaacaattcaatccagtacacagtatacaaatttattaaataatttcaaacaacaaacatccaaactaggagacacagcacaatatactacagaaccattttacatttctacaagatataacccatacaaagataatggagttggaaataaagcatactgggtaaaaaacacacaaagagacaaaggatgggaacacatgggagacccagacttaatagttgaaggatttccactatggatactgttatggggatgggaagattataccagaagattagctaaaatacataacttaaaccaagattatatattagttatagtaacaaaattttttgatactaaccttgactactatgtactattaagtgaagattttatacaaggaaacgggccttatggcctacccataaaagaagtagcaccttctcaattagctcactggtatccacaatggaaattccaaaaacaagctatagaagacatatgtaaaacaggtccaggtgtatgcagagcagaaactcaaaaacaaatacaagctcatttagaatataaatttctttttaagtggggcggcaacccagcaaccatggaaaaagtctacaatccgatacaacaaccaacataccctagaccctttggattcaacgcggaaaatgaaatcgttgatccaaacacatcaattaaagactatatctacacctttgatgtccgacgacatttccttacacaaacagctacaaaaagaattcaacaaagctcaacagatgacttctctttgttcacagatggagagccagctccaaaaatgtcaaagttcgaaatcccagtccaaacgcaacaagcacaagaggaatcctcggaggaggaaaaaacccaaacaccgctacagcagcagctcgagttctacaagcaacacaaccaactcctccagcagcgatacagacaattgaaaactattctggaaaccgtagagtaatgaaatgtgttaaatatgcaaaattgtttgatgataaaccacctaaaaacaggagatttactcctgaagaatttgtagatgaattacacttatgtagagctttcaaaagacaccctcgtcatttcttttatgacaaaccattttatgactatgttgtacctgaacctcttgtaaactttaaacttaacttcactgaataaaggcctgcattaattcaccctcggtgtccatttatataagtaaaaacttaaataaaccaacaccgcctccctaaaacgcaggcgcacaagggggctccgcccccttaaacccccagggggggccccccccatacgtcacaaaccacataatttacattgccaaccacaaacagacaaaaaaccacaacttctgcaaattattaaccacaaaatttgcattgcccaccacaaacgaacatgcaaatttagttccttaaagtacacactacttccctaaaaattaattaataatcagtgtcataaaggaggagccacacactatatataagtaactatactgtcgaatggctgagtttatgccgctagacggaggacagatcacacagtgactctggactgccatcggg

SEQ ID NO: 3230 - protein, 672 aa, Betatorquevirus sp.
MPFRWNYNRNYWRRRYQYGRRPYRKRFRRNLRKRRYRRRNWVRRRRRKFYKKKKLRKIKITQWQPNHIRKCTITGFYPLFQAAHGRFSNNFTTWRESYTPEYEPGGGGWSAFQFTLDCLYTENQLLNNWWSTSNKGLNLCRFRGVKVKFYRQPEVDYVVTYNNEWPFDMTKYHYMSAHPQRLLTYNHKVIVPSIKTMPTNKKPYYKKFIRPPKELIDEWYFQQKFAKTPLVMFIASACSLQHFYIANNVESINITVHSLNTKKFVYKDFNTENTQGYQPQPGYYLYASQDIQNSASNILQQNTIYLGNSKQFTEGETIKKSGVQTVTNYTKNYWGNPFHPDYMLGEIKTIQSSTQYTNLLNNFKQQTSKLGDTAQYTTEPFYISTRYNPYKDNGVGNKAYWVKNTQRDKGWEHMGDPDLIVEGFPLWILLWGWEDYTRRLAKIHNLNQDYILVIVTKFFDTNLDYYVLLSEDFIQGNGPYGLPIKEVAPSQLAHWYPQWKFQKQAIEDICKTGPGVCRAETQKQIQAHLEYKFLFKWGGNPATMEKVYNPIQQPTYPRPFGFNAENEIVDPNTSIKDYIYTFDVRRHFLTQTATKRIQQSSTDDFSLFTDGEPAPKMSKFEIPVQTQQAQEESSEEEKTQTPLQQQLEFYKQHNQLLQQRYRQLKTILETVE

SEQ ID NO: 3231 - protein, 89 aa, Betatorquevirus sp.
MSKYRCPPLYNGRALDQQWLNTIFQTHDLHCGCNKVIDHLRSILPPQECHSVGTTTEITGDADTNMDAALTEKDLEEIFAKDDTADETG

SEQ ID NO: 3232 - protein, 66 aa, Betatorquevirus sp.
MKCVKYAKLFDDKPPKNRRFTPEEFVDELHLCRAFKRHPRHFFYDKPFYDYVVPEPLVNFKLNFTE

SEQ ID NO: 3233 - DNA, 2873 bp, Alphatorquevirus sp.
ggctcgggactggccgggctatgggcaaggctcttaaaaaagcatgtttctcggcagggtctggagaaagaaaagggcgctgctactgcccgagctgcgaactcctgcgaaaaaaccacctctaatgagctggtcccagcctgtccacaatgtcaccacccgcgagggcttcttctacgcgggctgtaagcaacttcataactgcttttgtggttgtgatgattttattaatcatcttcttcgcatccagacccagcagggtccttccccggggacctccactcccagaacaccgccactcgctgtgatccgtagagccctgccggcaccggcggctccggagccacccgcagcatggcgtggagctggtggtggacccgccgccgacgcagaccgtggacccggaggagatggaggagactacgcacccggagacctagacgacctttacgccgccgtcgacgccgaaaacgcagagtaaggaggagacggtggggaaggagacgagggcgacggacattttacagacgcaaatttagaaagagacgcaggcgacgaaaaaagctagttttaactcaatggcaccctcagactattagagcatgttctataaggggctcagtgtgtttagttatgtgtggtcacacaaaagcaggcagaaactatgccctgcactctgaagactatgtcccccaagtgcatgccatgggagggtcctttagcactaccacctggagcctaaaagcactgtatgacgagcaccaaaaattccataacaggtggagctaccctaacacccagctagacctagccagatacagaggatgccgctggtggttttacagagaccccaaagtagactatattgttacctactacactacacctccatttaaacttaacaaatacagttgtcccatgctacaccctggcatgatgatacagtacaaaaaaaaaatactagtaccaagctatcaaacaaaaccaaagggaaaaggcagaataagtgttttcattaagcccccaactctttttgaggacaaatggtacacccagcaagacctctgtcccgttaatcttttgtcacttgcggttagcgcatgttccttcctgcatccgttctgcccaccagaaagtgacaacatgtgtattacattccaagttttgaaagacttctattaccaacagatgggtgttacacaaattagtggcacaacactaactgaacctgataatacaatttttaaaaaactttatacaactgcatccttctggcagtcccaccacacatcagcacagttaaacacatctcaaaaaccaggcaagctaggctcatctccaatacctgaaacagactggcttcaaggagacggtacaaataaatttagaacaggaaacaatagtatttatggccaaccaaattataaacctcattataacaaattagaagaaatcagaaaatggtactttaagcaagaaacagaaacaaatgatgtacactcatcctatggccgtcctatatacaatgcagtagactaccacgtaggaaagtacagcatgatatttttaagcccatacagaaccaacacacaatttgaaacagcatactcagacattacatacaacccaaacacagacaaaggactaggtaacaaaatgtggattcaatctgttactaaaacccacaccaaactagactcctcatgtagatgcctattagaagacattccactgtgggccatggccacaggatacggagagttctgtgagtcagaaattaactcagaggtatggaacctatatattatatgcattatatgcccttacactaaaccaccactatggaaaaaaacagaaactcctgaaggctgggtattttatgacacactgtttggagatggcaaaatgcccaccgggtcaggcctagtacccgtgtggttacagagcaggtggtaccccagactagtgttccaacaacaggtgttacacgatatctacctcacagggcccttcagttataaagatgacctaaagagctttactataaatgccagatacaaattcaaattcttatggggcggcactataatccccgaacaggttattaaaaacccgtgtaaagagcaagactcgccattcacctttaccggtagacagcctcgcgacctacaaattgctgacccacaaaccatgggcccagaatgggttttccacacctgggactggcgacgaggactatttggtcaaaatgctctcaaaagagtgtcagaacaaccaagcaatgatgcagactattatgctccaccaaaaaaacctagactattccctccaacagagctccaagagcaagaaaaaggctcagatttcacagtccacgaactcaggatcctctcggagagggcgccgtcgcaaacaagcgaagaagaggacccgcaggaggagcaccagctccagcagcaagagctccagctcagactccagcagcagttcagaatcaggcagcaactgcagcacctattcgtacaagttctcaaaacccaagccggtctccatataaatccattattcttaaaccctgcataaaccaggtgtttatgtttcctcctgacacccctaaacccattaccactgcagaagattggaaacaggagtatgaatcctgtaagcactgggatagaccccccagaaagtaccttacagaccgccccttttacccctggatgcccagggagccccctcagtgccatgtcagctttaaacttggcttccaataaaatttcaaggccattcaaatttcacttgtcggtgtctacctctataagtcactaagcactccgagcgccagcgaggagtgcgacccttccccctgactc

SEQ ID NO: 3234 - protein, 742 aa, Alphatorquevirus sp.
MAWSWWWTRRRRRPWTRRRWRRLRTRRPRRPLRRRRRRKRRVRRRRWGRRRGRRTFYRRKFRKRRRRRKKLVLTQWHPQTIRACSIRGSVCLVMCGHTKAGRNYALHSEDYVPQVHAMGGSFSTTTWSLKALYDEHQKFHNRWSYPNTQLDLARYRGCRWWFYRDPKVDYIVTYYTTPPFKLNKYSCPMLHPGMMIQYKKKILVPSYQTKPKGKGRISVFIKPPTLFEDKWYTQQDLCPVNLLSLAVSACSFLHPFCPPESDNMCITFQVLKDFYYQQMGVTQISGTTLTEPDNTIFKKLYTTASFWQSHHTSAQLNTSQKPGKLGSSPIPETDWLQGDGTNKFRTGNNSIYGQPNYKPHYNKLEEIRKWYFKQETETNDVHSSYGRPIYNAVDYHVGKYSMIFLSPYRTNTQFETAYSDITYNPNTDKGLGNKMWIQSVTKTHTKLDSSCRCLLEDIPLWAMATGYGEFCESEINSEVWNLYIICIICPYTKPPLWKKTETPEGWVFYDTLFGDGKMPTGSGLVPVWLQSRWYPRLVFQQQVLHDIYLTGPFSYKDDLKSFTINARYKFKFLWGGTIIPEQVIKNPCKEQDSPFTFTGRQPRDLQIADPQTMGPEWVFHTWDWRRGLFGQNALKRVSEQPSNDADYYAPPKKPRLFPPTELQEQEKGSDFTVHELRILSERAPSQTSEEEDPQEEHQLQQQELQLRLQQQFRIRQQLQHLFVQVLKTQAGLHINPLFLNPA

SEQ ID NO: 3235 - protein, 145 aa, Alphatorquevirus sp.
MFLGRVWRKKRALLLPELRTPAKKPPLMSWSQPVHNVTTREGFFYAGCKQLHNCFCGCDDFINHLLRIQTQQGPSPGTSTPRTPPLAVIRRALPAPAAPEPPAAWRGAGGGPAADADRGPGGDGGDYAPGDLDDLYAAVDAENAE

SEQ ID NO: 3236 - protein, 59 aa, Alphatorquevirus sp.
MFPPDTPKPITTAEDWKQEYESCKHWDRPPRKYLTDRPFYPWMPREPPQCHVSFKLGFQ

SEQ ID NO: 3237 - DNA, 2872 bp, Betatorquevirus sp.
gacgggatcacttcagtgactccagccgtagtctaggggcaattcgggctagttcagtctggcggaacgggcaagaaactaaaaatatttatttttacagatgagcaaatactataaaaaaccttcatacagcgcccgccatcaacaactacaatggattaatactatggtttctttacatgaccttcattgctactgcgacaaacctcttaaccatataataattgcaatactggaccaagaaccaactatacaatttgataaagaagactccaaaaaaattcaaaaatgccttactattaccgatggagaagacgtcctagacgactttggcgacgcagaactagaaaagctattcgcagaagatatagatactacagacgatacccctggcgcaactactgggtaagaaaacgaaaaagaaaattaaaaaaaattgttattaaacaactgcaacctcgtaccattagaaaacttaaaataacaggaaatattccactttttgaatgtacttctgaaagaataggaaataatatgactcaagtattagaatccagggcaccacacaactatccgggaggtggctcctttagcttaaacttatttacttttgaatctctttatgaattacacagaaaagcaagaaactggtggacaacttctaactgtaatttacctttgttaagatacactggatgtaaatttacactatacagacctataactgctgattatatatttttttacacaacatgtggtaaattagaagcaaacttagacttataccaatcagctcaaccgagtattttaatgctgaacaaaaacaaaagaatcatcacatgcaaagaaaacaataaccacaaaagaccctacaaaacagtacacattaaaccaccagcactatggtctaataaatggtacacacaacaagaaatagcaaaaatgccactactactaacagtaacatctgcagcttcactagacagattttacatatcagcacaagccaaatcaaacactataggctttacgagcctaaatacagatacattccaatttcatgattttaaagtaccaccaacaacaaccggctatgtaccaaatgaaaaacaactattatttacagtacatccatggttaggtgacctaactaaaacatattggggtaacttaatatacttaggaaacacaaatgaagacctaaaaggtacttcagtgaatgaaaaaccaacacacgtaagagagtggaacacttggatagacacctgggcctccaacaaagaatactggggaaacccctttcactcacaatacttacaacaagaccaccaacccatacttattacaaacaaaacaatatcatacataaaatcaaaactaaaaaccttaggtgcagagagtgtaaaaacaacaccattagaaacagattttgcacaaaagaccattccacagctctgggactgcagatataacccagaagcagacactagtcacaatgcagtattctttgcaaaaataacacagggacatgatacatggaaagaacccacagaagaaagattaatatgtaaaggtttacccttatggtatttattacatggttttgttgactttcatgctaaagcactggacatacaaagacttgaaactgactgggtactatgtattgttagcgacgctataaccccaaaaaaagactactatgtcccacttgactactggtttttaaacggacaaagcccatacgagactgaagaaggacaaaaaacaatttatgacgcctttaactggcacccaaaagtaaactttcaaaaaagtactatatcaaaaattaatggaactgggcctgcaacagtaaaactacctgacaatataagctgcgagggtcatgcaaaatatacattttactttaaacttggtggatgcccaccaccaatggacgaagtgtgcgaccctgcaaagcaacctgactttcccagacctactaatttcctacaaacacctatattacaggacccagaaactcccatacaatactatctccaatcctctgacgaaagacgtggactgcttacaaagacagctgcaaaacgcctcaaaacagactggttcactacagaaactttatttacagctccaaaacagagttcactcgacctcccagggccgcaaaaagaaaccagctcggacgaagagacatcggcagaggaaaaagacccggagacactacagctccaactcaagctccaccgccgaaagcagcgaaaactccagcagcgaatcctcgacctcctaacaatatctcaaactttgtaataaaagaatgtactgttaaagcttacttatttccaaaacctaaaaaaaaccgtagatttacccctgaagaatttcaaactgaactagaaatatcaaaatggttacatagacctcctagaacatttataaatgatcctcctttttacccctggttaccaccagaacctgttgtaaattttgatttaaactaccattaaacaaggccagcattaattcacttagtggtgtctgtttatttaataaaaaactttaataaaccaacaccgcctccctaacacgcaggcgcacaagggggctccgcccccttaaacccccagggggggataccccccctaaacccccccaaaaaccacaaaatttacattgccaaccacaaacgaacaggaaaccgcaaaatttgcattgccgaccacaaacgaatatgcaaattacacttcctaaaaacacttcttaacttcctcaaaaattaattagtaatcagcatcacataggcgtggtttactaactataaaactaactgcactgacgaatggctgagtttatgccgccagacgga

SEQ ID NO: 3238 - protein, 675 aa, Betatorquevirus sp.; identical to SEQ ID NO: 2701

SEQ ID NO: 3239 - protein, 102 aa, Betatorquevirus sp.; identical to SEQ ID NO: 2702

SEQ ID NO: 3240 - protein, 135 aa, Betatorquevirus sp.; identical to SEQ ID NO: 2703

SEQ ID NO: 3241 - DNA, 2872 bp, Alphatorquevirus sp.
ggctcttaaaaaagccatgtttctcggtaaactttacagaaagaaaagggcactgtcactgcgcggcctgccaactccaaaggcgaaactacctgcaatgagttggagtcccccgctgcacaaccccaatgggatcgagagaaacctgtacgaggcattctttcgcatgcatgctgcagcttgtggttgcggcgatcttgttggccatcttactgtactggctggtcggtatggtgctcctcctcgtcccccggcccccggggctcccagaccacaaataagacgccagctggcccttcccgcgccccccgctgatccacagcaggccaacccacaatggcctggtggggacggtggagaagatggcgctggaggccccgccgctggcggcgccgtcgcagacgccgagtaccaagaagacgagctcaacgccctgttcgacgccgtcgaacaagaagagtaaggaggaggcgatgggggaggcggaggtggagacgggggtacagacgcagacttagactgagacgcagacgcagacgaaagaaaataagactgactcagtggaacccagctaaagtcaggagatgtactattaagggggtcctgcccatgatactgtgcggagcaggacgctcagggtttaactatggactacacagcgacgactgcaccatacagaaaccccttggccagaacccccacgggggcggcatgagcacagtaacttttagcctacaggtgctatatgaccagtaccagagatttatgaacaagtggtcgtactccaacgaccagctagacctagcaagatactttggctgcaccttctggttttacagacacccagaagtagactttgtcgctcagtttgacaacgttcccccaatgaaaatggacgagaacacagcccctaacactcacccgtcattcctactacaaaacaaacacagggttaaaatccccagctttaaaaccaagccttttggcagaaaaaaaattagagttacagtggggccccccaaactgtttgaagacaagtggtacagccagcatgacttgtgtaaggtgcccctagtcagttggcggttaaccgcagctgacttcaggtttccgttctgctcaccacaaactgacaacccttgctacaccttccaggtattgcatgaacagtattacccagtaataggcacttctgctttagaacaaggaacaaattacgataaaacaagcatagacgcattagaggattttttatatacaaaatgtacccactatcaaacatttgccacagacacaagactaaaccctcagagacccatatcagtaaacagcaatgacacatataatcccagtggaaacgcagaacgtattatctggagtcaaagtgactttaaccagtttaaaaaacgcacagacagcaactatggctactgcagctactgccctcatggtgagttagttactaaaattaaaaattacagagaccaaagattcaagtggctaactgaaatgccacaaaacaacacctgccacataaatgccacctacgcccgaggaaaaattaaacagtgggaatatcacctaggttggtactcaaatatatttataggaaacctcagacacaacctagcattccgaacagcatacattgacattacctacaaccccattacagacaaaggagaaggtaacatagtgtggttccaatatgccaccaaacccagcacacagtacatagagtcacaggcaaaatgcactatcagaaacatacccctatatgctgctttttatggctacgaagactacatccaaagaacactaggcccctatcaagatgtagaaaccctaggcataatatgtgttaaatgtccctacacacatcccccactagttcacaaagacaagaataaggcagactggggctatgtattttacgacgttcactttggcaacggaaagaccccggagggcctgggccaagtgcacccttactggatgcagagatggagaccctatgtacagttccagaaagacactatgaacaagatagccagaaccggaccgttcagctacagagacgagacgccttccatcaccttgactgccgggtacaagtttcgttttaactgggggggcgactctatatttccacagattattaaaaacccctgcccagatagcggggtacgaccttcaaccagtagagagcgtcgctcagtacaagtcgttagcccgctcacaatggggccagagtacatattccaccggtgggactggcgacgggggttctttaatacaaaaactctcaaaagaatgcttgaaaaatcaattaatgatgaagaatattcaacaggcccaaaggtccctcgatggtttcccccactcgaccaccaagagcaagaaggcgtctcagatacagaaacgacaacctcgcagtcctcgcaagaagaagccgctcaagaagccctccaagaagtccaagaggcgtcgctacagcagcacctcctccagcagtaccgagagcagcgaagaatcggaaagcaactccaactcgtcatgctccaactcaccaagacgcagagcaacctgcacataaatccccgcgtccttggccatgcataaataaagtgtacatgtttccccccgaaaaaccaatgcccatatacggataccacgggtgggagacagagtatcaggcctgcaaagcttttgacagaccccctagaaactacctgtcagacaaacccatctatccctggcttccccgctcccaacctgaatttaaagtcagttttaagcttggttttcaataaacaacgccgtgggaatttcacttgtcggtgtctacctcttaaggtcactaagcactccg

SEQ ID NO: 3242 - protein, 761 aa, Alphatorquevirus sp.
MAWWGRWRRWRWRPRRWRRRRRRRVPRRRAQRPVRRRRTRRVRRRRWGRRRWRRGYRRRLRLRRRRRRKKIRLTQWNPAKVRRCTIKGVLPMILCGAGRSGFNYGLHSDDCTIQKPLGQNPHGGGMSTVTFSLQVLYDQYQRFMNKWSYSNDQLDLARYFGCTFWFYRHPEVDFVAQFDNVPPMKMDENTAPNTHPSFLLQNKHRVKIPSFKTKPFGRKKIRVTVGPPKLFEDKWYSQHDLCKVPLVSWRLTAADFRFPFCSPQTDNPCYTFQVLHEQYYPVIGTSALEQGTNYDKTSIDALEDFLYTKCTHYQTFATDTRLNPQRPISVNSNDTYNPSGNAERIIWSQSDFNQFKKRTDSNYGYCSYCPHGELVTKIKNYRDQRFKWLTEMPQNNTCHINATYARGKIKQWEYHLGWYSNIFIGNLRHNLAFRTAYIDITYNPITDKGEGNIVWFQYATKPSTQYIESQAKCTIRNIPLYAAFYGYEDYIQRTLGPYQDVETLGIICVKCPYTHPPLVHKDKNKADWGYVFYDVHFGNGKTPEGLGQVHPYWMQRWRPYVQFQKDTMNKIARTGPFSYRDETPSITLTAGYKFRFNWGGDSIFPQIIKNPCPDSGVRPSTSRERRSVQVVSPLTMGPEYIFHRWDWRRGFFNTKTLKRMLEKSINDEEYSTGPKVPRWFPPLDHQEQEGVSDTETTTSQSSQEEAAQEALQEVQEASLQQHLLQQYREQRRIGKQLQLVMLQLTKTQSNLHINPRVLGHA

SEQ ID NO: 3243 - protein, 148 aa, Alphatorquevirus sp.; identical to SEQ ID NO: 664

SEQ ID NO: 3244 - protein, 147 aa, Alphatorquevirus sp.
MVSPTRPPRARRRLRYRNDNLAVLARRSRSRSPPRSPRGVATAAPPPAVPRAAKNRKATPTRHAPTHQDAEQPAHKSPRPWPCINKVYMFPPEKPMPIYGYHGWETEYQACKAFDRPPRNYLSDKPIYPWLPRSQPEFKVSFKLGFQ

SEQ ID NO: 3245 - DNA, 2872 bp, Alphatorquevirus sp.
cgaggagtgcaggtgagtttacacaccgcagtctaggggcaattcgggcacgggtctggccgggcaatgggcaagattcttaaaaaatttccccgttctgtgctccggcaggacaccaagtcatgccgtggtctccgccgagacataacatcagaacgagagaggatctgtggattcaatcagttatttattcacatgacactttttgtggctgtaataatattcttgagcatattactggcctcctgggtggcctacaaccagctccacctagagacccagcaccccctaccatccggagcctgccggcactgccgccagctccgcaaccccctgaacaactacggcgtggtggagatacagacggaggccttggagaagatggaggagacgcaggtggcgcctaccaagaacaagatctagaagaacttttcgccgccgcaagagaagacgatatgtgagtagatggcggcgccgccgatacaggcgcagactcagacgggggcgacgaaaaaggggacgcagacgcagacgcagaaagactttaatattaagacaatggaacccagacgttatcaggagatgctttataacagggtggatgccactcataatatgtggcaccggacacatacaatataactttatcacccaccaagacgatctgcctcccgccaagagcggatacggaggcaacttcacaaacatcacattctcactagccagcctctatgaggagctcatgcaccacagaaaccactggtctaaatccaactatgacctagaactagtcagatacctcagcactactataaagctatacagacacgaatcagtagactacatagtcagctacaccaccacaggccccttcgagacaaatgaactctcctacatgtccacacatccactgttcatgctactcagtaaaaaacatgtagtagtacccagcttaaaaactaaacccaaaggcagacggtggataaagctaaagatatcaccaccaaaactaatgctaaacaagtggtactttgcccatgacttttgtaaaataggcctcttccagctgtgggccacagcctgtaacctttcaaacccctggctcagatcaggcacagacagcccctgcataaccttctatgttctaaaaaaccaagtgtacggaaacagaatgtccaacctagcacaagactctagtaaagacgaaagaaaaaacgcatataaagagctgtggccaacaactacatcaactgataacaattggtaccaatggcaatatacatacctaaaacctatgaaaaatatttactatcaagccgccaacgaacaaactaataaaagtgagatgcaaggcaaaacatataactggcaaaactataaaaactactttacaaaagtaaaaactaaatgggatagtatacaagaaagtaactatgaattagtaagaaaagaatacaataacatatacacaaccagcgccacatggcctcccagttgggacaacagacaatacttagaacatgactgtggcatattcagcccctactttctatcccctgacaactacacaccagaatggcacacagcatactcatctgtcagatacaatcctctaacagacagaggcataggcaacagaatctgtctgcagtggtgcagcgaggccagcacagactaccagcccaccaaaagcaaatgcatgatacaagacctgcctttatacataatgtgctatggttacctagactactgcatcaaagagctaggcataaagtcagcctggacagacctcagagtagccattagaagcccctacactgatccaaaactaataggatcttcagacaaaaccatgtttattccaatatcagaaacattcatgagaggagacatgccccacaaactaccctacataccagtaaagtggtggtttaagtggtatcctatgtgcacacaccaggcttccgttcttgaagcaatagtttcctgtagtccgttcatggtcagagatcaagatgccaacagttgggacataaccatgggctacagctcaaaattcttatggggcggctcccccttaccttcacagcctatcgacgacccctgccaaaaaaccacccacgaccttcccgaccccgatagaaaccctccacgaatacaaatcgcagacccgcaagtgctcggaccggcgacgctcttccactcgtgggacatcagacgtggactcattaacactagagctattaaaagagtgtcagaatacgcggatactaacgaacatttttcaacaggcgtcgagttcaaaagaccccgactggacactccccaccaaggacagcagctatcaaaccaagaagaagacgccttgtctatccttcgccaactccaagcagaacaagaagagaacacgtcgtcggaagaagaacaagcaccccaaagccaagaggtacaaaaagagaaaatactcaagcagctcagagtccagcgacagcagcaacacctcctcagacagggaatcaaacagctcctgggagacgtgctcagactccggaaaggagtccactggaaccccagcctataataattccagcagatcctataccagatctcttgttccccagtactaaaaaaaaacgcaaattttctcccttagactgggagaacgaggctcaaatagcagggtggttagacagacctatgaggctgtatcctggggacacccccttctacccgtggctaccccgcaagcccgttacccaacctacatgtaaagtaaccttcaaaataaagctagatgattaacttgcaaggccgtgggagtttcactggtcggtgtctacctcttaaggtcactaagcactccgagcgccag

SEQ ID NO: 3246 - protein, 659 aa, Alphatorquevirus sp.; identical to SEQ ID NO: 1046

SEQ ID NO: 3247 - DNA, 2872 bp, Betatorquevirus sp.; identical to SEQ ID NO: 3237

SEQ ID NO: 3248 - protein, 675 aa, Betatorquevirus sp.; identical to SEQ ID NO: 2701

SEQ ID NO: 3249 - protein, 102 aa, Betatorquevirus sp.; identical to SEQ ID NO: 2702

SEQ ID NO: 3250 - protein, 135 aa, Betatorquevirus sp.; identical to SEQ ID NO: 2703

SEQ ID NO: 3251 - DNA, 2871 bp, Alphatorquevirus sp.
gcgaccctcggggtgggtgcaacgccctcggcggaggggcaattcgggctcgggactggccgggctatgggcaaggctcttaaaaaagcatgtttctcggtaaactttacagaaagaaaaggaaactgcttctgtgctctctgcgtactacatcgaaagcacttaccttctcaatgagctggtccagacccatacacaatgttactgcactggaaagaaattggtaccagggtgttattcacactcatgctgcttgctgtggctgcggtaaccctggggctcacttcgctaccttggttgaaagatacaactccaaccaaatgcaacaccagcgtttactgccgccagcatccgctataaggtccccaaaccagatccgtagagcccgggccttgcccgaggctccggagcagcctccggcactgccatggcatggtggtggtggagaaggagacgccgcccgcggtggagaaggcgacgctggaggagacgagcccgtgtacgaaccaggagacctagacgccctgtacgccgccgtcgaagaagagtaaggagagggagacgggggtggcgtagactgtacagacgatggagacgcagggggcgacgcagacacaaacgaaaaaaactggtaatgagacagtggaaccccagtactgtaacaaaatgctttatagtgggctacctgcccattattatctgtggacagggtacctctgccatgaactatgcatctcactgcgatgatatagagtaccctggacccctgggagggggactaacctccatgaggtttactttaagaatactgtatgaccagtacaccaggggacagaacttttggacaaagagcaatgaggacctagacttagctagattcctgggatccaaatggactttttacagacatccagaagtagactttatagtaacctgggagacctcagccccctttacagactctatagtatcaggaccacaccaacacccaggcatacaaatgctcatgaaaaagaaaatactcataccaagttttagaacaaaacccaagggtcgcagcactataaaagttaaaataaacccccctaagctcatgatagacaagtggtacccacaaactgaattctgtgaggtaactctcctaacgattcatgccacagcatgtgacctgcggtttccgttctgctcaccacaaacgaacacttcctgcatacagttcctcgttttgtcaggagcttacagtggttacattagcatattacctgacaaagcaaacgaaagtcaacttagagcatttttagctactaatgtaacagatgattcaaatgtatgcaacacactagctacaccatacatgctaaaatatccaccaccaacaaaaaaaacaaactcaggtacagcagcacaatactcaccagacagccaagatggacaaaatatatacactaaccttatacaaacaataatgcaaaataacaatgtatggtttaccaaagctaaaacggcatggaccaacttacattcgcaatatggcgttcccacatcaccaggcctggaataccacacaggatttttcagtgccatattcttatcaccagtaagactaaactcacagtttccaggcttgtataccaccattaaatacaacccacttacagacaaaggagagggaaacagaatctggtgcgacccttgcaataaagagtccttcatgtacagcccaccacagagcaaatttctaatagaaaacatacagctatgggcggcagtatcaggctacttagactactgcacaaaagccagcaaagacgaaagctttaaatacaactacagagtacttatacagtgtccatacacagtgccacagctatacatacaaacacaaccacagagaggctacataccatacagcaacaactttggcatgggcaaaatgcccaatgacagctccgtaataccagttaggtggagatgcaggtggtatccagccctgtggaaccaacagcaggtactagaggacatattcatgtctggaccctttgcatacaagggagatcaaccctcagccacccttaacacaaagtatgcatttaagtggctctggggtggcaaccgtattttccaacaggttgttaaagacccctgctcacaccagcaagaccaggcagttggtcccagtagaaagcctagagcagtacaagtctttgacccgaagtaccaagcaccagagtggacgtttcacgcgtgggacctcaaacgcggcctatttggcagacaagctattaagagagtgtcagcaaaaccaacagctgatgagattttgtcaacaggtccaaagcgacccaggttggaagtccccgcgttcgaagaggggcaagaaaaaagcttacttttcagacaaagaaaacacctcctctgggaagagaccacagaggaagagacagaagcccaatcagaagaggagcaggaggaagaggagcagcagcagctcctcagacgactccagcaacagcgggagttggggcgaggcctcagatgcctcttccagcaactaacccgcacccagatgggtctccacgtagacccccaattattggcgcctgtataaataaagtatacatgtttcctccagcagaacccaaacccatctcaggctacgaagcctggagagatgagtttgaaacctgttccgcctggaacagacccccgagaaagtaccacacagacacccccttttacccctggatgcccccagaccagttccgtgtaacctttaagcttggctttcattaaaatttctaggccgtggaactttcacttgtcggtgtctacctcttaaggtcactaagcactccgagcgaagcgaggagt

SEQ ID NO: 3252 - protein, 726 aa, Alphatorquevirus sp.
MAWWWWRRRRRPRWRRRRWRRRARVRTRRPRRPVRRRRRRVRRGRRGWRRLYRRWRRRGRRRHKRKKLVMRQWNPSTVTKCFIVGYLPIIICGQGTSAMNYASHCDDIEYPGPLGGGLTSMRFTLRILYDQYTRGQNFWTKSNEDLDLARFLGSKWTFYRHPEVDFIVTWETSAPFTDSIVSGPHQHPGIQMLMKKKILIPSFRTKPKGRSTIKVKINPPKLMIDKWYPQTEFCEVTLLTIHATACDLRFPFCSPQTNTSCIQFLVLSGAYSGYISILPDKANESQLRAFLATNVTDDSNVCNTLATPYMLKYPPPTKKTNSGTAAQYSPDSQDGQNIYTNLIQTIMQNNNVWFTKAKTAWTNLHSQYGVPTSPGLEYHTGFFSAIFLSPVRLNSQFPGLYTTIKYNPLTDKGEGNRIWCDPCNKESFMYSPPQSKFLIENIQLWAAVSGYLDYCTKASKDESFKYNYRVLIQCPYTVPQLYIQTQPQRGYIPYSNNFGMGKMPNDSSVIPVRWRCRWYPALWNQQQVLEDIFMSGPFAYKGDQPSATLNTKYAFKWLWGGNRIFQQVVKDPCSHQQDQAVGPSRKPRAVQVFDPKYQAPEWTFHAWDLKRGLFGRQAIKRVSAKPTADEILSTGPKRPRLEVPAFEEGQEKSLLFRQRKHLLWEETTEEETEAQSEEEQEEEEQQQLLRRLQQQRELGRGLRCLFQQLTRTQMGLHVDPQLLAPV

SEQ ID NO: 3253 - protein, 153 aa, Alphatorquevirus sp.; identical to SEQ ID NO: 2263

SEQ ID NO: 3254 - protein, 125 aa, Alphatorquevirus sp.; identical to SEQ ID NO: 2268

SEQ ID NO: 3255 - DNA, 2871 bp, Betatorquevirus sp.
ttatgccgccagacggagacgggatcacttcagtaggggcaattcgggctagatcagtctggcggaacgggcaagaaacttaaaatatactttttttacagatatgtcaacaagatatatacatccaaaatcaactataagacaaaagaaactacaatggatgaatatgcttgttcattgccatgatataatgtgtgaatgctcatctccacttgaacacaccgctgcattaatttttgaacaagaaccaaaactccgctttaacccacctgaaaaagatttaattaaaaaatgccttactactacaaccgataccgcagacgccgctggagacccagacggttttggagaaggagatttagaagaccttttcaaagaaaattttggagaagacgacaccgggtaagaaaaagaaaacttaaaagaataagactatctcaatatcaaccacattatataaaaagactaacaataactggatattatcctttagtactatcaactaaagaaagactgtctaacaacttaaactgttacttagactctatagcaccagctgaagtacacggggggggaggattttctatatgtaactttagcctttactccttatatcaagaaaacctgcaattaagaaactggtggtccacatctaacgaaaatatgcctcttattagatttttaggatgctcagtaacattatacagacaagcccacctagactatctcttttactacagaaactcttaccctatgacagcttctttaacaacataccaaagcaccaacccacaagcaatgttactcacaaaaagaacaaaaataatggcatgcaaaacacacaacaaaaacaaaaaaccatacaaaaaactaaaaattagaccacctgcacaactacaaaacaaatggtattttcaaaaagaaatagcacaagttccactagtacaatttattacaacagcatgctcgttagaccgcaagtaccttaactcaacctcaatttcatcaacactaggctttattacattagacaccaacggtttcatgcaacgcttccttaaagcaaacacaacaactccttatcaaccattaacaggacaattaatgtttgcagcaccaaatggaaaagcaataaatgatatattattaacacaaataatattactaggttcagtagaagaagcaacagagggaacaactataggatcagtacctacaacactacgttgtccctcagattggcaagttaaaagtgacattgcaaacaaactatacacagcatacaaccaaagtaaatactggggaaatccatttatgccacattggttttacggagaccaaagaatactaataaccaacatgaacatagaagaactatgtaaaaaatttaaaaatgcaactgtaaatgactgcaaattaacaagtggctttgtagtaaaagaacaaaaatatcaacaattaagatacaatccatttgcagacaaaggagtaaataacatactatatttattacctatagactcacatttacattcctatggatgggatccacctacagacaaagatgtagtatgcagagacttaccactaaatgttttactatggggataccttgactttcagagaaaatgtaaagaatacaatgatatagacacaaaatgtatatgtgtatttcaatcaccctatgtaagccctcctggacattgcaaatttatagtagtactagacgatgactttttacatggcaattctccttactttgacgaagggaaaaaaaccacttcagattatcaaaattggcacccaaaagtaagatttcaagtaagaactttaaatgaaatagcatgttcaggaccggcaacaacaaaattacctgataatataagtgtagaatgccacctaaaatataaatttcattttaagattggtggagaaccagcaccaatgtcagtccttaaaaacccagaaaaccaacctcaatggaatatacccaataacttcctacaaacaacttcgttacagaatccaacagccccctttgaacacctcctctggaaatttgatgaacgcagaggagaacttacaaaaacagctgcaaaaagaattactgaaaacctccaatctgaaacaaatattttaccaattgcagaaacagcaacctggtgccctacagcactcagcaaagatcaagaaacatcggagacaacatcctcagaagaaaaagaaacatcaacgacggaggagagactccagcagcaccgaagaaagcaaaaactcctcagaaagctcatcaaccgaatgttactcagactaacaacattagaatagacaaatgcattgtaaaagtaaaattatttgatgacaatattaaacctaaccgtagaatgaatgcatgggaatatgaacaagaggtacaagaagcctcaatatggggtagagttcccagaactcacatttttgataaacctacatacccatatgtaccacaactttcaaaatactgtgtaaactttgatcttaatgcgccgcaataaatttcaacgccagcaataattcactctcggtgtccatttaataaagtataaacttatataaacatccaccactctcccaaatacgcaggcgcagaagggggctccgcccccttacacccccagggggggctccgccccccctataaccccccctaataaatattcaacaggaaaaccacataattagaatggccgaccaccaactgccacttacttccccttttcacacaacttccttttttacttattattattcattacattaattaataatcaccgtaattccggggaggagactactatgtatataactaagtatacttccgaatggctgagt

SEQ ID NO: 3256 - protein, 678 aa, Betatorquevirus sp.
MPYYYNRYRRRRWRPRRFWRRRFRRPFQRKFWRRRHRVRKRKLKRIRLSQYQPHYIKRLTITGYYPLVLSTKERLSNNLNCYLDSIAPAEVHGGGGFSICNFSLYSLYQENLQLRNWWSTSNENMPLIRFLGCSVTLYRQAHLDYLFYYRNSYPMTASLTTYQSTNPQAMLLTKRTKIMACKTHNKNKKPYKKLKIRPPAQLQNKWYFQKEIAQVPLVQFITTACSLDRKYLNSTSISSTLGFITLDTNGFMQRFLKANTTTPYQPLTGQLMFAAPNGKAINDILLTQIILLGSVEEATEGTTIGSVPTTLRCPSDWQVKSDIANKLYTAYNQSKYWGNPFMPHWFYGDQRILITNMNIEELCKKFKNATVNDCKLTSGFVVKEQKYQQLRYNPFADKGVNNILYLLPIDSHLHSYGWDPPTDKDVVCRDLPLNVLLWGYLDFQRKCKEYNDIDTKCICVFQSPYVSPPGHCKFIVVLDDDFLHGNSPYFDEGKKTTSDYQNWHPKVRFQVRTLNEIACSGPATTKLPDNISVECHLKYKFHFKIGGEPAPMSVLKNPENQPQWNIPNNFLQTTSLQNPTAPFEHLLWKFDERRGELTKTAAKRITENLQSETNILPIAETATWCPTALSKDQETSETTSSEEKETSTTEERLQQHRRKQKLLRKLINRMLLRLTTLE

SEQ ID NO: 3257 - protein, 115 aa, Betatorquevirus sp.
LAERARNLKYTFFTDMSTRYIHPKSTIRQKKLQWMNMLVHCHDIMCECSSPLEHTAALIFEQEPKLRFNPPEKDLIKKCLTTTTDTADAAGDPDGFGEGDLEDLFKENFGEDDTG

SEQ ID NO: 3258 - protein, 124 aa, Betatorquevirus sp.
LVPYSTQQRSRNIGDNILRRKRNINDGGETPAAPKKAKTPQKAHQPNVTQTNNIRIDKCIVKVKLFDDNIKPNRRMNAWEYEQEVQEASIWGRVPRTHIFDKPTYPYVPQLSKYCVNFDLNAPQ

SEQ ID NO: 3259 - DNA, 2871 bp, Betatorquevirus sp.
tacagtgagaaggtgagtgaaaccaccgtagtctaggggcaattcgggctagttcagtctggtggaacgggcaagaaacttaaaatatttatttttacagatgagcagatactacaaaaaaccatcatattccactagacatggaaacttacaatttataaatactatggttgctgtccacgacaactattgctactgcgacaaacccctaaaccacattattactggaataattgaacaagaaccaaacctcaaatttgacaaagaagattctaaacttattgaaaaatgccttacttctaccgccggagaagacgtcctagacgattttggagatggagacctagaaaagcttttcgcacaagatggagacgaccaagacgctacagacgcagacactgggtaaggagaaaaaaactaaaaaaattaagactaacacaatggcaacctacaacaataagaaaactaaaaataaaaggttgcattcctttatatgaaactaccagtgaaagactcggtaacaatttaacacaatggttagaatcgcatgcacctcacaattatccaggaggcggctcctttagcctacaactatttacattaaaaggactctatgacttacatagaaaagcaagaaactggtggactcaaagtaactgtaaattacctttaataagatatttaaaatgtagatttcgcttatttcgaagcatcagcagtgattatatatttgcttatacaacttgtggtaaattagaagctaacttagatatgtatcaatctacacaacctagtatactaatgttaaataaaagaaaaagaataataacctgcaaagaaaataataaccacaaaaagccatacaaaacattatatatcaaaccacctccattatggtgtaacaaatggtacttccaaaaagaagttgccagactacccctattattaacattaacatccacagcaagcctagacagatattacattagcagccaagcaaaatcaaacacaatgggattcacaagcttaaacacaaaaacatttcaattccataactacaaaacacccccaagtactacaggctatataccaaataaagatcaattattattcacaatatatggagtaccagacataaaagatgcaaaatacaaacacttaatatacttaggacaagcaaacgaagacataaaaggcacatcattacaagaacaaccagccacagaaaaagactggaatcaatgggtagaaaaatgggcaacaatgaaacaatattggggaaatccatttcattcacaatacttaaaccaagatgttcaacccatattaattacaaatttaaaatgggaccaaattaaaacaaaggcaaaaaacaacacgggagacgatcacttagcttcagactttgcacaaaaaacacaaccaatgttatgggaatgcagatataatcccgaagcagacacaagtcacaatgctattttctttgcaaaaattacagatgacaattctgcatggcatgagccatcagaagaaagacttatatgtaaaggtttaccattatggtatatgtttcatggttttattgactatcatgctaaagctgtagatatacaaagacttatgactgactgggtaatatgtattgtatctgacgctataattccgaaacaagactactatgtacctcttgactggtggtttttaaacggacgtagcccctacgaacctcacgaaggagaacaaacaatatatgataaatttaactggcaccctaaaacaaactttcaagtaagcactatttcaaagtttgttggaactggtcctgctactgttaaattaccagacaatataagcacagaagctcatgcagaatacacattttattttaaggtcggaggatgccctccaccaatggatgaggtctgcgacccaacaaccacaccagactttcccactcccagtaacatcataccatcaactttattgcaggatccagaaaccccaatacaatactatctccaaagctttgacgaaagacgtggactgcttacagacacagctattaaacgcctcaaaaaagactggctcactacagagtctttatttacaactacaggacaaagttctctcgacttgccagggccgacgaaagaaaccagctcggacgaagagacacaggaaacggaaaaagacccgcaaacactgcagctcaaactccaactccagcgaagaaagcaacgaaaactccagcagcgaatcctggacctcctagctatatctcaaagcttagaataataaacacaactaacaaagtatacctatttccccctgaaaaacctaaaaaccgtagactaaaaccacacgagttacaaacagaatatgaaatatgtggatggttaaaaagaccccctagaacctttattaacgacactcctttttacccttggttaccaccagaacctgttgtaaattttgatttaaactaccattaaaggcctgcaaacttacactctcggtgtccatttatattattttaaacttaaataaacagtcaccgcctcccaaatacgcaggcgctaaagggggctccgccccctttaacccccagggggggataccccccctacacccccccaaaaaccacaacatttgcattgccgaccacaaacggtgcaggaaaccacaaaatttgcattgccgaccacaaaccgtcaaacacttcccttatttacaatacttcctctttctcttataaatattcattaaattacttattaaacacactcacatcctgggaggagcaaacaaactataaaacaaaacacacttccgaatggctgagtttatgccgccagacggagacgggatcac

SEQ ID NO: 3260 - protein, 668 aa, Betatorquevirus sp.
MPYFYRRRRRPRRFWRWRPRKAFRTRWRRPRRYRRRHWVRRKKLKKLRLTQWQPTTIRKLKIKGCIPLYETTSERLGNNLTQWLESHAPHNYPGGGSFSLQLFTLKGLYDLHRKARNWWTQSNCKLPLIRYLKCRFRLFRSISSDYIFAYTTCGKLEANLDMYQSTQPSILMLNKRKRIITCKENNNHKKPYKTLYIKPPPLWCNKWYFQKEVARLPLLLTLTSTASLDRYYISSQAKSNTMGFTSLNTKTFQFHNYKTPPSTTGYIPNKDQLLFTIYGVPDIKDAKYKHLIYLGQANEDIKGTSLQEQPATEKDWNQWVEKWATMKQYWGNPFHSQYLNQDVQPILITNLKWDQIKTKAKNNTGDDHLASDFAQKTQPMLWECRYNPEADTSHNAIFFAKITDDNSAWHEPSEERLICKGLPLWYMFHGFIDYHAKAVDIQRLMTDWVICIVSDAIIPKQDYYVPLDWWFLNGRSPYEPHEGEQTIYDKFNWHPKTNFQVSTISKFVGTGPATVKLPDNISTEAHAEYTFYFKVGGCPPPMDEVCDPTTTPDFPTPSNIIPSTLLQDPETPIQYYLQSFDERRGLLTDTAIKRLKKDWLTTESLFTTTGQSSLDLPGPTKETSSDEETQETEKDPQTLQLKLQLQRRKQRKLQQRILDLLAISQSLE

SEQ ID NO: 3261 - protein, 115 aa, Betatorquevirus sp.
LVERARNLKYLFLQMSRYYKKPSYSTRHGNLQFINTMVAVHDNYCYCDKPLNHIITGIIEQEPNLKFDKEDSKLIEKCLTSTAGEDVLDDFGDGDLEKLFAQDGDDQDATDADTG

SEQ ID NO: 3262 - protein, 136 aa, Betatorquevirus sp.
LAHYRVFIYNYRTKFSRLARADERNQLGRRDTGNGKRPANTAAQTPTPAKKATKTPAANPGPPSYISKLRIINTTNKVYLFPPEKPKNRRLKPHELQTEYEICGWLKRPPRTFINDTPFYPWLPPEPVVNFDLNYH

SEQ ID NO: 3263 - DNA, 2871 bp, Betatorquevirus sp.
cgggtgctgaaggtgagtgaaaccaccgaaatcaaggggcaatatgggctgaattagtctagcggaatgggcaactgtcttaatattttgcagatgtcaaaattatggacacctccacaatacggacctaaaggattagaactacaattctacaacggattatttcacctccacgaccttcactgcggctgtaaacaacccattacacatatcctttcacaaatagcaattcaatctggaaatacaaaactttccttacatcaaattaaaaaaataaaatgccgccttactggagaagatggcgacgaagaagaagaaactattacacctggagacctagaagagcttttcaaagaacctttcaacgcagaagacgacgatggagaaaaagatactgggtaagcaaaaaaagaaaattaagaactattaaagtaaaagaatatcaaccaaaaactataagatactgtaaaattaaaggactaaaatgtttatttcaaggaagctgtatgagaaaaagtaataattactggcaatatcctagaactatttttccagaaaaatttccgggaggagggggatggggactgcaagtaatgagtttagacagcctatatgaagactggaaatatttacagaatgtttggactaacagcaatgcaggcctaccactagttagactgctaggcatatcattaacattttatcaagaaccagatgtagactatgtagtacaaatctataactgctggccaatggtagatagcagcctacaacatgcaaacacacatccacaaagaatgttattaggaaaacacaaattaataatgccaagcattaacacaaaaccactaaagcgcagaaaaaagaaaaaatttatatatccacctccacaaatgcaaaacaaatggtactttcaaaaagacatttgcaccacaaaattcatgatgatagccgctacagcctgtgacttatcatattattatttaggaccaacatcagaaagcaacaatataacactttggacattaaacacaaatctatttagaaacgcagacttccaacatccttcacaaacaacaggctatcaacctagaaacaactactacctatatgcttcaaaaaatggaggaggaacaccaacaagcaaacaacaattagtatacttaggagacacaagaaactacaaacaaggaaccggtatgacaaaagaagaatggggaaacccattttggacacattattttggttctatcccacaatacacaagttctgagccaccaacaagtaacaaatggaacgaacccaacatatctaaatacttaacagaggtacataaccctccatttgtaacaataagatataatccagacaaagatgacggttccacaaacaaagcttactttataagcaataacagaacatcaggagacaaatcctttgatccaccaacagacgcctcacttattattgaaggcctaccactcccaataatgctttggggatgggcagactggatgaaaaaactagcccttatacacagaatagacaaagaatacatacttgtaattcaaacagacaaattttcagaaaaatttccatactacatattaatagacgatagctttacacaaggcctaggcccatatgacacagaaaaaacaacagaagacgaacttaactggtacccaaaattttggtaccaacaaaaatcaatagaaacactttgcacttgtgcagcaggcgtaaacagactacctgactctagatctatacaagccaaatacaaatacacagttcatttaaaatggggaggatgccctgcagtactagaaaaagcttatgatccttgttcacagccaaagtgggccatacccgatacaatcgcatcaggatttcaaatccagaatccaagcaatgaccccagcaacttgttctacaactgggacgttaggagagacattatcacgcaaaaagctattgaaagagtatcaaaagacagagaaactgatacaatgtgctctcaaacaggatgcgcaagcgaccctccagtactactccaaacactccaagaaagctccaacgaaacatcgtcagaggaagaaacggaaacaccactccaaaaaaagctcctcagactcagaaagcgacacaagcaactactccagcagctcctccgactaaaaaccacacaaacttaatatgtgtacataaagtacaattatttcctccaaaaaaaccaaaaaacagacgctttacacaggcagaaatggaagatgaaaaatatatagcttcttggttaaaaagaccccaaagacactttttttacgaccccccaacatatccctggctgccaccagagccatatgtaaactttgacctaaactggaaaaaataaaggccaactaatttcacttaatagagtctgtttctttaattttaaactataacaaacatccaccacccaataaaactcgttggcgccaaaagggggctccgcccccttatacccccagggggctccgccccctaaaacccccaagggggctccgccccctaacacccccaagggggctccgccccctaacaccccctaataaatattcataacggaaaccacaaaattagaattgccgaccacaaacgaatatgctaattaacttcccggaaaccacaaaattagaattgccgaccacaaacgaatatgctaattaacttcccaaaactgcccttttacttccctaaaaattaattaataaacagcatcacacggggaggagtcacaccactatataactaacagtaccgacgaatggctgagtttatgccgctagacggagagacgatcacaccgcgatcggcgctaattcaggg

SEQ ID NO: 3264 - protein, 639 aa, Betatorquevirus sp.
MPPYWRRWRRRRRNYYTWRPRRAFQRTFQRRRRRWRKRYWVSKKRKLRTIKVKEYQPKTIRYCKIKGLKCLFQGSCMRKSNNYWQYPRTIFPEKFPGGGGWGLQVMSLDSLYEDWKYLQNVWTNSNAGLPLVRLLGISLTFYQEPDVDYVVQIYNCWPMVDSSLQHANTHPQRMLLGKHKLIMPSINTKPLKRRKKKKFIYPPPQMQNKWYFQKDICTTKFMMIAATACDLSYYYLGPTSESNNITLWTLNTNLFRNADFQHPSQTTGYQPRNNYYLYASKNGGGTPTSKQQLVYLGDTRNYKQGTGMTKEEWGNPFWTHYFGSIPQYTSSEPPTSNKWNEPNISKYLTEVHNPPFVTIRYNPDKDDGSTNKAYFISNNRTSGDKSFDPPTDASLIIEGLPLPIMLWGWADWMKKLALIHRIDKEYILVIQTDKFSEKFPYYILIDDSFTQGLGPYDTEKTTEDELNWYPKFWYQQKSIETLCTCAAGVNRLPDSRSIQAKYKYTVHLKWGGCPAVLEKAYDPCSQPKWAIPDTIASGFQIQNPSNDPSNLFYNWDVRRDIITQKAIERVSKDRETDTMCSQTGCASDPPVLLQTLQESSNETSSEEETETPLQKKLLRLRKRHKQLLQQLLRLKTTQT

SEQ ID NO: 3265 - protein, 111 aa, Betatorquevirus sp.
MGNCLNILQMSKLWTPPQYGPKGLELQFYNGLFHLHDLHCGCKQPITHILSQIAIQSGNTKLSLHQIKKIKCRLTGEDGDEEEETITPGDLEELFKEPFNAEDDDGEKDTG

SEQ ID NO: 3266 - protein, 121 aa, Betatorquevirus sp.
MRKRPSSTTPNTPRKLQRNIVRGRNGNTTPKKAPQTQKATQATTPAAPPTKNHTNLICVHKVQLFPPKKPKNRRFTQAEMEDEKYIASWLKRPQRHFFYDPPTYPWLPPEPYVNFDLNWKK

SEQ ID NO: 3267 - DNA, 2870 bp, Betatorquevirus sp.
cgggtgctgaaggtgagtgaaaccaccgaaatcaaggggcaatatgggctgaattagtctagcggaatgggcaactgtcttaatattttacagatgtcaaaattatggacacctccagtatacggacctaaaggattagaactacaattctacaacggaatatttcacattcacgacctacactgcggatgcaaagaccccattatacatatcctttcacaaattgctattcaatctggaaatacaaacctttccttacatcaacttaaaaaaataaaatgccgccttactggagaaaatggcgacgaagaagaagaaactattacacctggagacctagaaaaactttttacagaacctttcgacgcagaagacgccgatggagaaaaagaaactgggtaagcaaaaaaagaaaattaagaactattaaagtaagagaatatcaaccaaaaactataagatactgtaaaattaaaggactaaaatgtttatttcaaggaagctgtatgagaaaaagtaataattactggcaatatcctagaactatttttccagaaaaatttccgggaggcgggggatggggactacaagtaatgagtttagacagcctatatgaagactggaaatatttacaaaacgtatggacaagtagcaatgcaggactaccactagttagattactaggaatatcattaacattttatcaagaaccagacgtagactatgttgtacaaatatataactgctggccaatggtagacagtagcctacaacatgcaaacacacatccacaaagaatgttactaggaaaacacaaattaattatgccaagtattaacacaaaaccactaaaacgcagaaaaaaaaaaaaatttatatatccacctgcacaaatgcaaaacaaatggtactttcaaaaagacatctgcaccacaaaattcatgatgatagcagctacagcctgtgacttatcatattattatttaggaccaacatcagaaagcaacaatataacactttggacattaaacacaaatctctttagaaacgcagacttccaacatccttcacaaacaacaggctatcaacctagaaacaactactacttatatgcctctaaaaatggcgcaggaacaccaaaaaaacaagaacaattagtatacttaggagacacaagaaactacaaacaaggaacaggtttaaaaaaagatgaatggggaaacccattttggacacattactttggttctataccacaatacacaagccctgaggcacccacaagtgacaaatggaaagacgcagacatatcaaaatacttaacagaggtacataatcctccatttgtaaccataagatataatccagacaaagatgacggttccacaaacaaagcatactttgtaagcaataacagaacatcaggagacaaatcatttgatccaccaacagacgcctcactcattatagaaggcctaccactcccaataatgctttggggatgggcagactggatgaaaaaactagcccttattcacagaatagacaaagaatacatacttgtaattcaaacagacaaattttcagaaaaattcccatactacatattaatagatgacagctttatacaaggcctaggaccatatgacacagaaaaaaccacagaagacgaattaaactggtatccaaaattttggtaccaacaaaaatcaatagaaacactttgcacatgtgcagcaggagttaacagactaccagactctagatctatacaagcaaaatacaaatacacagtgcatttaaaatggggaggatgccctgcagtattagaaaaagcctatgatccttgttcacagccaaagtgggccatacccgatacaatcgcatcaggatttcaaatccagaatccaagcaatgaccccagcaacttgttctacaactgggacgttaggagagacattatcacgcaaaaagctattgagagagtatcaaaagacagaaaaactgatacaatgtgctctcaaacaggatgcgcaagcgaccctccaatactactccaaacactccaagaaagctcccacgaaacatcgtcagaggaagaaacggaaacaccactccaaaaaaagctcctcagactcagaaagcgacacaagcaactactccagcagctcctccgactaaaaaccacacaaacttaatatgtatacataaggtacaattatttcctccaaaaaccccaaaaaacagacgctttacacaagctgaaatggaggatgaaaagtttatagcttcttggttaaaaagaccccaaagaacctttttttacgaccccccaacatatccctggttaccaccagaaccctatgtaaactttgacctaaattggaaaaaataaaggccaactaatttcacttaatggagtctgtttctttaaatttaaactataacaaacatccaccacccaatgaaacttgttggcgccaaaagggggctccgcccccttacacccccagggggctccgccccctacaacccccaagggggctccgcccccttacacccccagggggctccgccccctaacaccccctaataaatattcatacaggaaaccacaaaattagaattgccgaccacaaacgaatatgctaattaacttccctaaactacacctttacttccccaaaaattaattaataaacactaattaacttccctaaactacacctttacttccccaaaaattaattaataaacagcatcatacagggaggagtcacaacactatataactaactgcactgacgaatggctgagtttatgccgctagacggagagacgatcacaccgcgatcggcgctaattcaggg

SEQ ID NO: 3268 - protein, 639 aa, Betatorquevirus sp.
MPPYWRKWRRRRRNYYTWRPRKTFYRTFRRRRRRWRKRNWVSKKRKLRTIKVREYQPKTIRYCKIKGLKCLFQGSCMRKSNNYWQYPRTIFPEKFPGGGGWGLQVMSLDSLYEDWKYLQNVWTSSNAGLPLVRLLGISLTFYQEPDVDYVVQIYNCWPMVDSSLQHANTHPQRMLLGKHKLIMPSINTKPLKRRKKKKFIYPPAQMQNKWYFQKDICTTKFMMIAATACDLSYYYLGPTSESNNITLWTLNTNLFRNADFQHPSQTTGYQPRNNYYLYASKNGAGTPKKQEQLVYLGDTRNYKQGTGLKKDEWGNPFWTHYFGSIPQYTSPEAPTSDKWKDADISKYLTEVHNPPFVTIRYNPDKDDGSTNKAYFVSNNRTSGDKSFDPPTDASLIIEGLPLPIMLWGWADWMKKLALIHRIDKEYILVIQTDKFSEKFPYYILIDDSFIQGLGPYDTEKTTEDELNWYPKFWYQQKSIETLCTCAAGVNRLPDSRSIQAKYKYTVHLKWGGCPAVLEKAYDPCSQPKWAIPDTIASGFQIQNPSNDPSNLFYNWDVRRDIITQKAIERVSKDRKTDTMCSQTGCASDPPILLQTLQESSHETSSEEETETPLQKKLLRLRKRHKQLLQQLLRLKTTQT

SEQ ID NO: 3269 - protein, 111 aa, Betatorquevirus sp.
MGNCLNILQMSKLWTPPVYGPKGLELQFYNGIFHIHDLHCGCKDPIIHILSQIAIQSGNTNLSLHQLKKIKCRLTGENGDEEEETITPGDLEKLFTEPFDAEDADGEKETG

SEQ ID NO: 3270 - protein, 121 aa, Betatorquevirus sp.
MRKRPSNTTPNTPRKLPRNIVRGRNGNTTPKKAPQTQKATQATTPAAPPTKNHTNLICIHKVQLFPPKTPKNRRFTQAEMEDEKFIASWLKRPQRTFFYDPPTYPWLPPEPYVNFDLNWKK

SEQ ID NO: 3271 - DNA, 2870 bp, Alphatorquevirus sp.
tgcgacccttggggtgggtgcaacgccctcggcggccgcgcgctacgcctcgggactggccgggctatgggcaaggctcttaaaaaagcatgtttctcggtaaactttacagaaagaaaaggaaactgcttctgtgctctctgcgtactacatcgaaagcacttaccttctcaatgagctggtccagacccatacacaatgttactgcactggaaagaaattggtaccagggtgttattcacactcatgctgcttgctgtggctgcggtaaccctggggctcacttcgctaccttggttgaaagatacaactccaaccaaatgcaacaccagcgtttactgccgccagcatccgctataaggtccccaaaccagatccgtagagcccgggccttgcccgaggctccggagcagcctccggcactgccatggcatggtggtggtggagaaggagacgccgcccgcggtggagaaggcgacgctggaggagacgagcccgtgtacgaaccaggagacctagacgccctgtacgccgccgtcgaagaagagtaaggagagggagacgggggtggcgtagactgtacagacgatggagacgcagggggcgacgcagacacaaacgaaaaaaactggtaatgagacagtggaaccccagtactgtaacaaaatgctttatagtgggctacctgcccattattatctgtggacagggtacctctgccatgaactatgcatctcactgcgatgatatagagtaccctggacccctgggagggggactaacctccatgaggtttactttaagaatactgtatgaccagtacaccaggggacagaacttttggacaaagagcaatgaggacctagacttagctagattcctgggatccaaatggactttttacagacatccagaagtagactttatagtaacctgggagacctcagccccctttacagactctatagtatcaggaccacaccaacacccaggcatacaaatgctcatgaaaaagaaaatactcataccaagttttagaacaaaacccaagggtcgcagcactataaaagttaaaataaacccccctaagctcatgatagacaagtggtacccacaaactgaattctgtgaggtaactctcctaacgattcatgccacagcatgtgacctgcggtttccgttctgctcaccacaaacgaacacttcctgcatacagttcctcgttttgtcaggagcttacagtggttacattagcatattacctgacaaagcaaacgaaagtcaacttagagcatttttagctactaatgtaacagatgattcaaatgtatgcaacacactagctacaccatacatgctaaaatatccaccaccaacaaaaaaaacaaactcaggtacagcagcacaatactcaccagacagccaagatggacaaaatatatacactaaccttgtacaaacaataatgcaaaataacaatgtatggtttaccaaagctaaaacggcatggaccaacttacattcgcaatatggcgttcccacatcaccaggcctggaataccacacaggatttttcagtgccatattcttatcaccagtaagactaaactcacagtttccaggcttgtataccaccattaaatacaacccacttacagacaaaggagagggaaacagaatctggtgcgacccttgcaataaagagtccttcatgtacagcccaccacagagcaaatttctaatagaaaacatacagctatgggcggcagtatcaggctacttagactactgcacaaaagccagcaaagacgaaagctttaaatacaactacagagtacttatacagtgtccatacacagtgccacagctatacatacaaacacaaccacagagaggctacataccatacagcaacaactttggcatgggcaaaatgcccaatgacagctccgtaataccagttaggtggagatgcaggtggtatccagccctgtggaaccagcagcaggtactagaggacatattcatgtctggaccctttgcatacaagggagatcaaccctcagccacccttaacacaaagtatgcatttaagtggctctggggtggcaaccgtattttccaacaggttgttaaagacccctgctcacaccagcaagaccaggcagttggtcccagtagaaagcctagagcagtacaagtctttgacccgaagtaccaagcaccagagtggacgtttcacgcgtgggacctcagacgcggcctatttggcagacaagctattaagagagtgtcagcaaaaccaacagctgatgagattttgtcaacaggtccaaagcgacccaggttggaagtccccgcgttcgaagaggggcaagaaaaaagcttacttttcagacaaagaaaacacctcctctgggaagagaccacagaggaagagacagaagcccaatcagaagaggagcaggaggaagaggagcagcagcagctcctcagacgactccagcaacagcgggagttggggcgaggcctcagatgcctcttccagcaactaacccgcacccagatgggtctccacgtagacccccaattattggcgcctgtataaataaagtatacatgtttcctccagcagaacccaaacccatctcaggctacgaagcctggagagatgagtttgaaacctgttccgcctggaacagacccccgagaaagtaccacacagacacccccttttacccctggatgcccccagaccagttccgtgtaacctttaagcttggctttcattaaaatttctaggccgtggaactttcacttgtcggtgtctacctcttaaggtcactaagcactccgagcgaagcgaggag

SEQ ID NO: 3272 - protein, 726 aa, Alphatorquevirus sp.
MAWWWWRRRRRPRWRRRRWRRRARVRTRRPRRPVRRRRRRVRRGRRGWRRLYRRWRRRGRRRHKRKKLVMRQWNPSTVTKCFIVGYLPIIICGQGTSAMNYASHCDDIEYPGPLGGGLTSMRFTLRILYDQYTRGQNFWTKSNEDLDLARFLGSKWTFYRHPEVDFIVTWETSAPFTDSIVSGPHQHPGIQMLMKKKILIPSFRTKPKGRSTIKVKINPPKLMIDKWYPQTEFCEVTLLTIHATACDLRFPFCSPQTNTSCIQFLVLSGAYSGYISILPDKANESQLRAFLATNVTDDSNVCNTLATPYMLKYPPPTKKTNSGTAAQYSPDSQDGQNIYTNLVQTIMQNNNVWFTKAKTAWTNLHSQYGVPTSPGLEYHTGFFSAIFLSPVRLNSQFPGLYTTIKYNPLTDKGEGNRIWCDPCNKESFMYSPPQSKFLIENIQLWAAVSGYLDYCTKASKDESFKYNYRVLIQCPYTVPQLYIQTQPQRGYIPYSNNFGMGKMPNDSSVIPVRWRCRWYPALWNQQQVLEDIFMSGPFAYKGDQPSATLNTKYAFKWLWGGNRIFQQVVKDPCSHQQDQAVGPSRKPRAVQVFDPKYQAPEWTFHAWDLRRGLFGRQAIKRVSAKPTADEILSTGPKRPRLEVPAFEEGQEKSLLFRQRKHLLWEETTEEETEAQSEEEQEEEEQQQLLRRLQQQRELGRGLRCLFQQLTRTQMGLHVDPQLLAPV

SEQ ID NO: 3273 - protein, 153 aa, Alphatorquevirus sp.; identical to SEQ ID NO: 2263

SEQ ID NO: 3274 - protein, 125 aa, Alphatorquevirus sp.; identical to SEQ ID NO: 2268

SEQ ID NO: 3275 - DNA, 2870 bp, Betatorquevirus sp.
caggtactggaggtgagtgaaaccaccgaaattaaggggcttaatgggcttaagcagtcttggcggaacgggcaactaacttaatcactttattacagatgtccaaatttatgaaaccatgcctgtactcacaaaaaggagtagaaggacaatggctaaataatatttgcggatctcacgacctattctgtggatgctgtaacccctttgaccacctaaaagacatcttgaaaagacaaacatggcaccctaccagagatattggaacttctacagaaaatggagacgacccagatttccctactatcgacgccggagacttagaaaaccttttccgaaccgccgacgaagaaaacgaacggtaagaagacgtcgccattttaaaacttataaaaagaaactaaaaagaattaaaatacaacagtggcaaccatctactattaaaaaatgccacattaaaggatatttatgcctttttcaggcgggacaaggtagagaatccaacaactacactttattcaaagaaagctacaccccggaacatgaaccgggcggtggcggttggtctctacaacaactatcacttggaaatttattccaacaaaacaatgacttaatgaactactggactaaaagcaattatagactaaatatgtgtagatactatggagtaacattctacctatttagacaacaatttactaactatatattttcatacttctgggacgcccctaaaaatgtaaccaaatattactatgcaagctaccacccaatgaaaatgttagaatatcatagaaaagtagtagttccaagctttgcatcacaaccacacaaaagaaaaccatacaaaaaaattaaaataaaaccgccaaaactaatgaaaacccaatggttctttcaacaacacttatcagactacccactaatatacttttcagcaacagcttgctcactagacaacatgtttggttcagacaaagcagaaaacagtaatgcctctatatacatgctaaatacaggcttttttaaacatccctgtttccaattcaaatcaacagtagaacccacatatggatacacaccaaactcagaaaactacctatggggaatacaaaatgaatatgaaatttttaataaaaacaaaagatcccaagctatatacctaggacaatcaatgctaaatgaagccggcacagctatgggaatatattcctcaaccaaaaaagacacctggggcaacccatttcactggcaatacttaacaggttcacataaaacatttataacattagcatcagaaacaccaagcgaattcctacaatcacaatcagacctaaccaaagaattaaaagacacacaagaaagacacttaccatcagtactaacagtaagatataacccatacaaagacaaaggaaaaggaaataaagtatattttatacctacatacaacagttctcataataattgggaaccaacatcagacccagacttaatgctcactgattatccactatggatactattatggggcttagaagacataatgaaaaaaatgggaaaatgcccaaatatagacaatgactggatactagtaatacaaactagctatttttcagactcagaaaaatactacgtaccactttcatgggactttgtacatggacagggcccctacggaaaaccacacgaagaaataaacccacacgacaatacatactggtttccaaaattcagatatcaaagacaagctttaaatgacattatacaaacaggaccagctgtagttagatttgaccacacaaaaaatatacaagccttatgtaaatataatttctcttttaagtggggaggcaacccatcaccaatggaaaacgtctacgacccaaacagtcaacccattacccccacccccggtggattcggcctacaaaatgaaatcactaatccagcaacagggatcgaaacattcctatatcccttcgacattagacgcgacttccttacgcagtcagctacaaaaagaattacagaaagcacaactgatgaaagatgtttgttcacagatggaacagaaaatccaacagacgtcaaactcttcccgcaagaaacacaaacgaaaaagaccccggaaacacaagaggagacactactccagcagctcgagcacctcagacaattcaacctacaactccaacagcgattcaacaacctaaaacaatcatttttacaaatgtaaaaaaagcatacttatttccaccagaaaaacctaaaaaaccccgtagatttaccccatacgaatgggaaacagaaaaacaaatagcatcatggctaaaaaggccaatgagatactttgccacagatgaccccttttacccatgggtacccccagaacctctcgttaactttgatattgtaactaagtactcaaataaaggccagcattaattcacttagtggtgtctgtttcttttattataaacttaaataaacatccaccgcctccctaatacgcaggcgcaaagggggctccgcccccttaaacccccagggggggtaaaccccccctaagccccccctactcattaatattcaacaggaaaaccacctaattagaattgccgaccacaaactgtcaaccagttcctcttttgaaaacacttccccatttactaattattattcattatattaattattaaacaccgtaaatccggggaggagctaaaacactatataactaactacacttccgaatggctgagtttatgccgccagacggagacactatataactaactacacttccgaatggctgagtttatgccgccagacggagacaagaaaacttcttggctgcttaaggg

SEQ ID NO: 3276 - protein, 666 aa, Betatorquevirus sp.
MAPYQRYWNFYRKWRRPRFPYYRRRRLRKPFPNRRRRKRTVRRRRHFKTYKKKLKRIKIQQWQPSTIKKCHIKGYLCLFQAGQGRESNNYTLFKESYTPEHEPGGGGWSLQQLSLGNLFQQNNDLMNYWTKSNYRLNMCRYYGVTFYLFRQQFTNYIFSYFWDAPKNVTKYYYASYHPMKMLEYHRKVVVPSFASQPHKRKPYKKIKIKPPKLMKTQWFFQQHLSDYPLIYFSATACSLDNMFGSDKAENSNASIYMLNTGFFKHPCFQFKSTVEPTYGYTPNSENYLWGIQNEYEIFNKNKRSQAIYLGQSMLNEAGTAMGIYSSTKKDTWGNPFHWQYLTGSHKTFITLASETPSEFLQSQSDLTKELKDTQERHLPSVLTVRYNPYKDKGKGNKVYFIPTYNSSHNNWEPTSDPDLMLTDYPLWILLWGLEDIMKKMGKCPNIDNDWILVIQTSYFSDSEKYYVPLSWDFVHGQGPYGKPHEEINPHDNTYWFPKFRYQRQALNDIIQTGPAVVRFDHTKNIQALCKYNFSFKWGGNPSPMENVYDPNSQPITPTPGGFGLQNEITNPATGIETFLYPFDIRRDFLTQSATKRITESTTDERCLFTDGTENPTDVKLFPQETQTKKTPETQEETLLQQLEHLRQFNLQLQQRFNNLKQSFLQM

SEQ ID NO: 3277 - protein, 101 aa, Betatorquevirus sp.
LAERATNLITLLQMSKFMKPCLYSQKGVEGQWLNNICGSHDLFCGCCNPFDHLKDILKRQTWHPTRDIGTSTENGDDPDFPTIDAGDLENLFRTADEENER

SEQ ID NO: 3278 - protein, 131 aa, Betatorquevirus sp.
MFVHRWNRKSNRRQTLPARNTNEKDPGNTRGDTTPAARAPQTIQPTTPTAIQQPKTIIFTNVKKAYLFPPEKPKKPRRFTPYEWETEKQIASWLKRPMRYFATDDPFYPWVPPEPLVNFDIVTKYSNKGQH

SEQ ID NO: 3279 - DNA, 2870 bp, Betatorquevirus sp.
cgggagccgaaggtgagtacaaccaccgaagtctaggggcaattcgggctgggtcagtctggcggaacgggcaactaacttaaactatattacagatgagtgactatgtaccaccaaaattatcaaaaaaacaactggatttacaaaatgtgaatacctacgtaaacgtacattgcctgacctgcgactgcgaacaaccattaaaacatatcatcaaacaaattactaaccaagaaccatccctgaaaccatggctcgctactatcgccgatactggagaccacgctaccgaaaaagatatcgatggtttcgaacctggagaactagagcgcctcttcgctggagaagacgcagaaagcgcagggtaagaagaaaactttcttctattaaaataagacaatatcaaccacaaagaattaacagacttaatataaaaggactatactgtctaatgttagtacataaagtacgctacaatcatgactttaatcaatatgaaacaagcgtaccaccagaaggactccctaacggaggtggatttacaattttaagatttacttggaatgctctttttgaacaacacgaaaaagcacataatgtatggactaaatcaaacaaaaacttgcctttatttagatacttaggatgttctataaaaatatatagacctttactagtagacttagtagttaaatttcaaacatgctatcctatgtcgagctcaaaactaatgtttacaggaacacaaccctctataatgatgatgactagaggagcaaaaattattaaatgccaaaaaaacgctccgaatgccaaaccttacaaaaaattcttttttaaaccaccacaacaaatgacaaacaaatggtacttccaacacacagaacaaaacacaggactcttattaatacaagcagcctcagcaagtctagaccaatactatgtatctcaatattcagacagctcaaccatacaattagtatcattaaacacaagaatatttcaaaaccttaaatttgacacaaaagacacatatgggtatcatccaagaaaagactactatttatgggccacaaacggaacagataaactaggagacttaatatacttaggacaatccaaactatataacgatggagaacaaattggcaaaggaacagatgaaaaaatgtggagaacaaaaagctttaaagaggcattagctacatatatgcaacaaaaccaaaaatggggcaacccatttcacagcaaccacatacaccaacaacaccctaactactactttacaagaaaacctccactactagcattcaccgacccacaattaaaattagacacaaatatatccaacgtactggaaggaagcacaccaatactacataaaatttcagacacatttttaattaatgtccgatataacccatttaaagacaaaggatacaacaacaatgtatacatactcccaaactttacagaccacgaagacaacctagaacccttaccagacccagacttacaaaacccaggattccctaattggctatctacatttggctttgaagactacttaataaaactaggaaaaaaaacaaaaatacctgaacattacatcatgctacacaaatccacattctttgacggacccctcacatactacctatttttagaccactggtttttacacggagacagtgaaaatttaataggcagaacacaatgggacaatactaactggtatccaatgataaaacaccaagaacaagaattaacaaatttagtgctttcaggaccaggaacacctaagctaggaagcacaaaactagcagaatgtaaaatggaatacaactttaaatttaaggttggaggatgctcagcccctgtggaaaaagttgcaaacccagcaacacaaccgacttttgctacaccaaataatatccttgacacaaattcgttacagagtccagaagaaccaatcgaaagcttcctctaccaattcgattggagacgagaccaaattacagaaagcgctgcacaacgaattacaaaagacttcccaactaaaaaatatctatttacagatgcagcaccaactggaacaagcgtcccactccaccaaacactccaaaaagaaatcctctcgtcgtcggaggaggaaacccaagaagagacactattcgagcagctccagcgacagcgaatcaagcaaaaagacctccgacacagaatcagacagctcctaactcaaatacaacaattacaataaaaaaacaaaaactaacggtaaacctatggggagacccacctaaaaatagaagaatgactgcaaaagaaaaagaagaagaaatacaagaaagtaaaatatggggacattatgtacgagactatatactagataagcctttttacaaaaatatgccaattaccccaataatcccaagacttaactttgatcttaattacaaagaataaagcctgcatactttcaaacctcggtgtccatttatttaagtttaaactaatataaacatccaccacatctcccaaatacgcaggcgcaaagggggctccgcccccttacacccccaagggggctccgcccccttacacccgggctccgcccccttacacccccttataaatattcaacaggaaaaccacctaattagaattgccgaccacaaaccgtcacatacttccccttttataacatacttccccttttgctaattattattcatgaaattaattattaatctgcgtaaatccggggcggtactacatacctatataactaactacacttccgaatggctgagtttatgccgccagacggagactggagcagtacactgattcaggctgaccaaggg

SEQ ID NO: 3280 - protein, 670 aa, Betatorquevirus sp.
MARYYRRYWRPRYRKRYRWFRTWRTRAPLRWRRRRKRRVRRKLSSIKIRQYQPQRINRLNIKGLYCLMLVHKVRYNHDFNQYETSVPPEGLPNGGGFTILRFTWNALFEQHEKAHNVWTKSNKNLPLFRYLGCSIKIYRPLLVDLVVKFQTCYPMSSSKLMFTGTQPSIMMMTRGAKIIKCQKNAPNAKPYKKFFFKPPQQMTNKWYFQHTEQNTGLLLIQAASASLDQYYVSQYSDSSTIQLVSLNTRIFQNLKFDTKDTYGYHPRKDYYLWATNGTDKLGDLIYLGQSKLYNDGEQIGKGTDEKMWRTKSFKEALATYMQQNQKWGNPFHSNHIHQQHPNYYFTRKPPLLAFTDPQLKLDTNISNVLEGSTPILHKISDTFLINVRYNPFKDKGYNNNVYILPNFTDHEDNLEPLPDPDLQNPGFPNWLSTFGFEDYLIKLGKKTKIPEHYIMLHKSTFFDGPLTYYLFLDHWFLHGDSENLIGRTQWDNTNWYPMIKHQEQELTNLVLSGPGTPKLGSTKLAECKMEYNFKFKVGGCSAPVEKVANPATQPTFATPNNILDTNSLQSPEEPIESFLYQFDWRRDQITESAAQRITKDFPTKKYLFTDAAPTGTSVPLHQTLQKEILSSSEEETQEETLFEQLQRQRIKQKDLRHRIRQLLTQIQQLQ

SEQ ID NO: 3281 - protein, 90 aa, Betatorquevirus sp.
MSDYVPPKLSKKQLDLQNVNTYVNVHCLTCDCEQPLKHIIKQITNQEPSLKPWLATIADTGDHATEKDIDGFEPGELERLFAGEDAESAG

SEQ ID NO: 3282 - DNA, 2869 bp, Betatorquevirus sp.
caggtaccgaaggtgagtgaaaccaccggagttaaggggcttattgggctaaagcagtcttggcggaacgggcaagaaactaaaataaactattattttacagcaatgagctcctaccttacaccagttatctacagcaagaatgctttagaaaaccagtgggtaaatactattttcaacacacacgatctttgctgtggatgcaacgacgccattaaacacctagccgccattttacaaagaaaaggaacacaactatgcctcccttcaacttctaccggagacgctactacccaaaccgatggagacgccgtagatactttagacgccggagatttagaccttctattcgccgaagattttggagaagacgaacggtaagaagacgccgtttttttaaaaaatataaaagaaaacttactaaaattaaacttaaccaatggcaaccacaaactataaacaaatgccacataaaaggaaatctttgtgcttttacttgtggaagaggtagagaaaaccacaattttattttaacacaagaaagctatgtacctacatctcaacctggagggggatcttggtctatactacaatttaccttaagagtactatatgatgaacataaagcaggcagaaattggtggacaaaaggaaatacaggtttaccacttgtaagatatatactatgcaaacttaaattttacagaagtaaagacacagactacctagtaacaatacaaagaacaccacctttcgaagtaactagagactcatacttaagcacacaaccatctagacacttaatgcaccacaaatctattatagttcctaaactaggaagaggaccaaacaaaaaaacatatataaaaagaaaagttctccctccagcaatgtttcaaaacaaatggtactttcaacaagacatatataatataccattttttatgttaaccatttcagcactagaactagatcaaatgtacgccccagaagaccaaataagctcaaatataacacttatatcactaaatacaaatgcatttcaaatgagtaactgggaaagagaaccatacagcacaaaatcagcaggaacatataacatatacttatggagttaccaaaatggtgacgataaaaataaaaaatggcaaaacatatattttttaggaaactgtaaagaatacacagaaggaactaagttaaatacattgcaagaatgcaaagaggtagcagaaattaaaaataaacaaaaatggggaaatccatttacacactggtataaccataaagatgcaagaatattttatggtgctataccaacaacaagacaagaaaccgatgatgctaacatattagaattagaagatttgtttatagaatgcagatacaacccatttaaagacaaaggcacaggaaacaaagtatacttagtacccacagacacaggcctaggtagctttttaacattaccaacaaaaaatgaattattaatagaaaatttaccactatggcttatattttggggttgggcagactggataaaaaagtctaaaccaatagcacacttagaagaagaataccaaataataatacaaactccatatatatttccaaaattaccatgttatgtactaacagacaaatactttctacacccaccaaatgacggaacacacacaaccacactatcacaaacagaccaactacattggcacataaaatacaactttcaagaacaacaatttaacttactagcaaaaacaggaccagcagcaccaaaaataaatgaagttaaacaaatagaagcacactttaactataacttttattttaagtggggaggaagcccagctccaatggaacaaattagtgacccagcagaccaagaaaaattccccacgcccaatacgcaactccaaagacttgagattgagagtccaacaaaacccaaacaacacttcttgtacaccttcgacgaaaagcgacacacactcacactcaaagctgcaaaaagacttaaaaaagactattcaactccaacattttttacagactttggagcaaaagacatcccgctcaaagcacaaacggaaagcgacagctcatcggaggaggaagaaatccaaacatcactccagagagaagacaaactcaagcagtacctccagcgaaagcgactccagtacagacagcgaatccacaacctcctaaaaacaaaaaaattattccccctttaagagacatgtttggacaaccttactataaaaaccgtagacttaatgctaaagaatttgaacaagaattgcttgatgctaaatgctggaaaagacgccccagactgtatatctttgataaacctgattatgaattacctactattgaaccacttgtaaacattggtgtaaatttttcattaaactttaaagagtaggccagcaaatattcacttgtcggtgtcagtttatataagtaataaccttaataaacatccatcacctccctaatacgcaggcgcacaagggggctccgcccccttaaacccccaagggggctccgcccccttaaacccccaggggctccgcccccttaaacccccaagggggctccgcccccttacaccccctaattaatattcaacaggaaaaccacctaattataattgccgaccacaaactgtcaaccgttgcatatacttccctaaattaaactgcacttctgctttttcagaaacactcccactaattcattaataatcagacgctattcctgggaggagcaacacatctatataaccaagtgcactgacgaatggctgagtttaccccgccagacggagaccagacaggacactgactgggctgcttttggg

SEQ ID NO: 3283 - protein, 659 aa, Betatorquevirus sp.
MPPFNFYRRRYYPNRWRRRRYFRRRRFRPSIRRRFWRRRTVRRRRFFKKYKRKLTKIKLNQWQPQTINKCHIKGNLCAFTCGRGRENHNFILTQESYVPTSQPGGGSWSILQFTLRVLYDEHKAGRNWWTKGNTGLPLVRYILCKLKFYRSKDTDYLVTIQRTPPFEVTRDSYLSTQPSRHLMHHKSIIVPKLGRGPNKKTYIKRKVLPPAMFQNKWYFQQDIYNIPFFMLTISALELDQMYAPEDQISSNITLISLNTNAFQMSNWEREPYSTKSAGTYNIYLWSYQNGDDKNKKWQNIYFLGNCKEYTEGTKLNTLQECKEVAEIKNKQKWGNPFTHWYNHKDARIFYGAIPTTRQETDDANILELEDLFIECRYNPFKDKGTGNKVYLVPTDTGLGSFLTLPTKNELLIENLPLWLIFWGWADWIKKSKPIAHLEEEYQIIIQTPYIFPKLPCYVLTDKYFLHPPNDGTHTTTLSQTDQLHWHIKYNFQEQQFNLLAKTGPAAPKINEVKQIEAHFNYNFYFKWGGSPAPMEQISDPADQEKFPTPNTQLQRLEIESPTKPKQHFLYTFDEKRHTLTLKAAKRLKKDYSTPTFFTDFGAKDIPLKAQTESDSSSEEEEIQTSLQREDKLKQYLQRKRLQYRQRIHNLLKTKKLFPL

SEQ ID NO: 3284 - protein, 91 aa, Betatorquevirus sp.; identical to SEQ ID NO: 1300

SEQ ID NO: 3285 - protein, 62 aa, Betatorquevirus sp.; identical to SEQ ID NO: 3103

SEQ ID NO: 3286 - DNA, 2869 bp, Betatorquevirus sp.
cgggtaccgaaggtgagtgaaaccaccgaagttaaggggcataatgggctggggcagtctggcggaccgggcaactaacttaatcatattttacagatgtcctttagcaaaccatgcttatataaaggaaaagccttagaaacccaatggatgaatacaatttttaatacacacgacctcttctgtggctgttctgatccaataacccacattaaaaaaattcaatcaagagataaatggctccataccaaagacgccgctactactacagacaaccttggaaatggagacgacggagacttccatatcgacgaaggagatttacaagaactcttcgaaaacgaagacgacaaaaatgggtaagaagaaaatattttcataaaaagcctaaaagaaaactaaaaaaactaaaactaactgaatggcaaccaaatgtaatacataaatgccacataaaaggctttttacctctatttgaaggaggaaatggaaggcaagaacaaaactatactttatacaaaaacagttttgtaccacctcatgaacctggtggcggagggtggagtatacaacaattaggacttggcatactttttaaagaaaataacttactacaaaactactggacaaaaactaactacagactaaatatgtgtagatatattggttgtaaaataacttgcttccgccaaccattttgtgattatatactgcattacttctttgatcctcctaaaaatgtaacaaaatattattatgctagttttcacccacaaaaaatgctacaactaaatcacaaagttattgtacctagcttttatacacaaccgctaaaaagaaaaccaacaaaaaaaatttatatcccaccacctaaaccttttagaaatcaatggttctttcaacaacaccttagtagctttccacttgtacacatagctgccaccgctgttagcttaactaacatgtacggctctagtaaagctcaaaacaacaactgcaccataaacacattaaacacagtcttctttaaacacccatgctttcagcacagagactctaccacttacggatacacaccaaatgaatcaaattacctatttggagtacctagagccagtgaaccactaaaaacaacaaaatactctcaagccacatacttaggaaattcagaactaaatgaatctggaatagcaggaccatggtcagatgacacacctaaaaacaactggggaaacccatttcactggacatacttaacaggcacatcaccaacttttataaccacaggatcacaaacacctaaggaaacattatcaaaagaaaaccaacaaaaacagattccagaaacacaatacagaaaaacagacagcattatacaacttagatacaatccatacaaagacttaggccaaggcaatagaatatacatggtaccaacatatgcttttacacacaataaatgggaacctacttcagacaaagacttaatattagaaaactttccactatggataatgttatggggatatgaaaatattttaaaatctatgggaaaatgccctaatatagactatgactgggtacttgtaatacaatgcagctatgtatcaggaacagaaccatacattgtacctttatctgaatactttataaatggtcaaggcccttatgatactgctaaagaagaaattaacccacaagactacacacactggtatccatgctacagacaccagagagaagcagtacatgacattataaacactgggccagcagtatttagaagtgatcatgaaaaaaatatgcaagccataataaaatatgactttctttttaagtggggcggaaacccatcaccaatggaatccgtatacgaccccaacagccaacctatcacacccaccccacctggacagtacctacaaaatgaaattactgacccaacaaccaacatccaaagctttatctacccctgggactgtagacgagactaccttacacaaacagctacaaacagaattatgcaaagcgacttatatgaaacaactttgttcacagatggagaccaagctacaacaaacatcccactcctcaaaacaacgacgccacagacgcaaaagaccacgaaagaacaagaagcgtcactactcttccagctcgagcagctccagcaattcaacagacaactacaacagcgattcaacaacctaaagtccttattacaggaccaataaaaagagcttatcttttccctgagagagttcgcaaaaaccgtagattaacaccctcagaaactgaaactgatatacaaattgctaaatggctaaaaagacctgtaagacacttctttgatgatcgcccattttacccctgggttgtgcctgaacctcttgtaaactttgacattgtaagcaaatataataaaggcctgcattaattcacttgaggtgtccatttatttaacttaaacttatataaaccaacaccgcctccctaatacgcaggcgcagaagggggctccgcccccttaaacccccggggaggtaaaccccccccctaagccgcagaagggggctccgcccccttaaacccccgggggggtaaaccccccctaagcccccccaaatcattaatattcaacaggaaaaccacataattagaattgccgaccacaaaccgtcaaccgttacaactacttccctaaaacacacactacttctcctttttaaaactccacccacaaaattaattaataaacaacatcatatcctaggaggagctcacacactatataactaactacacagacgaatggctgagtttatcacgccagacggagacagtataacaactactggctgccacaggg

SEQ ID NO: 3287 - protein, 665 aa, Betatorquevirus sp.
MAPYQRRRYYYRQPWKWRRRRLPYRRRRFTRTLRKRRRQKWVRRKYFHKKPKRKLKKLKLTEWQPNVIHKCHIKGFLPLFEGGNGRQEQNYTLYKNSFVPPHEPGGGGWSIQQLGLGILFKENNLLQNYWTKTNYRLNMCRYIGCKITCFRQPFCDYILHYFFDPPKNVTKYYYASFHPQKMLQLNHKVIVPSFYTQPLKRKPTKKIYIPPPKPFRNQWFFQQHLSSFPLVHIAATAVSLTNMYGSSKAQNNNCTINTLNTVFFKHPCFQHRDSTTYGYTPNESNYLFGVPRASEPLKTTKYSQATYLGNSELNESGIAGPWSDDTPKNNWGNPFHWTYLTGTSPTFITTGSQTPKETLSKENQQKQIPETQYRKTDSIIQLRYNPYKDLGQGNRIYMVPTYAFTHNKWEPTSDKDLILENFPLWIMLWGYENILKSMGKCPNIDYDWVLVIQCSYVSGTEPYIVPLSEYFINGQGPYDTAKEEINPQDYTHWYPCYRHQREAVHDIINTGPAVFRSDHEKNMQAIIKYDFLFKWGGNPSPMESVYDPNSQPITPTPPGQYLQNEITDPTTNIQSFIYPWDCRRDYLTQTATNRIMQSDLYETTLFTDGDQATTNIPLLKTTTPQTQKTTKEQEASLLFQLEQLQQFNRQLQQRFNNLKSLLQDQ

SEQ ID NO: 3288 - protein, 88 aa, Betatorquevirus sp.
MSFSKPCLYKGKALETQWMNTIFNTHDLFCGCSDPITHIKKIQSRDKWLHTKDAATTTDNLGNGDDGDFHIDEGDLQELFENEDDKNG

SEQ ID NO: 3289 - DNA, 2868 bp, Betatorquevirus sp.
cgggtaccgaaggtgagtgaaaccaccgaagttaaggggcataatgggctggggcagtctggcggaccgggcaactaacttaatcatattttacagatgtcctttagcaaaccatgcttatataaaggaaaagccttagaaacccaatggatgaatacaatttttaatacacacgacctcttctgtggctgttctgatccaataacccacattaaaaaaattcaatcaagagataaatggctccataccaaagacgccgctactactacagacaaccttggaaatggagacgacggagacttccatatcgacgaaggagatttacaagaactcttcgaaaacgaagacgacaaaaatgggtaagaagaaaatattttcataaaaagcctaaaagaaaactaaaaaaactaaaactaactgaatggcaaccaaatgtaatacataaatgccacataaaaggctttttacctctatttgaaggaggaaatggaaggcaagaacaaaactatactttatacaaaaacagttttgtaccacctcatgaacctggtggcggagggtggagtatacaacaattaggacttggcatactttttaaagaaaataacttactacaaaactactggacaaaaactaactacagactaaatatgtgtagatatattggttgtaaaataacttgcttccgccaaccattttgtgattatatactgcattacttctttgatcctcctaaaaatgtaacaaaatattattatgctagttttcacccacaaaaaatgctacaactaaatcacaaagttattgtacctagcttttatacacaaccgctaaaaagaaaaccaacaaaaaaaatttatatcccaccacctaaaccttttagaaatcaatggttctttcaacaacaccttagtagctttccacttgtacacatagctgccaccgctgttagcttaactaacatgtacggctctagcaaagctcaaaacaacaactgcaccataaacacattaaacacagtcttctttaaacacccatgctttcagcacagagactctaccgcttacggatacacaccaaatgaatcaaattacctatttggagtacctagagccagtgaaccactaaaaacaacaaaatactctcaagccacatacttaggaaattcagaactaaatgaatctggaatagcaggaccatggtcagatgacacacctaaaaacaactggggaaacccatttcactggacatacttaacaggcacatcaccaacttttataaccacaggatcacaaacacctaagcaaacattatcaaaagaaaaccaacaaaaacagattccagaaacacaatacagaaaaacagacagcattatacaacttagatacaatccatacaaagacttaggccaaggcaatagaatatacatggtaccaacatatgcttttacacacaataaatgggaacctacttcagacaaagacttaatattagaaaactttccactatggataatgttatggggatatgaaaatgttttaaaatctatgggaaaatgccctaatatagactatgactgggtacttgtaatacaatgcagctatgtatcaggaacagaaccatacattgtacctttatctgaatactttataaatggtcaaggcccttatgatactgctaaagaagaaattaacccacaagactacacacactggtatccatgctacagacaccagagagaagcagtacatgacattataaacactgggccagcagtatttagaagtgatcatgaaaaaaatatgcaagccataataaaatatgactttctttttaagtggggcggaaacccatcaccaatggaatccgtatacgaccccaacagccaacctatcacacccaccccacctggacagtacctacaaaatgaaattactgacccaacaaccaacatccaaagctttatctacccctgggactgtagacgagactaccttacacaaacagctacaaacagaattatgcaaagcgacttatatgaaacaactttgttcacagatggagaccaagctacaacaaacatcccactcctcaaaacaacgacgccacagacgcaaaagaccacgaaagaacaagaagcgtcactactcttccagctcgagcagctccagcaattcaacagacaactacaacagcgattcaacaacctaaagtccttattacaggaccaataaaaagagcttatcttttccctgagagagttcgcaaaaaccgtagattaacaccctcagaaactgaaactgatatacaaattgctaaatggctaaaaagacctgtaagacacttctttgatgatcgcccattttacccctgggttgtgcctgaacctcttgtaaactttgacattgtaagcaaatataataaaggcctgcattaattcacttgaggtgtccatttatttaacttaaacttatataaaccaacaccgcctccctaatacgcaggcgcagaagggggctccgcccccttaaacccccgggggggctccctaatacgcaggcgcagaagggggctccgcccccttaaacccccgggggggtaaaccccccctaagccccccccaaatcattaatattcaacaggaaaaccacataattagaattgccgaccacaaaccgtcaaccgttacaactacttccctaaaacacacactacttctcctttttaaaactccacccacaaaattaattaataaacaacatcatatcctaggaggagctcacacactatataactaactacacagacgaatggctgagtttatcacgccagacggagacagtataacaactactggctgccacaggg

SEQ ID NO: 3290 - protein, 665 aa, Betatorquevirus sp.
MAPYQRRRYYYRQPWKWRRRRLPYRRRRFTRTLRKRRRQKWVRRKYFHKKPKRKLKKLKLTEWQPNVIHKCHIKGFLPLFEGGNGRQEQNYTLYKNSFVPPHEPGGGGWSIQQLGLGILFKENNLLQNYWTKTNYRLNMCRYIGCKITCFRQPFCDYILHYFFDPPKNVTKYYYASFHPQKMLQLNHKVIVPSFYTQPLKRKPTKKIYIPPPKPFRNQWFFQQHLSSFPLVHIAATAVSLTNMYGSSKAQNNNCTINTLNTVFFKHPCFQHRDSTAYGYTPNESNYLFGVPRASEPLKTTKYSQATYLGNSELNESGIAGPWSDDTPKNNWGNPFHWTYLTGTSPTFITTGSQTPKQTLSKENQQKQIPETQYRKTDSIIQLRYNPYKDLGQGNRIYMVPTYAFTHNKWEPTSDKDLILENFPLWIMLWGYENVLKSMGKCPNIDYDWVLVIQCSYVSGTEPYIVPLSEYFINGQGPYDTAKEEINPQDYTHWYPCYRHQREAVHDIINTGPAVFRSDHEKNMQAIIKYDFLFKWGGNPSPMESVYDPNSQPITPTPPGQYLQNEITDPTTNIQSFIYPWDCRRDYLTQTATNRIMQSDLYETTLFTDGDQATTNIPLLKTTTPQTQKTTKEQEASLLFQLEQLQQFNRQLQQRFNNLKSLLQDQ

SEQ ID NO: 3291 - protein, 88 aa, Betatorquevirus sp.; identical to SEQ ID NO: 3288

SEQ ID NO: 3292 - DNA, 2868 bp, Gammatorquevirus sp.
cgggagcccgaggtgagtgaaaccaccgaggtctaggggcaactcgggctagggcagtctagcggaacgggcaagaaacttaaaactatttttcttttctagatgtcaacctacttcaaacaatgccgctacaatgcagaaacagttcaaaatatgtggatgtcagtagtaggtgactttcatgattcaatttgcagttgttggcatccttttgctcatatgcttgatttactctttccagaaggccataaagatagagataaaaccataagagaaattattgaaagagattcacaatgccattctggtggagacggagaagaagattttggtggggcaaacccaggtaccagcgccgccgtcgccgtcgctggaccaccagacgcaaacaaagaagacacagaagacctagatatagaagcactcgtcgccgccgcagaggccgcagaaaaaaggtaagaagaaaaagaaaagctatacctattttacaatggcaaccagactctataagaaactgtaaaataaaaggttatggagctttactctatggagctgaaggaacacagtacttgtgctatactaaccaaagatttgaattgccattaccacaatttccttcaggaggaggctttgctgtacaattatatagtctacaatacctgtatgaagaatcattgtttaaaaacaatatctggactgcaagcaatatatttacagacctttgcagatacctaaaatgtaaactttacttatatagacatgaaaaaacagactttgtagtttcatatagtagaatgcctccatggaacttaacaaagtatacatacccgagtgcacacccatacatgttacttcaaagtagacataagaaagtactactaagcaaaactactaatccaaaaggcaaactctggaaaaaaattactattaaaccaccaaaacaaatgataagtaagtggttttttcaaaagcaattttcacatcaaaatttatttcaattatcagcagctgcagcaagttttaaatatccaagattagcttgctgcaatgaaaatagagtgataactatttactatcttaacccacaattttacacacacagcacatgggcccaatctataaataaatactgggaaccatatgctcatgaatctagaactttaactttttactacaaagaaggtaatgctactaaatactaccaacctatattagaatacgataaacttccaacacaatctcaatactatgctagcatacaaaaagacactgggtggttttcaaaaaaaattttaactgctacagttgtaaaggaccgcccagacggtacagctcaagctaatttacctttaaatgcagctagatacaatccagaactagacaatggaaaaggaaataaagtttatttggttagtgtattaacaggatactataacaaaccatcagaagatgatttaatattccaaaatgctcctctctggttaatttttcatggattcttaaactatattattactaaaaaaggaaaaggctttcctgcagcacatatgtttgttattgaaagtccatttataactccacaaccttctgttataaccaaacagtttttcccttttgtagacttaaactttacattaggattaaatccttacaaagcttacatttctagtaaacaagcaacactatggtacccaacagtagagcaccaaatagaaactatcaatgcaatagtagaactaggaccatatatacctaaatattcagatgacagagacagtacatgggaactaccttaccattatattttttattttaagtggggaggacctgaaacacctcaacaagaagttgcagacccaaacaccaaaaacatctatactgtgcccgatacaatcacaggaacagtacagatatcaaacccaatcaaacaaagtactgaatcccttatacacaactgggatatcagaagggggctcattacacaaaaagctcttaaaagaatgtatgagaacctggaaactgactcagatttccaaccagatacagaacaaacaccaacaaaaagaccaagagttacaggagaactatgccatatccaagaaagcaacaaagagatccagagctgcctcgaagccctttgccaagaaacagaggaagaagagacaccacaaacacaggagggaatcatccagctcatcaacaagcagcagcaacagcaacagcagctcaagcgaaacatcttaatgctacttcaagaaataaaacacaaacaacaaatgttacaattaaccactggtctaatacaataaacttatttaaaccaggctttgaaatggaaacagaaaaagaactagctgcagcctttaaaagaccagttagaaaatttaaaacagactccccattttacccttggttaccccccactcctattgtaccccgagtaaactttaacctgaactacactttctaggccgacactgttcacttagcggagtatgtttaataaagtctaacccccaaaaaaatgtaaaaaaataaaaaaaaaaaaaaaaataaaaaaatgtaaaaattcggcgctcgcgcgcgctgcgcgcgcgcgagcgccgtcacgcgccggcgccccgcaccccccctacgtcacaaaccacgcccccgccgccatcttgggtgcggctgggcgggggctaaaatggcgggacccaatcaatttatactttcactttccaattaaaacccgccacatcacacacaaggggtggagtttctgaaactatataactaactacactgacgaatggctgagtttaccccgctagacggtgcagagaccgacagagcgcagcgaggaggtctacagctgcccatggg

SEQ ID NO: 3293 - protein, 670 aa, Gammatorquevirus sp.
MPFWWRRRRRFWWGKPRYQRRRRRRWTTRRKQRRHRRPRYRSTRRRRRGRRKKVRRKRKAIPILQWQPDSIRNCKIKGYGALLYGAEGTQYLCYTNQRFELPLPQFPSGGGFAVQLYSLQYLYEESLFKNNIWTASNIFTDLCRYLKCKLYLYRHEKTDFVVSYSRMPPWNLTKYTYPSAHPYMLLQSRHKKVLLSKTTNPKGKLWKKITIKPPKQMISKWFFQKQFSHQNLFQLSAAAASFKYPRLACCNENRVITIYYLNPQFYTHSTWAQSINKYWEPYAHESRTLTFYYKEGNATKYYQPILEYDKLPTQSQYYASIQKDTGWFSKKILTATVVKDRPDGTAQANLPLNAARYNPELDNGKGNKVYLVSVLTGYYNKPSEDDLIFQNAPLWLIFHGFLNYIITKKGKGFPAAHMFVIESPFITPQPSVITKQFFPFVDLNFTLGLNPYKAYISSKQATLWYPTVEHQIETINAIVELGPYIPKYSDDRDSTWELPYHYIFYFKWGGPETPQQEVADPNTKNIYTVPDTITGTVQISNPIKQSTESLIHNWDIRRGLITQKALKRMYENLETDSDFQPDTEQTPTKRPRVTGELCHIQESNKEIQSCLEALCQETEEEETPQTQEGIIQLINKQQQQQQQLKRNILMLLQEIKHKQQMLQLTTGLIQ

SEQ ID NO: 3294 - protein, 118 aa, Gammatorquevirus sp.
MSTYFKQCRYNAETVQNMWMSVVGDFHDSICSCWHPFAHMLDLLFPEGHKDRDKTIREIIERDSQCHSGGDGEEDFGGANPGTSAAVAVAGPPDANKEDTEDLDIEALVAAAEAAEKR

SEQ ID NO: 3295 - protein, 127 aa, Gammatorquevirus sp.
MPYPRKQQRDPELPRSPLPRNRGRRDTTNTGGNHPAHQQAAATATAAQAKHLNATSRNKTQTTNVTINHWSNTINLFKPGFEMETEKELAAAFKRPVRKFKTDSPFYPWLPPTPIVPRVNFNLNYTF

SEQ ID NO: 3296 - DNA, 2868 bp, Betatorquevirus sp.
cgggtgccgaaggtgagtgaaaccaccgtagtcaaggggcaattcgggctaggtcagtctggcggaacgggcaagaaactaaaaatattttattttacagaatgtcaagatatataccatctaaatcaacacttagacaacaaaaattaaaatggatgaattttttatgtcacggccatgacatattctgcgactgcccacacccactagaacacaccattggattaattttcgaacaagaaaaagaattaaaatttaacacccaagaaaaagatctaattaaaaaatgcgttactggagaagaaaccgctaccgctggagacgccatcgaccaagatattattggaaaagaagatttagacgccctatttggagaagattttggagaaaacgatacggggtaagaaaaagaaaacttaaatcaattagagttaaacaatggcaacctcattatataaaaagactacacataaaaggattttatccaatgtttatgtgcactaatgaaagacttggtaacaacttaaactgctacttagaaagtacagctcctcacaaaatgccagggggaggaggattttcaatatgtaactttaccttaaatatgctatatgaggaccatttaatagcaaaaaattggtggacaactggtaatgaaaatatgcctctaataagatacttatactgtaaaataacttgttatagagaagaaaatgtagactggttattttgttataataatagctatcctataaatgcaacaaaacttacatatatgagcacccatccacaagccatgatactaaacaaacatacaaaaataattacatgcagaagaaacaatagacacaaaaaaccatacaaaagaatttttattaaaccaccaacacaaatgcaaaacacatggtattttcaaaaagacttagcattcatgccactgttacaaactttcacaacatgctgctcgttagaccgcatgtttctaaactctaactcaatctcaaccacaactggctttatttccttagacaccaacggctggaaaagccacaacttccctagacaaactacacaaccatatgaaccagtaaacaatcaattattatttggcatgtacaatggtgaacatgaattaaccaaaatacaaataggagaattaacactattaggagacacatacaacaacacagacggaaccccatttaaagacgtagatatacaggcaaaaggaacacaatcacaatttcaacaaaaactacaaaaagctaaacaaaactcaggatactggggaaacccatttaacaaaaaatacttttatggagatcagagaattatatatagcatagtaccatgggacaccattgtcaatacttacacaaatgaaactgatacattaaagtcacaacactttaaatttcaaacacaagactgggtagactgtagatacaatccatttaaagacaaaggacaaggaaacaaaatatatttagtaaacacagattcaggaccacacttagatgattggacaccaccaacagacgaagatattgttacagaaaatataccaatatggctaggcctatggggttatttagactttcaaagaaaatgtaatactaccactactgtagatactcacagaatacttgttataaaatctccatatattgtacctaatacattaacttactttgtaccacttgatgaaacatttctacatggtttaagtccataccaagatcatttaataccttcagactactatggatggcatccaaaagtgcgatttcaagtacaatcaataaataaactaacaatatcaggcccactaactgcaaaactgcctaatgaaatatcagtagaaggacatataaaatatgacttttactttaaggttggaggacaacctgctcctatgtcaatcctcacagcaccagacaaacaaccaaaatggattacacccaataatcccaataacctcatccaaaacacttcgttgcagaatccaagcactcccttcgaatataccctctacaactttgacgaaagacgaggacaaattactaaaaaagctgcacaaagaatcacaacacacaaagaaactgaaagctctcttttaccaattacagacacaagcagcttctgcccagtcgcaccctacaaagaaacagagacaacggactcatcggagacggaagaagacgaagcaccgctcgagacacaactcctccagcaccgaagagagcaaaaactcctccgaaagcgaatcaacaagctcctactcagattagctcaattagaataaaaacatgtaatgtaacagtatcaatgtttcaaaaagaacctgtaaatagacgaatgaacccctgggaatatgaacaagaactaaaagatgcttactactggggtagagttcctagaactcacatatttgataagcctttttacccagattgtcctcctgtacctaaatatactgttaactttgacttaaatgcgccgcaataaactcaacgccagcaaatattcactctcggtgtccatttatataagttaaaacttaaataaacatccaccactctcccaaatacgcaggcgtagaagggggctccgcccccttaaacccccagggggggcaagccccccctacaaccccccaaaaaattaatattcaacaggaaaaccacataattagaatggccgaccacaaactgtcacttacttcccctttttaccaatacttcccattttactaataaatattcattacattaattaataatcaccgtaattccggggaggagcataaaaactatataaccaagtacacttccgaatggctgagtttatgccgccagacggagaggg

SEQ ID NO: 3297 - protein, 672 aa, Betatorquevirus sp.
MRYWRRNRYRWRRHRPRYYWKRRFRRPIWRRFWRKRYGVRKRKLKSIRVKQWQPHYIKRLHIKGFYPMFMCTNERLGNNLNCYLESTAPHKMPGGGGFSICNFTLNMLYEDHLIAKNWWTTGNENMPLIRYLYCKITCYREENVDWLFCYNNSYPINATKLTYMSTHPQAMILNKHTKIITCRRNNRHKKPYKRIFIKPPTQMQNTWYFQKDLAFMPLLQTFTTCCSLDRMFLNSNSISTTTGFISLDTNGWKSHNFPRQTTQPYEPVNNQLLFGMYNGEHELTKIQIGELTLLGDTYNNTDGTPFKDVDIQAKGTQSQFQQKLQKAKQNSGYWGNPFNKKYFYGDQRIIYSIVPWDTIVNTYTNETDTLKSQHFKFQTQDWVDCRYNPFKDKGQGNKIYLVNTDSGPHLDDWTPPTDEDIVTENIPIWLGLWGYLDFQRKCNTTTTVDTHRILVIKSPYIVPNTLTYFVPLDETFLHGLSPYQDHLIPSDYYGWHPKVRFQVQSINKLTISGPLTAKLPNEISVEGHIKYDFYFKVGGQPAPMSILTAPDKQPKWITPNNPNNLIQNTSLQNPSTPFEYTLYNFDERRGQITKKAAQRITTHKETESSLLPITDTSSFCPVAPYKETETTDSSETEEDEAPLETQLLQHRREQKLLRKRINKLLLRLAQLE

SEQ ID NO: 3298 - protein, 100 aa, Betatorquevirus sp.; identical to SEQ ID NO: 2688

SEQ ID NO: 3299 - protein, 121 aa, Betatorquevirus sp.; identical to SEQ ID NO: 2689

SEQ ID NO: 3300 - DNA, 2868 bp, Betatorquevirus sp.
cgggtaccgaaggtgagtgaaaccaccgaagttaaggggcataatgggctggggcagtctggcggaccgggcaactaacttaatcatattttacagatgtcctttagcaaaccatgcttatataaaggaaaagccttagaaacccaatggatgaatacaatttttaatacacacgacctcttctgtggctgttctgatccaataacccacattaaaaaaattcaatcaagagataaatggctccataccaaagacgccgctactactacagacaaccttggaaatggagacgacggagacttccatatcgacgaaggagatttacaagaactcttcgaaaacgaagacgacaaaaatgggtaagaagaaaatattttcataaaaagcctaaaagaaaactaaaaaaactaaaactaactgaatggcaaccaaatgtaatacataaatgccacataaaaggctttttacctctatttgaaggaggaaatggaaggcaagaacaaaactatactttatacaaaaacagttttgtaccacctcatgaacctggtggcggagggtggagtatacaacaattaggacttggcatactttttaaagaaaataacttactacaaaactactggacaaaaactaactacagactaaatatgtgtagatatattggttgtaaaataacttgcttccgccaaccattttgtgattatatactgcattacttctttgatcctcctaaaaatgtaacaaaatattattatgctagttttcacccacaaaaaatgctacaactaaatcacaaagttattgtacctagcttttatacacaaccgctaaaaagaaaaccaacaaaaaaaatttatatcccaccacctaaaccttttagaaatcaatggttctttcaacaacaccttagtagctttccacttgtacacatagctgccaccgctgttagcttaactaacatgtacggctctagcaaagctcaaaacaacaactgcaccataaacacattaaacacagtcttctttaaacacccatgctttcagcacagagactctaccacttacggatacacaccaaatgaatcaaattacctatttggagtacctagagccagtgaaccactaaaaacaacaaaatactctcaagccacatacttaggaaattcagaactaaatgaatctggaatagcaggaccatggtcagatgacacacctaaaaacaactggggaaacccatttcactggacatacttaacaggcacatcaccaacttttataaccacaggatcagaaacacctaagcaaacattatcaaaagaaaaccaacaaaaacagattccagaaacacaatacagaaaaacagacagcattatacaacttagatacaatccatacaaagacttaggccaaggcaatagaatatacatggtaccaacatatgcttttacacacaataaatgggaacctacttcagacaaagacttaatattagaaaactttccactatggataatgttatggggatatgaaaatgttttaaaatctatgggaaaatgccctaatatagactatgactgggtacttgtaatacaatgcagctatgtatcaggaacagaaccatacattgtacctttatctgaatactttataaatggtcaaggcccttatgatactgctaaagaagaaattaacccacaagactacacacactggtatccatgctacagacaccagagagaagcagtacatgacattataaacactgggccagcagtatttagaagtgatcatgaaaaaaatatgcaagccataataaaatatgactttctttttaagtggggcggaaacccatcaccaatggaatccgtatacgaccccaacagccaacctatcacacccaccccacctggacagtacctacaaaatgaaattactgacccaacaaccaacatccaaagctttatctacccctgggactgtagacgagactaccttacacaaacagctacaaacagaattatgcaaagcgacttatatgaaacaactttgttcacagatggagaccaagctacaacaaacatcccactcctcaaaacaacgacgccacagacgcaaaagaccacgaaagaacaagaagcgtcactactcttccagctcgagcagctccagcaattcaacagacaactacaacagcgattcaacaacctaaagtccttattacaggaccaataaaaagagcttatcttttccctgagagagttcgcaaaaaccgtagattaacaccctcagaaactgaaactgatatacaaattgctaaatggctaaaaagacctgtaagacacttctttgatgatcgcccattttacccctgggttgtgcctgaacctcttgtaaactttgacattgtaagcaaatataataaaggcctgcattaattcacttgaggtgtccatttatttaacttaaacttatataaaccaacaccgcctccctaatacgcaggcgcagaagggggctccgcccccttaaacccccgcaccgcctccctaatacgcaggcgcagaagggggctccgcccccttaaacccccgggggggtaaacccccccctaagcccccccaaatcattaatattcaacaggaaaaccacataattagaattgccgaccacaaaccgtcaaccgttacaactacttccctaaaacacacactacttctcctttttaaaactccacccacaaaattaattaataaacaacatcatatcctaggaggagctcacacactatataactaactacacagacgaatggctgagtttatcacgccagacggagacagtataacaactactggctgccacaggg

SEQ ID NO: 3301 - protein, 665 aa, Betatorquevirus sp.
MAPYQRRRYYYRQPWKWRRRRLPYRRRRFTRTLRKRRRQKWVRRKYFHKKPKRKLKKLKLTEWQPNVIHKCHIKGFLPLFEGGNGRQEQNYTLYKNSFVPPHEPGGGGWSIQQLGLGILFKENNLLQNYWTKTNYRLNMCRYIGCKITCFRQPFCDYILHYFFDPPKNVTKYYYASFHPQKMLQLNHKVIVPSFYTQPLKRKPTKKIYIPPPKPFRNQWFFQQHLSSFPLVHIAATAVSLTNMYGSSKAQNNNCTINTLNTVFFKHPCFQHRDSTTYGYTPNESNYLFGVPRASEPLKTTKYSQATYLGNSELNESGIAGPWSDDTPKNNWGNPFHWTYLTGTSPTFITTGSETPKQTLSKENQQKQIPETQYRKTDSIIQLRYNPYKDLGQGNRIYMVPTYAFTHNKWEPTSDKDLILENFPLWIMLWGYENVLKSMGKCPNIDYDWVLVIQCSYVSGTEPYIVPLSEYFINGQGPYDTAKEEINPQDYTHWYPCYRHQREAVHDIINTGPAVFRSDHEKNMQAIIKYDFLFKWGGNPSPMESVYDPNSQPITPTPPGQYLQNEITDPTTNIQSFIYPWDCRRDYLTQTATNRIMQSDLYETTLFTDGDQATTNIPLLKTTTPQTQKTTKEQEASLLFQLEQLQQFNRQLQQRFNNLKSLLQDQ

SEQ ID NO: 3302 - protein, 88 aa, Betatorquevirus sp.; identical to SEQ ID NO: 3288

SEQ ID NO: 3303 - DNA, 2868 bp, Alphatorquevirus sp.
caattcgggctcgggactggccgggctatgggcaaggctcttaaaaaagcatgtttctcggtaaactttacagaaagaaaaggaaactgcttctgtgctctctgcatactgcatcgaaagcacttaccctctccatgagctggtccagacccattcacaatgctattgcactggaaagaaattggtaccaggctgttattcactctcatgctgcttgctgtggctgcggtgaccctggggctcacttggctgccctggtacagcgatacaactccagcgaaatgcaacagcagcgtctactgccaccagcatctcagataaggtccccgaaccagatccgtagagcccgggccctgcccgcggctccggagcagcctccggcactgccatggcatggtggtggtggagaaggagacggcgcccgcggtggagaagacgacgctggaggagacgagcccgtgtacgaaccaggagacctagacgccctgtacgccgccgtcgaagaagagtaaggagagggagacgggggtggcgtagactatacagacgatggagacgcagggggcgacgcagacacaaacgaaaaaaactggtaatgagacagtggaaccccagtactgtgacaaaatgctttatagtgggctacctgcccattattatctgtggacagggtacctctgctatgaactatgcatcccactgcgatgacatagagtaccctggacccctgggagggggactaacctccatgaggtttactttaagaatactgtatgaccagcacaccaggggacagaacttttggacaaagagcaacgaggacctagacttagctagattcctgggatcccgatggactttttacagacacccagaagtagactttatagtaacctgggagacctcagccccttttacagactctatagtatcaggaccacaccaacacccaggcatacaaatgctcatgaaaaagaaagtactgataccaagtttcagaacgaaacccaagggtcgcagcacaataaaagttaagataaacccccctaagctcatgatagacaagtggtacccacagactgaattctgtgaggtaactctgctaacgatacatgccacagcatgtgacctgcggtttccgttctgctcaccacaaacgaacacttcctgcatacagttccttgttttgtcaggagcttacagtggttacattagcatattacctgacaaagcaaacaaaactcaactagaagcatttttaaatactaatgtcacaaacacatcaaatgtaggaaacacattagccaccccatacatgctaaaatatcctgcaccaacaaaaaaacaaggccaaggcgcacaaccatacacatcaccagacagccaggatggagatcctatatacataaacctaaaagaaacaatacttcaaaataatgacacttggtttaccaaagctaaaacagcatggaataacctacattcacaatatggaacacccacatcacaaggcctagaataccacacaggactatttagtgctatatttttatccccagtaagactaaactcacagtttccaggcttttataacaccattaaatacaacccactaacagacaaaggagaaggaaacagaatatggtgcgacccttgcactaaagaatcatttatgtacaacccaccacagagcaaatttgttatagaaaacatacaactatgggcagcagtagcaggctacttagactactgcacaaaagccagcaaagacgaaagctttaaatacaactacagagtactcatacagtgtccatacacagttccacaactatacttagactcacagaaagacagaggttacatagtatacagcaacaactttggcatgggcaaaatgcccaatgacagctccgtaataccagtcaggtggagatgcaggtggtatccagctttgtggaaccaacagcaagtgctagaggacatattcatgtctggaccctttgcatacaaaggagaacaaccctcagccacccttaacacaaaatatgcatttaagtggctctggggtggcaaccgtatcttccaacaggttgtcaaagacccctgctcacaccagcaagaccaggcagttggtcccagtagaaagcctagagcagtacaagtctttgacccgaagtaccaagcaccagagtggacgttccacgcgtgggacctcagacgcggcctatttggcagacaagctattaagagagtgtcagcaaaaccaacagctgatgagattctgtcaacaggtccaaaacgacccagattggaagtccccgcgttcgaagaggggcaagaaaaaagcttacttttcagacaaagaaaacacctcctgtgggaagagaccacagaagaagagacagaagcccaatcagaagaggagcaggaggaggaggagcagcagcagctcctcagacgactccagcaacagcgggagttggggagaggcctcagatgcctcttccagcaactgacccgcacccaaatgggtctccacgtagacccccaattattggcccctgtataaataaagtatacatgtttcctcctgcagaacccaaacccatctcaggctatgaagcctggaaagatgagtacgaaagctgcaaaacctgggacaggccccccagaaaataccactcagacacaccttactacccctgggtccccaaacccccagaccaatttcgtgtaacctttaagcttggctttcattaaaatttctaggccgtggaactttcacttgtcggtgtctacctctataagtcaccaagcactccgagcgaagcgaggagtgcgaccctcggggtgggtgcaacgccctcg

SEQ ID NO: 3304 - protein, 726 aa, Alphatorquevirus sp.
MAWWWWRRRRRPRWRRRRWRRRARVRTRRPRRPVRRRRRRVRRGRRGWRRLYRRWRRRGRRRHKRKKLVMRQWNPSTVTKCFIVGYLPIIICGQGTSAMNYASHCDDIEYPGPLGGGLTSMRFTLRILYDQHTRGQNFWTKSNEDLDLARFLGSRWTFYRHPEVDFIVTWETSAPFTDSIVSGPHQHPGIQMLMKKKVLIPSFRTKPKGRSTIKVKINPPKLMIDKWYPQTEFCEVTLLTIHATACDLRFPFCSPQTNTSCIQFLVLSGAYSGYISILPDKANKTQLEAFLNTNVTNTSNVGNTLATPYMLKYPAPTKKQGQGAQPYTSPDSQDGDPIYINLKETILQNNDTWFTKAKTAWNNLHSQYGTPTSQGLEYHTGLFSAIFLSPVRLNSQFPGFYNTIKYNPLTDKGEGNRIWCDPCTKESFMYNPPQSKFVIENIQLWAAVAGYLDYCTKASKDESFKYNYRVLIQCPYTVPQLYLDSQKDRGYIVYSNNFGMGKMPNDSSVIPVRWRCRWYPALWNQQQVLEDIFMSGPFAYKGEQPSATLNTKYAFKWLWGGNRIFQQVVKDPCSHQQDQAVGPSRKPRAVQVFDPKYQAPEWTFHAWDLRRGLFGRQAIKRVSAKPTADEILSTGPKRPRLEVPAFEEGQEKSLLFRQRKHLLWEETTEEETEAQSEEEQEEEEQQQLLRRLQQQRELGRGLRCLFQQLTRTQMGLHVDPQLLAPV

SEQ ID NO: 3305 - protein, 153 aa, Alphatorquevirus sp.; identical to SEQ ID NO: 1758

SEQ ID NO: 3306 - protein, 87 aa, Alphatorquevirus sp.; identical to SEQ ID NO: 1759

SEQ ID NO: 3307 - DNA, 2867 bp, Betatorquevirus sp.
cgggtaccgaaggtgagtgaaaccaccgtagttaaggggcaatatgggcacagtcagtctcggcagaagggcaactgtcttaattttatcttatagatgtcagactatattcaaccaactctatacaatggaaaaggactggaaaaccaactaaaaaacctttgctacaacgctcacgacctctgctgtggctgccaaaacccaactaaacatcttaaacacctgtttacggaaaaatggctccctacaaccgctactacaaaagaagatggagaaaatacttcagaaaccgtcgccccagaagacggtttcgacgctggggatttagaaagaattttcgccttagaagaagaaaaaacagggtaagaagaaaatattttaaaaactttaaatataaaaaactaagaaaaatagttcttaaacaatggcaaccaagccacataaaaaaatgtaaaattaaaggtacaatacagctttttcaagctggactcggtagatacagctataattatactatgtacaaagaatcttatgttccaccacatgaaccaggaggaggaggctggtgctacttaatgttatctttaggaaacttatacactgaaaatcaaagactacaaaactggtggactgtttccaacaaaggactaaaccttgtaagatatcaaggtgttatactaaaattttacagacaaaaacatacagactatgttgttacatggagtaatgaatatccaatggaagtaggaaagtatcactttccaagcattcatccacaaagaatgcttcaatacaatcataaaattgttgtaccaagctacgatactctacctcaatgtaaaaaaccatataaaagagtatatgtacctcctccaaaagaaatgatagataaatggtattttcaacaatttttccaaagatacccacttgtacttattgctagtactgcctgttctttaaacaatatgtatgttggaaaccaagcaatgaataacaactgttctataaactgtttaaatacaaacctgtttaaacataaatgttttcaatatcaaggaacaactggttatcaaccaaagggtggtatgtacttgtatgcactcgataacggtgaaattgaccctttaagcggaaaagtaggagaaatgacatacctaggaaactccatggactaccaacctggagaaaacttaaactcaacttctaacgttcaaacctacaaccaaaaaaaatggggtaatccattctatactcaatatataaatgaacaaagaaaaattgtgactacttcaaaacaatataccgctttatggtcaaaaaaaaacgaacaaatgaaacaagagagcatacaattacaaattgaacccttttactatgaatgccgatataacccttgtaaagatgatggcataggcaatgaagtatactgggtaaaaaactttgcagaagaaagtggctgggacacaaaaactgacccagacttagctattgacggatttccattatggatagcactttggggctggtatgattggtcaaaaaaattaaacaaagctaaaaacatatggaatgactacatattagtaattaaaacaagatatatggaaccaaaattacctgcctatgtttttttaaatgatgaatttccactaggactaggaaattatgatgaacctttaaaaaaaatagaccccaacgacttaaaacactggtatccaaaatggaaatttcaaaaagaagcagtagaaacattactaatgacaggcactgcagtatgcagaccagaaaacgctaggcaaatccaagctcattgtggttataaatttctttttaagtggggaggcaaccctgcctcaatggaacaagtcgttgatcccacagcacagcctcaataccctgtgcccagtggactcttccaaagccctgaaatcgttgatccaagcacatccatctttaactacttgtacaacttcgacgtcagacgtcacctccttacacaaacagctgaaaaaagaattaaaaacctctcagacactgacatctctatgttcacagatggaactcaacaaccactctacgagccaccaatccaaacaccgcaaacaacatggacggaagagacatcggaagaagagaaaaagacattactcctccagctccaacagctccaacaacacaacctacacctcctccagcgataccaacaactcaaattaatgactctaaatacataatatacaaatgtaaagaacctgcattactttttgctcctaataaaataaaaccccgtagattcagaccacatgaatgggaagacgaaaaatatttagctagctggatgaaacgcccccttagacacttttttactgataccccattttacccatggtgtgtacctgaacctaaagttaactttgaccttaatttcattaaataaaggccaacaaacttcacttgaggtgtccatttatttaagtttaaacctatacaaacatccaccgcctccctaatacgcaggcgcagcagggggctccgccccctaacccccaggggggggggcaaagcttgcccttctgccgagactgactgtgcccatattgccccttaccccccccccaaacgtcaccaaactcatgaatattcataaaccacaaaatttaaattgccgaccacaaacagtcacaggaaaccacaacttctctttttttactttaacttccttaaattataaccactcctactaattaattaataaacaacatcatatccaccacgtcacaaccactactataaaactaagtacactttcgaatggctgagtttatgctgccagacggagacgcgacaacttcgcggctgactgtggg

SEQ ID NO: 3308 - protein, 665 aa, Betatorquevirus sp.
MAPYNRYYKRRWRKYFRNRRPRRRFRRWGFRKNFRLRRRKNRVRRKYFKNFKYKKLRKIVLKQWQPSHIKKCKIKGTIQLFQAGLGRYSYNYTMYKESYVPPHEPGGGGWCYLMLSLGNLYTENQRLQNWWTVSNKGLNLVRYQGVILKFYRQKHTDYVVTWSNEYPMEVGKYHFPSIHPQRMLQYNHKIVVPSYDTLPQCKKPYKRVYVPPPKEMIDKWYFQQFFQRYPLVLIASTACSLNNMYVGNQAMNNNCSINCLNTNLFKHKCFQYQGTTGYQPKGGMYLYALDNGEIDPLSGKVGEMTYLGNSMDYQPGENLNSTSNVQTYNQKKWGNPFYTQYINEQRKIVTTSKQYTALWSKKNEQMKQESIQLQIEPFYYECRYNPCKDDGIGNEVYWVKNFAEESGWDTKTDPDLAIDGFPLWIALWGWYDWSKKLNKAKNIWNDYILVIKTRYMEPKLPAYVFLNDEFPLGLGNYDEPLKKIDPNDLKHWYPKWKFQKEAVETLLMTGTAVCRPENARQIQAHCGYKFLFKWGGNPASMEQVVDPTAQPQYPVPSGLFQSPEIVDPSTSIFNYLYNFDVRRHLLTQTAEKRIKNLSDTDISMFTDGTQQPLYEPPIQTPQTTWTEETSEEEKKTLLLQLQQLQQHNLHLLQRYQQLKLMTLNT

SEQ ID NO: 3309 - protein, 89 aa, Betatorquevirus sp.
MSDYIQPTLYNGKGLENQLKNLCYNAHDLCCGCQNPTKHLKHLFTEKWLPTTATTKEDGENTSETVAPEDGFDAGDLERIFALEEEKTG

SEQ ID NO: 3310 - protein, 109 aa, Betatorquevirus sp.
MDGRDIGRREKDITPPAPTAPTTQPTPPPAIPTTQINDSKYIIYKCKEPALLFAPNKIKPRRFRPHEWEDEKYLASWMKRPLRHFFTDTPFYPWCVPEPKVNFDLNFIK

SEQ ID NO: 3311 - DNA, 2866 bp, Betatorquevirus sp.
cgggagccgaaggtgagtgaaaccaccgtagtctaggggcaattcgggctagatcagtctggcggaacgggcaagaaacttaaaatatatttattttatagatatgtcatctatttggaagaaaccaaatgtgacaccgagatatctagaacttggatggatgaatttagtacaccaaagccatgatcaaatttgccactgtgaagacgccgacctacactttatgattttaatcaacaaattcggaggagccaaaaaaccagaaccagaaataagaaacataaaatgcctccttaccggagatactaccaaagctactactacagaaaccgcagaagaagatatcggaatagattcaggagacctagaaaaacttttcgaagaagatattggagaaccaaataccgcagaagacgtccaaaggtaaaaaaattcagaaaaagaaaactaaaaaaactaatacttaaagtatttcaacctaaatctattaaaaaatgtaaaattaaaggaatgaaatgcctctttcaaggagccattgaaagagcaagcaataactatatacaatacatttatgatactgttaatgacagaagaccagggggtggaggatggagtttacaagtgtttagcctagaatcattatttgaagaatatgaacatttgttaaatgtatggactactagcaacgccgctttaccccttgttagatatagaggttgtaaatttagattttatcaaagtaatgatactgattatgttgtaaagtatgacaactgttggcctatggtagacacaaaatacacacacgcagacagcgcaccacaaagaatgctaagagcacaacataaaatagtagtacctagcagaaaatcacaaactagaaaaaaaccatataaaacagcattcataagacctccatcacaaatgacaaataactggtatttccaaagagacatttgcaaaacacctttagcaatgctaaccacaacagccgttgacttaagaaacccttttgcagcaccagaagcccgcagcaataatgttacattatactcattaaacacttttcaatttaaaaataccaactttcaacaaccagatccacaaaaaggataccactataaaacagaaggaacagaaaaatactacttatatgcagctcatacaaacagtagtacttggggagaactaataccactaacaaacaccaaagacaaccaaccaggacaacaacttaaagtacttcttaataataataataacaacaaactatcaaactggggaaatccatttcaccacacatacacaccagatgattttaaattctactttatgacaaaatcacctacagaactcaataaaacagatttaaccaagactttaacaacaacaggtataacagaatttacaagctatttatattaccaattaagatacaatccagaaaaagacaccggagacacaaacaaagtatacttagtatctaacttacatgaaacaaactggaatgaaccagaaaacccaaatttaattttagaaggctttccacttagtatactactttggggatgggtagactggcaaaaaaaattaaaacaagtatcaaacataaataaccaatacattgtagtaattaaaacaaaaatgttttcagaaaacttaaaccactacgtactgctagacaaagactttatagatggatttgaaccatactccccacacgatacaaacgacataatacctataacaccacaaaatcaacaacactggtacccaaaattttcatttcaagaacaatctattaacacactttgcctatcaggttcaggatgcccacgaccaccatggaatcactatctacaggccttatgtacatatacattctatttttcctttggaggatgtccaaaacaattagaaaaagtttatgatccttgtttacagtcaaaatggcccacagccgataacatcccttcaacaactgaaatcaagaatcctaacaccgcaccacaaacagaacttttctcctgggactgggaaggtgactttgttaaaacaacagctatacaacgaattaaagaatacacgccatcttatgaatcaatattctcatctacaggaacaaagtcagatgcaataccactcaaagaagcccaagaaagccaaacacaagcccaagaagaggaaaaggagttattcgtccagctccagcagctccgacacaagcggaaaatcctccagtaccaactaaacgaattattattaagaagcacaccacaacagtagaactatttccaaaaccaaaaaagaacagaacttttacaccttcagaaagagaattagaaagacaagtagctatagcattttgcagaccccaaagacaatacttttatgatacccctatatacccatggctaccacctgcaccaataatgccaaaagtaaactttgatataaactatgtagataaataaaaaattcaaggccaacaaatttcacttgtcggagtccatttatttaagttaaactttaataaacatccaccactctcccaaaattgttggcgtagcaaagggggctccgcccccttacacccccaagggggctccgcccccttacaccccccctaataaatattcaacaggaaaaccacctaatttaaattgccgaccacaaaccgtctactacttctcctttttacacttacttcctctttcactaattattattcattacattaattattaaacaccgtaattccggggaggagactattaactatataactaactacacttccgaatggctgagtttatgccgccagacgaaggaggcatcacgttagtgactgcagactgatcttggg

SEQ ID NO: 3312 - protein, 666 aa, Betatorquevirus sp.
MPPYRRYYQSYYYRNRRRRYRNRFRRPRKTFRRRYWRTKYRRRRPKVKKFRKRKLKKLILKVFQPKSIKKCKIKGMKCLFQGAIERASNNYIQYIYDTVNDRRPGGGGWSLQVFSLESLFEEYEHLLNVWTTSNAALPLVRYRGCKFRFYQSNDTDYVVKYDNCWPMVDTKYTHADSAPQRMLRAQHKIVVPSRKSQTRKKPYKTAFIRPPSQMTNNWYFQRDICKTPLAMLTTTAVDLRNPFAAPEARSNNVTLYSLNTFQFKNTNFQQPDPQKGYHYKTEGTEKYYLYAAHTNSSTWGELIPLTNTKDNQPGQQLKVLLNNNNNNKLSNWGNPFHHTYTPDDFKFYFMTKSPTELNKTDLTKTLTTTGITEFTSYLYYQLRYNPEKDTGDTNKVYLVSNLHETNWNEPENPNLILEGFPLSILLWGWVDWQKKLKQVSNINNQYIVVIKTKMFSENLNHYVLLDKDFIDGFEPYSPHDTNDIIPITPQNQQHWYPKFSFQEQSINTLCLSGSGCPRPPWNHYLQALCTYTFYFSFGGCPKQLEKVYDPCLQSKWPTADNIPSTTEIKNPNTAPQTELFSWDWEGDFVKTTAIQRIKEYTPSYESIFSSTGTKSDAIPLKEAQESQTQAQEEEKELFVQLQQLRHKRKILQYQLNELLLRSTPQQ

SEQ ID NO: 3313 - protein, 122 aa, Betatorquevirus sp.; identical to SEQ ID NO: 2605

SEQ ID NO: 3314 - DNA, 2866 bp, Betatorquevirus sp.
cgggagccgaaggtgagtgaaaccaccgtagtctaggggcaattcgggctagttcagtctggcggaacgggcaagaaacttaaaatatattattttacagatgcaaatacaaccaccgattagaacctacaaacaaaccatttctgattggaaaaacttaattgttcacgttcacgacaatatctgcaaatgcaacaaaccattggaacatacaattgatacttgcaccaacaatccttctgaattaagattaaataaatctactaaacaacaactacaacaatgcctttctacaccagaagaagatggccccggagacgttatcgatggtttcgacgatggagagctagacgcccttttcgcccaagataccgaagaagatactgggtaagaaaatattctcgaaagagaaaactttataaaattactgaaaaacaatggcaaccaaaagttatcagaaaaactcatgttaagggcacataccccttatttctttgtacaaagcacagaattgcaaacaatatgatacaatacttagactctatagctccagaacactactatggtggaggaggattttcaataatgcaattttctttacaagctttatacgaagaatttgtaaaagccaaaaactggtggactcatacaaactgttttctaccaataataagatatatgggttgcagctttaaattttataaaaccgaatactatgactatgttgtacttattgaaagatgttatccacttgcttgtactgatgaaatgtacttatctactcaacctagtattatgatgcttacaaaaaaatgtatatttgtaccatgtaaacaaaacagcaaaggtaaaaaaccatatagaaaagtaaaagttaagccaccatcccaaatgactaccggatggcatttctcacaagacttagcaaacatgccactagtagtgttaaaaacatcagtatgcagtttcgacagatactacacagacagcacagctaaatctacaacaataggattcaaaacattaaacacaacaacatttaaatatcatgactggcaagacccaccaacaacaggctacaaaccacaacaaaacttatggttctatggagctgaaaacggttctcctacagacctagacaatacaccacttaactctcttatatatttagggggcacaggaccatacactaaaggcacaaaaatagcaaaccaatcaggacaactacaacaaaattacttttctacacctaaactatggggaaacatttttcatgatgactatttaacaggtacttcacctgtatttgtcactaacaaaccccctaaacacattgaagaaaattgggaacatcttaaaaataaaacaataaaacaaagtgaaatttttacagtaagaactataccactatggcaacaatgcagatataatccattcgcagacaaagcaacaaataacaaaatatggctagtatcaatacactcagatcacacagaatggaaacctatagataaccctttattacaaagaaatgatctaccactctggcttatagtatggggatggcaagactggcaaaaaaaaaaccaacaaacatcacaaccagacattaactatttaacagtaatatcatcaccctacataagcacatatccaaaactagactattatgtattaatagacgaatcaatgtttgaaggacactctacttatatagactcaattacagacagtgacaacaaacactggtacccaaaaaacagatttcaaatagaaactctaaacttaatagctaacacaggacctggaacagtaaaacttagaaacaatcaggcagcagaggctcacatggtatatcgctttaattttaagcttggaggatgcccagcaccaatggaaaagatttgtgaccctagcagacaaaccaaatatcctattcccaataaccagcaacaaacaacttcgttgcagagtccagaaaacccaattcaaacctatctctacgacttcgacgaaaggaggggcctacttacagaaagagctacaaaaagaatcaaacaagatcacacatctgaaaaaactgttttgccatttacaggagcagcaacagacctccccatactcaaaacaacatcacaggaggaaagctcctcggaagaagaagaagaccaacaagcggagaagaaactactccagctccgaagaaagcagcagcgactcagagacagaatcctccagctcttagacatacaaaatatgtaataaaacatagcagtgtaaaaattgatatgtttggtgaaacacctatgcctaaccggagaatgactccggaagaatttgaacaagaattaattgtagctcgtatattccaacgacctccttgttactttataaaagatagacctacttatccttgggtgcctaaaccttctgatgaaaaattcatggtaaactttgacttaaacccccctcaataaacaaggcctgcaaactttcactctcggtgtccgtttatattagtttaaacttaaataaacatccaccacactccctaatacgcaggcgcagaagggggctccgcccccttacacccccaagggggctccgcccccttacacccccacccctaattaatattcaacaggaaaaccacctaattagaattgccgaccacaaaccgtctcttagttcctctttttacacgcacttccctttttactaattattattcattatattaattaataaacagtgtaattccggggagggactaaacaactatataaccaactatacttccgaatggctgagtttatgccgccagacggagacgggatcactacagtgactccaggctgaacttggg

SEQ ID NO: 3315 - protein, 659 aa, Betatorquevirus sp.
MPFYTRRRWPRRRYRWFRRWRARRPFRPRYRRRYWVRKYSRKRKLYKITEKQWQPKVIRKTHVKGTYPLFLCTKHRIANNMIQYLDSIAPEHYYGGGGFSIMQFSLQALYEEFVKAKNWWTHTNCFLPIIRYMGCSFKFYKTEYYDYVVLIERCYPLACTDEMYLSTQPSIMMLTKKCIFVPCKQNSKGKKPYRKVKVKPPSQMTTGWHFSQDLANMPLVVLKTSVCSFDRYYTDSTAKSTTIGFKTLNTTTFKYHDWQDPPTTGYKPQQNLWFYGAENGSPTDLDNTPLNSLIYLGGTGPYTKGTKIANQSGQLQQNYFSTPKLWGNIFHDDYLTGTSPVFVTNKPPKHIEENWEHLKNKTIKQSEIFTVRTIPLWQQCRYNPFADKATNNKIWLVSIHSDHTEWKPIDNPLLQRNDLPLWLIVWGWQDWQKKNQQTSQPDINYLTVISSPYISTYPKLDYYVLIDESMFEGHSTYIDSITDSDNKHWYPKNRFQIETLNLIANTGPGTVKLRNNQAAEAHMVYRFNFKLGGCPAPMEKICDPSRQTKYPIPNNQQQTTSLQSPENPIQTYLYDFDERRGLLTERATKRIKQDHTSEKTVLPFTGAATDLPILKTTSQEESSSEEEEDQQAEKKLLQLRRKQQRLRDRILQLLDIQNM

SEQ ID NO: 3316 - protein, 110 aa, Betatorquevirus sp.
LAERARNLKYIILQMQIQPPIRTYKQTISDWKNLIVHVHDNICKCNKPLEHTIDTCTNNPSELRLNKSTKQQLQQCLSTPEEDGPGDVIDGFDDGELDALFAQDTEEDTG

SEQ ID NO: 3317 - protein, 62 aa, Betatorquevirus sp.
MFGETPMPNRRMTPEEFEQELIVARIFQRPPCYFIKDRPTYPWVPKPSDEKFMVNFDLNPPQ

SEQ ID NO: 3318 - DNA, 2865 bp, Betatorquevirus sp.
cgggtaccgaaggtgagtgaaaccaccgtagttaaggggcaatatgggcacagtcagtctgggcagaagggcaactgtcttaattttatcttatagatgtcagactatattaaaccaactctatacaatggaaaaggactggaaaaccaactaaaaaacctttgctacaacgctcacgacctctgctgtggctgccaaaacccaactaaacatcttcaacacctctttacggaaaaatggctccctacaaccgctactacaaaagaagatggagaaaatactttagaaaccgtcgccccagaagacggtttcgacgctggggatttagaaagaattttcgccttagaagaagaaaaaacagggtaagaagaaaatattttaaaaactttaaatataaaaaactaagaaaaatagttcttaaacaatggcaaccaagccacataaaaaaatgtaaaattaaaggtacaatacagctttttcaagctggactcggtagatacagctataattatactatgtacaaagaatcttatgttccaccacatgaaccaggaggaggaggctggtgctacttaatgttatctttaggaaacttatacactgaaaatcaaagactacaaaactggtggactgtttccaacaaaggactaaaccttgtaagatatcaaggtgttatactaaaattttacagacaaaaacatacagactatgttgttacatggagtaatgaatatccaatggaagtaggaaagtatcactttccaagcattcatccacaaagaatgcttcaatacaatcataaaattgttgtaccaagctacgatactctacctcaatgtaaaaaaccatataaaagagtatatgtacctcctccaaaagaaatgatagataaatggtattttcaacaatttttccaaagatacccacttgtacttattgctagtactgcctgttctttaaacaatatgtatgttggaaaccaagcaatgaataacaactgttctataaactgtttaaatacaaacctgtttcaacataaatgttttcaatatcaaggaacaactggttatcaaccaaagggtggtatgtacttgtatgcactcgataacggtgaaattgaccctttaagcggaaaagtaggagaaatgacatacctaggaaactccatggactaccaacctggagaaaacttaaactcaactactgatatacaaaactacaacaaaacaaaatggggtaatccattctatactcaatatataaatgaacaaagaaaaattgtgactacttcacaacaatataccgctttatggggaaaaaaaaccaaaataatgaaacaagagagcatacaattacaaattgaacccttttactatgaatgccgatataacccttgtaaagatgatggcataggcaatgaagtatactgggtaaaaaactttgcagaagaaagtggctgggacacaaaaactgacccagacttagctattgacggatttccattatggatagcactttggggctggtatgattggtcaaaaaaattaaacaaagctaaaaacatatggaatgactacatattagtaattaaaacaagatatatggaaccaaaattacctgcctatgtttttttaaatgatgaatttccactaggactaggaaattatgatgaacctttaaaaaaaatagaccccaacgacttaaaacactggtatccaaaatggaaatttcaaaaagaagcagtagaaacattactaatgacaggcactgcagtatgcagaccagaaaacgctaggcaaatccaagctcattgtggttataaatttctttttaagtggggaggcaaccctgcctcaatggaacaagtcgttgatcccacagcacagcctcaataccctgtgcccagtggactcttccaaagccctgaaatcgttgatccaagcacatccatctttaactacttgtacaacttcgacgtcagacgtcacctccttacacaaacagctgaaaaaagaattaaaaacctctcagacactgacatctctatgttcacagatggaactcaacaaccactctacgagccaccaatccaaacaccgcaaacaacatggacggaagagacatcggaagaagagaaaaagacattactcctccagctccaacagctccaacaacacaacctacacctcctccagcgataccaacaactcaaattaatgactctaaatacataatatacaaatgtaaagaacctgcattactttttgctcctaataaaataaaaccccgtagattcagaccacatgaatgggaagacgaaaaatatttagctagctggatgaaacgcccccttagacacttttttactgataccccattttacccatggtgtgtacctgaacctaaagttaactttgaccttaatttcattaaataaaggccaacaaacttcacttgaggtgtccatttatttaagtttaaacctatacaaacatccaccgcctccctaatacgcaggcgcagcagggggctccgccccctaacccccagggggggggggcaaagccccctaaccccccgggggggggcaaagcccccccccccttaccccccccaaacgtcaccaaactcatgaatattcataaaccacaaaatttaaattgccgaccacaaacagtcacaggaaaccacaacttctctttttttactttaacttccttaaattataaccactcctactaattaattaataaacaacatcatatccaccacgtcacaaccactagtataaaactaagtacactttcgaatggctgagtttatgctgccagacggagacgcgacaacttcgcggctgactgtggg

SEQ ID NO: 3319 - protein, 665 aa, Betatorquevirus sp.
MAPYNRYYKRRWRKYFRNRRPRRRFRRWGFRKNFRLRRRKNRVRRKYFKNFKYKKLRKIVLKQWQPSHIKKCKIKGTIQLFQAGLGRYSYNYTMYKESYVPPHEPGGGGWCYLMLSLGNLYTENQRLQNWWTVSNKGLNLVRYQGVILKFYRQKHTDYVVTWSNEYPMEVGKYHFPSIHPQRMLQYNHKIVVPSYDTLPQCKKPYKRVYVPPPKEMIDKWYFQQFFQRYPLVLIASTACSLNNMYVGNQAMNNNCSINCLNTNLFQHKCFQYQGTTGYQPKGGMYLYALDNGEIDPLSGKVGEMTYLGNSMDYQPGENLNSTTDIQNYNKTKWGNPFYTQYINEQRKIVTTSQQYTALWGKKTKIMKQESIQLQIEPFYYECRYNPCKDDGIGNEVYWVKNFAEESGWDTKTDPDLAIDGFPLWIALWGWYDWSKKLNKAKNIWNDYILVIKTRYMEPKLPAYVFLNDEFPLGLGNYDEPLKKIDPNDLKHWYPKWKFQKEAVETLLMTGTAVCRPENARQIQAHCGYKFLFKWGGNPASMEQVVDPTAQPQYPVPSGLFQSPEIVDPSTSIFNYLYNFDVRRHLLTQTAEKRIKNLSDTDISMFTDGTQQPLYEPPIQTPQTTWTEETSEEEKKTLLLQLQQLQQHNLHLLQRYQQLKLMTLNT

SEQ ID NO: 3320 - protein, 89 aa, Betatorquevirus sp.
MSDYIKPTLYNGKGLENQLKNLCYNAHDLCCGCQNPTKHLQHLFTEKWLPTTATTKEDGENTLETVAPEDGFDAGDLERIFALEEEKTG

SEQ ID NO: 3321 - protein, 109 aa, Betatorquevirus sp.; identical to SEQ ID NO: 3310

SEQ ID NO: 3322 - DNA, 2865 bp, Betatorquevirus sp.
cagataccggaggtgagtgaaaccaccgtagttaaggggcttattgggctgaagcagtcttgacggaacgggcaactaacttaaaaaatatttactttttagaaatgagctcttatttaactccatctatatactcaagaaatggattagaaaaccaatggcttaactctgtatggaatatccacgatcttatttgcggctgcaacaactgcttcaaacacctttttgatatattaaaagcaaaaaataacctgccatgcctcccttcaacttctaccgaagacgctggaacgcaaacaggtggagatggagatggagacgacgtgctagaggctggagacctagacaagctattcgaagaaagtttcgacgaagaagatgggtaagaagacgccgctatataaaaagatttaaaaagaaattatctaaaataactttaaaacaatggcaacctaagaaaataattaaatgtaacataaaaggcaatttatgcttatttgcttgcgggaaacaaagaactaatcataattatataattacttgtgaatcttatgtacctgaaagtgaacctgggggagggtcatggagtgtatttcaatttactttgagagttttatatgatgaatttttacactttagaaactggtggacaaacagtaaccaaggcttaccgttagcaagatacttaggctcaaactttagattttatagaagcgcacacacaagctacatagtaacacctataacatgtggaccatttgaagtaacaaaagaaacatactttgatacacaaccaagtagaagactaatggacagaaaatcatttatagtaccacaactaggacgaggaccactaaaaaaaacatacataaaaaagaaatttaaaccaccttcactatttctaaacaaatggtattttcaacaagacatttacaataccacactaataatgtttatggtatcagcatgtagctttgaccaaatgtacgccccacaagaccaaattagcacaaacataacattagtatctttaaatacaaacttatttcaaatgcctaactacaaaaaaataccatactcacctaaagccacaggcacattccaaacatacctatggtcatatggtaacggaagcaaagagcaatggacagatataattagcttaagtaatttacaattaatgcaagacggaaagcaaacaaaagacataaaacatataagaccattaacagaaatatacaaaagtgaatatggaaatccatttacacaccactattcacaacctgatgtaagaatcttttacggttcacaaccaaaaaactcagacgaattaaaaaccaaacctgacatatcagaaattacaggcctctttcaaagatgcagatacaacccttttagagataaaggaaaaggaaacaaagtatactggaaaccaacagacacagaccaaggctcactattatcactaccaacagacagtagactattaacagaagacttaccactttggctaatactctggggaatagaagactggacattaaaatcaaaaccaattacacatttatatgaagaatatcaattagtaattcaatcaccatatatagaaccaaagttaccctgctacgtatttttagattattactttacacaccccaaggaacacttatctgactacacagagacagacaaagcacactggcacccaaaatatggttatcaaatatatgcactagaacaactagcaaactcaggcccagcaacacctaaactaaacctagtaaaacaaatacaagctcacacattttataactttcattttaagtggggcggatgtccagcaccaatggaactcattacagacccagcagaccaagaaaaatttcccactcccaataaccagctccaaggacttgagatacaggatccagaaacccccaaagaatactgcttatacacatgggacgaaagacaaaaccaaattacagaaccagctgcaaaaagacttaaacaagactttacatctacaaaactttttacaggacttggagcaaaagacatcccactcctcgaagcaccacaaaaaacatgggaaacggaggaagaggaaaaacaaaaagagatatcagtccagctccagcagctgcgagagcaccgaagactcctcaagcagcgactccaccagctcctaaaaagatcaaaatatgcgcccctacaataaacttatttggtgactgtaaacctaaaaacaggagatttactcctaaagaatacgaacaagagttacaagaagcaaaaatatgggacagaccccctagacaatttatttttgacattcctttttactataatactgtaccagaacctgttgtaaactttgcattaaactataaattctaagccagcaaatattcacttgtcggtgtccatttatataagtttaaactttaataaacatccaccactctcccaaatacgcaggcgcacaagggggctccgcccccttaaacccccagggggctccgccaatacgcaggcgcacaagggggctccgcccccttaaacccccagggggctccgccccctaaaacccccaagggggctccgcccccttacaccccctaattaatatttaacaggaaaaccacctaatttgaattgccgaccacaaactgccaaccgttgcaacaacttctgctttttatactccacttcctcttttacagaactccacctcctaattcattaataatcagacacatttcctgggaggagactcaccactatataacaaacatacgtgacgaatggctgagtttaccccgtcagacggagacgagaaaagacttctcggctgcttcaggg

SEQ ID NO: 3323 - protein, 654 aa, Betatorquevirus sp.
MPPFNFYRRRWNANRWRWRWRRRARGWRPRQAIRRKFRRRRWVRRRRYIKRFKKKLSKITLKQWQPKKIIKCNIKGNLCLFACGKQRTNHNYIITCESYVPESEPGGGSWSVFQFTLRVLYDEFLHFRNWWTNSNQGLPLARYLGSNFRFYRSAHTSYIVTPITCGPFEVTKETYFDTQPSRRLMDRKSFIVPQLGRGPLKKTYIKKKFKPPSLFLNKWYFQQDIYNTTLIMFMVSACSFDQMYAPQDQISTNITLVSLNTNLFQMPNYKKIPYSPKATGTFQTYLWSYGNGSKEQWTDIISLSNLQLMQDGKQTKDIKHIRPLTEIYKSEYGNPFTHHYSQPDVRIFYGSQPKNSDELKTKPDISEITGLFQRCRYNPFRDKGKGNKVYWKPTDTDQGSLLSLPTDSRLLTEDLPLWLILWGIEDWTLKSKPITHLYEEYQLVIQSPYIEPKLPCYVFLDYYFTHPKEHLSDYTETDKAHWHPKYGYQIYALEQLANSGPATPKLNLVKQIQAHTFYNFHFKWGGCPAPMELITDPADQEKFPTPNNQLQGLEIQDPETPKEYCLYTWDERQNQITEPAAKRLKQDFTSTKLFTGLGAKDIPLLEAPQKTWETEEEEKQKEISVQLQQLREHRRLLKQRLHQLLKRSKYAPLQ

SEQ ID NO: 3324 - protein, 108 aa, Betatorquevirus sp.
LTERATNLKNIYFLEMSSYLTPSIYSRNGLENQWLNSVWNIHDLICGCNNCFKHLFDILKAKNNLPCLPSTSTEDAGTQTGGDGDGDDVLEAGDLDKLFEESFDEEDG

SEQ ID NO: 3325 - protein, 103 aa, Betatorquevirus sp.
MGNGGRGKTKRDISPAPAAARAPKTPQAATPPAPKKIKICAPTINLFGDCKPKNRRFTPKEYEQELQEAKIWDRPPRQFIFDIPFYYNTVPEPVVNFALNYKF

SEQ ID NO: 3326 - DNA, 2865 bp, Betatorquevirus sp.
cagataccgaaggtgagtgaaaccaccggagttaaggggcctattgggctaaagcagtcttggcggaacgggctagaaacttaaaaaatacactattttttaggtatgagctcctatttaactccaacaatatacagcaaaaatggcttggaaaaccagatgatgaactccatttggaacattcatgacctctgctgcggatgcaacaactgcttcaaacatatttttgatattcttcaaagaaaaaacaacctgccatgcctcccttcaacttctaccgaagacgttggtacccaaaccgatggagaaaaacaagaagatacactcgacgaaggagacctagaccgccttttcgaagaagatttcacagaagaaactgggtaagaagacgacgtttatttactaaaagacataaaaaactaaaaaaactaaaactatcagtatggcaaccaagaactattcataaatgtagaattaaaggactactatgtttaactacttgtggaaaaggaagagtaaatcataattctattttaactatggaaagctatgtaccagaaagtgagcccgggggaggtgcatggtctattttacaagtatcattaagagtattatgggatgaatatactgcttttagaaactggtggacaagtagtaaccaagccttaccgcttacaagatatttaggaggacaattaaaattttatagaagcaaacaaacagactatatagcaattgtaaatacttgccccccatttgatgtaacaagagacatatacttaaacacacaacctagtagagcaattatgcataaatataaaattattgtacccagattagacagaaaaatataccgaaaaccatatgttaaaaaaaatgtaaaaccaccaccactatttacaaacaaatggttttttcaaagagaaatatacaaccaaccattttttactgtacaaacttcttgttgttcactagaccaaatatttggcccagatacagaaattaataccaacctatcttttatatcactaaattgtgacttctttcaaaacccacaatgggcagacttaccagacacaggatacagaccaaaatacacaggcacaagcaacacatacttatttagagctcaaaatggaacttatacaggtaaaggatacaaaacccttacaccattatttaacacaaaaaccataacaaagggaaaaccattatcagctaacgactggcaaaatttccaaaacgaccttaaaaacaaagactactggggaaacccatttgacccaaactacttacactcatacacatactggtacggaccatatccaacgaaagatacttttgaaaacggaacactagtacaactacacgaagtattcctaacatgtagatacaacccttttagagacaaatccaaaggaaacaaagtatacttaaaatccacatccttacaacaaggcagcatgttatcattaccacaaaacgaacaaattttaatacaagatatgccactatggttaattttttgggcatgggaagactggatagtaaagagcaagcctgtacaacacttactacaagactaccaaattattatacaaagtaaatacatttacccaccaagaacagcatacgtaccactagataaatattttgcagaaacaacacacgaaacaaatttaacagaaacagacaaagcaaactggcacccaaaagtagaaatgcaacaatattccactcaaaacattgcacttacaggaccactatcaccaaaaattacaaccacaaaatcaatagaaactcatatgtactataaccttttttttaagtggggaggctgtccagctccaatggaaaacattacagatccagcagagcaagaaacattccccacacccggtaacatcatacaaggacttgaaatccaggatccaaaaaccccagaacaatacacaatttgggactgggacgaaagacgaggaattattacagcaaaaggttcaaaaagaattaaatcagactttgaaacttcaacatattttacagaacatggagcaaaggacccagaaacgcaggcaccacaacaaaaaatctacgcggcaccaccgcaaacagaaaagacggaggactacatcaaccagctcaagcagctgcagcgagacctcaagcaccgaatccacgagctcctaaaaacaaaaaaattattccctattctgtagacatgtttggacaaacaaagaataaaaaccgtagactaactgcaaaagaaagggcagatgacttacaagatgcaataatatggggcagataccctagaacatataaaaatgaatcttacttttacaaagacatgaaccctgaaccccttgtaaacttttcattaaactttaatttctaagccagcaaatattcacttgtcggtgtccatttattaaagttaaacttatataaacatccaccactttccctaatacgcaggcgcacaagggggcaccacccccttaaacccccagggggctccgccccctacaacccccaagggggctccgcccccttacaccccctaattaatattcaacaggaaaaccacataattagaattgccccccttacaccccctaattaatattcaacaggaaaaccacataattagaattgccgaccacaaaccgtcaactgttacaataacttccctatttttacaaacacttcctcttttacagagcaacgcctactaattcattaatagtcagagtcatatcctgggaggagaaacatgagtatataactaagtacactgacgaatggctgagtttaccccgccagacggagacgagacaggacactgactcggctgcttttggg

SEQ ID NO: 3327 - protein, 653 aa, Betatorquevirus sp.
MPPFNFYRRRWYPNRWRKTRRYTRRRRPRPPFRRRFHRRNWVRRRRLFTKRHKKLKKLKLSVWQPRTIHKCRIKGLLCLTTCGKGRVNHNSILTMESYVPESEPGGGAWSILQVSLRVLWDEYTAFRNWWTSSNQALPLTRYLGGQLKFYRSKQTDYIAIVNTCPPFDVTRDIYLNTQPSRAIMHKYKIIVPRLDRKIYRKPYVKKNVKPPPLFTNKWFFQREIYNQPFFTVQTSCCSLDQIFGPDTEINTNLSFISLNCDFFQNPQWADLPDTGYRPKYTGTSNTYLFRAQNGTYTGKGYKTLTPLFNTKTITKGKPLSANDWQNFQNDLKNKDYWGNPFDPNYLHSYTYWYGPYPTKDTFENGTLVQLHEVFLTCRYNPFRDKSKGNKVYLKSTSLQQGSMLSLPQNEQILIQDMPLWLIFWAWEDWIVKSKPVQHLLQDYQIIIQSKYIYPPRTAYVPLDKYFAETTHETNLTETDKANWHPKVEMQQYSTQNIALTGPLSPKITTTKSIETHMYYNLFFKWGGCPAPMENITDPAEQETFPTPGNIIQGLEIQDPKTPEQYTIWDWDERRGIITAKGSKRIKSDFETSTYFTEHGAKDPETQAPQQKIYAAPPQTEKTEDYINQLKQLQRDLKHRIHELLKTKKLFPIL

SEQ ID NO: 3328 - protein, 92 aa, Betatorquevirus sp.
MSSYLTPTIYSKNGLENQMMNSIWNIHDLCCGCNNCFKHIFDILQRKNNLPCLPSTSTEDVGTQTDGEKQEDTLDEGDLDRLFEEDFTEETG

SEQ ID NO: 3329 - protein, 58 aa, Betatorquevirus sp.
MFGQTKNKNRRLTAKERADDLQDAIIWGRYPRTYKNESYFYKDMNPEPLVNFSLNFNF

SEQ ID NO: 3330 - DNA, 2865 bp, Gammatorquevirus sp.
cgggagcccgaggtgagtgaaaccaccgaggtctaggggcaactcgggctagggcagtctagcggaacgggcaagaaacttaaaatatatttgttttctagatgctgtcacacaaagactttgccagaaaaactaaatacaatattgatacccaaaatcaaatatggatgtctggcattgctgactctcatgacacttggtgtgattgtgatactccattcgcgcatcttctagcaagtatttttccacctggccacaaagatagaaattctactataaaccaaatactatacagagactataaacaaaaatgcctttctggtggcgccgcagacaaagatactggagacccagaagattctggaaaaataaaacaagaaaatacaacagaagaagatggcctcgcaggcgcagaagaagaactcgcagaactactcgccgccgcagaagaaggagaaaatacaaggtaaaaagaaaaagacaaactttaccagtaagacaatggcaacctgataaaattgttaaatgtaaaattaaaggagtagatgtactagttttaggtggggagggtaaacagcttgtatgttatactaatgtaaaagatgcatggacaccacctaaagcaccagggggtggagggtttggctgtcagcaatatagcttaagctggttatatgaacaatatgtttttagaaacaatatatggacaaagagtaacataggattagacctttgtagatacttgcattgtagacttacattttatagacacccagacacagactttattatatcctatgaaagacaaccaccatttgacatagacaaatggacttatcctagctgtcacccaaaaaacttgctactaggaaaacacaaaatattgttattaagcaaagcaactaaaccaaatggaaaactaaccaaaagaattttaattaaaccacccaagcaaatgctaaccaaatggttctttcaagaacactttgcacatgcaggattatttttaattaaagctgcagcatgcaacttcagatacagccacttaggctgctgtaacaccaacagaattactactctattttatttaaacccaggcttttaccaacaaggtaactggtctgcacacacctctacaggttatcagccatatttaacagtaccaaaagaactatatttttggaacaaagacaacaaacccactaaatatacaaagccagaaacttatgatagatcaattgactattccacaggctggtttaaaaaagaaatattatctgctgttaaagtaaccacagacagtaccggaagtgaaccaactgccagtactccagtaaacatatgcaggtacaatcctgcagtagacagtggcaaaggcaacaccatatggttagtctccactttaacaaataactaccataaaccaacaagtgacaaatatattattatttcaggcctgcctttatatgaaatgctatatggctttttaagctttgtgcaaatgattaaaaagacacctcagtttttacaaacacacatactagccatagaatcaccagcactcaaaccttattcacaaataggagcagaaggcccaataatacctctagacaacacctttgtaaatggacaagcaccatacaatgaagtactaactaccagtatgaaagctaactggtggccaaatgtatataatcaactacaaatattaaattttatagtagagagtggaggctatgtaccaaagtatagccaaacaaaagaaagtacatgggaattacaatatatgtacaattttctttttaagtggggaggtccagaaatttcagaacagcctgttgcagatccaacattacaggggacatatgaagtacccgatactttcacaggaacaatacaaattagggacccagctaaacaaagtgcaatgtcaatcctccatccctgggacatcagacatggaatgtttacaaaaacagctcttaaaagaatgcaatcaaacatctcaactgattcaactttccaagcagatacagaagaagttcccaggaaaaaaaagaaagttacaggtccccagatgtcagtcccacaagaagagcaagaagagatccagagatgtctccactcactcttcgaaagcgatacctaccaagaaacggaggacccacaaaaaatcaaagacctcatcaagcagcagcacctcaagcagagagagctcaagtacaacatcctcagactcatctcagacctcaaagagcagcaaaacatcctgaaacttcaaacaggctatgtcacttaaccagatttaaaaaaggttttgaatgggacactgaaagacaactagcacatgcatttaacagaccccccagactttttaaagaagacccacctttctatccatggctaccccgctttgaacccattgtaaactttcaccttaattataaattctaggcctacaactttcacttagtggtgtatgtttatataagtctcacccccaaaaaaataataaaattgtaaaaaaaaaaaaaaaaataaaaaattgcaaaaattcggcgctcgcgcgcgctgcgcgcgcgcgagcgccgtcacgcgccggcgctcgcgcgccgcgcgtatgtgctaacacaccacgcacctagattggggtgcgcgcgctagcgcgcgcaccccaatgcgccccgccctcgttccgacccgcttgcgcgggtcggaccacttcgggctcggggggggcgcgcctgcggcgcttatttactaaacagactcccagtcgccatttggccccccctaagctccgcccccctcatgaatattcataaaggatcgagcgcagcgaggaggtccccggctgcccatggg

SEQ ID NO: 3331 - protein, 662 aa, Gammatorquevirus sp.
MPFWWRRRQRYWRPRRFWKNKTRKYNRRRWPRRRRRRTRRTTRRRRRRRKYKVKRKRQTLPVRQWQPDKIVKCKIKGVDVLVLGGEGKQLVCYTNVKDAWTPPKAPGGGGFGCQQYSLSWLYEQYVFRNNIWTKSNIGLDLCRYLHCRLTFYRHPDTDFIISYERQPPFDIDKWTYPSCHPKNLLLGKHKILLLSKATKPNGKLTKRILIKPPKQMLTKWFFQEHFAHAGLFLIKAAACNFRYSHLGCCNTNRITTLFYLNPGFYQQGNWSAHTSTGYQPYLTVPKELYFWNKDNKPTKYTKPETYDRSIDYSTGWFKKEILSAVKVTTDSTGSEPTASTPVNICRYNPAVDSGKGNTIWLVSTLTNNYHKPTSDKYIIISGLPLYEMLYGFLSFVQMIKKTPQFLQTHILAIESPALKPYSQIGAEGPIIPLDNTFVNGQAPYNEVLTTSMKANWWPNVYNQLQILNFIVESGGYVPKYSQTKESTWELQYMYNFLFKWGGPEISEQPVADPTLQGTYEVPDTFTGTIQIRDPAKQSAMSILHPWDIRHGMFTKTALKRMQSNISTDSTFQADTEEVPRKKKKVTGPQMSVPQEEQEEIQRCLHSLFESDTYQETEDPQKIKDLIKQQHLKQRELKYNILRLISDLKEQQNILKLQTGYVT

SEQ ID NO: 3332 - protein, 122 aa, Gammatorquevirus sp.
MLSHKDFARKTKYNIDTQNQIWMSGIADSHDTWCDCDTPFAHLLASIFPPGHKDRNSTINQILYRDYKQKCLSGGAADKDTGDPEDSGKIKQENTTEEDGLAGAEEELAELLAAAEEGENTR

SEQ ID NO: 3333 - protein, 112 aa, Gammatorquevirus sp.; identical to SEQ ID NO: 969

SEQ ID NO: 3334 - DNA, 2865 bp, Alphatorquevirus sp.
cgggactggccgggctatgggcaaggctcttaaaaaagcatgtttctcggtaaattatacagaaagaaaaggctactgcttctgccgagcgtgccagcttcaaagaagaaaccacctgcaatgagcgactggatcccacctactcagaatgttaccgatagagagggagattggttccggtccgtttactgctctcacaaatgtttctgtggctgtggcgatcctattcaccatctcgctagtattgctgctgctgttggctaccaacctccgccggggtcccgccaggccccggggccttcaggtacaccgccgctagtgagaggtctcagagcgctcccggcagcccccagcggttctagcaacccacaatgtggtggaaccgctggaagaggtaccggtggagaccgctccgacgctggaggaccatccgcaggagacgacccctacgatggagacgcagaggagctgctcgccgccctagaagacgcagagtaaggagatggcgacggaggaggagggcgtggggtaggagacgatacataaggcgccgcagactgagaaggaggcgcagaaagattaatataactcagtggaacccctccgtcgtcagaaaatgcgtggtgtccggctacatacccctcctcatctgtggaacgggtaccaccggcaccacctacaaaaactatggcagccaccaggctgactacaaaaagtatgacccctttggaggaggcttcagcaccatgcagttcaccctacagagtctatttgaggagtgggttaaacacagatgtacctggagcaggtccaacaaggacctagaactagtgagatatctaggtggcagcttcaccctgtacagacacccaaaatgtgactttatattcagatacaacagaaaacctcctttcacagacagccaggtcacaggacctagtctgcaccctggcatcctaatgaccagaaaaaaaaagaaaattattaaaagcttcctcactagacccagaggcagagccacaaagagagtcagattcaagccccccactctatatacagacaagtggtacttccaaaaagacatctgccagctgccgctcgttaacattgcagcatctgcgtgcagcctgcggtttccgttctgctcaccacaaactgacaacacttgcgtatacttccaggtgttgagtaaacgtttcaacaccatgctcagtatctccccagactaccccaagcaaaactatcagtcttttgttataactcaccttaagaacaatgtagaaactaattatgacacaaaaaaaagtggcacattagataactacaacgacagaaacagattaggagtagtattcaacacatttaaaacagaagaacacttatttgatcccacagcaaaagataccaaaaatacaaacactagagtaactaataaatatgaaaatgtaaccagtctctggggagactatatatacaaaaaagaagtagttgaccacttcattaaaaatgcacagaactattttaatgccagaaaaggcacagtagtcaccagtaatgaatacctgaatcacaaaacaggcctcttcagtccaatattcctatcaaacagtagactcagtccagactttccaggcttctacacagaagtcatttacaatccagcaaatgacaaaggagtgggcaacaaagtatggatggactggtgcactaaaaatgacagtacctggagagacgccccccaaaagctaccagtagtagacgtacccctctgggcagcactcctaggctattctgactactgcacaaaatatttcaatgataaaggactaataaaagaagccagactgaccatcatctgcccttacacacaaccaccgctcacagacacagaaaatgtagacatgggcttcgtaccctatgactctaatttcggaaatggagtgatgccagacggaaccccctatatcccaatagaatacagatttaagtggtacccatgcatgtttcaccagcaaaatttcatgaactctatagtacagagcggaccctttgcatatcagggagacgagaaatctgtagttctaactgcaaaatataaatttcgctttctattcggtggcaaccccacacccgaacagacgattaaggacccctgtcagcaacccaccttccagatgcccggtgccagtggactgcctcgcgacgtacaaatcgaggacccgcaactcctccacgagggatactacttcagagcctgggatatcagacgtggtctctatggcgaaaaagctatcaagagaatgcgagaacaaccgatccctcctgaattttttgcaggacctccaaagaaaagcagattcgaagtacccgcaaatgtcggagacgactgcagttcaaaggagcaaaagtggcatccgtggcccgactcaccgggagcggaagtgcagagctccgacgaggaagaaaaagaggtcgagacgccgatcctccagcaccagctcagagagcacctccgggagcagaaagtcctcaagtcccagatcaaattcgtcatcaagcagctcatgaaaactcaaagtcacctccacgtaccatactacccttagtgggcccaaaagcctacctgttcccaaaacgcttaccacaagtgtggtccaagcaagactgggaaacagaatatgaaacatgcgcggccttcgacagacctccgcgcacagaccttacgagcacccccttctatccttggatgcccagagagccctctcgcttcagagtcagcttcaagctaggttttcaaccctaaataaaatgcaaggccgtgggagtttcacttgtcggtgtctgcttattaaggtcaccaagcac

SEQ ID NO: 3335 - protein, 744 aa, Alphatorquevirus sp.
MWWNRWKRYRWRPLRRWRTIRRRRPLRWRRRGAARRPRRRRVRRWRRRRRAWGRRRYIRRRRLRRRRRKINITQWNPSVVRKCVVSGYIPLLICGTGTTGTTYKNYGSHQADYKKYDPFGGGFSTMQFTLQSLFEEWVKHRCTWSRSNKDLELVRYLGGSFTLYRHPKCDFIFRYNRKPPFTDSQVTGPSLHPGILMTRKKKKIIKSFLTRPRGRATKRVRFKPPTLYTDKWYFQKDICQLPLVNIAASACSLRFPFCSPQTDNTCVYFQVLSKRFNTMLSISPDYPKQNYQSFVITHLKNNVETNYDTKKSGTLDNYNDRNRLGVVFNTFKTEEHLFDPTAKDTKNTNTRVTNKYENVTSLWGDYIYKKEVVDHFIKNAQNYFNARKGTVVTSNEYLNHKTGLFSPIFLSNSRLSPDFPGFYTEVIYNPANDKGVGNKVWMDWCTKNDSTWRDAPQKLPVVDVPLWAALLGYSDYCTKYFNDKGLIKEARLTIICPYTQPPLTDTENVDMGFVPYDSNFGNGVMPDGTPYIPIEYRFKWYPCMFHQQNFMNSIVQSGPFAYQGDEKSVVLTAKYKFRFLFGGNPTPEQTIKDPCQQPTFQMPGASGLPRDVQIEDPQLLHEGYYFRAWDIRRGLYGEKAIKRMREQPIPPEFFAGPPKKSRFEVPANVGDDCSSKEQKWHPWPDSPGAEVQSSDEEEKEVETPILQHQLREHLREQKVLKSQIKFVIKQLMKTQSHLHVPYYP

SEQ ID NO: 3336 - protein, 152 aa, Alphatorquevirus sp.
MFLGKLYRKKRLLLLPSVPASKKKPPAMSDWIPPTQNVTDREGDWFRSVYCSHKCFCGCGDPIHHLASIAAAVGYQPPPGSRQAPGPSGTPPLVRGLRALPAAPSGSSNPQCGGTAGRGTGGDRSDAGGPSAGDDPYDGDAEELLAALEDAE

SEQ ID NO: 3337 - protein, 138 aa, Alphatorquevirus sp.
LQFKGAKVASVARLTGSGSAELRRGRKRGRDADPPAPAQRAPPGAESPQVPDQIRHQAAHENSKSPPRTILPLVGPKAYLFPKRLPQVWSKQDWETEYETCAAFDRPPRTDLTSTPFYPWMPREPSRFRVSFKLGFQP

SEQ ID NO: 3338 - DNA, 2865 bp, Alphatorquevirus sp.; identical to SEQ ID NO: 3334

SEQ ID NO: 3339 - protein, 744 aa, Alphatorquevirus sp.; identical to SEQ ID NO: 3335

SEQ ID NO: 3340 - protein, 152 aa, Alphatorquevirus sp.; identical to SEQ ID NO: 3336

SEQ ID NO: 3341 - protein, 138 aa, Alphatorquevirus sp.; identical to SEQ ID NO: 3337

SEQ ID NO: 3342 - DNA, 2864 bp, Betatorquevirus sp.
caggtaccgaaggtgagtgaaaccaccgaagttaaggggcaatatgggctgaagcagtcttggcggactgggcaagaaacttaaaataatactttattttacagatatgagcagctttcttactccctgtgtatactctggaaaagcccaagaaaatcaatgggtaaactgcatctttaactctcacgatctgttctgcggctgcaacgacaccattaaacacttggcatccattttacaaaccaaacaactatgcctcccttcaacttctaccgccgaagatggtactcaaactggccctacagaagaagaagatattttacaagaaggagacctcgacaaactattcgaagaagatttcgacgacgattccgggtaaggagacgacgccgacgctttaaaagacataaaaaactattaaatttaagactcaaacaatggcaacctaaaaaaattagaaaatgtactattgaaggactattatgtactgtacaatgtggaagggggaaagttaaccataattttaccttagaccaagaactgtatgtaaatgaaggtgaaccgggagggggatcatggtctataatgcaagtgactttaagagtgttatatgaagaatacttagcatgcagaaactggtggacagcaggaaaccaagggttacctttagtaagatatttaggaggctacataaaactatatagaagccaacaaacagactacatagctaccataaatacatgccctccatttgaggtaactagagactcatactttggaacacaaccaagcagattaataatgaacaaatacaaagtaatagtacctaaactatctagaacacacttaaaaaaaccatacattaaaaaaaaaatctttccaccatcattatttcaaaacaaatggtattttcaaaaagacctatacaaccaaccactatttatgataacaacttcatgttgctcactaggacaagtattttctagagaagacgaaataaacagcaacataacactcactagcctaaacacagacttttttcaaaatccacaatggggagacattccaaacaaaggatacagacctaaattttcaggcacaacagatacatacctatttttagcacaaaacggagcaacagaaataacatcatataaaaatcttattccattactacatacaaaaagactaaaagacggaaaacctttaccaacaaactttgaacaagcaatacaaaacgaaataattgatgaacaatactggggaaacccatttaatcctaaatacttacactcacacagatatttttatggaccatacccaacagcaaacaattatacaaactgcaatcttacagaactaacagaaatattttttaaattaagatacaatccatttagagacaaaggaaaaggaaacaaagtatacataaaatcaacctcattaccacaaagttcctttatggtactacctacaaacgaaaacctcctagtagaacacttaccaatatggctaattctttatgcatgggaagactggctactaaaaagcaaaccagtacaacacctataccaagattatcaattagtaatacaaacagactacttttatccaaaaagacaatgctatgtaattttagacaaatacttttgggacgtaactaacgaatccccacttacagaatcagacaaagcaaactggcatccaaaattagaaatgcaagaatatagcacagaaaaaatagcaaccacaggaccactagcacctaaaattaactttactaaaaatatagaaactcacatactatataaacttttttttaagtggggaggatgccctgcaccaatggaacaaattacagacccagcagaccaagaaaaattccctacgcccagtaacttcataccaacaattgaaatccaggatccagaaacaccagaacaatacacactctgggaatgggatcaaaggagagatatgcttacaggaaaggctacaaaaagaattaaactataccaagaacctacaaactattttacagaatatggagcaaaggatccagaaacgcaaacaccacaaacaatcagcttccaggcaccggaaaagggcgaaaaaaacgagaaagagtacatctccgagctccagcagctgcagcgagaactcaagcagcgaattcacagactcctaaaaaacccaaaattattccccttttaactgatatgtttggtaatagaataaagaaaaaccgtagatttaatcctaaagaatttgctgaagagctacaagaagctcgcatatggcatagacgccctagattgtacatacttgataagcctgattatgaattgcctgtaattgaacccattgtaaacttttcattaaactaccatttctaggccagcagtaattcacttgtcggtgtccatttatttaagttataacttatataaacatccaccacactccctaatacgcaggcgcacaagggggctccgcccccttaaacccccaagggggctccgcccccttaaacccccaagggggctccgcccccttacaccccctaattaatattcaacaggaaaaccacctaattagaattgccgaccacaaaccgtcaaccattcgttctacttctgctttttaccatctacttccttattttaaggccacacctacctacttcattaataatcagacgctattcctgggaggagcaacacatctatataaccaagtcattaataatcagacgctattcctgggaggagcaacacatctatataaccaagtacactgacgaatggctgagtttaccccgccagacggagacgagacaggacactgactcggctgcttcaggg

SEQ ID NO: 3343 - protein, 653 aa, Betatorquevirus sp.
MPPFNFYRRRWYSNWPYRRRRYFTRRRPRQTIRRRFRRRFRVRRRRRRFKRHKKLLNLRLKQWQPKKIRKCTIEGLLCTVQCGRGKVNHNFTLDQELYVNEGEPGGGSWSIMQVTLRVLYEEYLACRNWWTAGNQGLPLVRYLGGYIKLYRSQQTDYIATINTCPPFEVTRDSYFGTQPSRLIMNKYKVIVPKLSRTHLKKPYIKKKIFPPSLFQNKWYFQKDLYNQPLFMITTSCCSLGQVFSREDEINSNITLTSLNTDFFQNPQWGDIPNKGYRPKFSGTTDTYLFLAQNGATEITSYKNLIPLLHTKRLKDGKPLPTNFEQAIQNEIIDEQYWGNPFNPKYLHSHRYFYGPYPTANNYTNCNLTELTEIFFKLRYNPFRDKGKGNKVYIKSTSLPQSSFMVLPTNENLLVEHLPIWLILYAWEDWLLKSKPVQHLYQDYQLVIQTDYFYPKRQCYVILDKYFWDVTNESPLTESDKANWHPKLEMQEYSTEKIATTGPLAPKINFTKNIETHILYKLFFKWGGCPAPMEQITDPADQEKFPTPSNFIPTIEIQDPETPEQYTLWEWDQRRDMLTGKATKRIKLYQEPTNYFTEYGAKDPETQTPQTISFQAPEKGEKNEKEYISELQQLQRELKQRIHRLLKNPKLFPF

SEQ ID NO: 3344 - protein, 103 aa, Betatorquevirus sp.
LGKKLKIILYFTDMSSFLTPCVYSGKAQENQWVNCIFNSHDLFCGCNDTIKHLASILQTKQLCLPSTSTAEDGTQTGPTEEEDILQEGDLDKLFEEDFDDDSG

SEQ ID NO: 3345 - protein, 58 aa, Betatorquevirus sp.
MFGNRIKKNRRFNPKEFAEELQEARIWHRRPRLYILDKPDYELPVIEPIVNFSLNYHF

SEQ ID NO: 3346 - DNA, 2864 bp, Betatorquevirus sp.
gcgggtgccgaaggtgagtgaaaccaccgagtcaaggggcaattcgggctggttcagtctagcggaacgggcaagaaacttaaaacaattttattttacagaatgacaacttttattaaaccatcactttacaaaggaagatctctggaacacaaatgggtatccagcatttatgaatcccacgacctaatttgcagctgcgaagatccaattgaacacctctcaaaaatattaaatttacaaattaaaaaaccactatgcctcccttctaccgctggagaagaagaccatacacataccgttggagaagacgccgtcgaccaacttttagaaggagaattagacaaacttttcgaagacgaccttacagaagacactgggtaaggagacgtcgatatttaaaaagacttaaaagaaaacttaaaaaaataactgttaaacaatggcaaccataccatattagaaaatgtactataaaaggaaatttactattgctagcatgtggtcaaaaaaggattaatcataactttactttatttgctgaatctattgtacctaaagaagaaccagggggaggaggttggagtataatgcaactaactttaagagctttatatgacgaatataaaaaatatagaaactggtggacggcaagcaaccaaggcctgccattagtaaaatatttaggatgccagtttaaattctatagaagcgcacaaacagattatatagtcacaccacaactctgtccaccatttgatgtgacagaacacacatatttaaacacacaacctagcagacaaatgatgaacaaacatagtattattataccaagactagacagaccttacatgaaaaaaccttataaaaagagaagattcaatccaccttccatgtttcaaacaaaatggtactttcaacaagacatttataacaacccatttatagtattaacaaccgtagcatgtagtttagatgaaatgtttcaacccgaagaccaactaagctataacctaactctaatatcgctaaacacagacttttttcaaaacccaaaatggcaaaacttaccagacacaaagggatacgcaccaaaagtaacaggcacatacaatgtatacttatttactacagaaaatggcacaacaacaccaccaacatggaaagaattactaccattaactaacacagctagatacatagatggaaatctacaaaccaaaactaagtcgtatgaagaataccaaaaaacagaaactagcggaaatccattcacagaaaaaaacatacatatagatgctagatattactatggacaattcccaacaaaagaccaatttgacaaaaaccaaccagcagctgttaccagactatatgatgtctactggacatgcagatacaaccctctaaaagatgcaggcaaagacaacaaagtatattttaaatccattagtttatcacaaggcagctttcttacattaccagacaaaccagaattattaattacagactttcctttatggatagtcttttgggcatggcaagactggcaagaaaaactaaaacaaatacatcaaatagaccaaaattatcaaatagtagtgcaaagtccatacatatatcctaaaaaacaatgttatgtttttttagacaactactttacacaaccaaataaaggaagattaaatgaaacagatctagcaaactggcatcctaaactagaaatgcaacaagaaatgttcttttatatagcacaatcaggccctgcagcaccaaaaattaacaaaacaaaggcaatagaagcacattgtaactatagattctttttaaagtggggaggctgcccagcaccaatggaaacgatcacagaccccggaacgcaagaaaaattccccatccccaataacctcattcaaacaaatgaaatccaagatccaaccactgccaaagaaagctacatatactgctgggactcaaaaagagacattattacagaaaaatgctcaaaaagactcaaatcagctgaaccaactgaaatttcttttacagaatttggaacaaaggacctccccaaaaaaacacaagaaacacaggagacctcgtccgaggaagaaagcgaaacatcacaagagagaatcctccacctcaagctccagcgacacctactcaagcagcgactccacagactcctaaactcaaaaaaattattccccttacaataaatatgtttggtgacaatgtatcaaaaaatagaagattaactgtaaaagaactagaggacgaaatacaagaagcctctatttggcgtagacctgtacgttcttttattaaagacagacctacttatccttactgtaaaccagaaccacttgtaaatcaacctctcattaacttttcattaaactttaaattttaaggcctgcaaaatttcactctcggtgtccatttatataagtaataacttaaataaacatccaccacactccctaatacgcaggcgcaaagggggctccgcccccttaaacccccagggggggcaagccccccctaaccccccaagggggctccgcccccttaaacccccagggggggcaagccccccctaaccccccagggggctccgccccctaacacccccttattaatattcataaaggaaaccacaaaattagaattgccgaccacaaacgaatatgctaattacacttcctcaaacaacactgaacttccctaaaaattaattattaaacaccgtcactataggcggagacataacactatataactaagtacacagacgaatggctgagtttatgccgctagacggaggacgcatcacatcagtgactgcggactgaacttgg

SEQ ID NO: 3347 - protein, 654 aa, Betatorquevirus sp.; identical to SEQ ID NO: 3125

SEQ ID NO: 3348 - protein, 111 aa, Betatorquevirus sp.; identical to SEQ ID NO: 3126

SEQ ID NO: 3349 - DNA, 2863 bp, Gammatorquevirus sp.
cgggagcccgaggtgagtgaaaccaccgaggtctaggggcaattcgggctagggcagtctagcggaacgggcaagaaacttaaaactatatttgttttacagatgagcaagttttttaaaccaacaaaatacaacaatgaaactaaaaaccaactatggatgtccatgattgctgacagtcatgacatttgctgtgactgtcccacaccatttgctcacctactagattcaatatttccagaaggacacagagacagacacaaaccaattgactatattattaaaagagattggaaagaatgccattctggtggagaaggcgaagaaagccatggtggggacgctggagaagaaagagatataccacccgtcaaaaacgaagaagaagatttaacaacagaagatacaaacgtagaagaactgctcgccgccgtcgccgccgcagaggcaaggtaagaaaaaagaaagctaaacttaccttgcaacaatggcaaccagacagaattgttttatgcaaaattaaaggctttggtgaacttgtcctaggagcagaaggaactcaatttcaatgctataccaatgaaaagtacaatctacctttaccactgtgtccagggggaggtggttttggggttgaaagatttacattagaatggctatacaaacagcatattttcagaaataacatttggacaaaaagtaactactggacagacctatgtagataccttagagtagtgttttacctatacagacaccctacacaaagctttatagtacaatacagcagacaatcaccatttaacatagacaaaactacataccccaactttcatcctctactaatgcttttaaaaaaacaccataaaatagtaccaagcctacaaagaaaaccaagaggtaaaccctatgttaaacttactataaaaccaccaaaacaaatgttaacaaagtggttttttcaaaaagaattttgtgagtatgatttatgccaactagcaggatcagtaatatcattagactatcccagactaggatgctgcacagaaaacagagttataaccatatggtacataaatcctagcttttaccaaaactctgactgggcacaaactaaagacaacccatacgaaccagttacaggaattcctgaaaataaatatacatttaaaggaggcaaaaatccagcagcaggttatactcctaactttgaaatccctaaaacccaggaaccaggcactaaatacaaatactacaacagtataaactgggacaaaggctggttttcagctcagatattatcttccactagctacacaaaaaatggtcagcagactttaccattgccattagctgtagctagatacaaccctgctgaagatgatggtaaaggcaatgaagtatggttaacatcagtagcaacaggacagtatgctaaaccacaggacgatatcctactttttaacaatacaccactatggctagtgttctggggatatacaaactttttacagaaaattaaaaacaagtcttttttttcactatacatgtttgtaattaaaagcccctacattaaacctggaaacacagtacaaacaaaaaacttttttccatttgtagatgttaaatttacagaaggcaaaaactcacatgacagctatcttacatacacagataaaaaactctggtacccaacagtgtggagacaattagacaccataaatgcaatagtagaatgtggaccatatgttcctaaattaggctttgatagacttagcacatgggaacttgcttacaaatacattttttcctttaagtggggtggaccactcctcacagaacaagaagttgcagatccaaaatctaaagacaagtatcctacacccgatacaatgcaagaaacaatacaaatctgcaacccaaaacaccaagatacaaataccattttccatgagtgggactacagaaggggatacattaccaacccagctattaaaagaatgtcagaaaacctcatcattgattcagatgtctcaacagattcagaaacttcacagaaaaagagaaagagagttactacagagctcagaaacccggaggaaaagatcaagaaaatcaaaaaatgtctcctctcactctgcgaagaagatatctgccaagaggaggaagagggctcggacctccaccagctcatccgcaagcagcagcagcagcagcagctcctcaagcacaacatcctaacactattaaaagacatgaaagcaaaacaaaagatgctacagcttcaaacgggagtactagaataaaacttactccctttaaacctggctttgaaagagatactgaagatgaattagctaaagcattttataggcctgctagactatttaaagaagacacccccttctatccatggttacctaaattcacaccccttgtaaacttccacttaaactttagaggctaggcatgcactgttcacttggtggagtttgtttaataaagtttgcaccccaaaaaaattataaaataaaaaaaaaaaaaaaaaaataaaaaattgcaaaaattcggcgctcgcgcccccacaccccccgcggggggggggcaaagccccccccgcaccccccctacgtcacagaccacgcccccgccgccatcttgggtgcggcagggcgggggctaaaatggcgggagccaatcaatttatactttcactttccaattaaaacatgccacctcactacaaatgggtggagttttacacactatataatcaactacactgacgaatggctgagtttaccccgctagacggtgcagagatcgaccgagcgcagcgaggagatcttaagctgcccgtggg

SEQ ID NO: 3350 - protein, 671 aa, Gammatorquevirus sp.
LERMPFWWRRRRKPWWGRWRRKRYTTRQKRRRRFNNRRYKRRRTARRRRRRRGKVRKKKAKLTLQQWQPDRIVLCKIKGFGELVLGAEGTQFQCYTNEKYNLPLPLCPGGGGFGVERFTLEWLYKQHIFRNNIWTKSNYWTDLCRYLRVVFYLYRHPTQSFIVQYSRQSPFNIDKTTYPNFHPLLMLLKKHHKIVPSLQRKPRGKPYVKLTIKPPKQMLTKWFFQKEFCEYDLCQLAGSVISLDYPRLGCCTENRVITIWYINPSFYQNSDWAQTKDNPYEPVTGIPENKYTFKGGKNPAAGYTPNFEIPKTQEPGTKYKYYNSINWDKGWFSAQILSSTSYTKNGQQTLPLPLAVARYNPAEDDGKGNEVWLTSVATGQYAKPQDDILLFNNTPLWLVFWGYTNFLQKIKNKSFFSLYMFVIKSPYIKPGNTVQTKNFFPFVDVKFTEGKNSHDSYLTYTDKKLWYPTVWRQLDTINAIVECGPYVPKLGFDRLSTWELAYKYIFSFKWGGPLLTEQEVADPKSKDKYPTPDTMQETIQICNPKHQDTNTIFHEWDYRRGYITNPAIKRMSENLIIDSDVSTDSETSQKKRKRVTTELRNPEEKIKKIKKCLLSLCEEDICQEEEEGSDLHQLIRKQQQQQQLLKHNILTLLKDMKAKQKMLQLQTGVLE

SEQ ID NO: 3351 - protein, 117 aa, Gammatorquevirus sp.
MSKFFKPTKYNNETKNQLWMSMIADSHDICCDCPTPFAHLLDSIFPEGHRDRHKPIDYIIKRDWKECHSGGEGEESHGGDAGEERDIPPVKNEEEDLTTEDTNVEELLAAVAAAEAR

SEQ ID NO: 3352 - protein, 114 aa, Gammatorquevirus sp.
MSPLTLRRRYLPRGGRGLGPPPAHPQAAAAAAAPQAQHPNTIKRHESKTKDATASNGSTRIKLTPFKPGFERDTEDELAKAFYRPARLFKEDTPFYPWLPKFTPLVNFHLNFRG

SEQ ID NO: 3353 - DNA, 2863 bp, Betatorquevirus sp.
cgggagccggaggtgagtgaaaccaccgtagtctaggggcaattcgggctagatcagtctggcggaacgggcaagaaacttaaaagtctaggggcaattcgggctagatcagtctggcggaacgggcaagaaacttaaaatattattttttacagatgagtaaactgcaaactccaccaatatacaacgaaaaagcacttcaaactcagtggctaaatttgatctttcaaagccatgaattaatttgtggatgtgacaaggctcctgaacactttcaagatcttattaattctcaaaaatgccgccatttcaaagacgccgctactggaaccgaaacttttggaactacagacgaccaagaccttactatcgacgccggagatttagaaaatctattttcacccgaaaacgacgtagacgaagggtaagaagaaaaaatttttataaacgctttaaaaaacttagaaaaataaaaattaatcaatggcaaccacaaagcataaaacgatgtagaattgaaggatacctatgcttatttcaagctggacctactagatacctaaacaactatgctttgtggaaagaatccttctttccagaacattacccagggggaggaggatggagcatacaacaactatctttaggaaacttatttacccaacacaaggaatttatgaactattggactaaaagtaatgaaagaatgaacttatgtagatattatggctgtagaattcaattgtttagagaaacctttactgattatgtgttttactattttcaagaatgcccaaaaaatgtaaacagatatttttatgcttctcaacatccaattagactactaacacatggtagaaaaaaagtagtacctagctttgaaacacaaccacacaaaagaaaaccatacaaaacacttttcataccaccaccaaaactaatgcaaacaaaatggttttttcaacaaggattatcctcatttcccttagtatcttttgtagcaagcgcagtaagcttatcaggcatgtttggaagcaaaaattcaataagtaataatgctactctattttgtttagacagcaaagtatttgcttcaccaaactttcaatacaaaactgccacacatcctacttatggatacacaattgcaggctcatactacctatacggacttacaaatggacatgaaatttttacagaaaacaaaggaaaagaaagtatttatttaggaaacacaatggaacaaaaaagaggagccccaatgaatcactatcaaagtttcgataaatacacatttgaaaattggggaaacccctttttttggggttttttaacaggtaacttaagaacatttcaggcaaacataaacccaaataccatgtatactactgacccaaagttacaacaatcctggctaaaagaaaacaactatatatttaaagtaagatacaatccttttcacgataaaggacaaggaaatcaagtatactttgtaccaacatacgatgaaacacacaaaacatgggagcctacaaaagacccagacttaacatggtcagaccaacctttatggttaatattttggggactggaagacatgataaaaagactaggaaaatgcaaaaacctagatatggactgggtaatggtagttaaaagcagatacctagtgcctccagaaccctattatatatttttaagctatgactttgtacatggtagaggtccatatgacacagaacaagaatttatgaccagagatgatataacacactggtaccctagatttaaataccaaagacaaccaataagcaatatagtacaaacaggcccagcagtacccacaggggacaatgcaaaaaacatacaagctaaaattaaataccaatttctttttaagtggggaggcaactcatcgccacaagaaaacatatacgaccccaacaaccaaccagttactcctacacccaataacttcaacatcggggatgaaatcattgatccgacagcagacattacaaaagaaatatacccatgggactttagaagacacattcttacagaaacaagtgcaaaaagaattacagaaagcgaaattgatgaccaatttatgttcacagatggaagacaaacttcaacagacctccccttccaagaaacaacgacacaaacggaaaagaccccggaaacacaaacggaggcattattccagcagctccagcagctccagcaatacaaccagcaacttcagctccgactccgaaacctaaaacaattatctatggaccaataaacaaagtagaaatttttaaaactaaacgtaaaaataggagactaactccatatgaaaggcaaacagatattgagatagctaaatggttaaaaagacctgtaagacatttctttgatgatacaccttattatccatggttaccacctgcacccattgttcaatttgaccttgtaaaaggatttaataaaggcctgcattaattcacttgaggtgtccatttatttaagtaaaaacttatataaaccaacaccgcctccctaatacgcaggcgcaaagggggctccgcccccttaaacccccggggggggtaaaccccccctaacccccccacataattaatattcaacaggaaaaccacaaaattagaattgccgaccacaaacggtcactaagttcctctttttacacaacttctgcttttacttataaatattcatataattatttagtagtcactgtaattccggggaggagttaacaaactatataaccaactacagtttcgaatggctgagtttatgccgccagacgaagacgggaacacttcagtgtctccaggctgatcttggg

SEQ ID NO: 3354 - protein, 664 aa, Betatorquevirus sp.
MPPFQRRRYWNRNFWNYRRPRPYYRRRRFRKSIFTRKRRRRRVRRKNFYKRFKKLRKIKINQWQPQSIKRCRIEGYLCLFQAGPTRYLNNYALWKESFFPEHYPGGGGWSIQQLSLGNLFTQHKEFMNYWTKSNERMNLCRYYGCRIQLFRETFTDYVFYYFQECPKNVNRYFYASQHPIRLLTHGRKKVVPSFETQPHKRKPYKTLFIPPPKLMQTKWFFQQGLSSFPLVSFVASAVSLSGMFGSKNSISNNATLFCLDSKVFASPNFQYKTATHPTYGYTIAGSYYLYGLTNGHEIFTENKGKESIYLGNTMEQKRGAPMNHYQSFDKYTFENWGNPFFWGFLTGNLRTFQANINPNTMYTTDPKLQQSWLKENNYIFKVRYNPFHDKGQGNQVYFVPTYDETHKTWEPTKDPDLTWSDQPLWLIFWGLEDMIKRLGKCKNLDMDWVMVVKSRYLVPPEPYYIFLSYDFVHGRGPYDTEQEFMTRDDITHWYPRFKYQRQPISNIVQTGPAVPTGDNAKNIQAKIKYQFLFKWGGNSSPQENIYDPNNQPVTPTPNNFNIGDEIIDPTADITKEIYPWDFRRHILTETSAKRITESEIDDQFMFTDGRQTSTDLPFQETTTQTEKTPETQTEALFQQLQQLQQYNQQLQLRLRNLKQLSMDQ

SEQ ID NO: 3355 - protein, 104 aa, Betatorquevirus sp.
LAERARNLKYYFLQMSKLQTPPIYNEKALQTQWLNLIFQSHELICGCDKAPEHFQDLINSQKCRHFKDAATGTETFGTTDDQDLTIDAGDLENLFSPENDVDEG

SEQ ID NO: 3356 - DNA, 2863 bp, Betatorquevirus sp.
cgggtgctgaaggtgagtgaaaccaccgaaatcaaggggcaattcgggcttgtgcagtctagcggaacgggcaagaaacttaaaacaatatttattttacagatgagcaaattccaaaaagatgtctcctactctaagaaacaactaaacctacaaattgttaacacctatgttaacattcacgatctaaactgcggctgcaacaaacctttacaacatattattgaacaaattacaactcaagaaccatcactaaaatgccttactactaccgccgttggagaatcccatactggagacgcagaagacgagccctttggcgccgaagacctagaggctttattcgcagaaccagatggagaaaaagacgccgaccggtaagaagaaaacttaaaactttaactattagagaatggcaaccaaaatacattaacaaaatatgcgtaaaaggactttactgcttatttcaagctaatcataaaagactaaacaaaaactttgctcaatatgaaaactcaatacccattgaaggaactccgggaggaggaggtttttctttattaagatttaacttagatgctttgtactctcaacatcaacttgttagaaatgtatggactaaatctaacaaatatatgccactgtttagatataatggatgtaaaattaagatatatagacctgaaattgtagatgctgttgtaaaatttcaaacatgttatcctatgtctgccagtcaaatgctatatgcaggaacacaaccaggagtaatgatgctaagtaagggctcacataaaatacctagtaaaaaaacaaaaccatacggaaagccatacaaaatatttaaactaccaccaccacaacaaatgcaaaacaaatggtacttccaatcacacttagcaaagacaggcttactcttaattcaaacatgtgcagctagcttcgatgaatactacatatctaaaaatgccgaaagccaagcggttacactaagatcactaaacaccaaaatttttcaaaacttaaactttaaatcattacctactagtggatattccccaaaagaaaactactggctatggtcagtaacaaatggaagtgacttgaacaaagaattaatatacttaggtaacacaatagaatatgaactaggaaaaccagttacaaaaactaatgtagacacctatttacaaacaagaagcaactggggcaaccctttccatgaacattacatgaatcaaaaagtacaaatatacttttcaactataccaccagcacaagtaatacaagacattaaatccagagacagatgggaagagaaaataaccctaacaaaatttacacaagaaatgtactttacactaagatacaacccacaaacagacagtggaaaagatacacaaatatacttaaaatccaactggaaagaaaacgaaaacttaaatccaccaacagacacagacttaatatttgcaggttacccagtatggctatcagtctggggatttgtagactaccacataaaactaggaaaagtaacacaagtacctactcattacatagtattattaaaatcaccatccatacaaccaaaactagacacatacttattaatagacacatacttcacacatggagacacagattacctacaaggtagaactggatgggaaaatttaaattggtatccaatgataacacatcaagaagacacactagaaacattagcacaatcaggaccaggtacagctaaactagataaatcaataacagctgaatgtaaaatggaatataaattctactttaaggttggaggatgcgctcctccaattgaaaaaattgcagacccatcagaacaagcaacttatccgataccaaataacatgcaaccaacaacttcgttacagagtccagaagacccaattgaaacattcttatactcctttgactggcgtagaaacgaacttacaagcacagctactgaacgaatcacaaaagactactcaactccaaaatctttattttcagatacaacaacaactggaacagacgtgccaatccaccaaacacaccaaaaaaaagacatctcgtcggaggaggaggaagaacaagcggagacactattccagcagctccaactccagcgaaacaaacaaaagcgactccgacaccgaatcaagcaacttctaacacaactacaaacattagaataaaacatatcaaaaattttattagcctatttggtgacgaacctccaaacagacgaatgactccaaaagaattcaaagaagaactagaagaaagcgccatatggggtcacagacccagaacatatataaaagataaacccttttatgactttctacccataaccccaataatacccaaagtaaactttgatcttggttacagataataaaggcctgcaaactttcacacctcggtgtccatttatttaagtttaaacttatataaacatccaccacactcccaaatacgcaggcgcagaagggggctccgcccccttacacccccaagggggctccgcccccttacacccccaagggggctcaagggggctccgcccccttacacccccaagggggctccgcccccttacaccccctaattaatattcaacaggaaaaccacctaattagaattgccgaccacaaacggtcaactacttctgcttttcaacaaacttcctctttactttataaatattcattacataaattagtaatcaccgtaattccggggaggagacaattacctatataactaactacacttccgaatggctgagtttatgccgctagacggaggacacagcagttactgactgtggactgcacacggg

SEQ ID NO: 3357 - protein, 651 aa, Betatorquevirus sp.
MPYYYRRWRIPYWRRRRRALWRRRPRGFIRRTRWRKRRRPVRRKLKTLTIREWQPKYINKICVKGLYCLFQANHKRLNKNFAQYENSIPIEGTPGGGGFSLLRFNLDALYSQHQLVRNVWTKSNKYMPLFRYNGCKIKIYRPEIVDAVVKFQTCYPMSASQMLYAGTQPGVMMLSKGSHKIPSKKTKPYGKPYKIFKLPPPQQMQNKWYFQSHLAKTGLLLIQTCAASFDEYYISKNAESQAVTLRSLNTKIFQNLNFKSLPTSGYSPKENYWLWSVTNGSDLNKELIYLGNTIEYELGKPVTKTNVDTYLQTRSNWGNPFHEHYMNQKVQIYFSTIPPAQVIQDIKSRDRWEEKITLTKFTQEMYFTLRYNPQTDSGKDTQIYLKSNWKENENLNPPTDTDLIFAGYPVWLSVWGFVDYHIKLGKVTQVPTHYIVLLKSPSIQPKLDTYLLIDTYFTHGDTDYLQGRTGWENLNWYPMITHQEDTLETLAQSGPGTAKLDKSITAECKMEYKFYFKVGGCAPPIEKIADPSEQATYPIPNNMQPTTSLQSPEDPIETFLYSFDWRRNELTSTATERITKDYSTPKSLFSDTTTTGTDVPIHQTHQKKDISSEEEEEQAETLFQQLQLQRNKQKRLRHRIKQLLTQLQTLE

SEQ ID NO: 3358 - protein, 124 aa, Betatorquevirus sp.
LKVSETTEIKGQFGLVQSSGTGKKLKTIFILQMSKFQKDVSYSKKQLNLQIVNTYVNIHDLNCGCNKPLQHIIEQITTQEPSLKCLTTTAVGESHTGDAEDEPFGAEDLEALFAEPDGEKDADR

SEQ ID NO: 3359 - DNA, 2862 bp, Betatorquevirus sp.
cgggagccggaggtgagtgaaaccaccgtagtctaggggcaattcgggctagatcagtctggcggaacgggcaagaaacttaaactaggggcaattcgggctagatcagtctggcggaacgggcaagaaacttaaaatatttttaattacagatgtcaaagtttttacaaccaacttcatacaatggacgccaacaagaaaccaactggataaacttcaacattcactttcatgactccttctgtggatgccctgaacccctaacacacctaagacacctactaaaccaacaatgccaccatatcaaagacgccgctacttctacagaaactggtggaattcaagaagaaaacgatattggaatcgacgatggagacctagaaagactgttcgcaatcgaaaacgaagacaacgacgggtaagaagacgcttttataaaaaaaatagaaaacttaaaagactaagaataaatgaatggcaacctagctcaattaaaaaatgtaaaatagaaggatacctagtactgtttcaagcgggatacggacgctattctaataactatccattatggaaagaagtaatatttccacctcattatccaggtggaggtggatggggaatacaacaattaaacctaggaaatttatatactcaacataaagaacttatgaactactggactaaaagtaatgatagaatgaatatgtgtagatatatgggtgtaacacttacattatttagagagcaacacacagactggatattctcatactatgactcattaccaaaaacagtaacaaaatatttttacacctcacatcaccctatgcttatgcttacacacaaaagaaaaaaaacaataccaagttttgactcccagccacacaaaagaaaaccatacaaaaaaatatttgtaagaccaccaagactaatgagaaaccaatggtactttcaacaacaattagcagattttcctttactaacatttgccgcttcagcatgcagtcttcaaggcatgtttggatctataaactcagtaaacaataatgctacaatgtactgcatagaccacgcagtatttacaaaacctatatttcaatacaaaacacaaacacatccagaatggggctacaggcctagtgacaccatttacctatacggcctacaaaatggagcacacatttttactgaaaaccaatacaaagacagcatttacctaggaaacacaatgaacaatcaaagaggtgctgtaattaacagttacaccgaagcacaatttctacaaaaatacccctttggagaatggggaaacccttttttttggggatacatgacaggaaacttaacagttttccaaaacaatacagaccccataaccatggcaaaaaaccctacacaaaaactagaacaaagctggttaagagaaaacccttatgtttttaaagtcagatacaacccttttaaagataaaggacgaggaaaccaagtatactttgtaccaaattatgactccagccataacacatgggaacccaccaaagacccagatattctgttcgaaaattacccactatggttattactatggggcctagaagatatagttaaaagaatgggaaaatgcaaaaacttagacaatgactggactctagtaataaaatctaattggatactgccaccacaagcatactatataccagttagttatgactttgtacatggcagaggcccatatgatacagaaagagaagaaatgtctagagatgactatactaactggtaccctagatttaaataccaaagacaagcaatacaaaatattataatgacagggcctgctgttgctagaggagactatgctaaaaacatacaagctaaattgaaatatacttttcattttaagtggggaggcaactccgaaccgcaagaatcagtatttgacccaaccaaccaaccaattacacctgcaccccctaacatctacagcatccatgaaatcacaaatccgaattcaagcattacgggagaaatctacccatgggatttcagacgagatatgcttacaacaacagctacagaaagaattagacaaagcccaactaatgaaacatatatgttcacagatggagacgaaacttcaacagacctcaaaatctacacaccggagacacaaaaggaaaagaccccgaaaacacaaaagaaaacacttctcgagcagctccagctcatccagtcctacaaccaacagctccaactcagattcagaaaactaaaacaattatcaaaggacccataaaccaagtacaattgtttccaaaatacaaaaacagaagatttaaaccctatgaatttgaattagaattaacaatggctaaaatttttcacagacgccctagacattacttctatgatatgccaacttatgactggttaccccctgaacctaaagtaaactttgaccttgtacatggatttaataaaggccagcattaattcacttgaggtgtccgtttatttattattaaacttaactaaacatccaccgcctccccaatacgcaggcgcaaagggggctccgcccccttaaaccccccgggggggaaacccccccgaacccccccaactcattaatattcaacaggaaaaccacctaatttaaattgccgaccacaaaccgtcaactagttcccctttttataaaacttcccgttttactcataaatattcattgtattaattattaatcaccgtcacaagaggaggagcaaccacaactataaaacaaacaacactttcgaatggctgagtttatgctgccagacgtagacagcaagcacgcagtgactgctgactgatcttggg

SEQ ID NO: 3360 - protein, 667 aa, Betatorquevirus sp.
MPPYQRRRYFYRNWWNSRRKRYWNRRWRPRKTVRNRKRRQRRVRRRFYKKNRKLKRLRINEWQPSSIKKCKIEGYLVLFQAGYGRYSNNYPLWKEVIFPPHYPGGGGWGIQQLNLGNLYTQHKELMNYWTKSNDRMNMCRYMGVTLTLFREQHTDWIFSYYDSLPKTVTKYFYTSHHPMLMLTHKRKKTIPSFDSQPHKRKPYKKIFVRPPRLMRNQWYFQQQLADFPLLTFAASACSLQGMFGSINSVNNNATMYCIDHAVFTKPIFQYKTQTHPEWGYRPSDTIYLYGLQNGAHIFTENQYKDSIYLGNTMNNQRGAVINSYTEAQFLQKYPFGEWGNPFFWGYMTGNLTVFQNNTDPITMAKNPTQKLEQSWLRENPYVFKVRYNPFKDKGRGNQVYFVPNYDSSHNTWEPTKDPDILFENYPLWLLLWGLEDIVKRMGKCKNLDNDWTLVIKSNWILPPQAYYIPVSYDFVHGRGPYDTEREEMSRDDYTNWYPRFKYQRQAIQNIIMTGPAVARGDYAKNIQAKLKYTFHFKWGGNSEPQESVFDPTNQPITPAPPNIYSIHEITNPNSSITGEIYPWDFRRDMLTTTATERIRQSPTNETYMFTDGDETSTDLKIYTPETQKEKTPKTQKKTLLEQLQLIQSYNQQLQLRFRKLKQLSKDP

SEQ ID NO: 3361 - protein, 89 aa, Betatorquevirus sp.
MSKFLQPTSYNGRQQETNWINFNIHFHDSFCGCPEPLTHLRHLLNQQCHHIKDAATSTETGGIQEENDIGIDDGDLERLFAIENEDNDG

SEQ ID NO: 3362 - protein, 61 aa, Betatorquevirus sp.
LFPKYKNRRFKPYEFELELTMAKIFHRRPRHYFYDMPTYDWLPPEPKVNFDLVHGFNKGQH

SEQ ID NO: 3363 - DNA, 2862 bp, Betatorquevirus sp.
cgggagccggaggtgagtgaaaccaccgtagtctaggggcaattcgggctagatcagtctggcggaacgggcaagaaacttaaactaggggcaattcgggctagatcagtctggcggaacgggcaagaaacttaaaatatttttaattacagatgtcaaagtttttacaaccaacttcatacaatggacgccaacaagaaaccaactggataaacttcaacattcactttcatgactccttctgtggatgccctgaacccctaacacacctaagacacctactaaaccaacaatgccaccatatcaaagacgccgctacttctacagaaactggtggaattcaagaagaaaacgatattggaatcgacgatggagacctagaaagactgttcgcaatcgaaaacgaagacaacgacgggtaagaagacgcttttataaaaaaaatagaaaacttaaaagactaagaataaatgaatggcaacctagctcaattaaaaaatgtaaaatagaaggatacctagtactgtttcaagcgggatacggacgctattctaataactatccattatggaaagaagtaatatttccacctcattatccaggtggaggtggatggggaatacaacaattaaacctaggaaatttatatactcaacataaagaacttatgaactactggactaaaagtaatgatagaatgaatatgtgtagatatatgggtgtaacacttacattatttagagagcaacacacagactggatattctcatactatgactcattaccaaaaacagtaacaaaatatttttacacctcacatcaccctatgcttatgcttacacacaaaagaaaaaaaacaataccaagttttgactcccagccacacaaaagaaaaccatacaaaaaaatatttgtaagaccaccaagactaatgagaaaccaatggtactttcaacaacaattagcagattttcctttactaacatttgccgcttcagcatgcagtcttcaaggcatgtttggatctataaactcagtaaacaataatgctacaatgtactgcatagaccacgcagtatttacaaaacctatatttcaatacaaaacacaaacacatccagaatggggctacaggcctagtgacaccatttacctatacggcctacaaaatggagcacacatttttactgaaaaccaatacaaagacagcatttacctaggaaacacaatgaacaatcaaagaggtgctgttattaacagttacaaagagccagaatttacaaaaaaatacccctttggagaatggggaaacccttttttttggggatacatgacaggaaacttaacagttttccaaaacaatacagaccccaaaaccatggcaacaaaccctacacaaaaactaaaacaaagctggttaagagaaaacccttatgtttttaaagtcagatacaacccttttaaagataaaggacgaggaaaccaagtatactttgtaccaaattatgactccagccataacacatgggaacccaccaaagacccagatattctgttcgaaaattacccactatggttattactatggggcctagaagatatagttaaaagaatgggaaaatgcaaaaacctagacaatgactggactctagtaataaaatctaattggatactgccaccacaagcatactatataccagttagttatgactttgtacatggcagaggcccatatgatacagaaagagaagaaatgtctagagatgactatactaactggtaccctagatttaaataccaaagacaagcaatacaaaatattataatgacagggcctgctgttgctagaggagactatgctaaaaacatacaagctaaattgaaatatacttttcattttaagtggggaggcaactccgaaccgcaagaatcagtatttgacccaaccaaccaaccaattacacctgcaccccctaacatctacagcatccatgaaatcacaaatccgaattcaagcattacgggagaaatctacccatgggatttcagacgagatatgcttacaacaacagctacagaaagaattagacaaagcccaactaatgaaacatatatgttcacagatggagacgaaacttcaacagacctcaaaatctacacaccggagacacaaaaggaaaagaccccgaaaacacaaaagaaaacacttctcgagcagctccagctcatccaatcctacaaccaacagctccaactcagattcagaaaactaaaacaattatcaaaggacccataaaccaagtacaattgtttccaaaatacaaaaacagaagatttaaaccctatgaatttgaattagaattaacaatggctaaaatttttcacagacgccctagacattacttctatgatatgccaacttatgactggttaccccctgaacctaaagtaaactttgaccttgtacatggatttaataaaggccagcattaattcacttgaggtgtccgtttatttattattaaacttaactaaacatccaccgcctccccaatacgcaggcgcaaagggggctccgcccccttaaaccccccgggggggaaacccccccgaacccccccaactcattaatattcaacaggaaaaccacctaatttaaattgccgaccacaaaccgtcaactagttcccctttttataaaacttcccgttttactcataaatattcattgtattaattattaatcaccgtcacaagaggaggagcaaccacaactataaaacaaacaacactttcgaatggctgagtttatgctgccagacgtagacagcaagcacgcagtgactgctgactgatcttggg

SEQ ID NO: 3364 - protein, 667 aa, Betatorquevirus sp.
MPPYQRRRYFYRNWWNSRRKRYWNRRWRPRKTVRNRKRRQRRVRRRFYKKNRKLKRLRINEWQPSSIKKCKIEGYLVLFQAGYGRYSNNYPLWKEVIFPPHYPGGGGWGIQQLNLGNLYTQHKELMNYWTKSNDRMNMCRYMGVTLTLFREQHTDWIFSYYDSLPKTVTKYFYTSHHPMLMLTHKRKKTIPSFDSQPHKRKPYKKIFVRPPRLMRNQWYFQQQLADFPLLTFAASACSLQGMFGSINSVNNNATMYCIDHAVFTKPIFQYKTQTHPEWGYRPSDTIYLYGLQNGAHIFTENQYKDSIYLGNTMNNQRGAVINSYKEPEFTKKYPFGEWGNPFFWGYMTGNLTVFQNNTDPKTMATNPTQKLKQSWLRENPYVFKVRYNPFKDKGRGNQVYFVPNYDSSHNTWEPTKDPDILFENYPLWLLLWGLEDIVKRMGKCKNLDNDWTLVIKSNWILPPQAYYIPVSYDFVHGRGPYDTEREEMSRDDYTNWYPRFKYQRQAIQNIIMTGPAVARGDYAKNIQAKLKYTFHFKWGGNSEPQESVFDPTNQPITPAPPNIYSIHEITNPNSSITGEIYPWDFRRDMLTTTATERIRQSPTNETYMFTDGDETSTDLKIYTPETQKEKTPKTQKKTLLEQLQLIQSYNQQLQLRFRKLKQLSKDP

SEQ ID NO: 3365 - protein, 89 aa, Betatorquevirus sp.; identical to SEQ ID NO: 3361

SEQ ID NO: 3366 - protein, 61 aa, Betatorquevirus sp.; identical to SEQ ID NO: 3362

SEQ ID NO: 3367 - DNA, 2862 bp, Betatorquevirus sp.
caggtaccgaaggtgagtgaaaccaccgtagttaaggggcttattgggctgaagcagtattgacggaacgggctagaaacttaaaaatatatatatgttttacagatatgagcagctttcttacaccagcagtatacagcaacaatggattagaaaaccaatggataaactcaatttggaatatacacgaccttttttgcggctgtaacaacgccattaaacacctttttaacatcttaaagaaaaaacaaaccctaccatgcctcccttcaatcgatggcgtcgatactggaacccaaactggagaagatatcgaaaacgacgttttagaaccaggagatttagaaaagctattcgaggaagatttcgacgaagaagatgggtaagaagacgctttaaaaactatagaaaaaaagctaaaaaaataactgtaaaagaatggcaacctaaaaaaattagaaaatgtactatcaaaggacctttatgcttatttgcttgtggtagattttgcatagctaataactttactttatttgctgaatcctatataccagaaaaaaactgtggaggtggtgcctggtctattatgcagctaacattacaagctttatgggacgaatatgtaaaatttagaaattggtggactgtatccaatgagggcttacctcttgttaaatatatgtactgtaaatttaaattttatagaagcccattcacagactacatagtaataccttctctatgtcctccattttcagtaactagagatgactacttaaacacacaacctttaagagcactaatgaacaaaaacaaaataatagtacctaaattaagagaaaatagtaaaagaaaatacattaaaagaaagttttacccaccatctttatttcaatccaaatggtactttcaacaagatatatgtaaatttccattcatagtactaaaaacatcagcatgttcatttgatcaattttatcaaccagatgacatgctatcttataacataacattatactcactaagcacattttttgaaaaccctagatttgaagaaaaaatagcaaatggctactctcctaaaacagcatccggaggcacattagatggtaaaaaatactacctatatggaacagaaaacggcacagacaatccaacttgggcacaattaacaatactaacaaatacacaaacatttactaaaggcacaccttatggacaaaacaaaaatggatcaccaggaaaccctttccatcctgcatggattactaatgaagattcaaatatatactactcaacacaagaaccacaaaacatagcaaatataaacgaacaagccacaaacataactaaactaacacacttaatagaaaaatgcagatataacccacttagagatgcaggaaagggcaacaaagtatactttaaaagctcatctttacaacaaggaacaatgcatgacctaccaacaaacttaaatgtacttatagaagaccttcctttatggataatattttggggatggattagctggcttagaaaactacatcccataaaccacatagaaacagaatacatgtttatagtacaatcaccatatataacaccaaccagaccatggtacctatttttagactactactttttacaaaaaaaacatgacgatccactaacagaaacagaaaaagctcactggtttcctagatacgaattccaaaaagaagtagaattctactttgctcaaagtggtccaggtgctccaaaaattaactatacaaaatgtatacaagtaaactcaatgtattcattttttttaaagtggggaggatgtccagcaccaatggaaacatttacaaacccatgtgaacaagaaagatttcccgtccccggtgcaatcccacagtcagctacaatccaaaatccaaaattatcaaagtaccaatacctatatgagtgggacgaaaaagaaggtgtcattacaaaatcaactgcaaaaagaattaaaaaagacttctctcctacaaaatatgttacagacagtggagccaaagacgtcccattccaaacacaaacgacagaaagcgacgaaacatcgacagaagaagaaacgaaaacatcgctccagaaccagatcaccctcctcaagctccgccagcgaaagctcaagcgaaagctccgaaagcaccgattaatataaaaactattaaactaacacaaaatatttttggagaatcaacattaaaaaataggagaatgactagtaaagagttacaagaagaaaaaatagaggcaaaactgtggggtagaccagaaagaacatttatttttgatattccaggtccctactatggcactgtaccagaaccacttgtaaattttaacctaaactttaaataaacaaggcccatttattcactaaccggtgtctgttcctttaagtaaaaaccttaataaacatccataacacgcccaaataatgggcgccaaaatttaaagggggctccgcccccttacacccccaagggggctccgcccccttacacccccaagggggctccgcccccttacacccccacgcccccttacacccccaagggggctccgcccccttacaccccctaattaatatttaacaggaaaaccacctaattagaattgccgaccacaaactgtcatccgttacaacaacttccctattttacactacacttcctgttttttagagccacgcctgctacttcattattaatcagacgcatatcctgggaggaggaacacctctatataactaagtgtactgacgaatggctgagtttaccccgtcaaacggagacgagaaaagacttctcggctgcttcaggg

SEQ ID NO: 3368 - protein, 645 aa, Betatorquevirus sp.
MPPFNRWRRYWNPNWRRYRKRRFRTRRFRKAIRGRFRRRRWVRRRFKNYRKKAKKITVKEWQPKKIRKCTIKGPLCLFACGRFCIANNFTLFAESYIPEKNCGGGAWSIMQLTLQALWDEYVKFRNWWTVSNEGLPLVKYMYCKFKFYRSPFTDYIVIPSLCPPFSVTRDDYLNTQPLRALMNKNKIIVPKLRENSKRKYIKRKFYPPSLFQSKWYFQQDICKFPFIVLKTSACSFDQFYQPDDMLSYNITLYSLSTFFENPRFEEKIANGYSPKTASGGTLDGKKYYLYGTENGTDNPTWAQLTILTNTQTFTKGTPYGQNKNGSPGNPFHPAWITNEDSNIYYSTQEPQNIANINEQATNITKLTHLIEKCRYNPLRDAGKGNKVYFKSSSLQQGTMHDLPTNLNVLIEDLPLWIIFWGWISWLRKLHPINHIETEYMFIVQSPYITPTRPWYLFLDYYFLQKKHDDPLTETEKAHWFPRYEFQKEVEFYFAQSGPGAPKINYTKCIQVNSMYSFFLKWGGCPAPMETFTNPCEQERFPVPGAIPQSATIQNPKLSKYQYLYEWDEKEGVITKSTAKRIKKDFSPTKYVTDSGAKDVPFQTQTTESDETSTEEETKTSLQNQITLLKLRQRKLKRKLRKHRLI

SEQ ID NO: 3369 - protein, 108 aa, Betatorquevirus sp.
LTERARNLKIYICFTDMSSFLTPAVYSNNGLENQWINSIWNIHDLFCGCNNAIKHLFNILKKKQTLPCLPSIDGVDTGTQTGEDIENDVLEPGDLEKLFEEDFDEEDG

SEQ ID NO: 3370 - DNA, 2862 bp, Betatorquevirus sp.
cgggagccggaggtgagtgaaaccaccgtagtctaggggcaattcgggctagatcagtctggtggaacgggcaagaaacttaaaataatatttgttttacagatgagcaaatttctacaaccaccactttatgagaaaagagctctagaaaatcaatggataaacaccatatttaacacccacgacttattctgcggatgcaacaaaccaattgaacacctagaggccattttaaaacctacaaaatgcctccatttcggcgccgccgcttctacagaaactggtggaactacaaaagaccaagatcttactatcgacgaaggagatttagaaaatctattttcggaagaaaacgacgtcgacgaagggtaagaagaaaaaaattttatagacaaaacaaaaaacttaaaactataaaaataaaccaatggcaacctagttctattaagaaatgtagaatagaaggatacttatgcttatttcaagcaggacctggaagatatggcaataactatgctttatggaaagaatctttctttccacaacattatgcgggaggaggaggatggagtattcaacaactatctttaggaaacctatttactcaacataaagaatatatgaactattggactaaaagtaatgttagaatgaatatgtgtagatactatggctgtaaaattactttgtttagagaaccgtatacagactatgtttttaactatatgcaacatataccaaaaactgtaactaatacattttactgttcctttcaccctataagactactaactcacaacagaaaaaaaataataccaagctttcaaacacagccacataaaagaaaaccatacaaaactatttgggtaccaccaccaaaattaatgaaaaaccaatggttttttcaacaacaattagcagactttccactactaacctttgtaacatctgctatatcacttacaggaatgtttggaagctgtaaaacaattagcaacaatataacattttttagtttagacactgaacaattcccatcaccactattccaatacaaagattctacaccaccaacatggggttacaaatacggaacaacctacctttatggtatacaacaaccaaatcacattttcattcaaaataccaaaggatcacttacatatttaggaaatacaatgccacaagaaccaggaacacatatagcagtactaaataacaggacagtaacaaacaaagaaaactggggaaatccattttactgggactacttatcaggagacgctgtactagtcacgttaactgaaaatccctcacaagcatttaccaaaaagactgagaccttagaccaatcatcagaaaaaaaaacccattatatatttaaatgtagatacaacccatatcatgacaaaggaacaggtaacacagtatacctaatacctaactatgataaaacacaaacaaactggaatcccactaaagacacagacttaagatgggacaatctaccactatggctagtactgtggggcctagaagacatagtaaaaagaataggtaaatgccacaacctagacatggactggacactagttataagaagcaactacatagtaccacctcaaaaagaatatgtaccacttagttatgattttatacacggtagaggaccatacgacacagaaagagaatttatgacagctgacgaccttacacattggtatcccagatacaaatatcaaagacaatgcatagacacatttattagatcaggcccatcagtagccacaggagacaactgtccaaatatacaagctaaaataaaatacaatttcttttttaagtggggcggaatctctgatcctcaagaaacaatctttgaccccaacagtcaacccgtcacaccttcgcccaataacttcaacatcctcaatgaaatcattgatccaacaacagacattacaaaagaaatatacccatgggactttagaagacactatcttacagaggcagctgcaaaaagaattacagaaagcgaaactgatgaccaatttatgttcacagatggaaagcaaacttcaacagacctgcaactccaaacagaaacacaagagaaagagaccgagaaaacacaaaaagcgccactattccagcagctccagcagctccaacaatacaaccaacaactccagcagcgactccgaaacctaaagcaattatctacggacctataaataaagtagaactgtttaaaactaaacgtaaaaacaggagactaactccatacgaaatagaaacagatttacaaatagcaaaatggttaaaaagacctgtaagacatttttttaatgataccccttactacccatggctgccaccagcaccacttgtacaatttgaccttgtaaaaggatttaataaaggccaacattaattcacttgaggtgtccatttatttaagttacaacttatataaaccaacaccgcctccctaatacgcaggcgcacaagggggctccgcccccttaaacccccggggggggtaaaccccccctaacccccccaaactaattaatattcaacaggaaaaccacctaattagaattgccgaccacaaaccgtcactaacttccctttttttacaaagcttccccttttactaattattattcattacattaattaataatcaccgtaattccggggaggttttactaattattattcattacattaattaataatcaccgtaattccggggaggaaccaacactctatataaacaactatacttccgaatggctgagtttatgccgccagacggagactgaatcgcatcagagacttcaggctgatcttggg

SEQ ID NO: 3371 - protein, 662 aa, Betatorquevirus sp.
MPPFRRRRFYRNWWNYKRPRSYYRRRRFRKSIFGRKRRRRRVRRKKFYRQNKKLKTIKINQWQPSSIKKCRIEGYLCLFQAGPGRYGNNYALWKESFFPQHYAGGGGWSIQQLSLGNLFTQHKEYMNYWTKSNVRMNMCRYYGCKITLFREPYTDYVFNYMQHIPKTVTNTFYCSFHPIRLLTHNRKKIIPSFQTQPHKRKPYKTIWVPPPKLMKNQWFFQQQLADFPLLTFVTSAISLTGMFGSCKTISNNITFFSLDTEQFPSPLFQYKDSTPPTWGYKYGTTYLYGIQQPNHIFIQNTKGSLTYLGNTMPQEPGTHIAVLNNRTVTNKENWGNPFYWDYLSGDAVLVTLTENPSQAFTKKTETLDQSSEKKTHYIFKCRYNPYHDKGTGNTVYLIPNYDKTQTNWNPTKDTDLRWDNLPLWLVLWGLEDIVKRIGKCHNLDMDWTLVIRSNYIVPPQKEYVPLSYDFIHGRGPYDTEREFMTADDLTHWYPRYKYQRQCIDTFIRSGPSVATGDNCPNIQAKIKYNFFFKWGGISDPQETIFDPNSQPVTPSPNNFNILNEIIDPTTDITKEIYPWDFRRHYLTEAAAKRITESETDDQFMFTDGKQTSTDLQLQTETQEKETEKTQKAPLFQQLQQLQQYNQQLQQRLRNLKQLSTDL

SEQ ID NO: 3372 - protein, 89 aa, Betatorquevirus sp.
MSKFLQPPLYEKRALENQWINTIFNTHDLFCGCNKPIEHLEAILKPTKCLHFGAAASTETGGTTKDQDLTIDEGDLENLFSEENDVDEG

SEQ ID NO: 3373 - protein, 62 aa, Betatorquevirus sp.
LFKTKRKNRRLTPYEIETDLQIAKWLKRPVRHFFNDTPYYPWLPPAPLVQFDLVKGFNKGQH

SEQ ID NO: 3374 - DNA, 2861 bp, Gammatorquevirus sp.
cgggagcccgaggtgagtgaaaccaccgaggtctaggggcaattcgggctagggcagtctagcggaacgggcaagaaacttaaaatatattttattttacagatgcaaaacctatgtggagaagatttttatgttaaaacaccatacaatgcagtaactaaaacacaaatttggctaagtcaagttggagattctcacgacaatttctgtcactgccaaactgcttatgctcatttgcttgcttctatatttcctcctggccatcaagataggaataaaactattgaagaaatacttcaaagagactacaaagaaagatgccattcttctggagacgcagaaacaagaactggtatggcagatttagaagacaaaggtttagaaaatataaaagaagaagatggcccagaagaagatatagaaggcctgctcgccgccgccgccgccgtagaagaagaagacacaaggtaagaagaaagaaacaaactataactcttaaacaatggcaaccagactctattagaaaatgtaaaattaaagggtttaactgcattgtagcaggagctgaaggcagacaattcttctgctatactaatgaaaagactaactatatacaacctaaagcaccaggagggggaggctttggtgtagaactttattctcttgactacctatactctcaatggttaaaaaagcaaaacatatggacacatactaatgaatacaaagacctagttagataccaaggctgcagaataacattttttagacatgaaaaagtagactttgtagttcaataccaaagacaacctccatttttaattcaaaaacatacatacatgcaatgccatccacaaaacttactgttaactaaacaccataaagttattctatccaaaaaacataaacctactggtaaaaacactgtttccatatttataaaaccgccaaaacaaacagtatctaagtggttttttcaagatgaattcagtaaatatggcttatttcaattgcaagctgcagctgcaacatttggatacccaacatatgggccaaacacacaaagtacaaacttaacattctatgccttaaacaccagattttatcataacacagactgggcacaagaaaaaagtcagcaacacggatacaaaccctacacaaactttgatgataacattaaattttactatccaacacaaagtggaacctctgccattacacatgcaaacacaaccacctataccaaatcaatagactacaccacaggagtattccaaagcaaaatacttttatctactaaaatagaaggcacaacaacattcgtccatgaaagacccattacaatagctagatataatccagaagatgacaatggaataggcaactctgtttaccttgtatctataatatctgacacagggtgggctgaaccaaaagacaaagacttagtactacacaatgtaccattatatatagctttttatggcttctggaactatatactaaaagtaaaaggagacaaaaatttccttaaataccatatgtttgttgttaagagtgaagccataaaacttgttgttaacacagaacaaaaagagttccccatacttgactggagctttataactggcaaaatgccttatggtgaactactaacagagtcagacaaaaaattttggtaccccacatcctataaacaacaagaaataataaatgccatagtagaatgtgggccttatatacctaaactgtcaaatcaaccatcaagtacatggcaactttattacaaatactgtttttattttaaatggggcggtccacagattacagaccaacttgcagaaaacccaaaagaaaaaggcaaatatgatgttcccgatacagtctttgaaacagtacaaattactaacccaaacaaacaaagctgcaaatctatgcttagagcctgggactacagaagggggattattacacaaagagctcttaaaagaatgtcagaagacatccaaactgattcatctttcgaacctgatgatgcagaaacaccaaagaaaaagaaaaaggcaactggagaactccccgcagcccaagaagaaaaccagaaaatgcaggcctgtctcctctcgctcttcgaagaaagtacctgccaagaccaagaaaacctacagcagctcatccagcaccagcagcagcagcagcaaaagatcaagcacaacatcctcaacctcctcctagacttaaaaaagaaacagagaataatacaaatgcaatcaggcctggactaacaagattcaaaccaggatttgaatgggacactgaatgtgagatagcacaagcatttagaagaccccctagactgtttaaagaagacaaacccttttatccatggctacccaaattagaaccccttgttaactttcacctcaattttaagttctaggccgacactgttcacttagcggagtctgtttatataagtttgcaccccaaaaaaattgtaaaaaaaaaaaaataaaaaaaaaaaaaaaaattgcaaaaattcggcgcgcgcgcgcgctgcgcgcgcgcgagcgccccccacaccccccgcgggggggggcaaagccccccccgcaccccccctacgtcatagaacacgcccccgccgccatcttgggtgcggctgggcgggagctaaaatggcggcacccaatcattttatactttcactttccaatcacaaactgccacctcacagtaaaggggtggaaactttagaactatataactaagtgtggtggcgaatggctgagtttaccccgctagacggtgcagggaccggatcgagcgcagcgaggaggtccccggctgcccgtggg

SEQ ID NO: 3375 - protein, 656 aa, Gammatorquevirus sp.
MPFFWRRRNKNWYGRFRRQRFRKYKRRRWPRRRYRRPARRRRRRRRRRHKVRRKKQTITLKQWQPDSIRKCKIKGFNCIVAGAEGRQFFCYTNEKTNYIQPKAPGGGGFGVELYSLDYLYSQWLKKQNIWTHTNEYKDLVRYQGCRITFFRHEKVDFVVQYQRQPPFLIQKHTYMQCHPQNLLLTKHHKVILSKKHKPTGKNTVSIFIKPPKQTVSKWFFQDEFSKYGLFQLQAAAATFGYPTYGPNTQSTNLTFYALNTRFYHNTDWAQEKSQQHGYKPYTNFDDNIKFYYPTQSGTSAITHANTTTYTKSIDYTTGVFQSKILLSTKIEGTTTFVHERPITIARYNPEDDNGIGNSVYLVSIISDTGWAEPKDKDLVLHNVPLYIAFYGFWNYILKVKGDKNFLKYHMFVVKSEAIKLVVNTEQKEFPILDWSFITGKMPYGELLTESDKKFWYPTSYKQQEIINAIVECGPYIPKLSNQPSSTWQLYYKYCFYFKWGGPQITDQLAENPKEKGKYDVPDTVFETVQITNPNKQSCKSMLRAWDYRRGIITQRALKRMSEDIQTDSSFEPDDAETPKKKKKATGELPAAQEENQKMQACLLSLFEESTCQDQENLQQLIQHQQQQQQKIKHNILNLLLDLKKKQRIIQMQSGLD

SEQ ID NO: 3376 - protein, 122 aa, Gammatorquevirus sp.
MQNLCGEDFYVKTPYNAVTKTQIWLSQVGDSHDNFCHCQTAYAHLLASIFPPGHQDRNKTIEEILQRDYKERCHSSGDAETRTGMADLEDKGLENIKEEDGPEEDIEGLLAAAAAVEEEDTR

SEQ ID NO: 3377 - protein, 108 aa, Gammatorquevirus sp.
LSPLALRRKYLPRPRKPTAAHPAPAAAAAKDQAQHPQPPPRLKKETENNTNAIRPGLTRFKPGFEWDTECEIAQAFRRPPRLFKEDKPFYPWLPKLEPLVNFHLNFKF

SEQ ID NO: 3378 - DNA, 2861 bp, Betatorquevirus sp.
cgggagccgaaggtgagtgaaaccaccgtagtctaggggcaattcgggctagttcagtctggcggaacgggcaagaaacttaaaatatattattttacagatgcaaatacaaccaccgattagaacctacaaacaaaccatttctgattggaaaaacttaattgttcacgttcacgacaatatctgcaaatgcaacaaaccattggaacatacaattgatacttgcaccaacaatccttctgaattaagattaaataaatctactaaacaacaactacaacaatgcctttctacaccagaagaagatggccccggagacgttatcgatggtttcgacgatggagagctagacgcccttttcgcccaagataccgaagaagatactgggtaagaaaatattctcgaaagagaaaactttataaaattactgaaaaacaatggcaaccaaaagttatcagaaaaactcatgttaagggcacataccccttatttctttgtacaaagcacagaattgcaaacaatatgatacaatacttagactctatagctccagaacactactatggtggaggaggattttcaataatgcaattttctttacaagctttatacgaagaatttgtaaaagccaaaaactggtggactcatacaaactgttttctaccaataataagatatatgggttgcagctttaaattttataaaaccgaatactatgactatgttgtacttattgaaagatgttatccacttgcttgtactgatgaaatgtacttatctactcaacctagtattatgatgcttacaaaaaaatgtatatttgtaccatgtaaacaaaacagcaaaggtaaaaaaccatatagaaaagtaaaagttaagccaccatcccaaatgactaccggatggcatttctcacaagacttagcaaacatgccactagtagtgttaaaaacatcagtatgcagtttcgacagatactacacagacagcacagctaaatctacaacaataggattcaaaacattaaacacaacaacatttaaatatcatgactggcaagacccaccaacaacaggctacaaaccacaacaaaacttatggttctatggagctgaaaacggttctcctacagacctagacaatacaccacttaactctcttatatatttagggggcacaggaccatacactaaaggcacaaaaatagcaaaccaatcaggacaactacaacaaaattacttttctacacctaaactatggggaaacatttttcatgatgactatttaacaggtacttcacctgtatttgtcactaacaaaccccctaaacacattgaagaaaattgggaacatcttaaaaataaaacaataaaacaaagtgaaatttttacagtaagaactataccactatggcaacaatgcagatataatccattcgcagacaaagcaacaaataacaaaatatggctagtatcaatacactcagatcacacagaatggaaacctatagataaccctttattacaaagaaatgatctaccactctggcttatagtatggggatggcaagactggcaaaaaaaaaaccaacaaacatcacaaccagacattaactatttaacagtaatatcatcaccctacataagcacatatccaaaactagactattatgtattaatagacgaatcaatgtttgaaggacactctacttatatagactcaattacagacagtgacaacaaacactggtacccaaaaaacagatttcaaatagaaactctaaacttaatagctaacacaggacctggaacagtaaaacttagagacaatcaggcagcagaggctcacatggtatatcgctttaattttaagcttggaggatgcccagcaccaatggaaaagatttgtgaccctagcagacaaaccaaatatcctattcccaataaccagcaacaaacaacttcgttgcagagtccagaaaacccaattcaaacctatctctacgacttcgacgaaaggaggggcctacttacagaaagagctacaaaaagaatcaaacaagatcacacatctgaaaaaactgttttgccatttacaggagcagcaacagacctccccatactcaaaacaacatcacaggaggaaagctcctcggaagaagaagaagaccaacaagcggagaagaaactactccagctccgaagaaagcagcagcgactcagagacagaatcctccagctcttagacatacaaaatatgtaataaaacatagcagtgtaaaaattgatatgtttggtgaaacacctatgcctaaccggagaatgactccggaagaatttgaacaagaattaattgtagctcgtatattccaacgacctccttgttactttataaaagatagacctacttatccttgggtgcctaaaccttctgatgaaaaattcatggtaaactttgacttaaacccccctcaataaacaaggcctgcaaactttcactctcggtgtccgtttatattagtttaaacttaaataaacatccaccacactccctaatacgcaggcgcagaagggggctccgcccccttacacccccaagggggctccgcccccttacaccccctaattaatattcaacaggaaaaccacctaattagaattgccgaccacaaaccgtctcttagttcctctttttacacgcacttccctttttactaattattattcattatattaattaataaacagtgtaattccggggagggactaaacaactatataaccaactatacttccgaatggctgagtttatgccgccagacggagacgggatcacttcagtgactccaggctgaacttggg

SEQ ID NO: 3379 - protein, 659 aa, Betatorquevirus sp.
MPFYTRRRWPRRRYRWFRRWRARRPFRPRYRRRYWVRKYSRKRKLYKITEKQWQPKVIRKTHVKGTYPLFLCTKHRIANNMIQYLDSIAPEHYYGGGGFSIMQFSLQALYEEFVKAKNWWTHTNCFLPIIRYMGCSFKFYKTEYYDYVVLIERCYPLACTDEMYLSTQPSIMMLTKKCIFVPCKQNSKGKKPYRKVKVKPPSQMTTGWHFSQDLANMPLVVLKTSVCSFDRYYTDSTAKSTTIGFKTLNTTTFKYHDWQDPPTTGYKPQQNLWFYGAENGSPTDLDNTPLNSLIYLGGTGPYTKGTKIANQSGQLQQNYFSTPKLWGNIFHDDYLTGTSPVFVTNKPPKHIEENWEHLKNKTIKQSEIFTVRTIPLWQQCRYNPFADKATNNKIWLVSIHSDHTEWKPIDNPLLQRNDLPLWLIVWGWQDWQKKNQQTSQPDINYLTVISSPYISTYPKLDYYVLIDESMFEGHSTYIDSITDSDNKHWYPKNRFQIETLNLIANTGPGTVKLRDNQAAEAHMVYRFNFKLGGCPAPMEKICDPSRQTKYPIPNNQQQTTSLQSPENPIQTYLYDFDERRGLLTERATKRIKQDHTSEKTVLPFTGAATDLPILKTTSQEESSSEEEEDQQAEKKLLQLRRKQQRLRDRILQLLDIQNM

SEQ ID NO: 3380 - protein, 110 aa, Betatorquevirus sp.; identical to SEQ ID NO: 3316

SEQ ID NO: 3381 - protein, 62 aa, Betatorquevirus sp.; identical to SEQ ID NO: 3317

SEQ ID NO: 3382 - DNA, 2861 bp, Betatorquevirus sp.
cgggtgctgaaggtgagtgaaaccaccgaaatcaaggggcaattcgggctagttcagtctggcggaacgggcaagaaacttaaaattatttttattacagatgagcgactatgtgaaaccatgcatttacaaccaaaattccattaacacccaatggattaacaatatttgttcaagccacgacctattttgcggctgtgaaaatccaattaaccacctaaaagctgccctaaaagaaaaatgccaccattcaaaagatattggaattggaacagaccacggagaagatggcgaaaaagacgattttacacttcaacctggagacctcgaagatcttttccgcgtagaagaagaagacgcacggtaagaaaacgattttataaaaagtttttaagaaaaaaactaaaaaaaattaaactaaaccagtggcaaccaactactatacacaaatgccacataaaaggatttttaccattatttcaatgtggtgatggacgccaagaaaataattatatacaatataaagacagctatactccagaaaatgaaccaggaggcggtggatggtcaattcaaaaactatctttaggaattctatataaagaaaacaaagactttcaaaactactggactaaatctaaccgccgcttagtactttgtagatatattggagctagaattatattgtatagacagccttatacagactacttgtttcactattttcatgatcctccaaaaaatgtaaccaaatattactttgcttcttttcacccattgcaaatgcttaaactaaaacatactgtaatagttccaagctttaattcacaaccacacaaacgaaaaccctataaaaaactatacataaaaccaccaaaacttcttaaaaaccaatggtattttcaacaaaatttctctgactacccacttatacacatgacagcctctgctatctcattaacaaactcatacggttcagatagagctcaaaacaacaactgctctatatggatgctaaacacaacattttttcaaaacccatgcacacaatttaaccgcttaccacaaccaacatttggctatcacccaaacaaatcaaactattactgggcactatataaatcaccaacaaacccacaaagaaaagacgcaatatacttaggacaatctatgcttaatgaaccaggataccccgaagaagaaaaaacagcccagtcaataactggatggggtaatccattttattaccaatacctactaggagaagaaaaaacctttataacaaccgccacagaagatccagcaacttttatgaaaaaggacacactaagtgacaggattgaagccactagactaaaagaaacaccaaatgtttttaaggttagatacaatcctttcaaagacaaaggatcaggaaacagaatttactttgtacccaactttacattaacacaccaaacatgggacccaccatcagacccagacactatatttgaaggatttcccttatggctaatgttttggggaatagaagatattttaaaaaaaatgggaaaatgtcctaacctatatgaagactgggtatgtgttatacaaaccaactattttagcacacctgaaaagttttttgtaccacttagtgagtcattcgtacacggacaaggtgcctatgacatagacagagatcatattccacctgcacaatacactaaatggtttccaaaatataaatttcaaaaagaagccattcataatatagttgaaaccgcaccatttgtatgtagacctgatcatgtaaaaaactttcaagctgtaatgcattataactttttctttaagtggggaggcaatccatctccaatggaaccagtcgaagaccccaacagtcaacccatcacaccttatccccctccacagcaactcacagatgaaattactaacccgtacacagacctcaaatcctttatctacccatgggacgtcagacgtgacatgcttacagactcagctgcaaaaagaattaaagacagcacaattgatgacttctctttattcacagatcaagacaaaccatccacagacatcgaactattcaaagaagcacaaacgaaaacaaccccgcaaaaagaaaaagagacattactcctccagctcaagcagctccaacaatacaacaaacttctccgacagcgattcaacaaactaaatatatcattagaggacctataaaccatgttcaaatatttcctactaaaaaaaatcgccgcatgaatagatgggaatatgctgttgaactagaaacagcaaaatggatgaaacgacccccctgtcaaatgatatatgatattcctttttacccttggcttcccccagaacctattgttccaaaagtaaactttgaccttgtaaaaaactttaataaaggccagcattaactcactctcggtgtcagtttatataagtttaaactataacaaacatccatgtcctcccttatacgcatgcgcaaagggggctcagcccccttaaacccccggggggggtaaaccccccctttgcccccccaactcataaatattcataacggaaaccacaaaattagaattgccgacccccccccaactcataaatattcataacggaaaccacaaaattagaattgccgaccacaaaccgtcacttacttccccttttaacaatacttccctttttactaattattattcattaaattaattaataaacagcgtcattcaaaggaggagccacatacctatataactaaccacagtttcgaatggctgagtttatgccgccagacggagacgggagcagaacactgactgccggctgaacttggg

SEQ ID NO: 3383 - protein, 662 aa, Betatorquevirus sp.
MPPFKRYWNWNRPRRRWRKRRFYTSTWRPRRSFPRRRRRRTVRKRFYKKFLRKKLKKIKLNQWQPTTIHKCHIKGFLPLFQCGDGRQENNYIQYKDSYTPENEPGGGGWSIQKLSLGILYKENKDFQNYWTKSNRRLVLCRYIGARIILYRQPYTDYLFHYFHDPPKNVTKYYFASFHPLQMLKLKHTVIVPSFNSQPHKRKPYKKLYIKPPKLLKNQWYFQQNFSDYPLIHMTASAISLTNSYGSDRAQNNNCSIWMLNTTFFQNPCTQFNRLPQPTFGYHPNKSNYYWALYKSPTNPQRKDAIYLGQSMLNEPGYPEEEKTAQSITGWGNPFYYQYLLGEEKTFITTATEDPATFMKKDTLSDRIEATRLKETPNVFKVRYNPFKDKGSGNRIYFVPNFTLTHQTWDPPSDPDTIFEGFPLWLMFWGIEDILKKMGKCPNLYEDWVCVIQTNYFSTPEKFFVPLSESFVHGQGAYDIDRDHIPPAQYTKWFPKYKFQKEAIHNIVETAPFVCRPDHVKNFQAVMHYNFFFKWGGNPSPMEPVEDPNSQPITPYPPPQQLTDEITNPYTDLKSFIYPWDVRRDMLTDSAAKRIKDSTIDDFSLFTDQDKPSTDIELFKEAQTKTTPQKEKETLLLQLKQLQQYNKLLRQRFNKLNISLEDL

SEQ ID NO: 3384 - protein, 102 aa, Betatorquevirus sp.
LAERARNLKLFLLQMSDYVKPCIYNQNSINTQWINNICSSHDLFCGCENPINHLKAALKEKCHHSKDIGIGTDHGEDGEKDDFTLQPGDLEDLFRVEEEDAR

SEQ ID NO: 3385 - protein, 55 aa, Betatorquevirus sp.
MNRWEYAVELETAKWMKRPPCQMIYDIPFYPWLPPEPIVPKVNFDLVKNFNKGQH

SEQ ID NO: 3386 - DNA, 2861 bp, Alphatorquevirus sp.
ataagtcactaagcactccgagcgcagcgaggcaaggggcaattcgggctcgggactggccgggctatgggcaaggctcttaaaaagatgcgtttttctaatatcgcccgcagaaagaaaaggaaactgtcactgctacctgtgcaccctccacaggagacacctaccatgagctttgtagaacccttaattaacagccaccacagagaaatagcatactaccatggctgtgttcaaatgcacaaagcattttgtggctgcgacaactttctcacccacctgcagcgcataacaacactcctctctgctaaccaacacaccccacccagcacaccttcaaacaccctccgtagagcccgggccctgcccgcggctccggagcctcttccatggcgtggtcctggtggtggcagaggagacgccgaaggaggccgtggaccaggagaaggtggagaagactacgcacaagaagatctagacgccctattcgacgccgtcgcaagagatacagagtaaggagacggaggcggtggggcaggagacgtgggcgacgcacatactttagacgcagacttaaaaagagaaagagacgaaaaaagctcagactgactcagtggaaccctagcacaataagaggatgcacaattaaaggaatggctcctttaataatatgtggccacaccatgtcagggaataactttgccattcgaatggaggactatgtttctcaaattaaaccattcggagggtcttttagcaccacaacctggagccttaaagtactttgggacgaacacaccaggttccacaacacctggagctacccaaacacccagctagacctagcaaggtataaaggagtaaacttttacttttacagagacaaagacacagactttatagtaacatacagctcagtgccaccatttaaaatagacaaatactcttcagccatgctgcacccaggcatgctaatgcagagaaagaaaaagatattaatacccagctttacaaccagaccaaggggccgaaaaaaagttaaagtgcatataaaacctcctgttttatttgaagacaaatggtacacccagcaggacctgtgcgacgttaatcttttgtcacttgcggtttctgcggcttcctttagacatccgttctgcccaccacaaactgacaacatttgcataaccttccaagtgttgaaagacttctactatgaacaaatgtcagttacaccagatacacaaaaccaagaaaaagacaaaactatattagagaaattatatacaaatccagagtactatcaaactgtccacacaacaggcattatcaacaaaacccaaaaatcagcacaaatgcaaacatcaaagaacacactaggtgaacaatcctttattggcaattacttaaatccaccatcatcatccttaggtaaccaaacattagcaaccggtaacaactctatttatggctttccatcttacaacccaataaaagagaaaatgcaacaaattgctaactggttttggcagcaagaaactaacaaacaaaatgtagttacaggctcatattcaatgcctacaaattcagcagtaagctaccacctaggaaagtatagcccaatctttttaagctcttacagaacaaacctacaatttagaacagcatacacagatgtcacatacaatccactaaatgacaaaggtaaaggaaaccaaatatgggtacagtatgtaactaaaccagatactaaattcaatgccacacaatgcaaatgtcacatagtagatatacccctgtgggcagcattccatggctacatagactttgtacaaagtgaattaggcatacaagaagaaatattaaacattgccataatagtagttatatgtccatacacaaaacctaaactactacacgacccaccaaatgaaaaccaaggctttgtattctatgacacacaatttggagatggtaaaatgccagacggctcaggcctagtaccaatatactaccaaaacagatggtatccaagaattaagtttcagagtcaagtagtacatgactttatactaacaggccccttcagctacaaagatgaccttaaaagcgcagtactaacagtagagtacaagtttaaattcttatggggtggcaatatgattcccgaacaggttatcagaaacccatgtaaaacagaaggacacgatctccctcacaccagtagattccatcgcgacttacaagttgttgacccgcacaccgtgggtccccaatgggcgctccacacctgggactggcgacgtggactctttggtacagaagctatcaaaagagtgtcagaacaacaagtacatgatgagttatattacccaccttcaaaaaaacctagattcttccctccaatatcaggcctacaagagcaagaaggagactacagttcgcaggaagaaaaagaccagtcctcgacagaagaggagacggacccaaagaaaaaagagcaaatacagcagcgacgactccacctccagttccaagagcagcagcgactcggaaaccaactccgactcatcttcagagagctccagaaaacccaagcgggtctccacataaatcctatgttatcaaaccggctataaataaagtatacctttttcctcccgaggggcctaaacccatctctggctacagagactgggaagaagagttcacctgctgtaagtactgggacaggcctagtagaattaaccacacagacccccctttctacccctggatgcccaaatacaatgtaaccttcaaacttggctggaaataaacttacaaggccgtacactgttcacttgtcggtgtctacctct

SEQ ID NO: 3387 - protein, 749 aa, Alphatorquevirus sp.; identical to SEQ ID NO: 1893

SEQ ID NO: 3388 - protein, 149 aa, Alphatorquevirus sp.
MGKALKKMRFSNIARRKKRKLSLLPVHPPQETPTMSFVEPLINSHHREIAYYHGCVQMHKAFCGCDNFLTHLQRITTLLSANQHTPPSTPSNTLRRARALPAAPEPLPWRGPGGGRGDAEGGRGPGEGGEDYAQEDLDALFDAVARDTE

SEQ ID NO: 3389 - DNA, 2861 bp, Betatorquevirus sp.
cgggtgccgaaggtgagtgaaaccaccgtagtcaaggggcaattcgggctagatcagtatggcggaacgggcaagaaatttaaactattttcttttacagatgtcagactttgtaccaccaaactatacaaagaaagctcttaaccttcaaatggttaactgctacgtcggaattcacgaccttcattgccactgcaaaaaacctttaattcatattattcaacaaattgaacaacaagaaccaacccttaaaaaatgcccagatacttctaccgccgccgctggagaccctactggagaagacgttatagatggtttcggccccggagaactagaaaaactcttcgatatcgacgacgaaaacacccacgggtaagaagaaaattaaagagactaacactaaaagaatggcaacctaaatacattaacaaactaactatcaaaggactattttgcttattacaagtacatagaactagatataaccatgactttaatgcatacataacttcaattcctcaagaaggactctcaaatggaggaggattttctttaaatagatttactttaagtgctttatttgaagagcatgaaaaagctcataacgtttggactaaatctaacaaatatatgccactgtttagatatactggagtaactgttaagatttatagacctatgtatgttgacttgcttgtaaaatttcaaacttgttaccctatgtgctgtacaaaactattatacacaggaacacaaccttcaataatgatgatgactaaaggttgtaaaataataagatgcaaacaaaacgcacctaattcaaaaccctacaaaaaatttagatttccaccaccagaacaaatgcaaaacaaatggtattttcaacaaaaacaagccaacacaggactactattagtacaagcatcctcagctagcctagaccaatactacacatccaaaaacgcacaaagtagcttactaactctacatactcttaacacactcatatttaaaaatttaaactttgtagaagtacctacttacggatatatgccacacaacaaaatggcactatgggcaattaatggtgcttcacacccacccacactaggagacctaatatacttaggacaatcaaaactatacaactcaggagaatcggtaaaaacaaaagtgccaaatgtaacagatttcactgaggccttacaaacatacatgaaaaataatacatggtggggaaacgtgtttcatcaacataacctataccaacaacacgaaatttactttacaacaaaaccaccattactagcattccaaaaaacagccacaaaaacttttaagaccacagatgaattaacacaacacacagatacaatacataaattttcacaagaatttatgtttaaagtaagatacaatccatttgaagacaaaggctacaataacaatatttacataaaagccaactttaaagacaataacgaagatttagagcctgatgcagacatagacttacaaaacccgggtttccctaactggctaagctgctttggctttcaagactacctaataaaattaggaaaaaaatcacaaattaacacacactatattatggtacaccaaagcaattattttcaccctaaacaaaagtactacatttttatggacagctactttttaaatagtagttcagaagaattggagggtagaacagaatttgacaacagaaactggtacccatacattacacatcaacaaggagccctaaatgacttagcactagtaggcccaggagcccctaaactagacaaaattaatttagcagaagccaaaatcgaatatatgtttcattttaagatcggcggatgtgccccaaatgttgagaaaattaaagaccctacaaaccaaccaacttatgttacaccaagtaacatctttgacacaaattcgttacagagtccaacagcacctctcgaaaccttcttgtaccaatttgattggagacgagaccaaattactcaaacggctgcaaaacgaatcacaaaagacttctcaactgaaaaatctttatttacagatccagcaacaactggaacaacagtacccttctaccaaacacacgaaaaagacctgctctcgtcggaggaagaggaaacccaaacggagacactattcgagcagctccaactccagcgaaacaagcaaaaacaactcagactcagaatcaagcagctcctagcacaaatgcaaaatatacaataaaaaactgtaaaataaaagtaaacctgtttggagaccaaccaaacagaagactaaacagtaaagaaagagcagaggacaaaattgaagcagctatttggggtagatctgaaaaatactttataaaagatatacctttttattatggctgtgtacctgaaccccgtgtaaattttgacttaaactatcattaaacaaggcccattgattcacaactccgtgtccatttatttaagttttaaccttaataaacatccaccacttctccctatcaataggcgccaaaagggggctccgcccccacacccccaagggggctccgcccccttacacccccaagggggctccgcccccttaaaccccctaattaatattcaacaggaaaaccacaaaattagaattgccgaccacaaaccgtcacttacttcttctttttacaaaacttccccttttcctaattattattcataaaattaattagtaatctttgtaattccggggaggagctaataatctataaaacaaactacacttccgaatggctgagtttatgccgccagacgaagacgggatcactttagtgactccgggctgatcttggg

SEQ ID NO: 3390 - protein, 668 aa, Betatorquevirus sp.
MPRYFYRRRWRPYWRRRYRWFRPRRTRKTLRYRRRKHPRVRRKLKRLTLKEWQPKYINKLTIKGLFCLLQVHRTRYNHDFNAYITSIPQEGLSNGGGFSLNRFTLSALFEEHEKAHNVWTKSNKYMPLFRYTGVTVKIYRPMYVDLLVKFQTCYPMCCTKLLYTGTQPSIMMMTKGCKIIRCKQNAPNSKPYKKFRFPPPEQMQNKWYFQQKQANTGLLLVQASSASLDQYYTSKNAQSSLLTLHTLNTLIFKNLNFVEVPTYGYMPHNKMALWAINGASHPPTLGDLIYLGQSKLYNSGESVKTKVPNVTDFTEALQTYMKNNTWWGNVFHQHNLYQQHEIYFTTKPPLLAFQKTATKTFKTTDELTQHTDTIHKFSQEFMFKVRYNPFEDKGYNNNIYIKANFKDNNEDLEPDADIDLQNPGFPNWLSCFGFQDYLIKLGKKSQINTHYIMVHQSNYFHPKQKYYIFMDSYFLNSSSEELEGRTEFDNRNWYPYITHQQGALNDLALVGPGAPKLDKINLAEAKIEYMFHFKIGGCAPNVEKIKDPTNQPTYVTPSNIFDTNSLQSPTAPLETFLYQFDWRRDQITQTAAKRITKDFSTEKSLFTDPATTGTTVPFYQTHEKDLLSSEEEETQTETLFEQLQLQRNKQKQLRLRIKQLLAQMQNIQ

SEQ ID NO: 3391 - protein, 105 aa, Betatorquevirus sp.
MAERARNLNYFLLQMSDFVPPNYTKKALNLQMVNCYVGIHDLHCHCKKPLIHIIQQIEQQEPTLKKCPDTSTAAAGDPTGEDVIDGFGPGELEKLFDIDDENTHG

SEQ ID NO: 3392 - protein, 55 aa, Betatorquevirus sp.
LFGDQPNRRLNSKERAEDKIEAAIWGRSEKYFIKDIPFYYGCVPEPRVNFDLNYH

SEQ ID NO: 3393 - DNA, 2860 bp, Betatorquevirus sp.
cgggtgctgaaggtgagtgaaaccaccgaaatcaaggggcaattcgggctagttcagtctggcggaacgggcaagaaacttaaaattatttttattacagatgagcgactatgtgaaaccatgcatttacaaccaaaattccattaacacccaatggattaacaatatttgttcaagccacgacctattttgcggctgtgaaaatccaattaaccacctaaaagctgccctaaaagaaaaatgccaccattcaaaagatattggaattggaacagaccacggagaagatggcgaaaaagacgattttacacttcaacctggagacctcgaagatcttttccgcgtagaagaagaagacgcacggtaagaaaacgattttataaaaagtttttaagaaaaaaactaaaaaaaattaaactaaaccagtggcaaccaactactatacacaaatgccacataaaaggatttttaccattatttcaatgtggtgatggacgccaagaaaataattatatacaatataaagacagctatactccagaaaatgaaccaggaggcggtggatggtcaattcaaaaactatctttaggaattctatataaagaaaacaaagactttcaaaactactggactaaatctaaccgccgcttagtactttgtagatatattggagctagaattatattgtatagacagccttatacagactacttgtttcactattttcatgatcctccaaaaaatgtaaccaaatattactttgcttcttttcacccattgcaaatgcttaaactaaaacatactgtaatagttccaagctttaattcacaaccacacaaacgaaaaccctataaaaaactatacataaaaccaccaaaacttcttaaaaaccaatggtattttcaacaaaatttctctgactacccacttatacacatgacagcctgtgctatctcattaacaaactcatacggttcagatagagctcaaaacaacaactgctctatatggatgctaaacacaacattttttcaaaacccatgcacacaatttaaccgcttaccacaaccaacatttggctatcacccaaacaaatcaaactattactgggcactatataaatcaccaacaaacccacaaagaaaagacgcaatatacttaggacaatctatgcttaatgaaccaggataccccgaagaagaaaaaacagcccagtcaataactggatggggtaatccattttattaccaatacctactaggagaagaaaaaacctttataacaaccgccacagaagacccagcaacttttatgaaaaaggaaaaactaagtgacaaaattgaaaccagtagactaaaagaaacaccaaatgtttttaaagttagatacaatcctttcaaagacaaaggatcaggaaacagaatttactttgtacccaactttacattaacacaccaaacatgggacccaccatcagacccagacactatatttgaaggatttcccttatggctaatgttttggggaatagaagatattttaaaaaaaatgggaaaatgtcctaacctatatgaagactgggtatgtgttatacaaaccaactattttagcacacctgaaaagttttttgtaccacttagtgagtcattcgtacacggacaaggtgcctatgacatagacagagatcatattccacctgcacaatacactaaatggtttccaaaatataaatttcaaaaagaagccattcataatatagttgaaaccgcaccatttgtatgtagacctgatcatgtaaaaaactttcaagctgtaatgcattataactttttctttaagtggggaggcaatccatctccaatggaaccagtcgaagaccccaacagtcaacccatcacaccttatccccctccacagcaactcacagatgaaattactaacccgtacacagacctcaaatcctttatctacccatgggacgtcagacgtgacatgcttacagactcagctgcaaaaagaattaaagacagcacaattgatgacttctctttattcacagatcaagacaaaccatccacagacatcgaactattcaaagaagcacaaacgaaaacaaccccgcaaaaagaaaaagagacattactcctccagctcaagcagctccaacaatacaacaaacttctccgacagcgattcaacaaactaaatatatcattagaggacctataaaccatgttcaaatatttcctactaaaaaaaatcgccgcatgaatagatgggaatatgctgttgaactagaaacagcaaaatggatgaaacgacccccctgtcaaatgatatatgatattcctttttacccttggcttcccccagaacctattgttccaaaagtaaactttgaccttgtaaaaaactttaataaaggccagcattaactcactctcggtgtcagtttatataagtttaaactataacaaacatccatgtcctcccttatacgcatgcgcaaagggggctcagcccccttaaacccccgggggggtaaaccccccctttgcccccccaactcataaatattcataacggaaaccacaaaattagaattgccgaccacaaaccgtcacttacttccccttttaacaatacttccctttttactaattattattcattaaattaattaataaacagcgtcattcaaaggaggagccacatacctatataactaaccacagtttcgaatggctgagtttatgccgccagacggagacgggagcagaacactgactgccggctgaacttgggcgggtgctgaaggtgagtgaaaccaccgaaatcaaggggcaattcgggctagggg

SEQ ID NO: 3394 - protein, 662 aa, Betatorquevirus sp.
MPPFKRYWNWNRPRRRWRKRRFYTSTWRPRRSFPRRRRRRTVRKRFYKKFLRKKLKKIKLNQWQPTTIHKCHIKGFLPLFQCGDGRQENNYIQYKDSYTPENEPGGGGWSIQKLSLGILYKENKDFQNYWTKSNRRLVLCRYIGARIILYRQPYTDYLFHYFHDPPKNVTKYYFASFHPLQMLKLKHTVIVPSFNSQPHKRKPYKKLYIKPPKLLKNQWYFQQNFSDYPLIHMTACAISLTNSYGSDRAQNNNCSIWMLNTTFFQNPCTQFNRLPQPTFGYHPNKSNYYWALYKSPTNPQRKDAIYLGQSMLNEPGYPEEEKTAQSITGWGNPFYYQYLLGEEKTFITTATEDPATFMKKEKLSDKIETSRLKETPNVFKVRYNPFKDKGSGNRIYFVPNFTLTHQTWDPPSDPDTIFEGFPLWLMFWGIEDILKKMGKCPNLYEDWVCVIQTNYFSTPEKFFVPLSESFVHGQGAYDIDRDHIPPAQYTKWFPKYKFQKEAIHNIVETAPFVCRPDHVKNFQAVMHYNFFFKWGGNPSPMEPVEDPNSQPITPYPPPQQLTDEITNPYTDLKSFIYPWDVRRDMLTDSAAKRIKDSTIDDFSLFTDQDKPSTDIELFKEAQTKTTPQKEKETLLLQLKQLQQYNKLLRQRFNKLNISLEDL

SEQ ID NO: 3395 - protein, 102 aa, Betatorquevirus sp.; identical to SEQ ID NO: 3384

SEQ ID NO: 3396 - protein, 55 aa, Betatorquevirus sp.; identical to SEQ ID NO: 3385

SEQ ID NO: 3397 - DNA, 2860 bp, Betatorquevirus sp.
cgggtgctgaaggtgagtgaaaccaccgaaatcaaggggcaattcgggctagttcagtctggcggaacgggcaagaaacttaaaattatttttattacagatgagcgactatgtgaaaccatgcatttacaaccaaaattccattaacacccaatggattaacaatatttgttcaagccacgacctattttgcggctgtgaaaatccaattaaccacctaaaagctgccctaaaagaaaaatgccaccattcaaaagatattggaattggaacagaccacggagaagatggcgaaaaagacgattttacacttcaacctggagacctcgaagatcttttccgcgtagaagaagaagacgcacggtaagaaaacgattttataaaaagtttttaagaaaaaaactaaaaaaaattaaactaaaccagtggcaaccaactactatacacaaatgccacataaaaggatttttaccattatttcaatgtggtgatggacgccaagaaaataattatatacaatataaagacagctatactccagaaaatgaaccaggaggcggtggatggtcaattcaaaaactatctttaggaattctatataaagaaaacaaagactttcaaaactactggactaaatctaaccgccgcttagtactttgtagatatattggagctagaattatattgtatagacagccttatacagactacttgtttcactattttcatgatcctccaaaaaatgtaaccaaatattactttgcttcttttcacccattgcaaatgcttaaactaaaacatactgtaatagttccaagctttaattcacaaccacacaaacgaaaaccctataaaaaactatacataaaaccaccaaaacttcttaaaaaccaatggtattttcaacaaaatttctctgactacccacttatacacatgacagcctctgctatctcattaacaaactcatacggttcagatagagctcaaaacaacaactgctctatatggatgctaaacacaacattttttcaaaacccatgcacacaatttaaccgcttaccacaaccaacatttggctatcacccaaacaaatcaaactattactgggcactatataaatcaccaacaaacccacaaagaaaagacgcaatatacttaggacaatctatgcttaatgaaccaggataccccgaagaagaaaaaacagcccagtcaataactggatggggtaatccattttattaccaatacctactaggagaagaaaaaacctttataacaaccgccacagaagatccagcaacttttatgaaaaaggacacactaagtgacaggattgaagccactagactaaaagaaacaccaaatgtttttaaggttagatacaatcctttcaaagacaaaggatcaggaaacagaatttactttgtacccaactttacattaacacaccaaacatgggacccaccatcagacccagacactatatttgaaggatttcccttatggctaatgttttggggaatagaagatattttaaaaaaaatgggaaaatgtcctaacctatatgaagactgggtatgtgttatacaaaccaactattttagcacacctgaaaagttttttgtaccacttagtgagtcattcgtacacggacaaggtgcctatgacatagacagagatcatattccacctgcacaatacactaaatggtttccaaaatataaatttcaaaaagaagccattcataatatagttgaaaccgcaccatttgtatgtagacctgatcatgtaaaaaactttcaagctgtaatgcattataactttttctttaagtggggaggcaatccatctccaatggaaccagtcgaagaccccaacagtcaacccatcacaccttatccccctccacagcaactcacagatgaaattactaacccgtacacagacctcaaatcctttatctacccatgggacgtcagacgtgacatgcttacagactcagctgcaaaaagaattaaagacagcacaattgatgacttctctttattcacagatcaagacaaaccatccacagacatcgaactattcaaagaagcacaaacgaaaacaaccccgcaaaaagaaaaagagacattactcctccagctcaagcagctccaacaatacaacaaacttctccgacagcgattcaacaaactaaatatatcattagaggacctataaaccatgttcaaatatttcctactaaaaaaaatcgccgcatgaatagatgggaatatgctgttgaactagaaacagcaaaatggatgaaacgacccccctgtcaaatgatatatgatattcctttttacccttggcttcccccagaacctattgttccaaaagtaaactttgaccttgtaaaaaactttaataaaggccagcattaactcactctcggtgtcagtttatataagtttaaactataacaaacatccatgtcctcccttatacgcatgcgcaaagggggctcagcccccttaaacccccgggggggtaaaccccccctttgcccccccaactcataaatattcataacggaaacgggggggtaaaccccccctttgcccccccaactcataaatattcataacggaaaccacaaaattagaattgccgaccacaaaccgtcacttacttccccttttaacaatacttccctttttactaattattattcattaaattaattaataaacagcgtcattcaaaggaggagccacatacctatataactaaccacagtttcgaatggctgagtttatgccgccagacggagacgggagcagaacactgactgccggctgaacttggg

SEQ ID NO: 3398 - protein, 662 aa, Betatorquevirus sp.; identical to SEQ ID NO: 3383

SEQ ID NO: 3399 - protein, 102 aa, Betatorquevirus sp.; identical to SEQ ID NO: 3384

SEQ ID NO: 3400 - protein, 55 aa, Betatorquevirus sp.; identical to SEQ ID NO: 3385

SEQ ID NO: 3401 - DNA, 2859 bp, Alphatorquevirus sp.
ggactggccgggctatgggcaaggctcttaaaaaagcaatgtttctcggtaaactttacagaaagaagaggcacctgttactgtacccgctgcacactacacagaaagcttgcaggcttctgactgatatgtggagaccccccacttacaatgtacaaggccaagaaaggcagtggtacgactcatgctttaggtctcacgctgctatgtgtggctgtggcgattttatcaggcatctttgtcatcttgctgataattttggacgccctccaactgtccctcggcctcccgcacccacacctccagtaaggccactgccagctctcccggcacctcccaatccctccggtagcagagcggcatggcctactggtggtggagacggagaagacgagccccgtggaggaggagacggcgctggaggactcgcagaactcgcagacgaagagctgctttccgccgccgtggacgtcgccgaagagtaagaaagaggagggggaggtggagaaggacttatagaaaatggcggaggggcaaaaacagacgcaggcacaagagacgcttaatactaactcagtggcaacccgcctttataagacgctgctatatagtgggctacctgcccctcataatctgcggagaaaacacctccgccagaaactttgccacccactcagacgaccttatatccaacggaccgtacggggggggcatgactaccaccaaatttactctcagaatactatatgacgaacacctcaggcaccttaactactggactgtcagtaacgaggacctagacctgtgtagatacctggggggcaccttctacgcgtacagacaccccactgtacactttattatacaaatacacaccagtcccccctttctagacactccactcacgggtcccagcatacacccgggcatgctgatgctcacaaaacacaaaatactaataccaagcctaaaaaccagacccagcaagaaacacaaagtaaaaattagattcagaccccctaaactatttcaagacaagtggtacccccagtcagagctttgcgacaccacactcataaccatctttgcaaccgcatgtgacctgcaatttccgttcggctcaccactaacgaacaacccttgcgtcaacttccaggtgctaggttccgtttacaaaaggcacctcagcatacttcctgacaaactgtcagcatatgaaagccactatgaatcaaacttatatgacaatatacaactatatcaaacattccaaacaatagctcaaattaaacctagtgctcaagaaagtgacttttctcctacatggcaaaattgtcaaaatactagtaagcttatctacacaggcaagaaccaatcacaatgtaatgacacttggtattatggaaagacttatacaagtaaaattaaagacgcagctaaaaaaattagaacaaaatacttaaacgctacaaggttagccctaccagtactagcaacacatggacatgaactactagagtaccacacaggtatatacagttctatattcctatctgcaggcagaacatactttgaaaccacaggggcctacacagacataatttacaacccccttgtagacaaaggcataggaaacaaagtgtggctagaccccctaagtaaagaagacgcggtgctaaacagaaaacaggcaaaagtactgttagaagacatacccatatgggcagccctatttggatacacagaatttgcagctaaatacacaggagactctgccatatcagcaaactacagactgacaatacggtgcccctacacagaccccatgctagtagacagaaacaacgaagaccaaggctttgtgccctactctaagaactttggcaacgggaaaatgccaggagggtcctccaacgttccacttaccatgagaatcaagtggtaccccatattattccaccaactagaactcatggaagagctagtacagtctggaccgtttgcatacaggggcgacgaaaagatgtgtgtattagccataaaatataacttcagatggaaatggggaggtaaccctgtttctcaccagattgtgcgcaacccctgtaaaggagggtccggtgcccgtcgagagcctcgctcaatacaagcagttgacccgaaatacgtcacaccgacgctatccttccactcgtgggacttcagacggggactatttggcaaggcaagtattgagagaatgtcaagagaatcagaaactaatatctatcctacaggcccaccaagaaaaagaccaaaaagggacacggacccatacgactcgcagcaagaagaaaactcaatttcaagacacctccagctccagccgtggatccactccagtcaagaagtccaaagcgaagaagaaacgcaagtcccggaaaacctacaagaacaactcctccagcagctccgagagcagcagcagctccgactccatctacagtccctcgcctcgcaagtcctcaaaatcagggcgggatacgggatacaccccctattatcttcccaagcctaaacaaagtctatatgtttgaccccccaggtcctaagcccatacagggctaccatgactgggtggaagagtacaccgcctgtaaatattggaacaggccccccagaaagtaccacacagattttcccttctacccagacgtccccaaagtcccagaccagataagggtctcctttaagcttggctttcaataaacacacctgttcactgtactaggccgtgggagtttcactcgtcggtgtctacctctaaaggtcactaagcactccgagcgccagcgaggagtgcgacccttccccctgact

SEQ ID NO: 3402 - protein, 731 aa, Alphatorquevirus sp.
MAYWWWRRRRRAPWRRRRRWRTRRTRRRRAAFRRRGRRRRVRKRRGRWRRTYRKWRRGKNRRRHKRRLILTQWQPAFIRRCYIVGYLPLIICGENTSARNFATHSDDLISNGPYGGGMTTTKFTLRILYDEHLRHLNYWTVSNEDLDLCRYLGGTFYAYRHPTVHFIIQIHTSPPFLDTPLTGPSIHPGMLMLTKHKILIPSLKTRPSKKHKVKIRFRPPKLFQDKWYPQSELCDTTLITIFATACDLQFPFGSPLTNNPCVNFQVLGSVYKRHLSILPDKLSAYESHYESNLYDNIQLYQTFQTIAQIKPSAQESDFSPTWQNCQNTSKLIYTGKNQSQCNDTWYYGKTYTSKIKDAAKKIRTKYLNATRLALPVLATHGHELLEYHTGIYSSIFLSAGRTYFETTGAYTDIIYNPLVDKGIGNKVWLDPLSKEDAVLNRKQAKVLLEDIPIWAALFGYTEFAAKYTGDSAISANYRLTIRCPYTDPMLVDRNNEDQGFVPYSKNFGNGKMPGGSSNVPLTMRIKWYPILFHQLELMEELVQSGPFAYRGDEKMCVLAIKYNFRWKWGGNPVSHQIVRNPCKGGSGARREPRSIQAVDPKYVTPTLSFHSWDFRRGLFGKASIERMSRESETNIYPTGPPRKRPKRDTDPYDSQQEENSISRHLQLQPWIHSSQEVQSEEETQVPENLQEQLLQQLREQQQLRLHLQSLASQVLKIRAGYGIHPLLSSQA

SEQ ID NO: 3403 - protein, 156 aa, Alphatorquevirus sp.
MGKALKKAMFLGKLYRKKRHLLLYPLHTTQKACRLLTDMWRPPTYNVQGQERQWYDSCFRSHAAMCGCGDFIRHLCHLADNFGRPPTVPRPPAPTPPVRPLPALPAPPNPSGSRAAWPTGGGDGEDEPRGGGDGAGGLAELADEELLSAAVDVAEE

SEQ ID NO: 3404 - protein, 59 aa, Alphatorquevirus sp.; identical to SEQ ID NO: 817

SEQ ID NO: 3405 - DNA, 2859 bp, Betatorquevirus sp.
cgggagccggaggtgagtgaaaccaccgtagtctaggggcaattcgggctagatcagtctggtggaacgggcaagaaacttaaaataatatttgttttacagatgagcaaatttctacaaccaccactttatgagaaaagagctctagaaaatcaatggataaacaccatatttaacacccacgacttattctgcggatgcaacaaaccaattgaacacctagaggccattttaaaacctaaaaaatgcctccatttcggcgccgccgcttctacagaaactggtggaactacaaaagaccaagatcttactatcgacgaaggagatttagaaaatctattttcggaagaaaacgacgtcgacgaagggtaagaagaaaaaaattttatagacaaaacaaaaaacttaaaactataaaaataaaccaatggcaacctagttctattaagaaatgtagaatagaaggatacttatgcttatttcaagcaggacctggaagatatggcaataactatgctttatggaaagaatctttctttccacaacattatgcgggaggaggaggatggagtattcaacaactatctttaggaaacctatttactcaacataaagaatatatgaactattggactaaaagtaatgttagaatgaatatgtgtagatactatggctgtaaaattactttgtttagagaaccgtatacagactatgtttttaactatatgcaacatataccaaaaactgtaactaatacattttactgttcctttcaccctataagactactaactcacaacagaaaaaaaataataccaagctttcaaacacagccacataaaagaaaaccatacaaaactatttgggtaccaccaccaaaattaatgaaaaaccaatggttttttcaacaacaattagcagactttccactactaacctttgtaacatctgctatatcacttacaggaatgtttggaagctgtaaaacaattagcaacaatataacattttttagtttagacactcaacaattcccatcaccactattccaatacaaagattccacacaaccaacatggggttaccaacacggaaacacctacctttatggtatacaacaaccaaatcacattttcactcaaaataccaaagcatcacttacatatttaggaaatacaatgccacaagaaccaggaacacatataggagcactaactcaaaccaaagtaacaaacaaagaaaactggggaaatccattttactgggactacttatcaggagacgctgtactagtcacgttaactgaaaatccctcacaagcatttaccaaaaagactgagaccttagaccaatcatcagaaaaaaaaacccattatatatttaaatgtagatacaacccatatcatgacaaaggaacaggtaacacagtatacctaatacctaactatgataaaacacaaacaaactggaatcccactaaagacacagacttaagatgggacaatctaccactatggctagtactatggggcctagaagacatagtaaaaagaataggtaaatgccacaacctagacatggactggacactagttataagaagcaactacatagtaccacctcaaaaagaatatgtaccacttagttatgattttatacacggtagaggaccatacgacacagaaagagaatttatgacagctgacgaccttacacattggtatcccagatacaaatatcaaagacaatgcatagacacatttattagatcaggcccatcagtagccacaggagacaactgtccaaatatacaagctaaaataaaatacaatttcttttttaagtggggcggaatctctgatcctcaagaaacaatctttgaccccaacagtcaacccgtcacaccttcgcccaataacttcaacatcctcaatgaaatcattgatccaacaacagacattacaaaagaaatatacccatgggactttagaagacactatcttacagaggcagctgcaaaaagaattacagaaagcgaaactgatgaccaatttatgttcacagatggaaagcaaacttcaacagacctgcaactccaaacagaaacacaagagaaagagaccgagaaaacacaaaaagcgccactattccagcagctccagcagctccaacaatacaaccaacaactccagcagcgactccgaaacctaaagcaattatctacggacctataaataaagtagaactgtttaaaactaaacgtaaaaacaggagactaactccatacgaaacagaaacagatttacaaatagcaaaatggttaaaaagacctgtaagacatttttttaatgataccccttactacccatggctgccaccagcaccacttgtacaatttgaccttgtaaaaggatttaataaaggccaacattaattcacttgaggtgtccatttatttaagttacaacttatataaaccaacaccgcctccctaatacgcaggcgcacaagggggctccgcccccttaaacccccggggggggtaaaccccccctaaccccccccaaactaattaatattcaacaggaaaaccacctaattagaattgccgaccacaaaccgtttaatattcaacaggaaaaccacctaattagaattgccgaccacaaaccgtcactaacttccctttttttacaaagcttccccttttactaattattattcattacattaattaataatcaccgtaattccggggaggaaccaacactctatataaacaactatacttccgaatggctgagtttatgccgccagacggagactgaatcgcatcagagacttcaggctgatcttggg

SEQ ID NO: 3406 - protein, 662 aa, Betatorquevirus sp.
MPPFRRRRFYRNWWNYKRPRSYYRRRRFRKSIFGRKRRRRRVRRKKFYRQNKKLKTIKINQWQPSSIKKCRIEGYLCLFQAGPGRYGNNYALWKESFFPQHYAGGGGWSIQQLSLGNLFTQHKEYMNYWTKSNVRMNMCRYYGCKITLFREPYTDYVFNYMQHIPKTVTNTFYCSFHPIRLLTHNRKKIIPSFQTQPHKRKPYKTIWVPPPKLMKNQWFFQQQLADFPLLTFVTSAISLTGMFGSCKTISNNITFFSLDTQQFPSPLFQYKDSTQPTWGYQHGNTYLYGIQQPNHIFTQNTKASLTYLGNTMPQEPGTHIGALTQTKVTNKENWGNPFYWDYLSGDAVLVTLTENPSQAFTKKTETLDQSSEKKTHYIFKCRYNPYHDKGTGNTVYLIPNYDKTQTNWNPTKDTDLRWDNLPLWLVLWGLEDIVKRIGKCHNLDMDWTLVIRSNYIVPPQKEYVPLSYDFIHGRGPYDTEREFMTADDLTHWYPRYKYQRQCIDTFIRSGPSVATGDNCPNIQAKIKYNFFFKWGGISDPQETIFDPNSQPVTPSPNNFNILNEIIDPTTDITKEIYPWDFRRHYLTEAAAKRITESETDDQFMFTDGKQTSTDLQLQTETQEKETEKTQKAPLFQQLQQLQQYNQQLQQRLRNLKQLSTDL

SEQ ID NO: 3407 - protein, 89 aa, Betatorquevirus sp.
MSKFLQPPLYEKRALENQWINTIFNTHDLFCGCNKPIEHLEAILKPKKCLHFGAAASTETGGTTKDQDLTIDEGDLENLFSEENDVDEG

SEQ ID NO: 3408 - protein, 62 aa, Betatorquevirus sp.
LFKTKRKNRRLTPYETETDLQIAKWLKRPVRHFFNDTPYYPWLPPAPLVQFDLVKGFNKGQH

SEQ ID NO: 3409 - DNA, 2859 bp, Alphatorquevirus sp.
gctttttgtggctgtcgtgatcctgtttttcatctttctcgtctggctgcacgttttaacaatcagggacctccgccgcccccccaggacgaccgcccgacgtcgcctaccccagtgagacgcctcctcccgctgccctcctacccgggagagggtcccccagatagatggcctggtggggatggaggcgccgctggcggtggccgcagagacggtggcgatggaggcgtacgcgccgcagacgaagagtaccgacccgaagacctcgacgagcttttcggcgctatcgaacaagaacagtaaggaggcgccggagggggaggcggaggggctacaggagacgttacagactgagacgcttgcgcagacgcagatacaaacgcaaaaagatagtactgactcagtggaacccccaaaccgtcaggaggtgcaccataaagggtctcatgccagtactctgggcgggcatgggccaggggggccacaactacgcggtgcgctccgatgactacgtggccaagggcggtttcgggggctccttcgccacagagaccttctccctgaaggtgctctatgaccagtaccagagaggctttaacaggtggacttatagcaacgaggacttagacctagccctgtactatggctgcaagtgggtcttctacagaagcccagacacagactttatagtatacttcactaacaatccccccatgaagaccaaccagttcaccgctcccctgaccactcccggcatgctcatgaggagcaaatacaagatactgatccccagctttaaaaccaggcccaaggggcgcaagacagttactgttagaataagaccccccaaactgttcctgcacaagtggtacacccagcaggacctgtgcccagttccgttagtccaactgaacgtgaccgcagcagatatgcaacatccgttcggctcaccactaactgaaaacccttgcatcactttccaagttttagggaacttgtacaataactgcctcaacattgacctcccccaatttacagaggatgggaactttgaaacaagtgcaaactaccaaagagagaatgcaaatgacttaaaaaacctttataaagaattattctgtaagaaagagagcgcacactactggcaaaccttcatcactaactccatgatgaaggcccacattgatgctagcaaagctcagtcagctaccaccaactatcccaacgtgggaacaaatacagcttacaacaaagctgactttcctactaagccacccaaaaacaaattctctgactggaaaaacaaatttactgacggtagagacagtaactttctctttgccacctatcaccctgaccaagtaaaagaaataattaaagaaatgagagacaataactttgctttagaaacaggccccaatgacaagtacgggtccttcaccagccaatacactagaaacactcacctactagactactacctgggcttctacagccccatcttcttgtccccaggaaggtcaaatatagaattttttacagccttcagagacatagtatacaaccctctcctagacaaagcccagggcaacatgatctggttccaatatcacactaaatatgacaataaattcaaaaaaccagaatgccactgggaaatagcagatatgcccctgtgggccctgtgcaacgggtacgtagagtacctcgagagccagattaaatatggagacatactcctagagggcaaagtcctcatcaggtgtccttacaccaaaccgcccctagtagacaagaacgacgccacagccgggttcgttgtatacaacactaactttggcatgggcaagtggatagacggcgggggctacatccccctacacgagagaagcaagtggtatgtcatgctcagataccagacggacgtcctccatgacatagtgacctgtggaccgtggcagtacagagacgataacaaaaacgctcagctagtggccaagtactactttcggttcaagtggggaggaaacaccatccattcccaggttatcagaaacccgtgcccagacacccaagtttccggaccccgtcgacagcctagagaagtacaagtcgttgacccgcagctcatcacaccgccgtgggtcctccacacgttcgaccagagacgcggactgtttactgaaggagctatcagacgtctgctcaaacaaccaattcctggcgagtatgatcctcaacccccccccgggtcccactcctctttctaccctcagcattccagagagaagacggcactgccgaaagcgactccggttcaccggccaaaagaccccggtactcgttcgaagagagccagacggagaccctctcctcggaggaggacccggcggagacgacgagggagctcctcctccgaaagctccgagagcagcgagcactccagttccagctgcagcacttcgcagtccaactcgccaagacccaggcgaacctccacgtaaaccccctgtcatactgcccgccataaacaaggtgtttctgtttccccctgagggtcccaaacccatctcaggcagagaggcctgggcagacgagtacgccaccgcggcggcctggaacaggcccgtccgcagctatcactcagacacccccacttatccctggatgccccaacaattccgtgtaagcttcaaactaggcttccaataaaaatgtactaggccgtaaactgttcacttgtcggtgtctacctcttaaggtcactaagcactccgagcgtcagcgaggagtgcgaccctctaccctggtgcaacgccctcggcggccgcgcgctacgccttcggctgcgcgcggcac

SEQ ID NO: 3410 - protein, 778 aa, Alphatorquevirus sp.
MAWWGWRRRWRWPQRRWRWRRTRRRRRVPTRRPRRAFRRYRTRTVRRRRRGRRRGYRRRYRLRRLRRRRYKRKKIVLTQWNPQTVRRCTIKGLMPVLWAGMGQGGHNYAVRSDDYVAKGGFGGSFATETFSLKVLYDQYQRGFNRWTYSNEDLDLALYYGCKWVFYRSPDTDFIVYFTNNPPMKTNQFTAPLTTPGMLMRSKYKILIPSFKTRPKGRKTVTVRIRPPKLFLHKWYTQQDLCPVPLVQLNVTAADMQHPFGSPLTENPCITFQVLGNLYNNCLNIDLPQFTEDGNFETSANYQRENANDLKNLYKELFCKKESAHYWQTFITNSMMKAHIDASKAQSATTNYPNVGTNTAYNKADFPTKPPKNKFSDWKNKFTDGRDSNFLFATYHPDQVKEIIKEMRDNNFALETGPNDKYGSFTSQYTRNTHLLDYYLGFYSPIFLSPGRSNIEFFTAFRDIVYNPLLDKAQGNMIWFQYHTKYDNKFKKPECHWEIADMPLWALCNGYVEYLESQIKYGDILLEGKVLIRCPYTKPPLVDKNDATAGFVVYNTNFGMGKWIDGGGYIPLHERSKWYVMLRYQTDVLHDIVTCGPWQYRDDNKNAQLVAKYYFRFKWGGNTIHSQVIRNPCPDTQVSGPRRQPREVQVVDPQLITPPWVLHTFDQRRGLFTEGAIRRLLKQPIPGEYDPQPPPGSHSSFYPQHSREKTALPKATPVHRPKDPGTRSKRARRRPSPRRRTRRRRRGSSSSESSESSEHSSSSCSTSQSNSPRPRRTST

SEQ ID NO: 3411 - DNA, 2858 bp, Betatorquevirus sp.
cgggtgctgaaggtgagtgaaaccaccgaaatcaaggggcaattcgggctagttcagtctggcggaacgggcaagaaacttaaaattatttttattacagatgagcgactatgtgaaaccatgcatttacaaccaaaattccattaacacccaatggattaacaatatttgttcaagccacgacctattttgcggctgtgaaaatccaattaaccacctaaaagctgccctaaaagaaaaatgccaccattcaaaagatattggaattggaacagaccacggagaagatggcgaaaaagacgattttacacttcaacctggagacctcgaagatcttttccgcgtagaagaagaagacgcacggtaagaaaacgattttataaaaagtttttaagaaaaaaactaaaaaaaattaaactaaaccagtggcaaccaactactatacacaaatgccacataaaaggatttttaccattatttcaatgtggtgatggacgccaagaaaataattatatacaatataaagacagctatactccagaaaatgaaccaggaggcggtggatggtcaattcaaaaactatctttaggaattctatataaagaaaacaaagactttcaaaactactggactaaatctaaccgccgcttagtactttgtagatatattggagctagaattatattgtatagacagccttatacagactacttgtttcactattttcatgatcctccaaaaaatgtaaccaaatattactttgcttcttttcacccattgcaaatgcttaaactaaaacatactgtaatagttccaagctttaattcacaaccacacaaacgaaaaccctataaaaaactatacataaaaccaccgaaacttcttaaaaatcaatggtattttcaacaaaatttctctgactacccactcatacacatgacagcctctgctatctcattaacaaactcatacggttcagatagagctcaaaacaacaactgctctatatggatgctaaacacaacattttttcaaaacccatgcacacaatttaaccgcttaccacaaccaacatttggctatcacccaaacaaatcaaactattactgggcactatataaatcaccaacaaacccaaaaagaaaagacgcaatatacttaggacaatctatgcttaatgaaccaggataccccgaacaacaacacacagcccagtcaataactggatggggtaatccattttattaccaatacctactaggagaagaaaaaacctttataacaaacgccacagaagatccagcaacttttatgacagccgcaagcctagaaaaagacattgaaaccactagactaaaagaaacaccaaatgtttttaaagttagatacaatcctttcaaagacaaaggatcaggaaacagaatttactttgtacccaactttacattaacacaccaaacatgggacccaccatcagacccagacactatatttgaaggatttcccttatggctaatgttttggggaatagaagatattttaaaaaaaatgggaaaatgtcctaacctatatgaagactgggtatgtgttatacaaaccaactattttagcacacctgaaaagttttttgtaccacttagtgagtcattcgtacacggacaaggtgcctatgacatagacagagatcatattccacctgcacaatacactaaatggtttccaaaatataaatttcaaaaagaagccattcataatatagttgaaaccgcaccatttgtatgtagacctgatcatgtaaaaaactttcaagctgtaatgcattataactttttctttaagtggggaggcaatccatctccaatggaaccagtcgaagaccccaacagtcaacccatcacaccttatccccctccacagcaactcacagatgaaattactaacccgtacacagacctcaaatcctttatctacccatgggacgtcagacgtgacatgcttacagactcagctgcaaaaagaattaaagacagcacaattgatgacttctctttattcacagatcaagacaaaccatccacagacatcgaactattcaaagaagcacaaacgaaaacaaccccgcaaaaagaaaaagagacattactcctccagctcaagcagctccaacaatacaacaaacttctccgacagcgattcaacaaactaaatatatcattagaggacctataaaccatgttcaaatatttcctactaaaaaaaatcgccgcatgaatagatgggaatatgctgttgaactagaaacagcaaaatggatgaaacgacccccctgtcaaatgatatatgatattcctttttacccttggcttcccccagaacctattgttccaaaagtaaactttgaccttgtaaaaaactttaataaaggccagcattaactcactctcggtgtcagtttatataagtttaaactataacaaacatccatgtcctcccttatacgcatgcgcaaagggggctccgcccccttaaacccccggggggggtaaaccccccctttgcccccccaactcataaatattcataacggaaaccacaaaattagaattgccgaccacaaaccgtcacttacttccccttttaacaatacttccgtttttactaattattattcattaaattaattaataaacagcgtcattcaaaggaggagccacatacctatataactaaccacagtttcgaatggctgagtttatgccgccagacggagacgggagcagaacactgactgccggctgaacttgggcgggtgctgaaggtgagtgaaaccaccgaaatcaaggggcaattcgggcggg

SEQ ID NO: 3412 - protein, 662 aa, Betatorquevirus sp.
MPPFKRYWNWNRPRRRWRKRRFYTSTWRPRRSFPRRRRRRTVRKRFYKKFLRKKLKKIKLNQWQPTTIHKCHIKGFLPLFQCGDGRQENNYIQYKDSYTPENEPGGGGWSIQKLSLGILYKENKDFQNYWTKSNRRLVLCRYIGARIILYRQPYTDYLFHYFHDPPKNVTKYYFASFHPLQMLKLKHTVIVPSFNSQPHKRKPYKKLYIKPPKLLKNQWYFQQNFSDYPLIHMTASAISLTNSYGSDRAQNNNCSIWMLNTTFFQNPCTQFNRLPQPTFGYHPNKSNYYWALYKSPTNPKRKDAIYLGQSMLNEPGYPEQQHTAQSITGWGNPFYYQYLLGEEKTFITNATEDPATFMTAASLEKDIETTRLKETPNVFKVRYNPFKDKGSGNRIYFVPNFTLTHQTWDPPSDPDTIFEGFPLWLMFWGIEDILKKMGKCPNLYEDWVCVIQTNYFSTPEKFFVPLSESFVHGQGAYDIDRDHIPPAQYTKWFPKYKFQKEAIHNIVETAPFVCRPDHVKNFQAVMHYNFFFKWGGNPSPMEPVEDPNSQPITPYPPPQQLTDEITNPYTDLKSFIYPWDVRRDMLTDSAAKRIKDSTIDDFSLFTDQDKPSTDIELFKEAQTKTTPQKEKETLLLQLKQLQQYNKLLRQRFNKLNISLEDL

SEQ ID NO: 3413 - protein, 102 aa, Betatorquevirus sp.; identical to SEQ ID NO: 3384

SEQ ID NO: 3414 - protein, 55 aa, Betatorquevirus sp.; identical to SEQ ID NO: 3385

SEQ ID NO: 3415 - DNA, 2858 bp, Betatorquevirus sp.
cgggtgctgaaggtgagtgaaaccaccgaaatcaaggggcaattcgggctagttcagtctggcggaacgggcaagaaacttaaaattatttttattacagatgagcgactatgtgaaaccatgcatttacaaccaaaattccattaacacccaatggattaacaatatttgttcaagccacgacctattttgcggctgtgaaaatccaattaaccacctaaaagctgccctaaaagaaaaatgccaccattcaaaagatattggaattggaacagaccacggagaagatggcgaaaaagacgattttacacttcaacctggagacctcgaagatcttttccgcgtagaagaagaagacgcacggtaagaaaacgattttataaaaagtttttaagaaaaaaactaaaaaaaattaaactaaaccagtggcaaccaactactatacacaaatgccacataaaaggatttttaccattatttcaatgtggtgatggacgccaagaaaataattatatacaatataaagacagctatactccagaaaatgaaccaggaggcggtggatggtcaattcaaaaactatctttaggaattctatataaagaaaacaaagactttcaaaactactggactaaatctaaccgccgcttagtactttgtagatatattggagctagaattatattgtatagacagccttatacagactacttgtttcactattttcatgatcctccaaaaaatgtaaccaaatattactttgcttcttttcacccattgcaaatgcttaaactaaaacatactgtaatagttccaagctttaattcacaaccacacaaacgaaaaccctataaaaaactatacataaaaccaccaaaacttcttaaaaatcaatggtattttcaacaaaatttctctgactacccacttatacacatgacagcctgtgctatctcattaacaaactcatacggttcagatagagctcaaaacaacaactgctctatatggatgctaaacacaacattttttcaaaacccatgcacacaatttaaccgcttaccacaaccaacatttggctatcacccaaacaaatcaaactattactgggcactatataaatcaccaacaaacccaaaaagaaaagacgcaatatacttaggacaatctatgcttaatgaaccaggataccccgaagaacaacacacagcccagtcaataactggatggggtaatccattttattaccaatacctactaggagaagaaaaaacctttataacaaccgcctcagaagatccaacaacttttatgacacaaagcaaactaaatgacgatattgaaagcactagactaaaagaaacaccaaatgtttttaaagttagatacaatcctttcaaagacaaaggatcaggaaacagaatttactttgtacccaactttacattaacacaccaaacatgggacccaccatcagacccagacactatatttgaaggatttcccttatggctaatgttttggggaatagaagatattttaaaaaaaatgggaaaatgtcctaacctatatgaagactgggtatgtgttatacaaaccaactattttagcacacctgaaaagttttttgtaccacttagtgagtcattcgtacacggacaaggtgcctatgacatagacagagatcatattccacctgcacaatacactaaatggtttccaaaatataaatttcaaaaagaagccattcataatatagttgaaaccgcaccatttgtatgtagacctgatcatgtaaaaaactttcaagctgtaatgcattataactttttctttaagtggggaggcaatccatctccaatggaaccagtcgaagaccccaacagtcaacccatcacaccttatccccctccacagcaactcacagatgaaattactaacccgtacacagacctcaaatcctttatctacccatgggacgtcagacgtgacatgcttacagactcagctgcaaaaagaattaaagacagcacaattgatgacttctctttattcacagatcaagacaaaccatccacagacatcgaactattcaaagaagcacaaacgaaaacaaccccgcaaaaagaaaaagagacattactcctccagctcaagcagctccaacaatacaacaaacttctccgacagcgattcaacaaactaaatatatcattagaggacctataaaccatgttcaaatatttcctactaaaaaaaatcgccgcatgaatagatgggaatatgctgttgaactagaaacagcaaaatggatgaaacgacccccctgtcaaatgatatatgatattcctttttacccttggcttcccccagaacctattgttccaaaagtaaactttgaccttgtaaaaaactttaataaaggccagcattaactcactctcggtgtcagtttatataagtttaaactataacaaacatccatgtcctcccttatacgcatgcgcaaagggggctccgcccccttaaacccccggggggggaaaaccccccctttgcccccccaactcataaatattcataacggaaaccacaaaattagaattgccgaccacaaaccgtcacttacttccccttttaacaatacttccgtttttactaattattattcattaaattaattaataaacagcgtcattcaaaggaggagccacatacctatataactaaccacagtttcgaatggctgagtttatgccgccagacggagacgggagcagaacactgactgccggctgaacttgggcgggtgctgaaggtgagtgaaaccaccgaaatcaaggggcaattcgggcggg

SEQ ID NO: 3416 - protein, 662 aa, Betatorquevirus sp.
MPPFKRYWNWNRPRRRWRKRRFYTSTWRPRRSFPRRRRRRTVRKRFYKKFLRKKLKKIKLNQWQPTTIHKCHIKGFLPLFQCGDGRQENNYIQYKDSYTPENEPGGGGWSIQKLSLGILYKENKDFQNYWTKSNRRLVLCRYIGARIILYRQPYTDYLFHYFHDPPKNVTKYYFASFHPLQMLKLKHTVIVPSFNSQPHKRKPYKKLYIKPPKLLKNQWYFQQNFSDYPLIHMTACAISLTNSYGSDRAQNNNCSIWMLNTTFFQNPCTQFNRLPQPTFGYHPNKSNYYWALYKSPTNPKRKDAIYLGQSMLNEPGYPEEQHTAQSITGWGNPFYYQYLLGEEKTFITTASEDPTTFMTQSKLNDDIESTRLKETPNVFKVRYNPFKDKGSGNRIYFVPNFTLTHQTWDPPSDPDTIFEGFPLWLMFWGIEDILKKMGKCPNLYEDWVCVIQTNYFSTPEKFFVPLSESFVHGQGAYDIDRDHIPPAQYTKWFPKYKFQKEAIHNIVETAPFVCRPDHVKNFQAVMHYNFFFKWGGNPSPMEPVEDPNSQPITPYPPPQQLTDEITNPYTDLKSFIYPWDVRRDMLTDSAAKRIKDSTIDDFSLFTDQDKPSTDIELFKEAQTKTTPQKEKETLLLQLKQLQQYNKLLRQRFNKLNISLEDL

SEQ ID NO: 3417 - protein, 102 aa, Betatorquevirus sp.; identical to SEQ ID NO: 3384

SEQ ID NO: 3418 - protein, 55 aa, Betatorquevirus sp.; identical to SEQ ID NO: 3385

SEQ ID NO: 3419 - DNA, 2857 bp, Betatorquevirus sp.
cgggagccgaaggtgagtgaaaccaccgtagtctaggggcaattcgggctagatcagtctggcggaacgggcaagaaacttaaattattattattttttaggaatgtcacactatttacgagaaccaatataccaaggaaaagcacttgacaaccaatggattaataccattattggtacccacgatttaatgtgcggctgcccaacaccaattaaacacctaaaggatatactaaaatgccgtggagatacagatggagaagaagaagacaaagaaaatggaattactaccgtcccagaagatggcttcgacgccggagacttagaaacccttttcgaacaaccatttacagaagacgactcacggtaaggagacgccgaagaaaaatacatagaaaagctaaaagaataactgtaaagacttttcagccaaaaactatcaaaaaatgtaaagttaaaggactaaaatgccttatacaatgtggacaaacaagagacaataataattatgcacaatatatatatagctatacaaaaccaaatacaggagggggaggaggatggagcatgatggtattctcattagcaagcttatatgaagaccaccaacatttactaaactactggacaactagtaatgcaggattaaaccttataagatacagaggtgtaaaatttaaattttaccaacacacaacagtagactatgtagtcatacctagaacatgctatccaatgacagacactaaatttgaccatgcaaactcacaaccctttagagcccttatggacaaaaagaaaataatagtaccaagtatagctacaaaaccactaagacgcagatcaaaaacaagatttttttatccaccatcagaatttaaaactgactggtactttcaacaaaaaatttgcaactttccgtttataatgttaaccacagtcagttgcagcttaacacatacctttcttgcaccatcatggcaaagcaataacatttcactaaaatgtcttaacacacacttatttcaataccacaattttgaaaacccaacagccactacaggttaccaacctaaacctaacacttggctatacacagaaggaaatggctcaaccacaataccaagtaataaaaatacattaatatgcctagctaacacaaaagattatactgcaggaaaacaaattaaaagcccagacgaagacaaaatgtctaactggggtaacccttttcatgaccattacctacacccagatgttagaatatactcagccacaaaatcatggactaatttatcaagtaatccaaaaaacgaattaacactagtaacatctccattcttttatgaatgtagatattgcccagacaaagatgatggaacaggcaatgaggtatactttgtaaaaaactatgacaactccgactggcaacaaccagaacagtgggacgttaaaatagatggattcccactatggatatgttgctggggatgggcagactggattaaaaaactaagaaacatacaaagagtagactatgaccacataatggtaataaaaacaaacaaaatagaacctaaaatgccagcttatgtatttttagacgacagcttctggacaggcaaaggaatacaaaatacagaaatgttaccctatgatgaacaacactggcacccacaatttatgtatcaacaagtatctataaatgacatatgtaaatgcggaccaggtacagcaaaaccaccagacaaaaatagctttagcattaaagcaggatacacattttactttacatttggtggatgcccaagcactctagaaaatatttatgatccatgttcacaacaggtctatccaattcccacaaccagtaaccagtatgcaggactacaaatcacaaatccagcacaaccaaaagaaacaaccatacacgactttgacgtcaaaaaagacattattacaaaagcagctacaaaaagaatcaaagaatactcagcagttgatacaactatgctctcatctacagactgcctcagcaaaagctgcaaaaggccgagactacaaaccccgacaccagaaacatcggacacggaagaagaggagacgacacaggagcagcagctcaagctcctcaagcacaaccaacgactactcaagcgaacaatcctcaaattaatgtcaaatatagaataagaactggtaaaattaaagtgtctatgtttgaaaaccctgtaaaaaatagaatgttaactgcaagagaaaggtcagaagacctacaagatgcaattatatgggataggtatcctagaagctatttacatgaaaaacacttttacaaaaatatgttaataacccctaaagtaccctacataaactttgaccttggttactttaaataaagcctgcaaacttcacctctcggtgtccatttatttaagttttaacttatataaacatccaccaccctgcaaaaattgcaggcgccaagggggctccgcccccttacacccccaagggggctccgcccccttacacccccaagggggctccgcccccttacacccccaggggctccgcccccttacacccccaagggggctccgcccccttacaccccctaataaatatgcaacaggaaaaccacataattagaatggctcaccacaaaccgtcttaaacttcccttttttacacttacttcctgaaaaactacttattattcattacattaattaataatcaccgtaattccggggaggagcaaacaaactatataacaaactacacttccgaatggctgagtttacgccgccagacggagacggcatcacttcagtgactgcaggctgatcttggg

SEQ ID NO: 3420 - protein, 651 aa, Betatorquevirus sp.
MPWRYRWRRRRQRKWNYYRPRRWLRRRRLRNPFRTTIYRRRLTVRRRRRKIHRKAKRITVKTFQPKTIKKCKVKGLKCLIQCGQTRDNNNYAQYIYSYTKPNTGGGGGWSMMVFSLASLYEDHQHLLNYWTTSNAGLNLIRYRGVKFKFYQHTTVDYVVIPRTCYPMTDTKFDHANSQPFRALMDKKKIIVPSIATKPLRRRSKTRFFYPPSEFKTDWYFQQKICNFPFIMLTTVSCSLTHTFLAPSWQSNNISLKCLNTHLFQYHNFENPTATTGYQPKPNTWLYTEGNGSTTIPSNKNTLICLANTKDYTAGKQIKSPDEDKMSNWGNPFHDHYLHPDVRIYSATKSWTNLSSNPKNELTLVTSPFFYECRYCPDKDDGTGNEVYFVKNYDNSDWQQPEQWDVKIDGFPLWICCWGWADWIKKLRNIQRVDYDHIMVIKTNKIEPKMPAYVFLDDSFWTGKGIQNTEMLPYDEQHWHPQFMYQQVSINDICKCGPGTAKPPDKNSFSIKAGYTFYFTFGGCPSTLENIYDPCSQQVYPIPTTSNQYAGLQITNPAQPKETTIHDFDVKKDIITKAATKRIKEYSAVDTTMLSSTDCLSKSCKRPRLQTPTPETSDTEEEETTQEQQLKLLKHNQRLLKRTILKLMSNIE

SEQ ID NO: 3421 - protein, 103 aa, Betatorquevirus sp.
LAERARNLNYYYFLGMSHYLREPIYQGKALDNQWINTIIGTHDLMCGCPTPIKHLKDILKCRGDTDGEEEDKENGITTVPEDGFDAGDLETLFEQPFTEDDSR

SEQ ID NO: 3422 - DNA, 2857 bp, Betatorquevirus sp.
cgggtgctgaaggtgagtgaaaccaccgaaatcaaggggcaattcgggctaggttagtctggcgagacgggcaagtaacttaaatttattttacagatgagtaaattctacattccttcaaaatactcaagaaaacaaaaaaatctacaagaaataaaccttcatgtagctattcacgaccttaactgcggctgtaataatcctctacgccatattatctaccaaattttggaacaagaaccatctttaaactttattgaacaaccatgccatactactggaaccgctggcgccgccgcccatggagaagaagacaccgcttttggaccagaagatttagaacaactcttcgcagaagaaaaagaaggcgtagatacagggtaagaaaactaaaattaaaatatttacccttaaaagaatggcaaccaaagactatccataaaagcgtagttaaaggactatattgcttatttcaatgcaaccataaaagacttaactacaactttgcacagtacgaagcctcaatcgcgccaaaaaacataccggggggaggaggttactctttgtttcgctttaatttagatgctttatttgaacaaaatcaactagtaagaaatgtatggactaaatctaacaaacatttaccatttgttagatatcttggatgtcaatttaaaatttatagaccagaatttgtagatgtatgtataaaatttcaaaactgttaccctatgacagcaagtccatttttatacatgggaacacaacctagtttaatgatgatgtctagaaaaagctataaaataccctgcaaaaaaaccaacagaaaaattaaaccttacgtaaaatttaaatttccaccaccacaaaacatgcaaaataagtggtacttccaaaaagacatagcaaaattaggcttaatattagtagctacaacagcatgctcattagaccaatattatatatcaaactacgcagaaaacacaactatagaatttcaagtattaaatacaaagatttttcaaaacagacaattcagaaacacaaccacaacaggatattatccaaaagaaaacttttatttatacagctcgaatggaaacatacctaagccaaactacttacaaacaacatatttaggaaacaccatagaatatcaatatggacaaccatttaattataaaaatgacatggacgaaagtaattatgcagaaagaaaatctgaatacttatcaaacagatcacactggggaaacccattccaccactataacatacaaaaatcacacaaaatatggttttctacaaacccaccagcacaagcatatccaaaaaccttgaacgacgcaaaaaaaccaataccatggacagaagtaacacaagaactatactttacactaagatacaacccagtaacagacacaggaaaagatgttcaaatatatttattaaaaaactgggcagaagaaacaggttgggaaccaccacaaaatgaacttttaatacaagcaggtttcccactatggcttatagtatggggctttaaagactaccaaaccaaactaggccaagtaacagatatagaacatcactacattatagcctttaaacatccaaattttgaaccaaaattagacgcctacataccattaaacctatcttttataaatggacacagtgaatactacccagaagacgaaagaactgcccaagataacttaaattggtatccaatgtcacattaccaaacagcagccatagaaaacatagcacaaggtgggccaggtacagctaaattaggaaacattaaaacagcagaatgtcattgtgaatataaattttattttaagtttggcgggtgtgaaccaccaatggaaaaaacaacagatccaggaaaacaacctactttccctataccaaataacttcaatggcccaaattcgttacagaatccagacgacccaattgactccttcttatacaactttgatgaacgatggggccaaattacaaaaacagctgcacaacgaatcacaaaagactcaacaactaaaacaactctatttacagattcaacaacaactggaacagacgtgccaatcctccaagcactccaaacacaagacctctcgtcggaggaggaggaagcccaaaaagagacattattcgagcagctccaactccagcgaaacaagcaaaaacaactccgatacagaatcaagcagctcctaacaatgctccaaaatatacaataaaacactgtaaaattactgtaaacttgtttaatgagcaaaaaaaccgtagacttaatagcagagagagagcagaagacaaagaggaagcaaaaatatggggtagaagtgaaaaatattttctgaaagatatacccttctactatggctgtgtacctgaaccttatgttaactttaaactaaactatgtagaataaacaaggcccattaattcatatctcggagtccgtttctttaatataaacttaaataaacatccacctcatctcccaatcactaggcctacaagggggctccgcccccttacacccccaagggggctccgcccccttacacccccccaagggggctccgcccccttacacccccttataaatattcaacaggaaaaccacataattagaattgccgaccacaaaccgtcacttacttcctcattttcacttacttcccttttcactcatacatattcataaaataaattagtaatcaccatcacaaacaggaggagcttaacaactatataactaactacacttccgaatggctgagtttatgccgccagacggagactgcaaaggttactgaagcaggctaaccttggg

SEQ ID NO: 3423 - protein, 662 aa, Betatorquevirus sp.
MPYYWNRWRRRPWRRRHRFWTRRFRTTLRRRKRRRRYRVRKLKLKYLPLKEWQPKTIHKSVVKGLYCLFQCNHKRLNYNFAQYEASIAPKNIPGGGGYSLFRFNLDALFEQNQLVRNVWTKSNKHLPFVRYLGCQFKIYRPEFVDVCIKFQNCYPMTASPFLYMGTQPSLMMMSRKSYKIPCKKTNRKIKPYVKFKFPPPQNMQNKWYFQKDIAKLGLILVATTACSLDQYYISNYAENTTIEFQVLNTKIFQNRQFRNTTTTGYYPKENFYLYSSNGNIPKPNYLQTTYLGNTIEYQYGQPFNYKNDMDESNYAERKSEYLSNRSHWGNPFHHYNIQKSHKIWFSTNPPAQAYPKTLNDAKKPIPWTEVTQELYFTLRYNPVTDTGKDVQIYLLKNWAEETGWEPPQNELLIQAGFPLWLIVWGFKDYQTKLGQVTDIEHHYIIAFKHPNFEPKLDAYIPLNLSFINGHSEYYPEDERTAQDNLNWYPMSHYQTAAIENIAQGGPGTAKLGNIKTAECHCEYKFYFKFGGCEPPMEKTTDPGKQPTFPIPNNFNGPNSLQNPDDPIDSFLYNFDERWGQITKTAAQRITKDSTTKTTLFTDSTTTGTDVPILQALQTQDLSSEEEEAQKETLFEQLQLQRNKQKQLRYRIKQLLTMLQNIQ

SEQ ID NO: 3424 - protein, 95 aa, Betatorquevirus sp.
MSKFYIPSKYSRKQKNLQEINLHVAIHDLNCGCNNPLRHIIYQILEQEPSLNFIEQPCHTTGTAGAAAHGEEDTAFGPEDLEQLFAEEKEGVDTG

SEQ ID NO: 3425 - protein, 56 aa, Betatorquevirus sp.
LFNEQKNRRLNSRERAEDKEEAKIWGRSEKYFLKDIPFYYGCVPEPYVNFKLNYVE

SEQ ID NO: 3426 - DNA, 2857 bp, Betatorquevirus sp.
cgggtgctgaaggtgagtgaaaccaccgaaatcaaggggcaattcgggctagttcagtctggcggaacgggcaagaaacttaaaattatttttattacagatgagcgactatgtgaaaccatgcatttacaaccaaaattccattaacacccaatggattaacaatatttgttcaagccacgacctattttgcggctgtgaaaatccaattaaccacctaaaagctgccctaaaagaaaaatgccaccattcaaaagatattggaattggaacagaccacggagaagatggcgaaaaagacgattttacacttcaacctggagacctcgaagatcttttccgcgtagaagaagaagacgcacggtaagaaaacgattttataaaaagtttttaagaaaaaaactaaaaaaaattaaactaaaccagtggcaaccaactactatacacaaatgccacataaaaggatttttaccattatttcaatgtggtgatggacgccaagaaaataattatatacaatataaagacagctatactccagaaaatgaaccaggaggcggtggatggtcaattcaaaaactatctttaggaattctatataaagaaaacaaagactttcaaaactactggactaaatctaaccgccgcttagtactttgtagatatattggagctagaattatattgtatagacagccttatacagactacttgtttcactattttcatgatcctccaaaaaatgtaaccaaatattactttgcttcttttcacccattgcaaatgcttaaactaaaacatactgtaatagttccaagctttaattcacaaccacacaaacgaaaaccctataaaaaactatacataaaaccaccgaaacttcttaaaaatcaatggtattttcaacaaaatttctctgactacccactcatacacatgacagcctctgctatctcattaacaaactcatacggttcagatagagctcaaaacaacaactgctctatatggatgctaaacacaacattttttcaaaacccatgcacacaatttaaccgcttaccacaaccaacatttggctatcacccaaacaaatcaaactattactgggcactatataaatcaccaacaaacccaaaaagaaaagacgcaatatacttaggacaatctatgcttaatgaaccaggataccccgaacaacaacacacagcccagtcaataactggatggggtaatccattttattaccaatacctactaggagaagaaaaaacctttataacaaacgccacagaagatccagcaacttttatgacagccgcaagcctagaaaaagacattgaaaccactagactaaaagaaacaccaaatgtttttaaagttagatacaatcctttcaaagacaaaggatcaggaaacagaatttactttgtacccaactttacattaacacaccaaacatgggacccaccatcagacccagacactatatttgaaggatttcccttatggctaatgttttggggaatagaagatattttaaaaaaaatgggaaaatgtcctaacctatatgaagactgggtatgtgttatacaaaccaactattttagcacacctgaaaagttttttgtaccacttagtgagtcattcgtacacggacaaggtgcctatgacatagacagagatcatattccacctgcacaatacactaaatggtttccaaaatataaatttcaaaaagaagccattcataatatagttgaaaccgcaccatttgtatgtagacctgatcatgtaaaaaactttcaagctgtaatgcattataactttttctttaagtggggaggcaatccatctccaatggaaccagtcgaagaccccaacagtcaacccatcacaccttatccccctccacagcaactcacagatgaaattactaacccgtacacagacctcaaatcctttatctacccatgggacgtcagacgtgacatgcttacagactcagctgcaaaaagaattaaagacagcacaattgatgacttctctttattcacagatcaagacaaaccatccacagacatcgaactattcaaagaagcacaaacgaaaacaaccccgcaaaaagaaaaagagacattactcctccagctcaagcagctccaacaatacaacaaacttctccgacagcgattcaacaaactaaatatatcattagaggacctataaaccatgttcaaatatttcctactaaaaaaaatcgccgcatgaatagatgggaatatgctgttgaactagaaacagcaaaatggatgaaacgacccccctgtcaaatgatatatgatattcctttttacccttggcttcccccagaacctattgttccaaaagtaaactttgaccttgtaaaaaactttaataaaggccagcattaactcactctcggtgtcagtttatataagtttaaactataacaaacatccatgtcctcccttatacgcatgcgcaaagggggctccgcccccttaaacccctgggggggtaaaccccccctttgcccccccaactcataaatattcataacggaaaccacaaaattagaattgccgaccacaaaccgtcacttacttccccttttaacaatacttccgtttttactaattattattcattaaattaattaataaacagcgtcattcaaaggaggagccacatacctatataactaaccacagtttcgaatggctgagtttatgccgccagacggagacgggagcagaacactgactgccggctgaacttgggcgggtgctgaaggtgagtgaaaccaccgaaatcaaggggcaattcgggcggg

SEQ ID NO: 3427 - protein, 662 aa, Betatorquevirus sp.; identical to SEQ ID NO: 3412

SEQ ID NO: 3428 - protein, 102 aa, Betatorquevirus sp.; identical to SEQ ID NO: 3384

SEQ ID NO: 3429 - protein, 55 aa, Betatorquevirus sp.; identical to SEQ ID NO: 3385

SEQ ID NO: 3430 - DNA, 2857 bp, Betatorquevirus sp.
cgggtgctgaaggtgagtgaaaccaccgaaatcaaggggcaattcgggctagttcagtctggcggaacgggcaagaaacttaaaattatttttattacagatgagcgactatgtgaaaccatgcatttacaaccaaaattccattaacacccaatggattaacaatatttgttcaagccacgacctattttgcggctgtgaaaatccaattaaccacctaaaagctgccctaaaagaaaaatgccaccattcaaaagatattggaattggaacagaccacggagaagatggcgaaaaagacgattttacacttcaacctggagacctcgaagatcttttccgcgtagaagaagaagacgcacggtaagaaaacgattttataaaaagtttttaagaaaaaaactaaaaaaaattaaactaaaccagtggcaaccaactactatacacaaatgccacataaaaggatttttaccattatttcaatgtggtgatggacgccaagaaaataattatatacaatataaagacagctatactccagaaaatgaaccaggaggcggtggatggtcaattcaaaaactatctttaggaattctatataaagaaaacaaagactttcaaaactactggactaaatctaaccgccgcttagtactttgtagatatattggagctagaattatattgtatagacagccttatacagactacttgtttcactattttcatgatcctccaaaaaatgtaaccaaatattactttgcttcttttcacccattgcaaatgcttaaactaaaacatactgtaatagttccaagctttaattcacaaccacacaaacgaaaaccctataaaaaactatacataaaaccaccgaaacttcttaaaaatcaatggtattttcaacaaaatttctctgactacccactcatacacatgacagcctctgctatctcattaacaaactcatacggttcagatagagctcaaaacaacaactgctctatatggatgctaaacacaacattttttcaaaacccatgcacacaatttaaccgcttaccacaaccaacatttggctatcacccaaacaaatcaaactattactgggcactatataaatcaccaacaaacccaaaaagaaaagacgcaatatacttaggacaatctatgcttaatgaaccaggataccccgaacaacaacacacagcccagtcaataactggatggggtaatccattttattaccaatacctactaggagaagaaaaaacctttataacaaacgccacagaagatccagcaacttttatgaaaaaggaaaaactaagtgacaaaattgaaaccactagactaaaagaaacaccaaatgtttttaaagttagatacaatcctttcaaagacaaaggatcaggaaacagaatttactttgtacccaactttacattaacacaccaaacatgggacccaccatcagacccagacactatatttgaaggatttcccttatggctaatgttttggggaatagaagatattttaaaaaaaatgggaaaatgtcctaacctatatgaagactgggtatgtgttatacaaaccaactattttagcacacctgaaaagttttttgtaccacttagtgagtcattcgtacacggacaaggtgcctatgacatagacagagatcatattccacctgcacaatacactaaatggtttccaaaatataaatttcaaaaagaagccattcataatatagttgaaaccgcaccatttgtatgtagacctgatcatgtaaaaaactttcaagctgtaatgcattataactttttctttaagtggggaggcaatccatctccaatggaaccagtcgaagaccccaacagtcaacccatcacaccttatccccctccacagcaactcacagatgaaattactaacccgtacacagacctcaaatcctttatctacccatgggacgtcagacgtgacatgcttacagactcagctgcaaaaagaattaaagacagcacaattgatgacttctctttattcacagatcaagacaaaccatccacagacatcgaactattcaaagaagcacaaacgaaaacaaccccgcaaaaagaaaaagagacattactcctccagctcaagcagctccaacaatacaacaaacttctccgacagcgattcaacaaactaaatatatcattagaggacctataaaccatgttcaaatatttcctactaaaaaaaatcgccgcatgaatagatgggaatatgctgttgaactagaaacagcaaaatggatgaaacgacccccctgtcaaatgatatatgatattcctttttacccttggcttcccccagaacctattgttccaaaagtaaactttgaccttgtaaaaaactttaataaaggccagcattaactcactctcggtgtcagtttatataagtttaaactataacaaacatccatgtcctcccttatacgcatgcgcaaagggggctccgcccccttaaacccccgggggggtaaaccccccctttgcccccccaactcataaatattcataacggaaaccacaaaattagaattgccgaccacaaaccgtcacttacttccccttttaacaatacttccgtttttactaattattattcattaaattaattaataaacagcgtcattcaaaggaggagccacatacctatataactaaccacagtttcgaatggctgagtttatgccgccagacggagacgggagcagaacactgactgccggctgaacttgggcgggtgctgaaggtgagtgaaaccaccgaaatcaaggggcaattcgggcggg

SEQ ID NO: 3431 - protein, 662 aa, Betatorquevirus sp.
MPPFKRYWNWNRPRRRWRKRRFYTSTWRPRRSFPRRRRRRTVRKRFYKKFLRKKLKKIKLNQWQPTTIHKCHIKGFLPLFQCGDGRQENNYIQYKDSYTPENEPGGGGWSIQKLSLGILYKENKDFQNYWTKSNRRLVLCRYIGARIILYRQPYTDYLFHYFHDPPKNVTKYYFASFHPLQMLKLKHTVIVPSFNSQPHKRKPYKKLYIKPPKLLKNQWYFQQNFSDYPLIHMTASAISLTNSYGSDRAQNNNCSIWMLNTTFFQNPCTQFNRLPQPTFGYHPNKSNYYWALYKSPTNPKRKDAIYLGQSMLNEPGYPEQQHTAQSITGWGNPFYYQYLLGEEKTFITNATEDPATFMKKEKLSDKIETTRLKETPNVFKVRYNPFKDKGSGNRIYFVPNFTLTHQTWDPPSDPDTIFEGFPLWLMFWGIEDILKKMGKCPNLYEDWVCVIQTNYFSTPEKFFVPLSESFVHGQGAYDIDRDHIPPAQYTKWFPKYKFQKEAIHNIVETAPFVCRPDHVKNFQAVMHYNFFFKWGGNPSPMEPVEDPNSQPITPYPPPQQLTDEITNPYTDLKSFIYPWDVRRDMLTDSAAKRIKDSTIDDFSLFTDQDKPSTDIELFKEAQTKTTPQKEKETLLLQLKQLQQYNKLLRQRFNKLNISLEDL

SEQ ID NO: 3432 - protein, 102 aa, Betatorquevirus sp.; identical to SEQ ID NO: 3384

SEQ ID NO: 3433 - protein, 55 aa, Betatorquevirus sp.; identical to SEQ ID NO: 3385

SEQ ID NO: 3434 - DNA, 2857 bp, Betatorquevirus sp.
cgggtgctgaaggtgagtgaaaccaccgaaatcaaggggcaattcgggctagttcagtctggcggaacgggcaagaaacttaaaattatttttattacagatgagcgactatgtgaaaccatgcatttacaaccaaaattccattaacacccaatggattaacaatatttgttcaagccacgacctattttgcggctgtgaaaatccaattaaccacctaaaagctgccctaaaagaaaaatgccaccattcaaaagatattggaattggaacagaccacggagaagatggcgaaaaagacgattttacacttcaacctggagacctcgaagatcttttccgcgtagaagaagaagacgcacggtaagaaaacgattttataaaaagtttttaagaaaaaaactaaaaaaaattaaactaaaccagtggcaaccaactactatacacaaatgccacataaaaggatttttaccattatttcaatgtggtgatggacgccaagaaaataattatatacaatataaagacagctatactccagaaaatgaaccaggaggcggtggatggtcaattcaaaaactatctttaggaattctatataaagaaaacaaagactttcaaaactactggactaaatctaaccgccgcttagtactttgtagatatattggagctagaattatattgtatagacagccttatacagactacttgtttcactattttcatgatcctccaaaaaatgtaaccaaatattactttgcttcttttcacccattgcaaatgcttaaactaaaacatactgtaatagttccaagctttaattcacaaccacacaaacgaaaaccctataaaaaactatacataaaaccaccaaaacttcttaaaaaccaatggtattttcaacaaaatttctctgactacccacttatacacatgacagcctctgctatctcattaacaaactcatacggttcagatagagctcaaaacaacaactgctctatatggatgctaaacacaacattttttcaaaacccatgcacacaatttaaccgcttaccacaaccaacatttggctatcacccaaacaaatcaaactattactgggcactatataaatcaccaacaaacccacaaagaaaagacgcaatatacttaggacaatctatgcttaatgaaccaggataccccgaaaaagaaaacacagcccagtcaataactggatggggtaatccattttattaccaatacctactaggagaagaaaaaacctttataacaaccgccacagaagatccagcaacttttatgaaaaaggacaaactaagtgacaacattgaaaccactagactaaaagaaacaccaaatgtttttaaagttagatacaatcctttcaaagacaaaggatcaggaaacagaatttactttgtacccaactttacattaacacaccaaacatgggacccaccatcagacccagacactatatttgaaggatttcccttatggctaatgttttggggaatagaagatattttaaaaaaaatgggaaaatgtcctaacctatatgaagactgggtatgtgttatacaaaccaactattttagcacacctgaaaagttttttgtaccacttagtgagtcattcgtacacggacaaggtgcctatgacatagacagagatcatattccacctgcacaatacactaaatggtttccaaaatataaatttcaaaaagaagccattcataatatagttgaaaccgcaccatttgtatgtagacctgatcatgtaaaaaactttcaagctgtaatgcattataactttttctttaagtggggaggcaatccatctccaatggaaccagtcgaagaccccaacagtcaacccatcacaccttatccccctccacagcaactcacagatgaaattactaacccgtacacagacctcaaatcctttatctacccatgggacgtcagacgtgacatgcttacagactcagctgcaaaaagaattaaagacagcacaattgatgacttctctttattcacagatcaagacaaaccatccacagacatcgaactattcaaagaagcacaaacgaaaacaaccccgcaaaaagaaaaagagacattactcctccagctcaagcagctccaacaatacaacaaacttctccgacagcgattcaacaaactaaatatatcattagaggacctataaaccatgttcaaatatttcctactaaaaaaaatcgccgcatgaatagatgggaatatgctgttgaactagaaacagcaaaatggatgaaacgacccccctgtcaaatgatatatgatattcctttttacccttggcttcccccagaacctattgttccaaaagtaaactttgaccttgtaaaaaactttaataaaggccagcattaactcactctcggtgtcagtttatataagtttaaactataacaaacatccatgtcctcccttatacgcatgcgcaaagggggctcagcccccttaaacccccgggggggtaaaccccccctttgcccccccaactcataaatattcataacggaaaccacaaaattagaattgccgaccacaaaccgtcacttacttccccttttaacaatacttccctttttactaattattattcattaaattaattaataaacagcgtcattcaaaggaggagccacatacctatataactaaccacagtttcgaatggctgagtttatgccgccagacggagacgggagcagaacactgactgccggctgaacttgggcgggtgctgaaggtgagtgaaaccaccgaaatcaaggggcaattcgggcggg

SEQ ID NO: 3435 - protein, 662 aa, Betatorquevirus sp.
MPPFKRYWNWNRPRRRWRKRRFYTSTWRPRRSFPRRRRRRTVRKRFYKKFLRKKLKKIKLNQWQPTTIHKCHIKGFLPLFQCGDGRQENNYIQYKDSYTPENEPGGGGWSIQKLSLGILYKENKDFQNYWTKSNRRLVLCRYIGARIILYRQPYTDYLFHYFHDPPKNVTKYYFASFHPLQMLKLKHTVIVPSFNSQPHKRKPYKKLYIKPPKLLKNQWYFQQNFSDYPLIHMTASAISLTNSYGSDRAQNNNCSIWMLNTTFFQNPCTQFNRLPQPTFGYHPNKSNYYWALYKSPTNPQRKDAIYLGQSMLNEPGYPEKENTAQSITGWGNPFYYQYLLGEEKTFITTATEDPATFMKKDKLSDNIETTRLKETPNVFKVRYNPFKDKGSGNRIYFVPNFTLTHQTWDPPSDPDTIFEGFPLWLMFWGIEDILKKMGKCPNLYEDWVCVIQTNYFSTPEKFFVPLSESFVHGQGAYDIDRDHIPPAQYTKWFPKYKFQKEAIHNIVETAPFVCRPDHVKNFQAVMHYNFFFKWGGNPSPMEPVEDPNSQPITPYPPPQQLTDEITNPYTDLKSFIYPWDVRRDMLTDSAAKRIKDSTIDDFSLFTDQDKPSTDIELFKEAQTKTTPQKEKETLLLQLKQLQQYNKLLRQRFNKLNISLEDL

SEQ ID NO: 3436 - protein, 102 aa, Betatorquevirus sp.; identical to SEQ ID NO: 3384

SEQ ID NO: 3437 - protein, 55 aa, Betatorquevirus sp.; identical to SEQ ID NO: 3385

SEQ ID NO: 3438 - DNA, 2855 bp, Betatorquevirus sp.
cgggagccggaggtgagtgaaaccaccgtagtctaggggcaattcgggctagatcagtctggtggaacgggcaagaaacttaaaataatatttgttttacagatgagcaaatttctacaaccaccactttatgagaaaagagctctagaaaatcaatggataaacaccatatttaacacccacgacttattctgcggatgcaacaaaccaattgaacacctagaggccattttaaaacctacaaaatgcctccatttcggcgccgccgcttctacagaaactggtggaactacaaaagaccaagatcttactatcgacgaaggagatttagaaaatctattttcggaagaaaacgacgtcgacgaagggtaagaagaaaaaaattttatagacaaaacaaaaaacttaaaactataaaaataaaccaatggcaacctagttctattaagaaatgtagaatagaaggatacttatgcttatttcaagcaggacctggaagatatggcaataactatgctttatggaaagaatctttctttccacaacattatgcgggaggaggaggatggagtattcaacaactatctttaggaaacctatttactcaacataaagaatatatgaactattggactaaaagtaatgttagaatgaatatgtgtagatactatggctgtaaaattactttgtttagagaaccgtatacagactatgtttttaactatatgcaacatataccaaaaactgtaactaatacattttactgttcctttcaccctataagactactaactcacaacagaaaaaaaataataccaagctttcaaacacagccacataaaagaaaaccatacaaaactatttgggtaccaccaccaaaattaatgaaaaaccaatggttttttcaacaacaattagcagactttccactactaacctttgtaacatctgctatatcacttacaggaatgtttggaagctgtaaaacaattagcaacaatataacattttttagtttagacactgaacaattcccatcaccactattccaatacaaagattctacaccaccaaaatggggttacaaatacggaacaacctacctttatggtatacaacaaccaaatcacattttcactgaaaataccaaaggatcacttacatatttaggaaatacaatgccacaagaaccaggaacacatatagcagtactaaataacaccacagtaacagacaaagaaaactggggaaatccattttactgggactacttgtcaggagacgctgtactagtcacgttaactgacaatccctcagaactacttaaaaaaaagcaagagaaattaccagcatcatcagaaaaaaaaacccattatatatttaaatgtagatacaacccatatcatgacaaaggaacaggtaacacagtatacctaatacctaactatgataaaacacaaacaaactggaatcccactaaagacacagacttaagatgggacaatctaccactatggctagtactatggggcctagaagacatagtaaaaagaataggtaaatgccacaacctagacatggactggacactagttataagaagcaactacatagtaccacctcaaaaagaatatgtaccacttagttatgattttatacacggtagaggaccatacgacacagaaagagaatttatgacagctgacgaccttacacattggtatcccagatacaaatatcaaagacaatgcatagacacatttattagatcaggcccatcagtagccacaggagacaactgtccaaatatacaagctaaaataaaatacaatttcttttttaagtggggcggaatctctgatcctcaagaaacaatctttgaccccaacagtcaacccgtcacaccttcgcccaataacttcaacatcctcaatgaaatcattgatccaacaacagacattacaaaagaaatatacccatgggactttagaagacactatcttacagaggcagctgcaaaaagaattacagaaagcgaaactgatgaccaatttatgttcacagatggaaagcaaacttcaacagacctgcaactccaaacagaaacacaagagaaagagaccgagaaaacacaaaaagcgccactattccagcagctccagcagctccaacaatacaaccaacaactccagcagcgactccgaaacctaaagcaattatctacggacctataaataaagtagaactgtttaaaactaaacgtaaaaacaggagactaactccatacgaaatagaaacagatttacaaatagcaaaatggttaaaaagacctgtaagacatttttttaatgataccccttactacccatggctgccaccagcaccacttgtacaatttgaccttgtaaaaggatttaataaaggccaacattaattcacttgaggtgtccatttatttaagttacaacttatataaaccaacaccgcctccctaatacgcaggcgcacaagggggctccgcccccttaaacccccgtccctaatacgcaggcgcacaagggggctccgcccccttaaacccccggggggggtaaaccccccctaacccccccaaactaattaatattcaacaggaaaaccacctaattagaattgccgaccacaaaccgtcactaacttccctttttttacaaagcttccccttttactaattattattcattacattaattaataatcaccgtaattccggggaggaaccaacactctatataaacaactatacttccgaatggctgagtttatgccgccagacggagactgaatcgcatcagagacttcaggctgatcttggg

SEQ ID NO: 3439 - protein, 662 aa, Betatorquevirus sp.
MPPFRRRRFYRNWWNYKRPRSYYRRRRFRKSIFGRKRRRRRVRRKKFYRQNKKLKTIKINQWQPSSIKKCRIEGYLCLFQAGPGRYGNNYALWKESFFPQHYAGGGGWSIQQLSLGNLFTQHKEYMNYWTKSNVRMNMCRYYGCKITLFREPYTDYVFNYMQHIPKTVTNTFYCSFHPIRLLTHNRKKIIPSFQTQPHKRKPYKTIWVPPPKLMKNQWFFQQQLADFPLLTFVTSAISLTGMFGSCKTISNNITFFSLDTEQFPSPLFQYKDSTPPKWGYKYGTTYLYGIQQPNHIFTENTKGSLTYLGNTMPQEPGTHIAVLNNTTVTDKENWGNPFYWDYLSGDAVLVTLTDNPSELLKKKQEKLPASSEKKTHYIFKCRYNPYHDKGTGNTVYLIPNYDKTQTNWNPTKDTDLRWDNLPLWLVLWGLEDIVKRIGKCHNLDMDWTLVIRSNYIVPPQKEYVPLSYDFIHGRGPYDTEREFMTADDLTHWYPRYKYQRQCIDTFIRSGPSVATGDNCPNIQAKIKYNFFFKWGGISDPQETIFDPNSQPVTPSPNNFNILNEIIDPTTDITKEIYPWDFRRHYLTEAAAKRITESETDDQFMFTDGKQTSTDLQLQTETQEKETEKTQKAPLFQQLQQLQQYNQQLQQRLRNLKQLSTDL

SEQ ID NO: 3440 - protein, 89 aa, Betatorquevirus sp.; identical to SEQ ID NO: 3372

SEQ ID NO: 3441 - protein, 62 aa, Betatorquevirus sp.; identical to SEQ ID NO: 3373

SEQ ID NO: 3442 - DNA, 2855 bp, Betatorquevirus sp.
cgggagccggaggtgagtgaaaccaccgtagtctaggggcaattcgggctagatcagtctggtggaacgggcaagaaacttaaaataatatttgttttacagatgagcaaatttctacaaccaccactttatgagaaaagagctctagaaaatcaatggataaacaccatatttaacacccacgacttattctgcggatgcaacaaaccaattgaacacctagaggccattttaaaacctacaaaatgcctccatttcggcgccgccgcttctacagaaactggtggaactacaaaagaccaagatcttactatcgacgaaggagatttagaaaatctattttcggaagaaaacgacgtcgacgaagggtaagaagaaaaaaattttatagacaaaacaaaaaacttaaaactataaaaataaaccaatggcaacctagttctattaagaaatgtagaatagaaggatacttatgcttatttcaagcaggacctggaagatatggcaataactatgctttatggaaagaatctttctttccacaacattatgcgggaggaggaggatggagtattcaacaactatctttaggaaacctatttactcaacataaagaatatatgaactattggactaaaagtaatgttagaatgaatatgtgtagatactatggctgtaaaattactttgtttagagaaccgtatacagactatgtttttaactatatgcaacatataccaaaaactgtaactaatacattttactgttcctttcaccctataagactactaactcacaacagaaaaaaaataataccaagctttcaaacacagccacataaaagaaaaccatacaaaactatttgggtaccaccaccaaaattaatgaaaaaccaatggttttttcaacaacaattagcagactttccactactaacctttgtaacatctgctatatcacttacaggaatgtttggaagctgtaaaacaattagcaacaatataacattttttagtttagacactgaacaattcccatcaccactattccaatacaaagattctacaccaccaaaatggggttacaaatacggaacaacctacctttatggtatacaacaaccaaatcacattttcactgaaaataccaaaggatcacttacatatttaggaaatacaatgccacaagaaccaggaacacatatagcagtactaaataacaccacagtaacagacaaagaaaactggggaaatccattttactgggactacttgtcaggagacgctgtactagtcacgttaactgacaatccctcagaactacttaaaaaaaagcaagagaaattaccagcatcatcagaaaaaaaaacccattatatatttaaatgtagatacaacccatatcatgacaaaggaacaggtaacacagtatacctaatacctaactatgataaaacacaaacaaactggaatcccactaaagacacagacttaagatgggacaatctaccactatggctagtactatggggcctagaagacatagtaaaaagaataggtaaatgccacaacctagacatggactggacactagttataagaagcaactacatagtaccacctcaaaaagaatatgtaccacttagttatgattttatacacggtagaggaccatacgacacagaaagagaatttatgacagctgacgaccttacacattggtatcccagatacaaatatcaaagacaatgcatagacacatttattagatcaggcccatcagtagccacaggagacaactgtccaaatatacaagctaaaataaaatacaatttcttttttaagtggggcggaatctctgatcctcaagaaacaatctttgaccccaacagtcaacccgtcacaccttcgcccaataacttcaacatcctcaatgaaatcattgatccaacaacagacattacaaaagaaatatacccatgggactttagaagacactatcttacagaggcagctgcaaaaagaattacagaaagcgaaactgatgaccaatttatgttcacagatggaaagcaaacttcaacagacctgcaactccaaacagaaacacaagagaaagagaccgagaaaacacaaaaagcgccactattccagcagctccagcagctccaacaatacaaccaacaactccagcagcgactccgaaacctaaagcaattatctacggacctataaataaagtagaactgtttaaaactaaacgtaaaaacaggagactaactccatacgaaatagaaacagatttacaaatagcaaaatggttaaaaagacctgtaagacatttttttaatgataccccttactacccatggctgccaccagcaccacttgtacaatttgaccttgtaaaaggatttaataaaggccaacattaattcacttgaggtgtccatttatttaagttacaacttatataaaccaacaccgcctccctaatacgcaggcgcacaagggggctccgcccccttaaacccccgctccctaatacgcaggcgcacaagggggctccgcccccttaaacccccgggggggtaaaccccccctaacccccccaaactaattaatattcaacaggaaaaccacctaattagaattgccgaccacaaaccgtcactaacttccctttttttacaaagcttccccttttactaattattattcattacattaattaataatcaccgtaattccggggaggaaccaacactctatataaacaactatacttccgaatggctgagtttatgccgccagacggagactgaatcgcatcagagacttcaggctgatcttggg

SEQ ID NO: 3443 - protein, 662 aa, Betatorquevirus sp.; identical to SEQ ID NO: 3439

SEQ ID NO: 3444 - protein, 89 aa, Betatorquevirus sp.; identical to SEQ ID NO: 3372

SEQ ID NO: 3445 - protein, 62 aa, Betatorquevirus sp.; identical to SEQ ID NO: 3373

SEQ ID NO: 3446 - DNA, 2854 bp, Betatorquevirus sp.
caggtgccgaaggtgagtgaaaccaccgaagtcaaggggcaatatgggctagatcagtctggcggaacgggcaagaaacttaatgtatactttctttacagatatgacacattacttaaaaacaccacaatacaatggacgcgcaatggaacttcaattaatgaatacaattattggaaaccatgatctctgctgtggatgcatgacaccagttcttcatattaaagaaataatcaacaccttttcatatacaccatgcccccgtactactggagacaaagaagaccaacatggagacaaagaaactaccgacgctttagaaggcctagaagatggagaattagatcgcttgttcgccgccgatggagaagacgacgaagggtaagaaacaaaagactgtttttccgacgaaaaaaactgactcgactgactttaaaagaatggcaacctaaaaaaattaaaaaatgttccataaaaggaatactacctgcattcatatgcggaaaatcaagaatagcaaacaactatatattattttcagaaagcatagtaccggtgggagaacccggaggaggggcctggtcaatactacaaataaacttaagagtattatatgaccaatttataaaatttaaaaactggtggactgctagcaaccaaggcctaccactaacaagatacttaggaatgaaagtgacattctacaaaactcaatttgtagactacatagttataccacaactatgccctccattttctgtaacaagagacaactacctaaacatacatccagttagaatgttaatgaacagacacaaaattataataccacaaagacaaaaaggaaagaaaaactacattaaaaaatggtttagaccacctgacttaatgcaaaacaaatggtatttccaacaagacatagtaaacataccacttatagtactacacatatcagcagcaagccttgaccaatatagtataccagaaaaccaaatatcaacaaacataacactttggtctctaaacacagacttctttagaaacaaccaattcacaggttatgaagactcaggatacataccaaaaacatttggaacacaaaactactatttatacactgaaggtaatggtactactcacccaaagaacttcagtcaaatgataccattaaaaaacacaacaacatacacaaacggacaaaaagcagcaaccttggcaaagtggaaagacaaaacttgttggggtaatccatttacacaaaaccacgctagtccagatgtaccaatttactacaacaacacaacacccaacgaaaacaactacagcacaccacaaacattcaccccattacatgaactctacttccaatgcagatacaatccagaaaaggacacaggcataggtaacaaagtattttttaaatcaaacaaactaaaacaaggagaaattgacactattccagacaaagacgaaatagttataacagactttccactatggttaatattttactcttggattagctggatacaaaaaagcaaacctatacaacatataatgaatgactactactttattgttataacaccatttatagaaccaaaaagaaaaagctacctatttttagacacttactttgtacagccaataacaaacagattaacagaaacagaaaaacaacactggtatccacaaactggataccaaacagatgtaatttttagctttgcacaaacaggcccagcaacacctaaaatagatagatcacaatcaatacaagcacaatttaaatacaatgtaaaactaaaatggggcggatgtcctgcaccaatggaactaataactgatccatcattacaggacaaatttcccatccccaatacaatcttcaaaacacttgagatccaaaatccagaaacaaacaaaaggactctactgtacgacttcgacgaaagacatgacggacttacggacagagctgcaaaaagaattaaaacagaacaaatatttgaaacatcttttacaggacaactaccaacagatcccaatatcaggatccaaacacaagaaacgacctcatcgtcggaggaagaaagcgaagtatcactcaaggaggagctcaagctcctcaagcgaaaaaacaagcagctcagaaacaagctcctcagactaacatcttactaaaaccaaaaattatatacgctccatacactatgtttggagacaaagccactaaaaaactaacacctattaagggtaaaagttgggaggcagaacttcagttagctaaaatgttcaaaagaccacttagaacttatgaagaggaccccccatattatccctgggttgttcctgaaccagttgtaaactttcacttaaattttaaagaataaaggccagcattatttcacagtcggtgtccgtttctttaagttaaaacttatataaacatccattacctccctaatacgcaggcgcacaagggggctccgcccccttaaacccccaagggggctccctaatacgcaggcgcacaagggggctccgcccccttaaacccccaagggggctccgcccccttacacccccaagggggctccgcccccttacacccccttattaatattcaacaggaaaaccacctaatttaaattgccgaccacaaaccgtcttttatttcctcattcacacaatacttcctctttacctaattattattcattacattaattaataatcaccatcacaaagggcggagactgctatctatataactaactacacagacgaatggctgagtttatgccgccagacggaggactcatcacttcagtgactgaggactgatcttggg

SEQ ID NO: 3447 - protein, 642 aa, Betatorquevirus sp.
MPPYYWRQRRPTWRQRNYRRFRRPRRWRIRSLVRRRWRRRRRVRNKRLFFRRKKLTRLTLKEWQPKKIKKCSIKGILPAFICGKSRIANNYILFSESIVPVGEPGGGAWSILQINLRVLYDQFIKFKNWWTASNQGLPLTRYLGMKVTFYKTQFVDYIVIPQLCPPFSVTRDNYLNIHPVRMLMNRHKIIIPQRQKGKKNYIKKWFRPPDLMQNKWYFQQDIVNIPLIVLHISAASLDQYSIPENQISTNITLWSLNTDFFRNNQFTGYEDSGYIPKTFGTQNYYLYTEGNGTTHPKNFSQMIPLKNTTTYTNGQKAATLAKWKDKTCWGNPFTQNHASPDVPIYYNNTTPNENNYSTPQTFTPLHELYFQCRYNPEKDTGIGNKVFFKSNKLKQGEIDTIPDKDEIVITDFPLWLIFYSWISWIQKSKPIQHIMNDYYFIVITPFIEPKRKSYLFLDTYFVQPITNRLTETEKQHWYPQTGYQTDVIFSFAQTGPATPKIDRSQSIQAQFKYNVKLKWGGCPAPMELITDPSLQDKFPIPNTIFKTLEIQNPETNKRTLLYDFDERHDGLTDRAAKRIKTEQIFETSFTGQLPTDPNIRIQTQETTSSSEEESEVSLKEELKLLKRKNKQLRNKLLRLTSY

SEQ ID NO: 3448 - protein, 108 aa, Betatorquevirus sp.
LAERARNLMYTFFTDMTHYLKTPQYNGRAMELQLMNTIIGNHDLCCGCMTPVLHIKEIINTFSYTPCPRTTGDKEDQHGDKETTDALEGLEDGELDRLFAADGEDDEG

SEQ ID NO: 3449 - protein, 59 aa, Betatorquevirus sp.
MFGDKATKKLTPIKGKSWEAELQLAKMFKRPLRTYEEDPPYYPWVVPEPVVNFHLNFKE

SEQ ID NO: 3450 - DNA, 2852 bp, Gammatorquevirus sp.
cgggagccgaaggtgagtgaaaccaccgtagtctaggggcaactcgggcggctgcagtctagaggaacgggcaagattcttaatgcgtacgctttttttacagatacatgtcctccttctacagaaaacaaacctttttaaatacacatgcaaaagaacaagagtggattcaaaatgtggagtgctcacataatttatggtgtagctgtactaactggcttgctcatttccttgatactacttttccttctgattcgagcaatcgtcagagaacaattgaagaacttctaaatcaagcacacaaacaaattagagcactaccagcccttccactcaaaccatggtttggttctggagaaggagacgccgctggccctggaaacgccgatcctaccgaaaacgaaaccgccgccgtcgataccgccgcagatcttggtatcccagaagaagaactactaaatatacttcaacaaacagaagaagacgaaaaagaaaacgcagggtaagaaaaaaaaaatctactactaaactaatacaatggaatccagaaagcataagaacttgtaaaattataggactagcacccttaatactagggtgcaatggcagacaaatgtataactacatatactggcaagactattggacacatcctaaatgtgccgccggaggaggcttctctgtatataaattttctttagcattactatatgaagactacaaaaaactaagaaatgtatggacatactctaactgtgaatatgatctttgtagatataaaaaaaccactgtaaccttttatagacaccaagaagtagactttgttgtatactataccagaaatccacctatggttgtagatcaatggacatacatgagcacacatccacaatttctattactaagaaaacacaaactactaatacccagtatgagaactaaaccacatggaaaacgaagtgttaaaattaccattaaaccacctagactagctattaacaaatggttttttcaaaaacactttcaagacacaggcctattcatgctacaagcagctgcctgtgatttagactacagttaccttggaagtaacagtagaaatagactactaacatttacagcactaaacccagaattttggaaaaatccagactgggcaaacccaaatacaccatactcatggtcagttactcctccaccaagcacaggcatgaaagcaaaaacacttattaataatcaacttcaatcatacacaataccagcaaactttaacactacttcaggaacagtacacgaaaaactaaaatgggaaacaggaatatttaacaacaaatttctaaacattcaatactgggaaacaaccccaacaccaccaaataaaataccaacaatacaagtacaatacaacccaatggtagacaaaggaaaaggtaacattgtatggtttgtaagtactctatccacctcctgggctgtaccaacaacagaccctttattagtatggagagataaacctctttggctaatattttttggagtacaagactacatattaaaagctaaaggctcttcttctgctttaagagattatatttgtgtaatatacagtaaagcaatatttcctgtgcttaaccgagttgtactaataggaaacaatttcttaaatggtttaactgaatgtggtgtaacaccaacaggaactaatattgataagtggtttttaactttagaagaccaaaaccaagcattaaatgaaattgttaaatcaggtccctttgttcagaacatggacggttttagatgctcctgggaactaaaaatgaaatatagatctgtatggcaatggggaggagctagacctccactaaagcctgcctgtgatccttatcaacaggaaatctttcccttacccgatactgtcaaacaatcaatacaaatcattgatccgtccaagcaaatcccagaagcattattccatagctgggattacagaagaggacaaattactaaatcagctattaaaagaatgcaagagaacctctcagatgcagactcttcttcaacaggctcagaagaaccagaaaagaagaaagcaaaaagaggagagccgccatgcttccacgaaaaagaccactcactcctcgagacggtacaaagtatctgccaaaaaacccaagaaacaccaacagaccagcagctccagcagctccagcagcagcaactcaacaaaaacatccaaatcctcaaactcatctcagagttaaaacaacgacaattaaatttacaattaatgacaggcctaatggagtagaactatttcctacaaaaccaaaaaatcctgtatttgaagggtggggaaaaataatagaagagagatgtgctaaagcttttcatagaccacctagaaaatatatgtatgatacacctttttatccatatgtaattccagaacctaaagtaaactttcacttgaaatttaaagactaggcccacaatgtacacttagtaaaggatgtttattaaagtttgctttgttttaaaacacgcccactttgtatacgtcatgaataaatttaaataaataatttttaaccggcggagggtttggggggccccccgacgtcactaactccacccccgccgccatcttgggtgcggctgggcggttcttaaaatggcgggaaccaatcatattaaaacttcactatccaattaaaacaccacacgtcactaaaactaggaggagcctacaacactatataactaactacactgacgaatggctgagtttaccccgctagacggtgctgagcacaacgagcgcagcgaggagagactcagcagcagctggg

SEQ ID NO: 3451 - protein, 656 aa, Gammatorquevirus sp.
MVWFWRRRRRWPWKRRSYRKRNRRRRYRRRSWYPRRRTTKYTSTNRRRRKRKRRVRKKKSTTKLIQWNPESIRTCKIIGLAPLILGCNGRQMYNYIYWQDYWTHPKCAAGGGFSVYKFSLALLYEDYKKLRNVWTYSNCEYDLCRYKKTTVTFYRHQEVDFVVYYTRNPPMVVDQWTYMSTHPQFLLLRKHKLLIPSMRTKPHGKRSVKITIKPPRLAINKWFFQKHFQDTGLFMLQAAACDLDYSYLGSNSRNRLLTFTALNPEFWKNPDWANPNTPYSWSVTPPPSTGMKAKTLINNQLQSYTIPANFNTTSGTVHEKLKWETGIFNNKFLNIQYWETTPTPPNKIPTIQVQYNPMVDKGKGNIVWFVSTLSTSWAVPTTDPLLVWRDKPLWLIFFGVQDYILKAKGSSSALRDYICVIYSKAIFPVLNRVVLIGNNFLNGLTECGVTPTGTNIDKWFLTLEDQNQALNEIVKSGPFVQNMDGFRCSWELKMKYRSVWQWGGARPPLKPACDPYQQEIFPLPDTVKQSIQIIDPSKQIPEALFHSWDYRRGQITKSAIKRMQENLSDADSSSTGSEEPEKKKAKRGEPPCFHEKDHSLLETVQSICQKTQETPTDQQLQQLQQQQLNKNIQILKLISELKQRQLNLQLMTGLME

SEQ ID NO: 3452 - protein, 132 aa, Gammatorquevirus sp.
MSSFYRKQTFLNTHAKEQEWIQNVECSHNLWCSCTNWLAHFLDTTFPSDSSNRQRTIEELLNQAHKQIRALPALPLKPWFGSGEGDAAGPGNADPTENETAAVDTAADLGIPEEELLNILQQTEEDEKENAG

SEQ ID NO: 3453 - protein, 124 aa, Gammatorquevirus sp.
MLPRKRPLTPRDGTKYLPKNPRNTNRPAAPAAPAAATQQKHPNPQTHLRVKTTTIKFTINDRPNGVELFPTKPKNPVFEGWGKIIEERCAKAFHRPPRKYMYDTPFYPYVIPEPKVNFHLKFKD

SEQ ID NO: 3454 - DNA, 2852 bp, Betatorquevirus sp.
cgggtaccgaaggtgagtgaaaccaccggagttaaggggcttaatgggcaaatgcagtctaacggaacgggctacaaacttaaaaataccttctctttcagatgagcaaacagctacaaaatacaatttactacggaaaagcacttgaaaatcaatggagaaacaacatatttagctcacacgacttaatgtgtggctgcaacaatcctattttacacttactaattattctaaacagagaaggaaacgcacctaaaccagaagaagatattaaaaatatactatgccttattactggagaacccgataccaaaactggagaaccagaagaagacgttttaaaagaaggagacctagacatacttttcaaagaagactttggagaagacgatggagacgaccccggaacttctgggtaagaagacgtaaaaaacttaaatatatacctttaaaacaatttcaacctgatgtaataagacgctgtacaattaaaggcactgtatgtctatttcaaggacatccttttagagcaattaacaattatattcaatatatatactctaaagtccctgaaaatgaacccggagggggaggatggacaataatgactgaaagcttaacaagcttatgggaagactgggaacatttaaaaaatgtctggacaaacagtaatgctggcctaccacttgtaagatacggaggagttaccttacttttttatcaagatccatatacagattacattgtagaaattcataactgttaccccatgacagataccaaatatcaacatgcagatttatcccccagtagaatgctacaaaaaagaaaagtaattgtagttccaagtatggaaactaaaaagagaagaaaaaactataaaaaagtaaaagtacctcctccgtctcaaatgcaaaacaaatggtattttcaaagagatatttgtagaattcctcttatacttatagctgctacagcagtaagcttaagatatccctttgccgcaagcaatgcaaagagtaataattatacatttcactgtttaaacacaaccttttttcaaagacacgactttgataacttttctgcaacaacaggttactttcctaaaccaaacacttatatgtactcaagtaacacacacaccaccaaaaaaccaacaaaaaaaacagaattagtatacttaggagacacaaaagatatgaaacaaggtacaggaatagaaagaaatcagtggggaaatcctttctttcatcactatctagatggtactttacctatatggatatctacaaagcaaccatcacaactaacagaatcactagaagacacagacctaacagacttaacacaagagctaataattaaagtgagatacaatccagaaaatgacacaggagcagcaaacacaatatacttagtcccaaattaccaaccaggagcatgggatataccacaaaataaagacttagttctagatggctttccactatataatttaatttggggctataaagactggcaagaaaaaataaaagtagcaacaaatatagacaatgcttggatattagttatacaaacagatcaatttgatcaacccctaccagcatatgtaattttagactcaagttttatagaaggatttggaccataccacactgaacctatacctaggagacacatacaacactggtcacctaaatatacttttcaacaaaaatcagcaaatgacttaggtatttctggccccggagcacctagaccaccatatgataactacatgcaagctaaaatgagatacttttttcacatgaaatggggagggtgccctagaactttagaaaaaccatatgatccttgttcacagccaaactggactatacccagtaaccagcatgaaggacttcaaatccagaacccagaaactatgccacaaacagaactacaaaagtgggactgggaaggagactatgttaaacaaaaagctattaaacgaatacaagaatacacaaaaactgatgaaactttgcaaatccctacagagtccagacacaatgttccagcactacaagaaacatccaaagagatcagctcgacagactcagaaacggagacggaagaagagcaaacatcactccaacaacagatcagaaacctcaagcgaaagcagctacagctcaagcgacacctgctcaagcgactaaaaatccaaaatttagaataataaaaagtaaatacaaagcagaattatttcctactcctaaaaagcatgtaaatagacgctttcacccatgggaattacaaacagaaaaagaaatagcacaaataatgaaaagacctatgagacacttttttcatgattttccccattacccatatcttgtacctgaacctcgtgtaaactttttgctaaactacaaataaacaaggccctaattttcacttagtggtgtctgtttctttaagttaaccttaataagcaaactccgcctccctaaattagggcgccaaaagggggctccgcccccttaaaccccaagggggctccgcccccttataccccctagggggctccgccccctaacaccccctaataaatattcatacaggaaaccacaaaattagaattgccgaccacaaatattcatacaggaaaccacaaaattagaattgccgaccacaaacgaatatgctaattaacttccctaaattacacctctacttccctaaaaattaattagtaaacaccatcacactgggaggagccaacacactataaaattaagtacacttccgaatggctgagtttatgccgttagacggagacgagaaacttctcggctgcatttggg

SEQ ID NO: 3455 - protein, 646 aa, Betatorquevirus sp.
MPYYWRTRYQNWRTRRRRFKRRRPRHTFQRRLWRRRWRRPRNFWVRRRKKLKYIPLKQFQPDVIRRCTIKGTVCLFQGHPFRAINNYIQYIYSKVPENEPGGGGWTIMTESLTSLWEDWEHLKNVWTNSNAGLPLVRYGGVTLLFYQDPYTDYIVEIHNCYPMTDTKYQHADLSPSRMLQKRKVIVVPSMETKKRRKNYKKVKVPPPSQMQNKWYFQRDICRIPLILIAATAVSLRYPFAASNAKSNNYTFHCLNTTFFQRHDFDNFSATTGYFPKPNTYMYSSNTHTTKKPTKKTELVYLGDTKDMKQGTGIERNQWGNPFFHHYLDGTLPIWISTKQPSQLTESLEDTDLTDLTQELIIKVRYNPENDTGAANTIYLVPNYQPGAWDIPQNKDLVLDGFPLYNLIWGYKDWQEKIKVATNIDNAWILVIQTDQFDQPLPAYVILDSSFIEGFGPYHTEPIPRRHIQHWSPKYTFQQKSANDLGISGPGAPRPPYDNYMQAKMRYFFHMKWGGCPRTLEKPYDPCSQPNWTIPSNQHEGLQIQNPETMPQTELQKWDWEGDYVKQKAIKRIQEYTKTDETLQIPTESRHNVPALQETSKEISSTDSETETEEEQTSLQQQIRNLKRKQLQLKRHLLKRLKIQNLE

SEQ ID NO: 3456 - DNA, 2852 bp, Alphatorquevirus sp.
ttcacttgtcggtgtctacctcttaaggtcgtcaaggggcaattcgggctcgggactggccgggccccgggcaaggctcttaaaatgcgcttttctcgaatttacagagcgaaaaggaaagtgcttctgccagctttgccagcttcacagagcacacctgccatgagctggttccccccggtgcataatgccgccggcagagaaagaaactactgggaatgctgttttagggcgcacgcatgtttttgtggttgtggcaatttcattcgccaccttaatcttctggctgatcgttatcacttcgacccgccggcacctccaccaggaggtcccccgccgggaccgcggccagcactgagagcgctccctcccgtcccgggcgaccccgccgatccccctaacccaggcccgcaatggcctggggctggtggcgacgccggcgctggggcgcccgccgctggaggcgcagaaggaggcgccgccgaccagtatggagacgccgacctcgacgccctgttcgccgccgtcgaagaagacaacgaacagtaaggaggcgaaggggtcgctacactagacgcaggcgcgggtggggacgtagacggactgtcagacgcaggagacgcaaaaaactttacctggctcaatggaacccgcccatagtaaaacgctgctttattaaaggggctctacccctcatactgtgcgggtctcccagggccaacatgaactatgccatgcactgcgaagacagcaccccgcagcccgagccctttggaggcggcatgtccacagtaacattcagcctactggtactgtatgaccagcacgagagacaccttaaccgctggacgttccccaacgaccagctagacctggttagatacaaacacgccaagtttagattctacaggagcaaagacactgactttatagtaacctttaacataaagccccccatgaaaatgaacgagactacctcacccaacgcgcacccaggaatgctaatgcaaatgaaacacaaaatactaattcccagctttcaaacaagaccaggggggcgcagatacgtttctattaaaatagggcctcccaaactgtttgaagacaagtggtatcctcaggcagacttttgcaaggttccccttgtctgtttaaccgcaaccgcatgtgacttcagacatccgttctgctcaccacaaacgaacaatccttgcaccaccttccaggtgttgcgagagcagtataacaaagtaataggcttccccatgaaaggggaagaggcctaccaagactttgaaacatggctatatgagtctgggggccactatcaaacctttcaaactgaagctcaatttagagtcccccaacatacaccagatggctgtgacaatacaaataaacaaaagtggactgacacatggtcaggtgtaaacggaatttaccaacgaaaaacagacagtaactatggctaccactcatttcaagttaaaggcaaaaaaaacgatataattagcagaagagacatacagtttagttgggagactaaatttacaaacaacgcaacccacattaacgccacatggcaaccaggtcactttaaacaatatgagtaccacctggggtggttcagtccaatatttataggccccaacagatacaatgtacaatttcgcccagcatactatgatgttacctacaatccctttaatgacaaaggcaaaggtaacatggtgtggttccaatacctcacaaaaccagacacagagtttgaccctgtacagtgtaaatgtgtacttacagacatacccctctgggccgcgttttttggctacccagactacatagagagccagctaggtccctttcaggaccacgaaaccgtaggcatagtgtgctttgtgtgtccctacactcagccacccatgtacaaacctggcaaagttcaatgtggctatgtattttatgacaccaactttggaaacggcaagatgccctcaggactcggacagatacccgtatactggcagagcaggtggcgaccgtacctaaagtggcaactacaagtcatgaatgacatctgcaaaactggaccgtttagctacagagacgaactgaagcaggcgcagctgtgtgccatgtacagttttaaatttcttttcgggggcgacttactgtatccacagatcattaaaaacccctgtggagactccggagtgccttccagtcccagtagacagcctcgcagcgtacaagtcacgaacccgctctccatggcaccccagttcatcttccacaaatttgacagcagacgtgggttctatagctcagcttctctcaaaagaatgctacaacaaccaaaagatgatgaactctatcttacaaaatcaaaattccctcgcttgcttacagccctacaagcagaccaagggcaagaagacagcttcagttcacaggaagcaagcgagcagtcctcgcaagaagagaaagaagcagaagccccccaaacgcagacgcaaatacagcagcagctcagacagcagctcaagcagcaaatccaactcagaaaccaactgcagctcgtcatgttccaactctcccgcacacaagccaatttacatttaaacccactatctttagcacacctcacataaagtatgatatgtttcaaggcaaatttatccgtcctcccaccaaggaggactggcagtgcgagtacgaggcctgcagggcgtgggatagaccccctagaacccacctaacagacaaaccctactacccctggatgccccctcctaaacccaagttctctgtaacgtttaagcttggcttcaaataaacaaggccgtgggagt

SEQ ID NO: 3457 - protein, 745 aa, Alphatorquevirus sp.
MAWGWWRRRRWGARRWRRRRRRRRPVWRRRPRRPVRRRRRRQRTVRRRRGRYTRRRRGWGRRRTVRRRRRKKLYLAQWNPPIVKRCFIKGALPLILCGSPRANMNYAMHCEDSTPQPEPFGGGMSTVTFSLLVLYDQHERHLNRWTFPNDQLDLVRYKHAKFRFYRSKDTDFIVTFNIKPPMKMNETTSPNAHPGMLMQMKHKILIPSFQTRPGGRRYVSIKIGPPKLFEDKWYPQADFCKVPLVCLTATACDFRHPFCSPQTNNPCTTFQVLREQYNKVIGFPMKGEEAYQDFETWLYESGGHYQTFQTEAQFRVPQHTPDGCDNTNKQKWTDTWSGVNGIYQRKTDSNYGYHSFQVKGKKNDIISRRDIQFSWETKFTNNATHINATWQPGHFKQYEYHLGWFSPIFIGPNRYNVQFRPAYYDVTYNPFNDKGKGNMVWFQYLTKPDTEFDPVQCKCVLTDIPLWAAFFGYPDYIESQLGPFQDHETVGIVCFVCPYTQPPMYKPGKVQCGYVFYDTNFGNGKMPSGLGQIPVYWQSRWRPYLKWQLQVMNDICKTGPFSYRDELKQAQLCAMYSFKFLFGGDLLYPQIIKNPCGDSGVPSSPSRQPRSVQVTNPLSMAPQFIFHKFDSRRGFYSSASLKRMLQQPKDDELYLTKSKFPRLLTALQADQGQEDSFSSQEASEQSSQEEKEAEAPQTQTQIQQQLRQQLKQQIQLRNQLQLVMFQLSRTQANLHLNPLSLAHLT

SEQ ID NO: 3458 - protein, 154 aa, Alphatorquevirus sp.
MRFSRIYRAKRKVLLPALPASQSTPAMSWFPPVHNAAGRERNYWECCFRAHACFCGCGNFIRHLNLLADRYHFDPPAPPPGGPPPGPRPALRALPPVPGDPADPPNPGPQWPGAGGDAGAGAPAAGGAEGGAADQYGDADLDALFAAVEEDNEQ

SEQ ID NO: 3459 - protein, 58 aa, Alphatorquevirus sp.
MFQGKFIRPPTKEDWQCEYEACRAWDRPPRTHLTDKPYYPWMPPPKPKFSVTFKLGFK

SEQ ID NO: 3460 - DNA, 2852 bp, Alphatorquevirus sp.
atgggcaaggctcttaaagaatgcacttttctcgaatttccaggcaaaagaaaaggaaagtgctactgcgacgtgtgcgagctaaaccgaaagctaggccttcaatgagccaccggcctccagcacacaatgccgcgggcattgagcgcctctggttcgacagttgctttaggtcccacggatcttgttgtggttgtggtaattttgttaatcatattcttctactggctaatcgctatggctttcaggccggtccgccggcgccaggtggtcctcggggtgcacccgcactgagggccctgccgcctcccggggaagccaatcccggtgacggcgagcaacaaccatggcgtggcgatggtggtggcagagacgaaggagacggtggccgtggaggagacgccgctggagacgcctacggacaagacgacctagacgcactgttcgccgccgtcgaagaagagcaacagtaaggagaaggaggtgggggcgcagacgggggcgacgcacatataccagacgcagggccagacgcagacgcagacccagaaaaaaactgctgctttctatgtggcagccccagactataaggagatgcactattaggggcttcactagcctaataatatgtgggaactccaaatcggggcgaaactacgccctccacagcgaggactacaccacacaaatagagccctttgggggcagctttagcaccactacatggagcctgaaggtgcttttcgacgagcaccaaaaaatgctcaacaaatggagctaccccaacacacagctagacctcgccagatacaaagggtgcaccttctacttctacagagacttaaaaacagactatatagtaacctggagtagaaatccaccctttaaactgaacaaatacagctctcccatgctgcatccaggtatgatgatgcagagaaaaaagaaacttatagtacctagctttcaaaccagacccaggggcaaaaagagatacagggtccgcataagaccccccaacatgtttgaagacaagtggtatacacaagaggacctctgtcccgttaatcttgtgtcacttgcggtttctgcggctacactgacacatccgttctgcccaccactaacgaacaatccttgcatcaccttccaggtgttgaaagacttctattacaaagccataggcattaacagtaacttaacctcacaatataatgaactagaaaatatattatatgaaaaaaactgcacatactatcaaacaagccaagttttagcacagctaaatccaaattttaaaccagcaaaaaaccagagcccaaacaaagacctaggtagtaaagtaccctggcttaaacaaacaaataccactaatggcttcctaactaaaaacaaccctgtatttggaatgtgtagctacaaacctaacaaagagaagcttaaaaaagttagacagtggtactgggatcaacaaaacactgaaaatgacatacatagcacctatggaaaagccaatcttgagcaatttgagtaccacataggcttttacagctctgtatttttaagcccccaaagagacctacagttccctgcagcataccaagatgtaacttacaatccaaactgtgacagggctgtaggaaacatggtgtggttccagtacaacacaaaatccaccacagaattcgatgcgacccagtgtaaatgtgtccttaaagacattccactgtgggcagccttctatggctactctgactttataatacaagagctaagcataagcacagaaatatataacataggcctagtctgtgttatctgcccatacacctttccccctatgtacaacaaaacaaagcccacctggggatacgtgttctatgacaccacctttggaaatggcaagatgcccaacgggtctggccacatccctgtgcactggcagcagagatggtggcccagaatggccttccaacaacaagtaatgcatgactttacactaacaggccccttcagctataaagatgactatgctaacacaacattcactgcaaagtataagtttgatttcttatggggcggtaatatgatatccgaacaggttatcaagaacccgtgcaaatcagaaagtgaacacgcctcctacccccatcgagtcagtcgcgacctacaaattgttgacccagcaaccatgggcccccaatatgtattccacacctgggactggagacggggactttttggcagagatgctctcaaaagagtgtcagaaaaaccgacagatgcttttgagtttacaaacccttacaaaagaccaagatatctccctcctacagaccaagaagaagcagagcaagaaaaagacttctattcaccggagcaaaaactccggtcctcgtcagaagagaaccaggagacgagcccgccgcaaagcgagcagctccgagagcgagtcctctcactccagctcacagagcagcagcgagtcggagagcagctccgattcctgttacagcaagtcctcaaaacgcaagcaggtctccacctaaacccccagttatttcaaaagctgtaaacaaggtttacctgtttgagccccccaggcctgtaattcccataatgggcagagaggcctgggaagacgagtacaccacttgcaaggtgtgggatagaccagctagacagaaccacacagacacccccttctacccctgggctcctaaggccccccccacaattcaaagtgtctttcaaacttggctggagataaataaacaaggccttaaactgttcacttgtcggtgtctacctcttaaggtcactaagcactccgagcgtcagcgaggagtgcg

SEQ ID NO: 3461 - protein, 742 aa, Alphatorquevirus sp.
MAWRWWWQRRRRRWPWRRRRWRRLRTRRPRRTVRRRRRRATVRRRRWGRRRGRRTYTRRRARRRRRPRKKLLLSMWQPQTIRRCTIRGFTSLIICGNSKSGRNYALHSEDYTTQIEPFGGSFSTTTWSLKVLFDEHQKMLNKWSYPNTQLDLARYKGCTFYFYRDLKTDYIVTWSRNPPFKLNKYSSPMLHPGMMMQRKKKLIVPSFQTRPRGKKRYRVRIRPPNMFEDKWYTQEDLCPVNLVSLAVSAATLTHPFCPPLTNNPCITFQVLKDFYYKAIGINSNLTSQYNELENILYEKNCTYYQTSQVLAQLNPNFKPAKNQSPNKDLGSKVPWLKQTNTTNGFLTKNNPVFGMCSYKPNKEKLKKVRQWYWDQQNTENDIHSTYGKANLEQFEYHIGFYSSVFLSPQRDLQFPAAYQDVTYNPNCDRAVGNMVWFQYNTKSTTEFDATQCKCVLKDIPLWAAFYGYSDFIIQELSISTEIYNIGLVCVICPYTFPPMYNKTKPTWGYVFYDTTFGNGKMPNGSGHIPVHWQQRWWPRMAFQQQVMHDFTLTGPFSYKDDYANTTFTAKYKFDFLWGGNMISEQVIKNPCKSESEHASYPHRVSRDLQIVDPATMGPQYVFHTWDWRRGLFGRDALKRVSEKPTDAFEFTNPYKRPRYLPPTDQEEAEQEKDFYSPEQKLRSSSEENQETSPPQSEQLRERVLSLQLTEQQRVGEQLRFLLQQVLKTQAGLHLNPQLFQKL

SEQ ID NO: 3462 - protein, 150 aa, Alphatorquevirus sp.; identical to SEQ ID NO: 2677

SEQ ID NO: 3463 - protein, 88 aa, Alphatorquevirus sp.
LFEPPRPVIPIMGREAWEDEYTTCKVWDRPARQNHTDTPFYPWAPKAPPTIQSVFQTWLEINKQGLKLFTCRCLPLKVTKHSERQRGV

SEQ ID NO: 3464 - DNA, 2851 bp, Betatorquevirus sp.
cgggagccgaaggtgagtgaaaccaccgtagtctaggggcaattcgggctagatcagtctggcggaacgggcaagaaacttaaattattattattttttaggaatgtcacactatttacgagaaccaatataccaaggaaaagcacttgacaaccaatggattaataccattattggtacccacgatttaatgtgcggctgcccaacaccaattaaacacctaaaggatatactaaaatgccgtggagatacagatggagaagaagaagacaaagaaaatggaattactaccgtcccagaagatggcttcgacgccggagacttagaaacccttttcgaacaaccatttacagaagacgactcacggtaaggagacgccgaagaaaaatacatagaaaagctaaaagaataactgtaaagacttttcagccaaaaactatcaaaaaatgtaaagttaaaggactaaaatgccttatacaatgtggacaaacaagagacaataataattatgcacaatatatatatagctatacaaaaccaaatacaggagggggaggaggatggagcatgatggtattctcattagcaagcttatatgaagaccaccaacatttactaaactactggacaactagtaatgcaggattaaaccttataagatacagaggtgtaaaatttaaattttaccaacacacaacagtagactatgtagtcatacctagaacatgctatccaatgacagacactaaatttgaccatgcaaactcacaaccctttagagcccttatggacaaaaagaaaataatagtaccaagtatagctacaaaaccactaagacgcagatcaaaaacaagatttttttatccaccatcagaatttaaaactgactggtactttcaacaaaaaatttgcaactttccgtttataatgttaaccacagtcagttgcagcttaacacatacctttcttgcaccatcatggcaaagcaataacatttcactaaaatgtcttaacacacacttatttcaataccacaattttgaaaacccaacagccactacaggttaccaacctaaacctaacacttggctatacacagaaggaaatggctcaaccacaataccaagtaataaaaatacattaatatgcctagctaacacaaaagattatactgcaggaaaacaaattaaaagcccagacgaagacaaaatgtctaactggggtaacccttttcatgaccattacctacacccagatgttagaatatactcagccacaaaatcatggactaatttatcaagtaatccaaaaaacgaattaacactagtaacatctccattcttttatgaatgtagatattgcccagacaaagatgatggaacaggcaatgaggtatactttgtaaaaaactatgacaactccgactggcaacaaccagaacagtgggacgttaaaatagatggattcccactatggatatgttgctggggatgggcagactggattaaaaaactaagaaacatacaaagagtagactatgaccacataatggtaataaaaacaaacaaaatagaacctaaaatgccagcttatgtatttttagacgacagcttctggacaggcaaaggaatacaaaatacagaaatgttaccctatgatgaacaacactggcacccacaatttatgtatcaacaagtatctataaatgacatatgtaaatgcggaccaggtacagcaaaaccaccagacaaaaatagctttagcattaaagcaggatacacattttactttacatttggtggatgcccaagcactctagaaaatatttatgatccatgttcacaacaggtctatccaattcccacaaccagtaaccagtatgcaggactacaaatcacaaatccagcacaaccaaaagaaacaaccatacacgactttgacgtcaaaaaagacattattacaaaagcagctacaaaaagaatcaaagaatactcagcagttgatacaactatgctctcatctacagactgcctcagcaaaagctgcaaaaggccgagactacaaaccccgacaccagaaacatcggacacggaagaagaggagacgacacaggagcagcagctcaagctcctcaagcacaaccaacgactactcaagcgaacaatcctcaaattaatgtcaaatatagaataagaactggtaaaattaaagtgtctatgtttgaaaaccctgtaaaaaatagaatgttaactgcaagagaaaggtcagaagacctacaagatgcaattatatgggataggtatcctagaagctatttacatgaaaaacacttttacaaaaatatgttaataacccctaaagtaccctacataaactttgaccttggttactttaaataaagcctgcaaacttcacctctcggtgtccatttatttaagttttaacttatataaacatccaccaccctgcaaaaattgcaggcgccaagggggctccgcccccttacacccccaagggggctccgcccccttacacccccaagggggctccgcccccttacacccccaccgcccccttacacccccaagggggctccgcccccttacaccccctaataaatatgcaacaggaaaaccacataattagaatggctcaccacaaaccgtcttaaacttcccttttttacacttacttcctgaaaaactacttattattcattacattaattaataatcaccgtaattccggggaggagcaaacaaactatataacaaactacacttccgaatggctgagtttacgccgccagacggagacggcatcacttcagtgactgcaggctgatcttggg

SEQ ID NO: 3465 - protein, 651 aa, Betatorquevirus sp.; identical to SEQ ID NO: 3420

SEQ ID NO: 3466 - protein, 103 aa, Betatorquevirus sp.; identical to SEQ ID NO: 3421

SEQ ID NO: 3467 - DNA, 2851 bp, Betatorquevirus sp.
caggtaccgaaggtgagtgaaaccaccgaagttaaggggcttattgggctaaagcagtcttggcggaacgggctacatactaaaaaaatatattattttacagaaatgagctcgtacttaactccagttgtctacagcaaaaatgcattagaaaaccaatgggtaaacaccatctttaatacccacgacctgtgctgtggatgtaacgacgccattaaacaccttgctgccattttacaaagaaaaggatcacaactatgcctcccttcaacttctaccgacgacgctggtacccaaaccgatggagacgccgtagatactttagacgccggagacctagacctactcttcgcagaagattttggagaagacgaacggtaagaagacgccgctttattaaaaaatataaaagaaaagctataaaaattagacttaaccagtggcaaccacaaactattagaaaatgccacataaaaggaaacctctgcgcatttacatgtggaagaggcagacaaaaccataactttattttaacccaagaaagctatgtacctacatcagaaccaggagggggatcttggtctatactacaatttacattaagagtactttgggatgaacataaagcaggcagaaactggtggacaagaggaaatgcaggcttacctttagtaagatacatgctatgtaaattaaaattttatagaagcaaagacacagattacttagtaacaattcacagaacaccaccatttgaagtgacaagagactcatacttaagcacacaaccatctagacatttaatgaaccacaaagctattatagtaccaaaattaggaagaggaccaaacaaaagaacttatattaaaagaaaagtattacctccagcactattccaaaacaaatggtattttcaacaagacatatacaacataccattttttatgttaactatatcagcattagaattagaccaaatgtatgcaccagaagatcaaataagctcaaacattacattaatatcattaaacacaaacgcatttcaaacaagtaactgggaaagagaaccatacgacacaaaatccacagggacatacaatatatacctatggtcctatggtaacggacaccatgagaaaaaatggaaagacatttattttttaggcaactgtaaagaatacaaagaaggacaaaaactaacaaacttagatgactgcaaaaccgtagcaacctcacaacagaaacataaatggggtaacccatttacacactggtataaccataaagatgttaaaatattttacggtgcaatacctaaaccacaagaaaaagaagataacgcaaacatattagaactagaagacctttttatacactgcagatacaacccatttaaagacaaaggaacaggaaacaaagtatacttagtaccaacagacagtggcttaggaagctttttaaccataccaaaaaatgaaaacttacttatagaaaacttaccactatggctaatattttggggatgggcagattggatactaaaatctagaccaattgcacatttagaagaagaatatcaaatagttatacaaactccttacatatatccaaaattaccatgctatgtacttgtagataaatactttttaaacccaccagatgatggcacacacacaacaacactatcccaaacagaccaagctcactggcacataaagtaccactttcaagaaaaacaatttaatttactagcaaacacaggaccaggaacaccaaaaattaatgaagttaaacaaatagaagcacattttaattataacttttatttaaagtggggaggaagcccagctccaatggaacaaattaatgacccagcagaacaagaaaaattccccacgcccaatacgcaactccaaagacttgagatcgagagtccaacaaaaccaaagcaacattacttgtacaccttcgacgaaaaacgacacacactcacacttaaagctgcaaaaagacttaagaaagactattcaactccaacattttttacagactttggagcaaaagacatcccgctcaaagcacaaacggaaaccgacagctcatcggaggaggaagaaatacaaacatcactcccgagagaagagagactccagcagtacctacagcgaaagcgactccaataccgacagcgaatccaccagctcctaaaaacaaaaaaattattcccccaataagagacatgtttggacaaccttacaaaaaaaatcgtagatttaatagtaaagaatttgcagaagaattaatagatgcttatcactggcgtagacgccctagactatacatacatgataaacctgactataatattcctgtaatagaacctcttgtaaacattggtgtaaacttttcattaaactttaaagactaggccagcaaatattcacttgtcggtgtcagtttatataagttataactttaataaacatccatcgcctccctaatacgcaggcgcacaagggggctccgcccccttaaacccccaagggggctccgcggggctccgcccccttaaacccccaagggggctccgcccccttacaccccctaattaatattcaacaggaaaaccacctaattagaattgccgaccacaaactgtcagccgttgcatatacttccctaaattatactatacttcctcttttttagaaccacgcccaataattcattaataatcagacgctattcctgggaggagcaacacaactatataactaagtacactgacgaatggctgagtttaccccgccagacggagaccagacaggacactgactgggctgctttaggg

SEQ ID NO: 3468 - protein, 658 aa, Betatorquevirus sp.
MPPFNFYRRRWYPNRWRRRRYFRRRRPRPTLRRRFWRRRTVRRRRFIKKYKRKAIKIRLNQWQPQTIRKCHIKGNLCAFTCGRGRQNHNFILTQESYVPTSEPGGGSWSILQFTLRVLWDEHKAGRNWWTRGNAGLPLVRYMLCKLKFYRSKDTDYLVTIHRTPPFEVTRDSYLSTQPSRHLMNHKAIIVPKLGRGPNKRTYIKRKVLPPALFQNKWYFQQDIYNIPFFMLTISALELDQMYAPEDQISSNITLISLNTNAFQTSNWEREPYDTKSTGTYNIYLWSYGNGHHEKKWKDIYFLGNCKEYKEGQKLTNLDDCKTVATSQQKHKWGNPFTHWYNHKDVKIFYGAIPKPQEKEDNANILELEDLFIHCRYNPFKDKGTGNKVYLVPTDSGLGSFLTIPKNENLLIENLPLWLIFWGWADWILKSRPIAHLEEEYQIVIQTPYIYPKLPCYVLVDKYFLNPPDDGTHTTTLSQTDQAHWHIKYHFQEKQFNLLANTGPGTPKINEVKQIEAHFNYNFYLKWGGSPAPMEQINDPAEQEKFPTPNTQLQRLEIESPTKPKQHYLYTFDEKRHTLTLKAAKRLKKDYSTPTFFTDFGAKDIPLKAQTETDSSSEEEEIQTSLPREERLQQYLQRKRLQYRQRIHQLLKTKKLFPQ

SEQ ID NO: 3469 - protein, 91 aa, Betatorquevirus sp.
MSSYLTPVVYSKNALENQWVNTIFNTHDLCCGCNDAIKHLAAILQRKGSQLCLPSTSTDDAGTQTDGDAVDTLDAGDLDLLFAEDFGEDER

SEQ ID NO: 3470 - protein, 62 aa, Betatorquevirus sp.
MFGQPYKKNRRFNSKEFAEELIDAYHWRRRPRLYIHDKPDYNIPVIEPLVNIGVNFSLNFKD

SEQ ID NO: 3471 - DNA, 2851 bp, Alphatorquevirus sp.
cctctaaaggtcactaagcactccgagcgccagcgggggcaattcgggctcgggactggccgggctatgggcaaggctcttaaaaaagccatgtttctcggtaaactttacagaaagaagaggctcctgtcactgtccccactgcacactccacaaaaagctcgcaggcttctaactgctatgtggagaccccccgctcacaatgtacaaggccaagaaaggcagtggtacgagtcatgctttcggtctcacgctgctatgtgtggctgtggcgattttatcaggcatctttgtcatcttgctgataattttggacgccctcccactgtccctcggcctccggcacccacacctccagtaaggccactgccagctctcccggcaccccccaacccctccggtagcagagcggcatggcctactggtggtggagacgcagaagacgagccccgtggaggaggagacggcgctggaggactcgcagaactcgcagacgaagagctgctttccgccgccgtggacgccgccgaagagtaagaaagaggagggggaggtggagaaggacttatagaaaatggcggaggggcaaaaagagacgcaggcacaggagacgcttaatactgactcaatggcaacccgcctttataagacgctgctatatagtgggctacctgccccttataatctgcggagaaaacacctccgccagaaactttgccacccactcagacgacctcatatccaacggaccttacggggggggcatgactaccacgaaattcactctcagaatactatatgacgaacacctgaggcaccttaactactggactgtcagtaacgaggacctagacctgtgtagatacctggggggcaccttctacgcgtacagacaccccactgtagactttatcgtacagatacacaccagtccccccttcctagacactcccctgacgggtcccagcatacacccgggcatgctgatgctaacaaaaaacaaaatactaatacctagcttaaaaaccagaccaagcagaaaacacaaagtaaaaattagattcaaaccccctaaactttttcaagacaagtggtacccccagtcagagctctgtgacacaacgctgctaaccgtctttgcaaccgcatgtgacctgcaatttccgttcggctcaccactaacgaacaacctttgcgtcaacttccaggtgctaggttccgtttacaaacggcacctcagcatacttcctgagaaactgtcacaatatacaaattactatgattcaaacttatataacaatatacaactctaccaaacattccaaacaatagctcaaattaaacccagtgcccaagaaagcgactttactcctacatggcaaaagtgtcaaaatactactaaacttaactcgtcaggcaataaccaacaagaatctaatgatacctggtactatggaaaaacttatacagagcacataacacaagcagcaaaaaagattagaagtaaatatttaactgctactagatcagcactaccactcctacaaacacaaggacatgaactactagaataccacacaggtatttacagttctatattcctatctgcaggcagaacatactttgagaccacaggggcctacacagacataatttataaccccctagtagacaaaggaataggaaacaaagtgtggctagaccccctaactaaagaagatgctgtgctaaacagaaaacaagcaaaagtactgttagaagacatacctatatgggcagccctatttggatacacagaatttgcagctaaatacacaggagactctgccatatcagcaaactacagactgacaatacggtgcccctacacagaccccatgctagtagacagaaacaacgaagaccaaggctttgtaccctactctaaaaactttggcaacggaaaaatgccaggagggtcctccaacgttccactaactatgagaataaagtggtaccccatattattccaccaactagaactcatggaagaactagttcagtccggaccgtttgcatacaggggcgacgaaaagatgtgtgtattagccataaaatataacttcagatggaaatggggaggtaaccctgtatctcaccagattgtgcgcaacccctgtaaaggagggtccggtacccgtcgagagcctcgctcaatacaagcagttgacccgaaatacgtcacaccgacgctatccttccactcgtgggacttcagacggggactttttggcaaggcaagtattgagagaatgtcaagagaatcagaaactaatatctatcctacaggcccaccaagaaaaagaccaaaaagagacacggacccgtacgactcgcagcaagaagaaagctcactttcaggacacctccagctccagccgtgggtccactccagtcaggaagcccaaagcgaagaagaaacgcaagtcccggaaaacctacaagaacaactcctccagcagctccgagagcagcagcagctccgagtccatctccagtccctcgccacacaagtcctcaaaatcagggcgggatacgggatacaccccctattatcttcccaagcctaaacaaagtctttatgtttgaccctccaggtcccaagcccatacagggctatgaggactggaaagaggagtttacctgctgcaaatattggaacaggcctcccagaaagtaccacacagatatacccttttacccagacgtccccaaagtcccagaccaaataagagtctcctttaagcttggctttcaataaacacacctgttcactgtactaggccgtgggagtttcactcgtcggtgtcta

SEQ ID NO: 3472 - protein, 731 aa, Alphatorquevirus sp.
MAYWWWRRRRRAPWRRRRRWRTRRTRRRRAAFRRRGRRRRVRKRRGRWRRTYRKWRRGKKRRRHRRRLILTQWQPAFIRRCYIVGYLPLIICGENTSARNFATHSDDLISNGPYGGGMTTTKFTLRILYDEHLRHLNYWTVSNEDLDLCRYLGGTFYAYRHPTVDFIVQIHTSPPFLDTPLTGPSIHPGMLMLTKNKILIPSLKTRPSRKHKVKIRFKPPKLFQDKWYPQSELCDTTLLTVFATACDLQFPFGSPLTNNLCVNFQVLGSVYKRHLSILPEKLSQYTNYYDSNLYNNIQLYQTFQTIAQIKPSAQESDFTPTWQKCQNTTKLNSSGNNQQESNDTWYYGKTYTEHITQAAKKIRSKYLTATRSALPLLQTQGHELLEYHTGIYSSIFLSAGRTYFETTGAYTDIIYNPLVDKGIGNKVWLDPLTKEDAVLNRKQAKVLLEDIPIWAALFGYTEFAAKYTGDSAISANYRLTIRCPYTDPMLVDRNNEDQGFVPYSKNFGNGKMPGGSSNVPLTMRIKWYPILFHQLELMEELVQSGPFAYRGDEKMCVLAIKYNFRWKWGGNPVSHQIVRNPCKGGSGTRREPRSIQAVDPKYVTPTLSFHSWDFRRGLFGKASIERMSRESETNIYPTGPPRKRPKRDTDPYDSQQEESSLSGHLQLQPWVHSSQEAQSEEETQVPENLQEQLLQQLREQQQLRVHLQSLATQVLKIRAGYGIHPLLSSQA

SEQ ID NO: 3473 - protein, 156 aa, Alphatorquevirus sp.
MGKALKKAMFLGKLYRKKRLLSLSPLHTPQKARRLLTAMWRPPAHNVQGQERQWYESCFRSHAAMCGCGDFIRHLCHLADNFGRPPTVPRPPAPTPPVRPLPALPAPPNPSGSRAAWPTGGGDAEDEPRGGGDGAGGLAELADEELLSAAVDAAEE

SEQ ID NO: 3474 - protein, 59 aa, Alphatorquevirus sp.
MFDPPGPKPIQGYEDWKEEFTCCKYWNRPPRKYHTDIPFYPDVPKVPDQIRVSFKLGFQ

SEQ ID NO: 3475 - DNA, 2851 bp, Betatorquevirus sp.
ttccgaatggctgagtttatgccgccagacggagaggggcaattcgggctagatcagtctggcggaacgggcaagaaacttaaaatattttgttttacagatatgagtactcgctggattacacctaaaacatctttaaaacaacaaaaactacaatggattaatttactttgtcacgaccatgatattttctgtggatgcccatcaccattagaacacacagccgcattaatttttgaacaagaacctcaacttcgctttagaccaccagaaaaagatctaattaaaaaatgccttactactcaagatactacagaaggagatggagaccaagacgcttttggagaaggcgatttagaagaacttttcaaagaagattttggagaagaagatactcggtaaggagaaaaaaacttaaaaaactaaaactagctcaatggcaacctcataccataaaaaaatgtagaattattggatactatccactagctataagcacaagagacagactatctgaaaaccttaattgttacctagactctgttgcgccgcatttaatacattctgggggaggtttttcaatatgtaactggtctttatatgccttatacagagaaaatattgaaatgagaaactggtggacaacgggaaatgataatttacctttatgcagatatttaggatgtaaaattactttatatagacaagcagaagtagactacatgtttgcatacagaaattcttttcctatgacagcatcaatacacacataccaaagtacaaacccacaagtaatgctactaaacaacagaacaagaaaaatgccatgcaaaaaacataacagaaacaaaaaaccatacagaaaaatatttataagacccccatcacaacttcaaaacaaatggtacatgcaacatgacatagctcaaacaccacttgtacaaacatttaccacattatgctcttttgacagaatgtaccaaaactcatcctcaatttcaaacacaatcggattcacaggtttagacacaaatggctttaaaaatcactacttcaaagcaaacggaacccgtccatacgcaccaatacatgatcaaatactaatagcaataccccaaggccctgtaacaaatgatatatcaacagttaacatactaagatgcataattttaggaaccgtaactgattacacacccggcacagttattaatgcttgtgaagaaacagtaagtacaacaatacaaccaaaaccaacatcaacacaggcaaaaaaattttacaatgcatacacaaaaataaaccactggggaaaccctttttatacagactattttcatggagacactattatggcaatgtcaaacaaaacaatcactgaattaataacccattttaatactagcacaaccttagataacacatttacaataaaatcacaaaaatacatagaatacagatacaacccatttgcagacaaaggagaaggaaacaaattatatttagtacctattaacactcaactacattcagacgactggtctccaccaacagacaaggaagttttatgtgaaaatttacccattaatgttatgttatggggatacttagactttcaaagaaaatgtagagaatataatgacatagatacaacatgtttatgtgtgatacaaacaaaatatataacacctaataatggaccaaaatttatagttccattagatgatgatgtactatatggaaactccccttactattctgaaggtcatagaacagccagtgaccaacaaaactggcatcccaaagttagattccaaacacgaactctaaataacatagcatgtacaagtatagctacagctaaactaccacgtgatacaagtgttgaatgtcacatgaaatattgtttttactttaagtttggaggagaaataccaccaatgtcaattaccaaaaacccagaagaccaaccaaaatttcctattcccaataacctcctacaacaaccttcgttacagagtccaacgaccccttttgaatacttcctctacaaatttgaccagcgcagaggaatgctcacaaaatcagctattgaaagaattacaaaaaaccaaaaacctgaaacagatattttatcaattgcagacccatcaacttggtgcccaacaacactccaacaagaaaaagaaacatcggaggaatcaacctcggaagaagagcaaacatcatcgacggaggagagactccagcagcagcgaagaaagcaaaaacacctcagaaaactcatcaacagacttctcctccgactaacaacattagaataaaaaaatgtactgtacaagtaaaactattcccagaacccccacaaaataggagaatgacaccccaagaatatgaggatgaaatattaacagcaaaaatatggggtagagttcctagagattttatttttgaccatccaacatatccatatgtaccaactgtacctaaatactctgtaaactttgacttaaatgcgccgcaataaactcaaggcctacaattttcactctcggtgtctacctctttaagtaaaaactttaataaacatccaccacactccctaatacgcaggcgcacagggggctccgccccctgtaacccccagggggggatacccccccttaaccccccccaaaaaccacaaaatttgcattgccgaccacaaacgaacaggaaaccacaaaatttgcattgccgaccacaaactgacttatgctaattaacttctgcaaaatacactaacttccctaaaaattaattattaatcagcatcacaataggaggagcctaacaactatataaccaagtatac

SEQ ID NO: 3476 - protein, 676 aa, Betatorquevirus sp.
MPYYSRYYRRRWRPRRFWRRRFRRTFQRRFWRRRYSVRRKKLKKLKLAQWQPHTIKKCRIIGYYPLAISTRDRLSENLNCYLDSVAPHLIHSGGGFSICNWSLYALYRENIEMRNWWTTGNDNLPLCRYLGCKITLYRQAEVDYMFAYRNSFPMTASIHTYQSTNPQVMLLNNRTRKMPCKKHNRNKKPYRKIFIRPPSQLQNKWYMQHDIAQTPLVQTFTTLCSFDRMYQNSSSISNTIGFTGLDTNGFKNHYFKANGTRPYAPIHDQILIAIPQGPVTNDISTVNILRCIILGTVTDYTPGTVINACEETVSTTIQPKPTSTQAKKFYNAYTKINHWGNPFYTDYFHGDTIMAMSNKTITELITHFNTSTTLDNTFTIKSQKYIEYRYNPFADKGEGNKLYLVPINTQLHSDDWSPPTDKEVLCENLPINVMLWGYLDFQRKCREYNDIDTTCLCVIQTKYITPNNGPKFIVPLDDDVLYGNSPYYSEGHRTASDQQNWHPKVRFQTRTLNNIACTSIATAKLPRDTSVECHMKYCFYFKFGGEIPPMSITKNPEDQPKFPIPNNLLQQPSLQSPTTPFEYFLYKFDQRRGMLTKSAIERITKNQKPETDILSIADPSTWCPTTLQQEKETSEESTSEEEQTSSTEERLQQQRRKQKHLRKLINRLLLRLTTLE

SEQ ID NO: 3477 - protein, 131 aa, Betatorquevirus sp.
MAEFMPPDGEGQFGLDQSGGTGKKLKIFCFTDMSTRWITPKTSLKQQKLQWINLLCHDHDIFCGCPSPLEHTAALIFEQEPQLRFRPPEKDLIKKCLTTQDTTEGDGDQDAFGEGDLEELFKEDFGEEDTR

SEQ ID NO: 3478 - protein, 123 aa, Betatorquevirus sp.
LVPNNTPTRKRNIGGINLGRRANIIDGGETPAAAKKAKTPQKTHQQTSPPTNNIRIKKCTVQVKLFPEPPQNRRMTPQEYEDEILTAKIWGRVPRDFIFDHPTYPYVPTVPKYSVNFDLNAPQ

SEQ ID NO: 3479 - DNA, 2850 bp, Gammatorquevirus sp.
cgggagcccgaggtgagtgaaaccaccgaggtctaggggcaactcgggctagggcagtctagcggaatgggcaagaaacttaaaaaagtttattattttaaatacagatgcagaatatcagctcacaagacttctaccaggaaactcattttaatcccgagactaagactcaaatatggatgtctcaaattgctgattctcatgataatatctgcaactgctatcatccatttgctcaccttcttgcttccatatttcctcctggtcacaaagaccgtgatcttaccattaatcaaatacttagtagggattacaaagaaaaatgcctttctggtggggtagaagaaaaaagccatggtttggcagatggagataccgcaggcgccgctggaacatcaggaggaaaaagaaaagaagaagaagactacccagaagaagaactagacgctatactcgccgccgctatggaagaaaacgcaaggtaagaagaaaacttaaaaaaattaaaatacaacaatggcaacctgactctattagaaaatgtaaaatcaaaggctactcatgcatgatactaggaggtgaaggaactcaaatgttttgctatacaaatacagccagtgactatccacaaccaaaagccccaggtggcggaggctttggctatgaggttataaccttaaaatggctgtaccaagaatttttaagacacaataatatttggactcgctctaatgaatacacagacttggttagatatactggaggtaggataactttttttgcacatccatacattgactttattatatcatatgacctacaacctccatttgacctaaacaagttttcatacccagaaattcagccacaaaacttactactaagaaaacataaaagaatattacttagcagacaaagcaatccaaaaggaagacacaaagtaacaataaaatttcatcctccaaaacaaatgacaactaaatggtttttccaaaaagacttttgcccctatggattaataaaactaacagcagctgcagcagacttttcatacccaatcataggacctaaagctcaaagtactatactaacaatatatgcattaaatacaaacttttatcaaaatagtgattggggacatgtaaaaacctcagaaccttacaagaacatttcaaatcaaaaagtacccctttactttacatacaaagaaaaaggtgtagacaaagtatttacatataatccagattcagccacagaaaaatactattattctatttcatgggaaaatggattatttagtcccaaagtactgctagcatataaaatatcaactgatcagcaaggcgagaaagtaatagcaggtacaccaataataccattaagatataatccacaagaagatgatggttttggaaatgaagtatatctttccagcatactaaatggcagatataacaaaccatcatacacaactgattatcaatttaacaatgtaccattgtacatagcattctatggctactataactatttaaaactatacagtaaagataaaaacataatgaagtcttacatatttgtagttaaaagtaaagcaattaaacctatttctcaaacaacagcacaaacatattatcctatactagacagtgactttgtttttggcaaactaccctgggatgaatacatgtctgcagaggcaaaaaaactatggtatcctactgcagaaaaacaagaaggtataataaatagcatagtagaatctggcccatttgtgccaaagcttaacaacatgacatacagtacatggtctctaatgtacaattataaatttttttttaagtggggtggaccacatgtcacagatcccaaagttgaagacccttgcaccagaaacaaataccctgtgcccgatacaatgcaacagggattacagattgtcaacccagaaaaaaataaagttgaatccttactacatgactgggactttagaagggggttcgttacaaacacagctcttaaaagaatgtcagaaaacctcccatctgaaacatctctctcatctgatgattcagaatcacctgcaaagaagagaaagatcacaaaagaagtcccatgccagcaagaaagcaaagagaaaatccaagcttgtctcctctcactctgcgaagaaaatacctgccaagaaacaccccaaaacctccagcagctcatccagcagcagcagcagcaacagcaacagctcaagagaaacatactcaagctcctcacacacctaaaaaaaggccaaagatgtgtggaactacaaacaggccttttagagtagaaccatttaaaccagggtttgaagaacaaacagaaaaagaacttgcagcagctttttgcagacctccaagaaaatataaaaatgacccccctttttacccctggttaccaattaccccaaaagtagtgtttaacctaaacttcaaaggctaggccaacactgtacacttagtagaggttgtttaataaagtttgcccctaaacaaaaaaaaaaaataggataatatgtttgtgctgttgtttgagaaataggtttatttgctttacttttaacccccccgcaccccccctacgtcacaaaccacgcccccgccgccatcttgggtgtggcagggcgggggctaaaaaagcgggaaccaataaaattaaactgccaacatccactaaaaatgaaacacatcacaaaaagaggcaggactaactaactctatatattcaagtacactttcgaatggctgagtttatcccgctagacggtgcagagatcgaccgagcgcagcgaggagatctacagctgcccaaggg

SEQ ID NO: 3480 - protein, 667 aa, Gammatorquevirus sp.
MPFWWGRRKKPWFGRWRYRRRRWNIRRKKKRRRRLPRRRTRRYTRRRYGRKRKVRRKLKKIKIQQWQPDSIRKCKIKGYSCMILGGEGTQMFCYTNTASDYPQPKAPGGGGFGYEVITLKWLYQEFLRHNNIWTRSNEYTDLVRYTGGRITFFAHPYIDFIISYDLQPPFDLNKFSYPEIQPQNLLLRKHKRILLSRQSNPKGRHKVTIKFHPPKQMTTKWFFQKDFCPYGLIKLTAAAADFSYPIIGPKAQSTILTIYALNTNFYQNSDWGHVKTSEPYKNISNQKVPLYFTYKEKGVDKVFTYNPDSATEKYYYSISWENGLFSPKVLLAYKISTDQQGEKVIAGTPIIPLRYNPQEDDGFGNEVYLSSILNGRYNKPSYTTDYQFNNVPLYIAFYGYYNYLKLYSKDKNIMKSYIFVVKSKAIKPISQTTAQTYYPILDSDFVFGKLPWDEYMSAEAKKLWYPTAEKQEGIINSIVESGPFVPKLNNMTYSTWSLMYNYKFFFKWGGPHVTDPKVEDPCTRNKYPVPDTMQQGLQIVNPEKNKVESLLHDWDFRRGFVTNTALKRMSENLPSETSLSSDDSESPAKKRKITKEVPCQQESKEKIQACLLSLCEENTCQETPQNLQQLIQQQQQQQQQLKRNILKLLTHLKKGQRCVELQTGLLE

SEQ ID NO: 3481 - protein, 125 aa, Gammatorquevirus sp.
MQNISSQDFYQETHFNPETKTQIWMSQIADSHDNICNCYHPFAHLLASIFPPGHKDRDLTINQILSRDYKEKCLSGGVEEKSHGLADGDTAGAAGTSGGKRKEEEDYPEEELDAILAAAMEENAR

SEQ ID NO: 3482 - protein, 120 aa, Gammatorquevirus sp.
MPARKQRENPSLSPLTLRRKYLPRNTPKPPAAHPAAAAATATAQEKHTQAPHTPKKRPKMCGTTNRPFRVEPFKPGFEEQTEKELAAAFCRPPRKYKNDPPFYPWLPITPKVVFNLNFKG

SEQ ID NO: 3483 - DNA, 2850 bp, Betatorquevirus sp.
cgggtaccgaaggtgagtgcaaccaccgaagttaaggggcttagcaaccaccgaagttaaggggcttaatgggcaaaagcagtcttggcagaacgggctagtaacttaaatattttacagatgagtaaattttttactccatcattctcatcaaaaagaagactagaaacacaatggatgaatcttaatattcacatccatgatatgttttgctcctgcgagagagttttagaccacctacaagacatcttaaaccgcgacaaatgccgccctaccaaagacgccgctactactaccgaaactggtggggctcccgaagacgacgagcttggtatcgacgccggagacctcgaaattcttttttcagacgcaaacgacgtagacgaagggtaagaaaacgtttctttaaaagaactagaaaactaaaaaaactaaaaattaatcaatggcaaccaagtactattaaaaaatgtagaatagaaggatacctatgtttatttcaagcgggatttggacgctatacaaataactatgctttgtggaaagaatcaatttttccacacaattaccccggaggagggggatggagtattcaacaactatctctaggaaacctatatactcaacataaagaacaaatgaactattggactaaatcaaatgacagacttaatatgtgtcgatattttggatgtattgtaacttgttttagacaaccctatacagactatatatttagttactttgaaaatttacctaaaaatgtatctaaatacttttactgctcacaacatcctttaagacaactaaattacaaaagaaaaagagtaattagcagctacaacacacaaccacatagaaaaaaaccctacaaaagaatatttataccaccaccaaaaccaatgaaaaaccaatggttttttcaacaacaactagcagactatccactagtgacatttatagccacagcatgtagccttacaaacatgtttggtagcaactcatggaaaaataacaatgtagaactatggtgcatagacaccacattttttagaacaccacactttcaatacagaacagcaacaacaccacaatggggatatagagaaactgatcaacaatacctttggggtttacaaaatggcttagaagactttaaaaaaaataaatggagccaagcaatatacctaggtaacacaatgcatgaacaaacaggagaaccaattgacaacataacacaaactgaaataactaaaaaatacacatttgatcactggggaaacccatttcactggacatacatgacacaaacatcccgagtatttttatcaaacaaaagcccatcagacttatcagacacacaaaaaaaccaacaaataaacaatgaaggaacactaaaagaaaacccttatgcattcacagttagatataatccttttaaagacaaaggatatggaaacaaattatacttaatacctaattatgacaatgacattaaaaaatgggaccccacagacgacccagacctattatttgaaaactttccactttggataatgacatggggtttagaagatattgtaacaagaatgggtaaatgcagaaatctatatgatgactggacagttgtaatacaaacaaaatatatgtctggaacagaaaaatattatgtacctgtatcatatgaatttgtacatggccaaggcccttatgacaccccaaataatgaaatatctggaaatgactatagacactggtacccaaaatttggttttcaaaaacaagctttagaaaacatagcaatgtcaggtccagctgtagcacgaggagacaatgtaaaaaatatacaagcaacaatcaaatatgattttctttttaagtggggaggaaactcaccgccacaagaatctatctgggatcctactcagcaacccgtcacaccctaccccaataacctcgacctctcaaatgaaatcattgatccgacaacaagcatccttacagaaatctacacaggggactttagacgggacttacttacagagacagctcaaaaaagaattacacaaagcatcactaatgaacaacctttgttcacagatggaagaaagacttcaacagacctccaactcttcccacaagaaacacaaacggaagagaccccgaaaacacaagaagaaacattactcctccagctcatccagctccaacaattcaacaatcaactccagcaccgattcagaaagttaaaggaaatttgttcggacctataaataaagcatatctgtttcaaccaaaaataaaaaaccgtagattacacccatatgaaaaagaatgggagatctggcaagcaaaggcctttcatagaccccctagagaaatgctcttagatccccctttttacccctggatacctactcaacacaaagtattctttgacattgtaagcaactttaataaaggcatgcattaattcacttaatggagtctgtttataataattaaacttaaataaacgaacaccgcctccctaatacgcatgcgcaaaagggggctccgcccccttaaaccccccgggggggataaacccccccgaacccccccaaatcattaatattcaacaggaaaaccacctaattagaattgccgaccacaaactgtcaccgttaaaccacaacttctgcttttaacacttacttctgctttttacttactcctcccactaattaattaatactcaccatcattaccggggaggagttactttactataaatttaactatacttccgaatggctgagtttatgctgccagacggagcggagatagaatatcaacgctgcttttggg

SEQ ID NO: 3484 - protein, 687 aa, Betatorquevirus sp.
LLLRESFRPPTRHLKPRQMPPYQRRRYYYRNWWGSRRRRAWYRRRRPRNSFFRRKRRRRRVRKRFFKRTRKLKKLKINQWQPSTIKKCRIEGYLCLFQAGFGRYTNNYALWKESIFPHNYPGGGGWSIQQLSLGNLYTQHKEQMNYWTKSNDRLNMCRYFGCIVTCFRQPYTDYIFSYFENLPKNVSKYFYCSQHPLRQLNYKRKRVISSYNTQPHRKKPYKRIFIPPPKPMKNQWFFQQQLADYPLVTFIATACSLTNMFGSNSWKNNNVELWCIDTTFFRTPHFQYRTATTPQWGYRETDQQYLWGLQNGLEDFKKNKWSQAIYLGNTMHEQTGEPIDNITQTEITKKYTFDHWGNPFHWTYMTQTSRVFLSNKSPSDLSDTQKNQQINNEGTLKENPYAFTVRYNPFKDKGYGNKLYLIPNYDNDIKKWDPTDDPDLLFENFPLWIMTWGLEDIVTRMGKCRNLYDDWTVVIQTKYMSGTEKYYVPVSYEFVHGQGPYDTPNNEISGNDYRHWYPKFGFQKQALENIAMSGPAVARGDNVKNIQATIKYDFLFKWGGNSPPQESIWDPTQQPVTPYPNNLDLSNEIIDPTTSILTEIYTGDFRRDLLTETAQKRITQSITNEQPLFTDGRKTSTDLQLFPQETQTEETPKTQEETLLLQLIQLQQFNNQLQHRFRKLKEICSDL

SEQ ID NO: 3485 - protein, 102 aa, Betatorquevirus sp.
LAERASNLNILQMSKFFTPSFSSKRRLETQWMNLNIHIHDMFCSCERVLDHLQDILNRDKCRPTKDAATTTETGGAPEDDELGIDAGDLEILFSDANDVDEG

SEQ ID NO: 3486 - protein, 71 aa, Betatorquevirus sp.
LFGPINKAYLFQPKIKNRRLHPYEKEWEIWQAKAFHRPPREMLLDPPFYPWIPTQHKVFFDIVSNFNKGMH

SEQ ID NO: 3487 - DNA, 2849 bp, Betatorquevirus sp.
cgggagccgaaggtgagtgaaaccaccgtagtctaggggcaattcgggctagagtctaggggcaattcgggctagatcagtctggcggaacgggcaagaaacttaaatatatttttttacagatgagcaaattctacaaaccaacaaacaactcacccagaagaaatgaactacaaattatgaacctgattttctcctcacacgacagcctttgttcctgcagcaacgcatctgaacacctcctccatcttctaaccagagaaaaatgcctccatttcaaagacgccgctactaccacagaaactactggaactaccgaaaaccaagatcttactatagacgccggagatttagaaaatttattttcggaagaaaacgacgtcgacgaagggtaagaagaaaaagattttctaaacgtaatagaaaactaaaaacaattaaaattaatcaatggcagccatcctccattaaaaaatgcaaaatacaagggtacctatgcttatttcaagcaggacccggacgatatggaaataactatccattatggaaagaatcatactttcctgaacattatccaggaggaggaggatggagcattcaacaactttctttaggaatactgtttaaagaacataaagactatatgaattactggactcgtagtaacagtagattaaatatgtgtagatactatggttgtagaatacaattgtttagagaaccatatactgattatatatttagctggtttgatagtttaccaaaaactgttaacaatatgttttatgcttcatatcatccattaagattattaacacacaatagaaaaaagatactaccaagcaaccaaacacaaccacataaaagaaagccatacaaaactgtattcataccgccacccagattaatgaaaaaccaatggttttttcaacagcaattgtcagactttccactagtaacatttgtagcctcagcttgcagcctaacaggaatgtttggcagtacaaaatctattagtaataatgcaacactattctgtttagacacagacataatgtcatctcccacatttcaatacaaaaacacaactccaccaacatggggatacacattaggatcacaatacctatatggacttccacaaccacaacacccatttacatccaacacacgaggacaatgcatttacttaggaaacacaatgcaacaacaagaaggagacgaaattaaccacacaaaaaataccgaattccaaacaaaatacacaaaagacaaatggggtaacccattttactggatgtacacctcaggaaacgcagctctacttcaaacctcaaatgacccaactactatgtctacaaacagaaatcaacctgtagacgccacctgggaaaaacaaactcattacatatttaaagctagatacaacccatttcacgacaaaggttttggaaatgtagtttactttatacctacatatgacaaaggtacaaccacttgggaccccccaaaagaccctgaccttatatggagagacaaaccactatggctaatattttggggactagaagacatagtaaaaagaatgggaaaatgcacaaacctagatatggactggatattagtatttaaatcctcatatttagtaccaccacaaaaacactatgttattttaagttatgattttatacatggtagaggtccatatgacacagacaaagaatttatgactaaagatgatataacacactggtttcccagatataaatatcaaagacaagcagtagacaatataattagaacaggaccagcagtagcaacaggagataatgtacagaatatacaagctaaatgtaaatataccttttatttcaagtggggaggaaatacagaaccacaagaaacaatattcgacccaaacagccaacccatcactcccactcccaataacttcaacttcggggatgaaatcattgatccgtcaacagacattacatcagaaatatacccatgggactttagaagacacattcttacagcaacagctgcaaaaagaattaaagaaagcccactcactgaccaaactctattcacagatggaaggcagagctcaacggacatccccctgtggaaagaaacaacacaagaggaagagaccccgaaaacgcaaacagaagagatattccagcagctccagcagctccagcaatacaacagagaactcctccaccgactcagatcaataaaggaattatcttaaaaactgttaataacattcaattgttcccaaaacctagaaaaaaccgtagactaactccctatgaactacaaactgaaaaagaaatttgtaaatggttacatagaccccccagacattactttgatgaccctccattttacccttggttaccccctactccaaaagttccatttgtaaactttgaccttgtatctgcatttaataaaggccaacattaattcacttaacaagtctgtttatttaagtaaaaacttatataaacatccaccacctcccaatcaataaggcctacagggggctctgccccctaaaacccccaggggggggtaaaccccccctaaacccccccaaattaacatattcaacaggaaaaccacaaaattagaattgccgaccacaaaccgtcactaacttctgcttttccaataacttcctctttaccttataaatattcattaaattaattaataatcaccgtaattccggggaggagttaccaaactatataaccaacataacagacgaatggctgagtttatgccgccagacggagactgaagagcaacagcaacttcaggctgatcaaggg

SEQ ID NO: 3488 - protein, 664 aa, Betatorquevirus sp.; identical to SEQ ID NO: 1341

SEQ ID NO: 3489 - protein, 90 aa, Betatorquevirus sp.; identical to SEQ ID NO: 1342

SEQ ID NO: 3490 - protein, 65 aa, Betatorquevirus sp.
LFPKPRKNRRLTPYELQTEKEICKWLHRPPRHYFDDPPFYPWLPPTPKVPFVNFDLVSAFNKGQH

SEQ ID NO: 3491 - DNA, 2849 bp, Betatorquevirus sp.
cgggtaccgaaggtgagtgaaaccaccgaagttaaggggcaattcgggctgaatcagtctagcggaacgggcaagaaactaaaatataattcttttacagatgagtaaactgtataaacctacacagtttacacctaaagccctagaaagagaatggattaacaccgtgtttcaaacccactccttgttttgtgactgcgacaacgccggcaaccattttgaatacctgttaaaccaacaaaaatgccgccatttcaaagacgccgctactacaaccgaaactggtggaacagccgctggagaagaccttactatcgacgaaggagacctggaaagacttttcgatcccgaaaacgacgtagacgaagggtaagaagaaaatttttttataaaagacataaaaaacttaaaaagttaagactgcaacaataccaacctatgtctattaaaagatgcagaatagaaggatacttatgcttatttcaagctggctttggcagatacagtaataactatgctttatggaaagaatcaatttttccagaaaaatttcccggagggggaggatggagtatacaaaaactatctctagcaaatttatatacacaacatacagaatttatgaactactggactaaatctaacgacagactaaacctatgtagatttatgggcacaaaagtaacactgtttagacaaagatttacagactatatattcacttggatgcaagaacaacctagacatgtacacaaatattattactgctcctaccatccactacgactaatgactcacaaaagaaaaaaaatagttccctcactaacaactcaaccacataaaagaaaaccatacaaaacagtattcataccaccaccaaaagtaatgaaaaaccaatggttttttcaacaacaactatcaggttactcactagtaacttttgcagccacagcatgctccttaaataacacatttggatcagataaactacaaagcaataactgcacattattttgcatagacacatcaatattcagctccccctacttccaatttaaacaacaaaagccacagtggggataccaaataacaggtcaacaatttttatggggaatagacagccctgccttacaaccatcacaatataaatggcaaaactcaatttatttaggaaacacaatggaaaacaacagaggagcccatataactgcagcaaattataacaaatttgacgaatggggaaacccatttcactggacatacctaacacaacaccttccattagcacagacacaagccacagaaacaccagcagaaattaaatcaaaactagcacaacaaattacagaatctcaattaaaatccacaccattaatatttacagtacgatacaacccatttaaagacaaaggagaaggcaatagactttacatagttcctaattacctatcaagcaaaacaaactgggaacctccttcagacacagatttactattcgaaaattatccactgtggttaatgtgctggggttttgaagacatacttaaacgcataggcaaatccacagagctagaattaaactggacagcagtaatacagagcaaatacctatcacacccagaaagatattatgtattagtatcacataacttcattttaggaaaaggcccatacaacacagaacacgaagaccttacagcagatgatttaacacattggtatcctagatggaaataccaaagagaagctttcaataatataacacaaacagggccatttgtagcaacaggcgacaatgcacaaaacatacaagctacaatgaaatatcaattttattttaagtggggaggcaactccccaccacaggaaaacatcttcgatccagtcaaccagccaattaccccttatccccataacctcgaactcgacaatgaaatcattaatccatcaacaagcattacaacagaaatatacccatgggactttagacgagacttccttacatctacagctacaaaaagaattacagaaagctcaaaatatgacatccctttattcacagatggagaccaaactgcaacaacaacagaaaaaacccaaacaacaccaccggagaaagagacccagaaaacacaaaaagagacactgttcaaccagctcaagctcatccagcaatacaacctacaactccaacagcgactcctcaagctaaagcaattatctttggacctataaacaaagtatctttatttgaaactaaaataaaaaacagacgctttaggccacacgaatggcaaacagaaagagaaatagcaacaataatgaaacgcccacttcgtacttttatacatgatatgccattttacccatattgtgtacctgaacccaaagttaactttgatattgtaagtaaatttaataaaggcctgcattaattcacttgaggtgtccatttattaaagcttaaccttaataaacatccaccgcctccctaatacgcaggcgcacaagggggctccgcccccttacacccaccgcctccctaatacgcaggcgcacaagggggctccgcccccttacacccccgggggggaaaccccccctaaacccccccaactcattaatattaataaaggaaaccacaaaattagaattgccgaccacaaaccgtcactaacttcctctttacattatacttccttttttactcattaatattaataaaattaattagtaaacagcgcaaatccggggaggagcttcaaacatatataaataactatacttccgaatggctgagtttatgccgctagacggagacgagacaacagctctcggctgattcaggg

SEQ ID NO: 3492 - protein, 663 aa, Betatorquevirus sp.
MPPFQRRRYYNRNWWNSRWRRPYYRRRRPGKTFRSRKRRRRRVRRKFFYKRHKKLKKLRLQQYQPMSIKRCRIEGYLCLFQAGFGRYSNNYALWKESIFPEKFPGGGGWSIQKLSLANLYTQHTEFMNYWTKSNDRLNLCRFMGTKVTLFRQRFTDYIFTWMQEQPRHVHKYYYCSYHPLRLMTHKRKKIVPSLTTQPHKRKPYKTVFIPPPKVMKNQWFFQQQLSGYSLVTFAATACSLNNTFGSDKLQSNNCTLFCIDTSIFSSPYFQFKQQKPQWGYQITGQQFLWGIDSPALQPSQYKWQNSIYLGNTMENNRGAHITAANYNKFDEWGNPFHWTYLTQHLPLAQTQATETPAEIKSKLAQQITESQLKSTPLIFTVRYNPFKDKGEGNRLYIVPNYLSSKTNWEPPSDTDLLFENYPLWLMCWGFEDILKRIGKSTELELNWTAVIQSKYLSHPERYYVLVSHNFILGKGPYNTEHEDLTADDLTHWYPRWKYQREAFNNITQTGPFVATGDNAQNIQATMKYQFYFKWGGNSPPQENIFDPVNQPITPYPHNLELDNEIINPSTSITTEIYPWDFRRDFLTSTATKRITESSKYDIPLFTDGDQTATTTEKTQTTPPEKETQKTQKETLFNQLKLIQQYNLQLQQRLLKLKQLSLDL

SEQ ID NO: 3493 - protein, 90 aa, Betatorquevirus sp.
MSKLYKPTQFTPKALEREWINTVFQTHSLFCDCDNAGNHFEYLLNQQKCRHFKDAATTTETGGTAAGEDLTIDEGDLERLFDPENDVDEG

SEQ ID NO: 3494 - DNA, 2849 bp, Betatorquevirus sp.
cgggtgctgaaggtgagtgaaaccaccgaaatcaaggggcaatatgggcacagtcagtctggtggaacgggcaactaacttaaattattttacagatgagcgactatgtaccgccaagatatacaaaaagacaacttaatttacaacaagtaaactgctatgttggaatccatgacctaaactgcaactgcaaagaaccacttcaacacatcataaaacaaattataacccaggaaccatctcttaaaccatggctcgctactactatagaagaagatggacgccaagatggagaaccagatatagatggtttcggccctggagaattagagcgcctcttcgcagaaccagaaggcgaaaacgcagacgggtaagaagaaaaaagccttttttaccactaaaacaatggcaacctaaatatatacacaaactaactgtaaaaggactattttgcttattacaagtacataaagtagactataaccaaaactttaatcaatatgcaaatactgtaacagccgaaggactctctaatggaggcggctttactcttgtaagattcaacctgaacagcctatttgaacaacatgaaaaagcaagaaattactggactaaatcaaatagaaatatgcctctatttagatatactggatgttgtataaaagtatatagacctgaatatatagaccttgttataaaatttcaaagatgttatcctatgtgctgtacaaaactaatgtatactggatgtcaacctagcttattaatgatgtctagaggatctaaattaataagatgcagacaaaatgctccaaattccagaccatacaaaaaatttaaatttaaaccaccagaacaaatgctaaacaaatggtattttcaacacaatgaatcacaaacaggactaattatgatacaagctgcagcagcctcattttcaaactactacactagctcacatgcagaaagcagctcaataacactttggggcattaacacaagaatttttcaaaacttaaactttcaaactaaaaatacacaaggttacaaccctaaaacacaattttacttatatgccactaatggagaagaaaaactaaaagacattatatatctaggacagtcccaactatacaatgaaggtatacctataaaagaaacaccaggctacacaccatcaaactggacacaaacacttacaaactactttagcaacccaaaaaactggggaaatccttttcaccaagaacacgcacataaaatatatggaaagtactatttttcacaaacaccaccattacaaacattaaaaggaaacactcacacaggagaagaaaaaataaacagcgtacaagcactaaaagaatttacacaggaaatatttgtaaaatttagatacaacccattcacagacacaggatataataacatatacattttaccaaactttcaagacaataacgataatttagaaccacctgaagatatagacttacaaaacccaggattcccaaactggttatcatgctttggatttagagactatttaataaaactaggaaaaaaacccagaatcacacaagactgggtagttctaattaaaacaaaccacatatacccaaaagaaacttactacatgctaatagatgaatactttctacatggagactccgataaatataaaggcagaacagactgggataatgaacactggtatcctaactttacacaccaacaaggagctctaaacactctagcactatgtggtccaggagcacctaaactaggagacataaaactagcagaagcaaaaatagaatatcaattttattttaaggttggaggatgtgctacaccagctgaaaaaattacagacccttcaacacaaccgacttatgttacaccaactaatatccttgacacaaattcgttacagagtccagaggaatcaattgaaagtttcctctaccaattcgactggagacgacaccaaattactgaaacagctgcaaaacgaatcactaaagacttcccaactaaaacacatctatttacagatgcaggaagcagttcaacagaagtacccttcatcgaaacatacaaagaggagctcgaaacatcggaggaggaggaagcccaaaaagagacactattcgagcagctccagcgacagcgacacaagcagaaggacctccgactcagaatcaaacacctcctaaaccaactacaaaaattagaataaaacaccaaacagtaactgttaacctatttggggaaccaccagtaaaaaatcgcagaatgacaccaagagaatatcaagaggagctgcaagaagcagctatatgggaccattaccctagacagtatattttcgataaaccttggtataaaaacatgcctataacaccacttgtaccctctcttaattttgacttaaacttcaaagaataaaggcctgcaaacttcatacctcggtgtccatttattaagtttaaacttaaataaacatccaccacactccctaatacgcaggcgcacaagggggctccgcccccttaaacccccaagggggctccgcccccttaaacccccaagggggctccgcccccttacaaataaatattcaacaggaaaaccacctaatttgaattgccgaccacaaaccgtcacttacttccccaaaatacataacttccctaaaaactaataaatattcattaaattatttaataatcaccgtaattccggggaggagccatatacctatataactaactacagtttcgaatggctgagtttacgccgccagacggagacgggagcataacaatcgaccggctgactgtggg

SEQ ID NO: 3495 - protein, 663 aa, Betatorquevirus sp.
MARYYYRRRWTPRWRTRYRWFRPWRIRAPLRRTRRRKRRRVRRKKPFLPLKQWQPKYIHKLTVKGLFCLLQVHKVDYNQNFNQYANTVTAEGLSNGGGFTLVRFNLNSLFEQHEKARNYWTKSNRNMPLFRYTGCCIKVYRPEYIDLVIKFQRCYPMCCTKLMYTGCQPSLLMMSRGSKLIRCRQNAPNSRPYKKFKFKPPEQMLNKWYFQHNESQTGLIMIQAAAASFSNYYTSSHAESSSITLWGINTRIFQNLNFQTKNTQGYNPKTQFYLYATNGEEKLKDIIYLGQSQLYNEGIPIKETPGYTPSNWTQTLTNYFSNPKNWGNPFHQEHAHKIYGKYYFSQTPPLQTLKGNTHTGEEKINSVQALKEFTQEIFVKFRYNPFTDTGYNNIYILPNFQDNNDNLEPPEDIDLQNPGFPNWLSCFGFRDYLIKLGKKPRITQDWVVLIKTNHIYPKETYYMLIDEYFLHGDSDKYKGRTDWDNEHWYPNFTHQQGALNTLALCGPGAPKLGDIKLAEAKIEYQFYFKVGGCATPAEKITDPSTQPTYVTPTNILDTNSLQSPEESIESFLYQFDWRRHQITETAAKRITKDFPTKTHLFTDAGSSSTEVPFIETYKEELETSEEEEAQKETLFEQLQRQRHKQKDLRLRIKHLLNQLQKLE

SEQ ID NO: 3496 - protein, 92 aa, Betatorquevirus sp.
MSDYVPPRYTKRQLNLQQVNCYVGIHDLNCNCKEPLQHIIKQIITQEPSLKPWLATTIEEDGRQDGEPDIDGFGPGELERLFAEPEGENADG

SEQ ID NO: 3497 - DNA, 2848 bp, Gammatorquevirus sp.
cgggagcccgaggtgagtgaaaccagcgaggtctaggggcaattcgggctagggcagtctagcggaacgggcaagaaagttaaaacaataattgttttacagatgtccaagattcaagcgaaggacttttttaatcccacaccctacaatcaagacacgaagaatcaaatttggatgtctcaaattgctgatgctcacgataatatctgcaattgtaaccatccctttgctcatttgcttgccaatatctttcctgtgggtcacaaagaccgtgatcatacaattaaccaaattcttctaagagactacaaagaaaaatgccgttctggtggagaaggcgaaagaagccatggtggggcagatttaggtatcgcagacgcttctacaaaaacagaaggagacggagaagaagactacccaggagaagaactcgaagaactactcgccgccgccatagaagaaagcgcaaggtaagaagaaaactacaaaaaatatctataaaacaatggcaacctgatagaattgttagatgtaaaattaaaggcttttcttgccttgtactgggagctgagggcagacagatgtactgctacacaaatgaagcctcagactacccacaaccaaaagccccaggtggtggaggctttggatgtgaaactataactttaaaatggctattccaagaatatctaagacataataatatttggactaaatcaaatgactatacagatctttgcagatacactggatgcaaaataactctatacagacatcctacaatagattttgttgtattctatgatacacaacctccttttgacattaacaaatttacataccctgaactacagcctcaaaatgtactacttagaagaagaaaaagagttatactaagcagacaaactaatcctgctggcaaaattaaacatactattaaaataaaaccaccaaaacaactaataactaaatggttttttcaaagagatttttgtacctatggcttactaaaactatgtgcttctgcagcagactttaactacccaagaatatcacccttatctcaaagtactattttaacagttctagctttaaatattaacttttaccaaaacagtgactgggcactaacaaaaacacacgacccatataaaaatataacaacacagaaactaccattatactttacatacacagacaaacaaggaagagaccagacatatgcctacaacccacaaggtgtcacagacccagacccgacagcaaaatattactactccattaacagagaaacaggcttattttcaccacaagtgttactagctaaaaaagtatccacagagaaaggtagtgctgaccctggactaggatctctaccactaataacacttagatacaacccacaagaagacacaggccatggcaatgaagtatatcttaccagtattctaaatggtcactacaataagccaagcataagcactgactactcatttaatggtgttccactatatgtagccttttatggcttttggaattacttgcaaatctacagccataataaaggcttctacaaatcatatatgtttgtagttaagagtgatgcactaagaccactttcagtagcaactcctgaaaaatactttccaatactagatgctgactttgtctatggtaaactaccatgggacgaatacatgtcagcagacattaaaaaactgtggtatcctacagcagaaagacaacaggttataattaaccaaatagtagaatcaggaccatttatgcctaaactatccaatttaaaaaacagtacatgggaactaaattacaaatatcaatttttttttaagtggggaggcccatacaccacagatcaacccgttgaagatccatgcaccagaaacaaatacaatgtccccgatacactccaacaatcaatacaaattaccgaccctgaaaaaaacaaaacagaaggcatactccatgactgggactttagaaggggcttcattacacaaacagctcttaaaagaatgtcacaaaacctcccaattgattcatctctcgaatctgatgactcagaatcaccacaaaagaaaagaaaaatcaccaaggaactcccattccaacaaaagaaagaagaaaaaatccagaaatgtctcctctcactctgcgaagagccttcctgccaagaaacaccagaaacactccagcagtacatcctccagcagcgaaagcagcagcgagagctcaagcacagcatcctccagctcctaactcacctaaagaagggccaaacctgtatggaactccaaacaggccttttagagtagagccattcaaaccaggatttgaatgggaaacagaatgtgaatgtgcaaaagcattttgtagaccacccagacattataaaaatgatcctccattttacccatggttacctctaacaccccttgtaaactttaaccttaactacaaatgctaggccctcaatgtacacttagtggtggatgtttaataaagtttgcccccaaaaaaaaaaaaaaaaaaaaaaataaaaaattgcaaaaattcggcgctcgcgcgcgcagccccccccgcaccccccctacgtcacagaccacgcccccgccgccatcttgggcgcggcagggcgggggctaaaatggcgggaaccaatcattttatactttcactttccaattaaaacttgccacgtaacaaaaaatgggtggagactttaaaactatataaccaagtacagtgacgaatggctgagtttaccccgctagacggtgcagggaccgcatcgagcgcagcgagaaggtccccggctgcccatggg

SEQ ID NO: 3498 - protein, 672 aa, Gammatorquevirus sp.
MPFWWRRRKKPWWGRFRYRRRFYKNRRRRRRRLPRRRTRRTTRRRHRRKRKVRRKLQKISIKQWQPDRIVRCKIKGFSCLVLGAEGRQMYCYTNEASDYPQPKAPGGGGFGCETITLKWLFQEYLRHNNIWTKSNDYTDLCRYTGCKITLYRHPTIDFVVFYDTQPPFDINKFTYPELQPQNVLLRRRKRVILSRQTNPAGKIKHTIKIKPPKQLITKWFFQRDFCTYGLLKLCASAADFNYPRISPLSQSTILTVLALNINFYQNSDWALTKTHDPYKNITTQKLPLYFTYTDKQGRDQTYAYNPQGVTDPDPTAKYYYSINRETGLFSPQVLLAKKVSTEKGSADPGLGSLPLITLRYNPQEDTGHGNEVYLTSILNGHYNKPSISTDYSFNGVPLYVAFYGFWNYLQIYSHNKGFYKSYMFVVKSDALRPLSVATPEKYFPILDADFVYGKLPWDEYMSADIKKLWYPTAERQQVIINQIVESGPFMPKLSNLKNSTWELNYKYQFFFKWGGPYTTDQPVEDPCTRNKYNVPDTLQQSIQITDPEKNKTEGILHDWDFRRGFITQTALKRMSQNLPIDSSLESDDSESPQKKRKITKELPFQQKKEEKIQKCLLSLCEEPSCQETPETLQQYILQQRKQQRELKHSILQLLTHLKKGQTCMELQTGLLE

SEQ ID NO: 3499 - protein, 123 aa, Gammatorquevirus sp.
MSKIQAKDFFNPTPYNQDTKNQIWMSQIADAHDNICNCNHPFAHLLANIFPVGHKDRDHTINQILLRDYKEKCRSGGEGERSHGGADLGIADASTKTEGDGEEDYPGEELEELLAAAIEESAR

SEQ ID NO: 3500 - protein, 109 aa, Gammatorquevirus sp.
MSPLTLRRAFLPRNTRNTPAVHPPAAKAAARAQAQHPPAPNSPKEGPNLYGTPNRPFRVEPFKPGFEWETECECAKAFCRPPRHYKNDPPFYPWLPLTPLVNFNLNYKC

SEQ ID NO: 3501 - DNA, 2848 bp, Betatorquevirus sp.
cgggtaccgaaggtgagtgaaaccaccgaagttaaggggcaattcgggctgaatcagtctagcggaacgggcaagaaactaaaatataattcttttacagatgagtaaactgtataaacctacacagtttacacctaaagccctagaaagagaatggattaacaccgtgtttcaaacccactccttgttttgtgactgcgacaacgccggcaaccattttgaatacctgttaaaccaacaaaaatgccgccatttcaaagacgccgctactacaaccgaaactggtggaacagccgctggagaagaccttactatcgacgaaggagacctggaaagacttttcgatcccgaaaacgacgtagacgaagggtaagaagaaaatttttttataaaagacataaaaaacttaaaaagttaagactgcaacaataccaacctatgtctattaaaagatgcagaatagaaggatacttatgcttatttcaagctggctttggcagatacagtaataactatgctttatggaaagaatcaatttttccagaaaaatttcccggagggggaggatggagtatacaaaaactatctctagcaaatttatatacacaacatacagaatttatgaactactggactaaatctaacgacagactaaacctatgtagatttatgggcacaaaagtaacactgtttagacaaagatttacagactatatattcacttggatgcaagaacaacctagacatgtacacaaatattattactgctcctaccatccactacgactaatgactcacaaaagaaaaaaaatagttccctcactaacaactcaaccacataaaagaaaaccatacaaaacagtattcataccaccaccaaaagtaatgaaaaaccaatggttttttcaacaacaactatcaggttactcactagtaacttttgcagccacagcatgctccttaaataacacatttggatcagataaactacaaagcaataactgcacattattttgcatagacacatcaatattcagctccccctacttccaatttaaacaacaaaagccacaatggggataccaaataacaggtcaacaatttttatggggaatagacagccctgccttacaacgatcacaatataaatggcaaaactcaatttatttaggaaacacaatggaaaacaacagaggagcccatataactgcagcaaattataacaaatttgacgaatggggaaacccatttcactggacatacctaacacaacaccttccattagcacagacacaagccacaattccaccagacaaaattaaagacaaactaacagacacaattgaccagtctcaattaaaatccacaccattaatatttacagtacgatacaacccatttaaagacaaaggagaaggcaatagactttacatagttcctaattacctatcaagcaaaacaaactgggaacctccttcagacacagatttactattcgaaaattatccactgtggttaatgtgctggggttttgaagacatacttaaacgcataggcaaatccacagagctagacttaaactggacagcagtaatacagagcaaatacctatcacacccagaaagatattatgtattagtatcacataacttcattttaggaaaaggcccatacaacacagaacacgaagaccttacagcagatgatttaacacattggtatcctagatggaaataccaaagagaagctttcaataatataacacaaacagggccatttgtagcaacaggcgacaatgcacaaaacatacaagctacaatgaaatatcaattttattttaagtggggaggcaactccccaccacaggaaaacatcttcgatccagtcaaccagccaattaccccttatccccataacctcgaactcgacaatgaaatcattaatccatcaacaagcattacaacagaaatatacccatgggactttagacgagacttccttacatctacagctacaaaaagaattacagaaagctcaaaatatgacatccctttattcacagatggagaccaaactgcaacaacaacagaaaaaacccaaacaacaccaccggagaaagagacccagaaaacacaaaaagagacactgttcaaccagctcaagctcatccagcaatacaacctacaactccaacagcgactcctcaagctaaagcaattatctttggacctataaacaaagtatctttatttgaaactaaaataaaaaacagacgctttaggccacacgaatggcaaacagaaagagaaatagcaacaataatgaaacgcccacttcgtacttttatacatgatatgccattttacccatattgtgtacctgaacccaaagttaactttgatattgtaagtaaatttaataaaggcctgcattaattcacttgaggtgtccatttattaaagcttaaccttaataaacatccaccgcctccctaatacgcaggcgcacaagggggctccgcccccttaaaccaccgcctccctaatacgcaggcgcacaagggggctccgcccccttacacccccgggggggaaaccccccctaaacccccccaactcattaatattaataaaggaaaccacaaaattagaattgccgaccacaaaccgtcactaacttcctctttacattatacttccttttttactcattaatattaataaaattaattagtaaacagcgcaaatccggggaggagcttcaaacatatataaataactatacttccgaatggctgagtttatgccgctagacggagacgagacaacagctctcggctgattcaggg

SEQ ID NO: 3502 - protein, 663 aa, Betatorquevirus sp.
MPPFQRRRYYNRNWWNSRWRRPYYRRRRPGKTFRSRKRRRRRVRRKFFYKRHKKLKKLRLQQYQPMSIKRCRIEGYLCLFQAGFGRYSNNYALWKESIFPEKFPGGGGWSIQKLSLANLYTQHTEFMNYWTKSNDRLNLCRFMGTKVTLFRQRFTDYIFTWMQEQPRHVHKYYYCSYHPLRLMTHKRKKIVPSLTTQPHKRKPYKTVFIPPPKVMKNQWFFQQQLSGYSLVTFAATACSLNNTFGSDKLQSNNCTLFCIDTSIFSSPYFQFKQQKPQWGYQITGQQFLWGIDSPALQRSQYKWQNSIYLGNTMENNRGAHITAANYNKFDEWGNPFHWTYLTQHLPLAQTQATIPPDKIKDKLTDTIDQSQLKSTPLIFTVRYNPFKDKGEGNRLYIVPNYLSSKTNWEPPSDTDLLFENYPLWLMCWGFEDILKRIGKSTELDLNWTAVIQSKYLSHPERYYVLVSHNFILGKGPYNTEHEDLTADDLTHWYPRWKYQREAFNNITQTGPFVATGDNAQNIQATMKYQFYFKWGGNSPPQENIFDPVNQPITPYPHNLELDNEIINPSTSITTEIYPWDFRRDFLTSTATKRITESSKYDIPLFTDGDQTATTTEKTQTTPPEKETQKTQKETLFNQLKLIQQYNLQLQQRLLKLKQLSLDL

SEQ ID NO: 3503 - protein, 90 aa, Betatorquevirus sp.; identical to SEQ ID NO: 3493

SEQ ID NO: 3504 - DNA, 2847 bp, Alphatorquevirus sp.
taaaaaagccatgtttctcggtaaactttacagaaagaagaggcgcctgccactgtccccactgcacactccacagaaaactcgcaggcttttgactgctatgtggaggccccccgtgcacaatgtccgcgggcaggagagacagtggtacgagtcctgctttcggtctcacgcttgcttttgtggctgtggtgattttattcggcatctttgtgatctggcgaatgattttggacgtcctcctaccgtccctcgacccccggcaccaccacctccagtaaggcctctgccagctctcccggcacccccaaacccccccggtagcagagcggcatggcctactggtggtggagacggagaagacgagccccgaggtggaggagacggcgctggaggactcgcagaactcgcagacgacgagctgctttccgccgtcgtggacgccgccgaagagtaagaaagaggagggggaggtggaggaggacttatagaaaatggcggaggggcagaaagagacgcaggcacaaaagacgcttaatactgactcagtggcaaccagcctttataagacgctgctatatagtgggctacctgcccctcttaatatgcggagaaaacacctccggcagaaactttgctacccactcagacgacctaatatccaacggaccttacgggggaggcatgaccactaccaaattcaccctcagaatactgtatgacgaacacctgagacaccttaactactggactgtcagtaacgaggacttagacctgtgcagataccttgggggaaccttctacgcgtacagacaccccactgtagactttatcatacaaatccacaccagtccccctttcctagacactcccctaacgggtcccagcatacacccaggcatgctaatgctgacaaaaaacaaaatactaatacccagcttaaaaaccagacctaacaaaaagcacaaagtaaaaattagattcaggccccctaaactattccaagacaagtggtacccccagtcagagctctgtgacacaacactactaaccatctttgcaaccgcatgtgacctgcaatttccgttcggctcaccactaacgaacaacccttgcgtcaacttccaggtgctaggttccgtttacaaacggcacctcagtatacttcctgataaactaaattcatatgaacaacactatgaaactaacctatataaagtagtacaatattatgatacattccaaactatagcacaaataaaacctagcgccacacaagcaaacttctcacccccatggaatgatatacaaaataaaataacattaagtgaaacaggctcaaaccaatccacaagcaatgacacctggtacctaggccatgcatatgacaaagataaaatacaacaagcagcctataaaattagagacaaatacttaaccgcaacaagattagcactaccagcactagcaacactaggaaacaaaatgctagaataccacacaggcatctacagctctatattcttatctgcaggcagatcttactttgaaaccctaggggcctacacagacataatttacaacccactagtagacaaaggcataggtaacaaattgtggctagaccccctatcaaaagaagacgcagtgctaaacagaaaacaagcaaaagtactaatagaagacatacctctatgggcagccctatttggctacacagaatttgcagccaagtacacaggagactctgccataacagccaactacagactgacaatacggtgcccctacacagaccccatgctgacagacacaagcaacgaagaccagggctttgtaccctactctaaaaactttggcaacggaaaaatgcccggaggcagtgccaatgttccactgactatgagaataaggtggtaccccatactattccatcagctagaatggctagaagaaatgattcagtctggaccgtttgcataccggggcgacgaaaaaagctgtgtgttagccataaagtacattttcagatggaaatggggaggtaaccctgtgtctcaccagattgtgcgaaatccctgcaaaggagggtccggttcccgtcgagagcctcgctcaatacaagcagctgacccgaaatacatcacaccgagactatccttccactcgtgggacttcagacgagggctttttggctcggcaagtattaaaagaatgtcagaagaatcaacagctcctgtctatcctacaggcccaccaagaaaaagaccaagaaaagacacggacccgtacgagtcggggcaagaagaaaactcactttcaagacacctccagctccagccctgggtccactccagccaagaagcccaaagcgaagaagaaacgcaagtcccgacggacctacaggaacaactcctccagcagctccgagaccaacagcagctccgacagcacctgcagtccctcgcctcacaagtcctcaaaatcagggcgggatacggcatacaccccctattatcttcccaagcctaaacaaggtctttatgtttgagcccaaaggccccaaacccatacagggctatgaggcctggttagatgagtaccagacagcaggcgtctgggataggccggtaagaacataccacacagacacccccttctatccctgggcacccaaaccccccaaccaattccgtgtcagcttcaaactcggctttcaataaaatttcaaggcctttgactgttcacttgtcggtgtctacctctataagtcactaagcactccgagcgtcagcgaggagtgcgaccctagggggggactcaacgccttcggagccgcgcgctacg

SEQ ID NO: 3505 - protein, 732 aa, Alphatorquevirus sp.; identical to SEQ ID NO: 1163

SEQ ID NO: 3506 - protein, 148 aa, Alphatorquevirus sp.
MFLGKLYRKKRRLPLSPLHTPQKTRRLLTAMWRPPVHNVRGQERQWYESCFRSHACFCGCGDFIRHLCDLANDFGRPPTVPRPPAPPPPVRPLPALPAPPNPPGSRAAWPTGGGDGEDEPRGGGDGAGGLAELADDELLSAVVDAAEE

SEQ ID NO: 3507 - protein, 126 aa, Alphatorquevirus sp.; identical to SEQ ID NO: 1165

SEQ ID NO: 3508 - DNA, 2846 bp, Betatorquevirus sp.
cgggagccggaggtgagtgaaaccaccgtagtctaggggcaattcgggctagatcagtctggcggagtctaggggcaattcgggctagatcagtctggcggaacgggcaagaaacttaaaatattttctattacagatgtcaaagtttctaaaaccaactttatacaatggccgccaacaagaaaacaactggctaaacttcaacattcactttcatgactccttctgcggctgccctgaaccactaacccaccttagatacctacttaaccaacaatgccgccataccaaagacgccgatacttctacagaaattggtggaattcaagaagaaaaagatattggaatcgacgctggagacctagaaaaactgttcgctatagaaaacgaagacaacgacgggtaagaagacgtttttataaaaaaaatagaaaacttaaaagactaagaataaatgaatggcaacctagttcaattaaaaaatgtagaatagaaggatacctagtactatttcaagcgggatatggacgctattcaaataactatccactatggaaagaagtaatatttccaccacactatccaggtggcggtggatggggaattcaacagttaagcctaggaaatttatatactcaacataaagaactaatgaactactggactaaaagtaatgatagaatgaatatgtgcagatatatgggcgtaacagtcacattatttagagagcaacatacagactggatattttcatactatgattccttacctaaaacagtaacaaaatatttttatacttcacaccaccctatgctaatgctaacacacaaaagaaagaaaacaataccaagttttgactcacagccacacaaaaaaaaaccatacaaaaaaatatttataagaccaccaaggctaatgaaaaaccaatggtactttcaacaacaactagcagactttccattactaacatttgctgcatctgcatgcagccttcaaggcatgtttggctccatcaacgctgttaacaataatgctacaatgtactgtattgatcatgccgtatttacaaatccaatatttcaatacaaaacacaaacacatccagaatggggttacaaacccggtgacaatatttatctatacggcctgcaaaacggagcacacatttttactgacaacaattacagagacagtatttatctaggaaatacaatgaataatcaaagaggtgcagttattaatacttattcacaagatcagtttatgaataaatatccctttggagaatggggtaacccatttttttggggatacatgacaggaaatttaactgtattccaaaatcatttagaccccaaaaccatggcaaaaactccaacacaaaaactagaacaatcctggctaagagaaaacccatatgtatttaaagttagatataacccatttaaagacaaaggacgaggaaaccaagtatactttataccaaactatgacagtagccacaacacatgggaacccacaaaagacccagatataatatttgaaaattatccactatggttactactttggggattagaagacatagtaaaaagaatgggaaaatgcaaaaacttagataatgactggacactagtaataaaatcaaactggatactaccaccacaagcatactatataccagtaagctatgactttgtacatggcagaggaccatatgacacagaaagagaagaaatgagtagagatgactatactaactggtaccctagatttaaataccaaagacaagcaatacaaaatattataatgacaggccctgcagtagctagaggagactatgctaaaaatatacaagctaaaatgaaatatacctttcattttaagtggggaggcaactccgaacctcaagaatcaatatttgacccaacaaaccaaccaattacacctgcaccccctaacatctacagcatcaatgaaatcacaaatccgcatgcaagcattacgggagaaatctacccatgggatttcagacgagatatgcttacagaatcagctacagaaagaattagacaaagcccaactaatgaaacatatatgttcacagatggagaccaaacttcaacagacatccaaatcttcacaccggagacacaaaagaaaaagaccccgaaaacacaaaaagaaacacttctccagcagctccagctcatccagtcctacaaccaacagctccaactcagattcagaaaactaaaacaattatcaaaggacccataaaccaagtgcaattatttccaaaacacaaaaataggagatttaaaccatatgaatttgaattagaattaacaatggctaaacttttcaaaagacgaccccgaacatacttttatgacatgccaacttacgactggttaccccctgaacccaaagttaactttgatcttgtacatggatttaataaaggccagcattaattcacttgaggtgtctgtttatttattattaaactttaataaacatccaccgcctccctaatacgcaggcgcaaagggggctccgcccccttaaaccccccgggggggaaacccccccgaacccccccaactcattaatattcaacaggaaaaccacctcatttgaattgccgaccacaaaccgtcaactacttccccttttataagaacttcctcttttacttataaatattcattacattaattatgaatcaccgtcacatagggaggagccaccattactataaaacaaacaacacttccgaatggctgagtttatgctgccagacggagacagcaaccacgcagtgactgctggctgatcttggg

SEQ ID NO: 3509 - protein, 667 aa, Betatorquevirus sp.
MPPYQRRRYFYRNWWNSRRKRYWNRRWRPRKTVRYRKRRQRRVRRRFYKKNRKLKRLRINEWQPSSIKKCRIEGYLVLFQAGYGRYSNNYPLWKEVIFPPHYPGGGGWGIQQLSLGNLYTQHKELMNYWTKSNDRMNMCRYMGVTVTLFREQHTDWIFSYYDSLPKTVTKYFYTSHHPMLMLTHKRKKTIPSFDSQPHKKKPYKKIFIRPPRLMKNQWYFQQQLADFPLLTFAASACSLQGMFGSINAVNNNATMYCIDHAVFTNPIFQYKTQTHPEWGYKPGDNIYLYGLQNGAHIFTDNNYRDSIYLGNTMNNQRGAVINTYSQDQFMNKYPFGEWGNPFFWGYMTGNLTVFQNHLDPKTMAKTPTQKLEQSWLRENPYVFKVRYNPFKDKGRGNQVYFIPNYDSSHNTWEPTKDPDIIFENYPLWLLLWGLEDIVKRMGKCKNLDNDWTLVIKSNWILPPQAYYIPVSYDFVHGRGPYDTEREEMSRDDYTNWYPRFKYQRQAIQNIIMTGPAVARGDYAKNIQAKMKYTFHFKWGGNSEPQESIFDPTNQPITPAPPNIYSINEITNPHASITGEIYPWDFRRDMLTESATERIRQSPTNETYMFTDGDQTSTDIQIFTPETQKKKTPKTQKETLLQQLQLIQSYNQQLQLRFRKLKQLSKDP

SEQ ID NO: 3510 - protein, 103 aa, Betatorquevirus sp.
LAERARNLKYFLLQMSKFLKPTLYNGRQQENNWLNFNIHFHDSFCGCPEPLTHLRYLLNQQCRHTKDADTSTEIGGIQEEKDIGIDAGDLEKLFAIENEDNDG

SEQ ID NO: 3511 - DNA, 2846 bp, Betatorquevirus sp.; identical to SEQ ID NO: 3508

SEQ ID NO: 3512 - protein, 667 aa, Betatorquevirus sp.; identical to SEQ ID NO: 3509

SEQ ID NO: 3513 - protein, 103 aa, Betatorquevirus sp.; identical to SEQ ID NO: 3510

SEQ ID NO: 3514 - DNA, 2846 bp, Betatorquevirus sp.
cgggagccgaaggtgagtgaaaccaccgtagtctaggggcaattcgggctagtctaggggcaattcgggctagatcagtctggcggaacgggcaagaaacttaaatatatttttttacagatgagcaaattctacaaaccaacaaacaactcacccagaagaaatgaactacaaattatgaacctgattttctcctcacacgacagcctttgttcctgcagcaacgcatctgaacacctcctccatcttctaaccagagaaaaatgcctccatttcaaagacgccgctactactacagaaactactggaactaccgaaaaccaagatcttactatagacgccggagatttagaaaatttattttcggaagaaaacgacgtcgacgaagggtaagaagaaaaagattttctaaacgtaatagaaaactaaaaacaattaaaattaatcaatggcagccatcctccattaaaaaatgcaaaatacaagggtacctatgcttatttcaagcaggacccggacgatatggaaataactatccattatggaaagaatcatactttcctgaacattatccaggaggaggaggatggagcattcaacaactttctttaggaatactgtttaaagaacataaagactatatgaattactggactcgtagtaacagtagattaaatatgtgtagatactatggttgtagaatacaattgtttagagaaccatatactgattatatatttagctggtttgatagtttaccaaaaactgttaacaatatgttttatgcttcatatcatccattaagattattaacacacaatagaaaaaagatactaccaagcaaccaaacacaaccacataaaagaaagccatacaaaactgtattcataccgccacccagattaatgaaaaaccaatggttttttcaacagcaattgtcagactttccactagtaacatttgtagcctcagcttgcagcctaacaggaatgtttggcagtacaaaatctattagtaataatgcaacactattctgtttagacacagacataatgtcatctcccacatttcaatacaaaaacacaactccaccaacatggggatacacattaggatcacaatacctatatggacttccacaaccacaacacccatttacatccaacacacaaggacaatgcatttacttaggaaacacaatgcaacaacaagaaggagacgaaattaaccacacaaaaaataccgaattccaaacaaaatacacaaaagacaaatggggtaacccattttactggatgtacacctcaggaaacgcagctctacttcaaacctcaaatgacccaactactatgtctacaaacagaaatcaacctgtagacgccacctgggaaaaacaaactcattacatatttaaagctagatacaacccatttcacgacaaaggttttggaaatgtagtttactttatacctacatatgacaaaggtacaaccacttgggaccccccaaaagaccctgaccttatatggagagacaaaccactatggctaatattttggggactagaagacatagtaaaaagaatgggaaaatgcacaaacctagatatggactggatattagtatttaaatcctcatatttagtaccaccacaaaaacactatgttattttaagttatgattttatacatggtagaggtccatatgacacagacaaagaatttatgactaaagatgatataacacactggtttcccagatataaatatcaaagacaagcagtagacaatataattagaacaggaccagcagtagcaacaggagataatgtacagaatatacaagctaaatgtaaatataccttttatttcaagtggggaggaaatacagaaccacaagaaacaatattcgacccaaacagccaacccatcactcccactcccaataacttcaacttcggggatgaaatcattgatccgtcaacagacattacatcagaaatatacccatgggactttagaagacacattcttacagcaacagctgcaaaaagaattaaagaaagcccactcactgaccaaactctattcacagatggaaggcagagctcaacggacatccccctgtggaaagaaacaacacaagaggaagagaccccgaaaacgcaaacagaagagatattccagcagctccagcagctccagcaatacaacagagaactcctccaccgactcagatcaataaaggaattatcttaaaaactgttaataacattcaattgttcccaaaacctagaaaaaaccgtagactaactccctatgaactacaaactgaaaaagaaatttgtaaatggttacatagaccccccagacattactttgatgaccctccattttacccttggttaccccctactccaaaagttccatttgtaaactttgaccttgtatctgcatttaataaaggccaacattaattcacttaacaagtctgtttatttaagtaaaaacttatataaacatccaccacctcccaatcaataaggcctacagggggctctgccccctaaaacccccagggggggtaaaccccccctaaacccccccaaattaacatattcaacaggaaaaccacaaaattagaattgccgaccacaaaccgtcactaacttctgcttttccaataacttcctctttaccttataaatattcattaaattaattaataatcaccgtaattccggggaggagttaccaaactatataaccaacataacagacgaatggctgagtttatgccgccagacggagactgaagagcaacagcaacttcaggctgatcaaggg

SEQ ID NO: 3515 - protein, 664 aa, Betatorquevirus sp.
MPPFQRRRYYYRNYWNYRKPRSYYRRRRFRKFIFGRKRRRRRVRRKRFSKRNRKLKTIKINQWQPSSIKKCKIQGYLCLFQAGPGRYGNNYPLWKESYFPEHYPGGGGWSIQQLSLGILFKEHKDYMNYWTRSNSRLNMCRYYGCRIQLFREPYTDYIFSWFDSLPKTVNNMFYASYHPLRLLTHNRKKILPSNQTQPHKRKPYKTVFIPPPRLMKNQWFFQQQLSDFPLVTFVASACSLTGMFGSTKSISNNATLFCLDTDIMSSPTFQYKNTTPPTWGYTLGSQYLYGLPQPQHPFTSNTQGQCIYLGNTMQQQEGDEINHTKNTEFQTKYTKDKWGNPFYWMYTSGNAALLQTSNDPTTMSTNRNQPVDATWEKQTHYIFKARYNPFHDKGFGNVVYFIPTYDKGTTTWDPPKDPDLIWRDKPLWLIFWGLEDIVKRMGKCTNLDMDWILVFKSSYLVPPQKHYVILSYDFIHGRGPYDTDKEFMTKDDITHWFPRYKYQRQAVDNIIRTGPAVATGDNVQNIQAKCKYTFYFKWGGNTEPQETIFDPNSQPITPTPNNFNFGDEIIDPSTDITSEIYPWDFRRHILTATAAKRIKESPLTDQTLFTDGRQSSTDIPLWKETTQEEETPKTQTEEIFQQLQQLQQYNRELLHRLRSIKELS

SEQ ID NO: 3516 - protein, 90 aa, Betatorquevirus sp.; identical to SEQ ID NO: 1342

SEQ ID NO: 3517 - protein, 65 aa, Betatorquevirus sp.; identical to SEQ ID NO: 3490

SEQ ID NO: 3518 - DNA, 2844 bp, Betatorquevirus sp.
ttgggcgggagccgaaggtgagtgaaaccaccgaaggggcaattcgggctagatcagtctggcggaacgggcaagaaacttaaaatattattcttttacagaaatgagcaaactatttcagaaaactaaagacaatgcaagaaaattagaacttcactggatgaatataatcttccaaacacacgaccaaatatgccgctgcaaggacccaatgctacaccttattcaactaattaacctgcaaaacagcaaaaaagaattatccattgaacaactacaaaaaataaaatgccaccttactggagaagaagaagatatccaagaagatacaaacgttttagatggcgtcgacctcgaaaaacttttttcagaaccagacgatggagacgacgccgccgctacggggtaagaagaaaatttaaactgtcctctataaaaataagacaatttcaacctaagcaaataagaaaatgtcatataaagggatttaaatgtttatttcaaggaagctcactaagagcagataacaactactggcaatatccaagaagtattgttccagaaggacaaccggggggaggaggatggggtctgttagcattaagcttgtctagcttctacgaggactggcaatatttacaaaatatatttactgctagcaatgctggattacctcttgtaagaataataggatttaaattaacattctatcaagaagactatgtagactatgttgtagaaatagataactgctggccaatgttagatacaccattaaaacacccaaactgtcaaccaagtagaatgctcttaagcaaaaagaaaattataatgccaagcacacaaacaagaccactaagaaaaagaaagaaaacagtatgggttagaccaccaagtcaactagaaaatagatggtactttcaaaaagacatatgcaacacaaaattaataatgatagctgccacagcatgctccttaaaccactattacatagcacccagagcacaaagtaacaatgctaccctatggtgcctaaacacaaacatttttaaaaatgcagacttccaacactttggaacaaatggataccaaccaaaaaacaacacatatatatacacaaacacaaacacaaacccagatcaattctctaaagaaaaactaataccattaacagacccaaaaacatacacagcaggtgcaactagcgccacaacaagtaaggccactaaaggaaatccattttataaaacatacttattaggaacagcaccaacatacaccagcacaaaatctccacaagaattaagcacaatgtcgtcagatcaaattaaacaagaaatgacaccaacacactggggactagcaataaagttaagatacaatccagacaaagacaacggtagcacaaacaaagcatactttgtagacaactacagaacagcaggagacaggggatttgaaccaccaacagaccccaatagaataatagaaggctttccattatggttattactatggggatggccagactggattaaaaaactagcagaaatacacagagtagacaaagactatattctagtaatacaaacagaccaatttacagaaaagtttccatactatgtattattagacgacacatttgtaaatggaaaaggtgcatatgaaacaccacaaacaactgaagacttactaaactggtatccaaaatttttatatcaacacgctagtgtaacaaacatttgtaaaactggaccaggggtaacaagaactaacatgttacacagtgtagaggcaaaaatgaaatatgacttaactgtaaaatggggaggatgtccttctactttagaaaaagtatatgatccttgttcacagccaaaatggcctacaccatataacttcactgaaggactacagatccagaatccagcaaacgaccccagagacattatccatacctgggacgtcagaagagattttattacagcaaaagctatcaaaagacttaaaaaagacaaaaaaactgatgactgtactttctcaactacagaccacagatcaggagtaccagcaattggctacacaactcaaagccccgaaacctcggagacagaaacggagacatcggaagaagagacgtcgtcactacagtcaaagctcaaccagctccgaaggaacaaccgcaagctacacaagcagctcctcaaattaatacaaactacaaaataattaactgtaaaactaaaatacaattattccctaatgtaaaagtaaaaaaaaatcgccgctttcacccctgggaaatagatactgaaagggatttagctaaaatatttagaagacctatgcgtacatttttctatgatgatcctttttacccttacttgcctcctacaccacttgctaatcaatatgcaaactttaaactaaactttgttgactcagatgaataaacaaggccttcaaatttcacttaatggtgtctgtttctttaagtttaaccttaataaactgactccgcctccctaaaattagggcgccaaaagggggctccgcccccttaaacccccaagggggctccgcccccttacacccccaagggggctccgccccctttaacccccattaatattcataaaggaaaccacaaaattagaattgccgaccacaaactgccatatgcaaattaacttcctaaaaccaactacaacttccctaaaaattaattaataaacagcgtcacaagggaggagccaaaccactatataactaactacactgacgaatggctgagtttatgccgccagacgaagacaggatcactacagtgactccaggctgatc

SEQ ID NO: 3519 - protein, 646 aa, Betatorquevirus sp.
MPPYWRRRRYPRRYKRFRWRRPRKTFFRTRRWRRRRRYGVRRKFKLSSIKIRQFQPKQIRKCHIKGFKCLFQGSSLRADNNYWQYPRSIVPEGQPGGGGWGLLALSLSSFYEDWQYLQNIFTASNAGLPLVRIIGFKLTFYQEDYVDYVVEIDNCWPMLDTPLKHPNCQPSRMLLSKKKIIMPSTQTRPLRKRKKTVWVRPPSQLENRWYFQKDICNTKLIMIAATACSLNHYYIAPRAQSNNATLWCLNTNIFKNADFQHFGTNGYQPKNNTYIYTNTNTNPDQFSKEKLIPLTDPKTYTAGATSATTSKATKGNPFYKTYLLGTAPTYTSTKSPQELSTMSSDQIKQEMTPTHWGLAIKLRYNPDKDNGSTNKAYFVDNYRTAGDRGFEPPTDPNRIIEGFPLWLLLWGWPDWIKKLAEIHRVDKDYILVIQTDQFTEKFPYYVLLDDTFVNGKGAYETPQTTEDLLNWYPKFLYQHASVTNICKTGPGVTRTNMLHSVEAKMKYDLTVKWGGCPSTLEKVYDPCSQPKWPTPYNFTEGLQIQNPANDPRDIIHTWDVRRDFITAKAIKRLKKDKKTDDCTFSTTDHRSGVPAIGYTTQSPETSETETETSEEETSSLQSKLNQLRRNNRKLHKQLLKLIQTTK

SEQ ID NO: 3520 - protein, 116 aa, Betatorquevirus sp.
LAERARNLKYYSFTEMSKLFQKTKDNARKLELHWMNIIFQTHDQICRCKDPMLHLIQLINLQNSKKELSIEQLQKIKCHLTGEEEDIQEDTNVLDGVDLEKLFSEPDDGDDAAATG

SEQ ID NO: 3521 - protein, 140 aa, Betatorquevirus sp.
LYFLNYRPQIRSTSNWLHNSKPRNLGDRNGDIGRRDVVTTVKAQPAPKEQPQATQAAPQINTNYKIINCKTKIQLFPNVKVKKNRRFHPWEIDTERDLAKIFRRPMRTFFYDDPFYPYLPPTPLANQYANFKLNFVDSDE

SEQ ID NO: 3522 - DNA, 2844 bp, Gammatorquevirus sp.
cgggagcccgaggtgagtgcaaccaccgaggtctaggggcaattcgggctagggcagtctagcggaacgggcaagaaacttaaaatatactttttattttagatgtccaaaatacaagcaaaagacttctttactccaacaccgtataatcaggatacgaagaatcaaatttggatgtctcaaattgctgattctcacgataatatctgcagttgtaaccatccctttgctcatctcattgccaatatctttcctgtgggtcacaaagatcgtgatctcacaattaacaaaattcttttaagagattacagagaaaaatgcctttctggtgggccagaaggcgcaagccatggtatggcagatggaggtaccgccgcaacaagtactacaggcgcagaaaaaagccaagaagaagaagacttcccagaagacgaggtagacgctttactcgccgccgccatagaagaaggcgcaaggtaagaagaaaacttaaaaaaattaatatacaacaatggcaaccagatagaattaaaaaatgtaagattaaaggatactcctgcctagtactaggcagtgaaggcagacaaatgtactgttatactaatgaagcctctgaatacttacaacctaaagctccaggagggggaggttttggaacagaagttttttctttaaaatggctataccaagaatggttagctcacaacaacatatggactgccagtaatgaaaatactgatctttgcagatatacaggcactaaaatcacagtatacagacacccaactgtagactttattttctcctttgacagaatgccaccatttaatattaataaatttacctacccagaattacaaccacaaaacatgctactccacaaacataaaaaaattattttaagcagaagaactaatcctaaaggaaaaattaaacacacatttaaaataggccctccaaagcaaatggtaactaaatggttttttcaaagagactttgcacctgcacatctctttagaatatctgctacagcagccacttttgaataccctagatatggaaagggcaatgccagtaacatactaacagtacctgcattaaacacttttttttttgcaaacagtgactgggcacaaacaaaagcaggaccatacacaaacatacatacagcccctgcaaaatacttttttaaatatagagatagcagaggcaatgaaattaaaggccaatatacaaaacctacaaagtctaccacggaaggttactacgaatccatagactacagcacaggtattttccaaacaggaatgctacaagcatttttcattagttcacaaagtcatgaagccacttcacaggcagcattacctgttatttacttaagatacaatccacatgaagatacaggccatggtaatgaagtttatttaacctctgttttcaatgggcaatacaacaagccaggtgcaactgcacctgacttgcaatttaacaatgtccctctttggatggccttttggggatactacaactacctactaataagtacagctaataaaggcctatacttaacacatatgtttgtagtaaaaagcccagcactaaaaccattatcacaagctacagaccaatcacactatccaatactagaccaagattttatactaggtaaactaccatggggtgaatacctgtcaaaaaatgaaaaaaaactatggtaccctacagcacaaaaacaaacacaaattataaatcaaatagttagcactggcccttatgttcctaaactaaacaatcagccagacagcacatgggaattaccttacaaatatatttcttattttaagtggggaggaccacaagttcaagacccaaatgttgaagacccaacaagcagaaacaaatacaatgtccccgatacagtccaacaatcagtacaaatcgctgacccgtcaaaattacacccagaaaccattttccatgactgggactacagaaggggtattattacacaaacagctattaaaagaatgtcagaaaacctcgaaattgattcaattatctcatctgatgactcagaatcgccacccaagaaaagaaaagtcaccaaggaactcccatgcatcaaccaaaaagagaaaaaaatcaaggactgtctcctctcgctctgcgaagagcctacctgccaagaaaccccacaaacacttcagcagcacatcgagcagcagcagcagcagcagcacaagctcagaaaaaacatcttgtacctcctaaccagcttaaagaaaacacagagacacatggagctacaaacaggaatattagactaactagatttaaacctggctttgaagaacaaactgaaaaagaactatctataattttcaaaagaccaccaagaacctacaaagaagacgcccctttttacccctggcttccaattgaacccaaagttaactttaacctcaactataatttctaggccaacaatgtacacttagtaaaacatgtttaataaagtttgcacccaaaaaaaaaaagtgtttaatgcaggtactgttagtatgttactggcattgcccgggcaaagccccccccgcaccccccctacgtcacaagccacgcccccgccgccatattgggtgcggctgggcgggggctaaaatggcggcacccaatcattttatactttcactttccaattaaaactcgccacgtcacaataaaggggtggagtttttaaaactatataagtaagtggggtggcgaatggctgagtttaccccgctagacggtgcagggaccggatcgagcgcagcgaggaggtccacagctgcccatggg

SEQ ID NO: 3523 - protein, 670 aa, Gammatorquevirus sp.
MPFWWARRRKPWYGRWRYRRNKYYRRRKKPRRRRLPRRRGRRFTRRRHRRRRKVRRKLKKINIQQWQPDRIKKCKIKGYSCLVLGSEGRQMYCYTNEASEYLQPKAPGGGGFGTEVFSLKWLYQEWLAHNNIWTASNENTDLCRYTGTKITVYRHPTVDFIFSFDRMPPFNINKFTYPELQPQNMLLHKHKKIILSRRTNPKGKIKHTFKIGPPKQMVTKWFFQRDFAPAHLFRISATAATFEYPRYGKGNASNILTVPALNTFFFANSDWAQTKAGPYTNIHTAPAKYFFKYRDSRGNEIKGQYTKPTKSTTEGYYESIDYSTGIFQTGMLQAFFISSQSHEATSQAALPVIYLRYNPHEDTGHGNEVYLTSVFNGQYNKPGATAPDLQFNNVPLWMAFWGYYNYLLISTANKGLYLTHMFVVKSPALKPLSQATDQSHYPILDQDFILGKLPWGEYLSKNEKKLWYPTAQKQTQIINQIVSTGPYVPKLNNQPDSTWELPYKYISYFKWGGPQVQDPNVEDPTSRNKYNVPDTVQQSVQIADPSKLHPETIFHDWDYRRGIITQTAIKRMSENLEIDSIISSDDSESPPKKRKVTKELPCINQKEKKIKDCLLSLCEEPTCQETPQTLQQHIEQQQQQQHKLRKNILYLLTSLKKTQRHMELQTGILD

SEQ ID NO: 3524 - protein, 125 aa, Gammatorquevirus sp.
MSKIQAKDFFTPTPYNQDTKNQIWMSQIADSHDNICSCNHPFAHLIANIFPVGHKDRDLTINKILLRDYREKCLSGGPEGASHGMADGGTAATSTTGAEKSQEEEDFPEDEVDALLAAAIEEGAR

SEQ ID NO: 3525 - protein, 120 aa, Gammatorquevirus sp.
MHQPKREKNQGLSPLALRRAYLPRNPTNTSAAHRAAAAAAAQAQKKHLVPPNQLKENTETHGATNRNIRLTRFKPGFEEQTEKELSIIFKRPPRTYKEDAPFYPWLPIEPKVNFNLNYNF

SEQ ID NO: 3526 - DNA, 2844 bp, Betatorquevirus sp.
cgggtaccgaaggtgagtgaaaccaccgtagttaaggggcaatatgggcacagtcagtctcggcagaagggcaactgtcttaattttatcttatagatgtcagactatattcaaccaactctatacaatggaaaaggactggaaaaccaactaaaaaacctttgctacaacgctcacgacctctgctgtggctgccaaaacccaactaaacatcttaaacacctgtttacggaaaaatggctccctacaaccgctactacaaaagaagatggagaaaatacttcagaaaccgtcgccccagaagacggtttcgacgctggggatttagaaagaattttcgccttagaagaagaaaaaacagggtaagaagaaaatattttaaaaactttaaatataaaaaactaagaaaaatagttcttaaacaatggcaaccaagccacataaaaaaatgtaaaattaaaggtacaatacagctttttcaagctggactcggtagatacagctataattatactatgtacaaagaatcttatgttccaccacatgaaccaggaggaggaggctggtgctacttaatgttatctttaggaaacttatacactgaaaatcaaagactacaaaactggtggactgtttccaacaaaggactaaaccttgtaagatatcaaggtgttatactaaaattttacagacaaaaacatacagactatgttgttacatggagtaatgaatatccaatggaagtaggaaagtatcactttccaagcattcatccacaaagaatgcttcaatacaatcataaaattgttgtaccaagctacgatactctacctcaatgtaaaaaaccatataaaagagtatatgtacctcctccaaaagaaatgatagataaatggtattttcaacaatttttccaaagatacccacttgtacttattgctagtactgcctgttctttaaacaatatgtatgttggaaaccaagcaatgaataacaactgttctataaactgtttaaatacaaacctgtttaaacataaatgttttcaatatcaaggaacaactggttatcaaccaaagggtggtatgtacttgtatgcactcgataacggtgaaattgaccctttaagcggaaaagtaggagaaatgacatacctaggaaactccatggactaccaacctggagaaaacttaaactcaacttctgacgttcaaacctacaaccaaaaaaaatggggtaatccattctatactcaatatataaatgaacaaagaaaaattgtgactacttcacaacaatatagcggtttatggacaaaaaaaaaccaacaaatgaaacaagagagcatacaattacaaattgaacccttttactatgaatgccgatataacccttgtaaagatgatggcataggcaatgaagtatactgggtaaaaaactttgcagaagaaaatggctgggacacaaaaactgacccagacttagctattgacggatttccattatggatagcactttggggctggtatgattggtcaaaaaaattaaacaaagctaaaaacatatggaatgactacatattagtaattaaaacaagatatatggaaccaaaattacctgcctatgtttttttaaatgatgaatttccactaggactaggaaattatgatgaacctttaaaaaaaatagaccccaacgacttaaaacactggtatccaaaatggaaatttcaaaaagaagcagtagaaacattactaatgacaggcactgcagtatgcagaccagaaaacgctaggcaaatccaagctcattgtggttataaatttctttttaagtggggaggcaaccctgcctcaatggaacaagtcgttgatcccacagcacagcctcaataccctgtgcccagtggactcttccaaagccctgaaatcgttgatccaagcacatccatctttaactacttgtacaacttcgacgtcagacgtcacctccttacacaaacagctgaaaaaagaattaaaaacctctcagacactgacatctctatgttcacagatggaactcaacaaccactctacgagccaccaatccaaacaccgcaaacaacatggacggaagagacatcggaagaagagaaaaagacattactcctccagctccaacagctccaacaacacaacctacacctcctccagcgataccaacaactcaaattaatgactctaaatacataatatacaaatgtaaagaacctgcattactttttgctcctaataaaataaaaccccgtagattcagaccacatgaatgggaagacgaaaaatatttagctagctggatgaaacgcccccttagacacttttttactgataccccattttacccatggtgtgtacctgaacctaaagttaactttgaccttaatttcattaaataaaggccaacaaacttcacttgaggtgtccatttatttaagtttaaacctatacaaacatccaccgcctccctaatacgcaggcgcagcagggggctccgccccctaacccccagggggggggcaaagccccccccccttaccccccttacccccccccaaacgtcaccaaactcatgaatattcataaaccacaaaatttaaattgccgaccacaaacagtcacaggaaaccacaacttctctttttttactttaacttccttaaattataaccactcctactaattaattaataaacaacatcatatccaccacgtcacaaccactactataaaactaagtacactttcgaatggctgagtttatgctgccagacggagacgcgacaacttcgcggctgactgtggg

SEQ ID NO: 3527 - protein, 665 aa, Betatorquevirus sp.
MAPYNRYYKRRWRKYFRNRRPRRRFRRWGFRKNFRLRRRKNRVRRKYFKNFKYKKLRKIVLKQWQPSHIKKCKIKGTIQLFQAGLGRYSYNYTMYKESYVPPHEPGGGGWCYLMLSLGNLYTENQRLQNWWTVSNKGLNLVRYQGVILKFYRQKHTDYVVTWSNEYPMEVGKYHFPSIHPQRMLQYNHKIVVPSYDTLPQCKKPYKRVYVPPPKEMIDKWYFQQFFQRYPLVLIASTACSLNNMYVGNQAMNNNCSINCLNTNLFKHKCFQYQGTTGYQPKGGMYLYALDNGEIDPLSGKVGEMTYLGNSMDYQPGENLNSTSDVQTYNQKKWGNPFYTQYINEQRKIVTTSQQYSGLWTKKNQQMKQESIQLQIEPFYYECRYNPCKDDGIGNEVYWVKNFAEENGWDTKTDPDLAIDGFPLWIALWGWYDWSKKLNKAKNIWNDYILVIKTRYMEPKLPAYVFLNDEFPLGLGNYDEPLKKIDPNDLKHWYPKWKFQKEAVETLLMTGTAVCRPENARQIQAHCGYKFLFKWGGNPASMEQVVDPTAQPQYPVPSGLFQSPEIVDPSTSIFNYLYNFDVRRHLLTQTAEKRIKNLSDTDISMFTDGTQQPLYEPPIQTPQTTWTEETSEEEKKTLLLQLQQLQQHNLHLLQRYQQLKLMTLNT

SEQ ID NO: 3528 - protein, 89 aa, Betatorquevirus sp.; identical to SEQ ID NO: 3309

SEQ ID NO: 3529 - protein, 109 aa, Betatorquevirus sp.; identical to SEQ ID NO: 3310

SEQ ID NO: 3530 - DNA, 2844 bp, Betatorquevirus sp.
cgggagctgaaggtgagtgaaaccaccgaaatctaggggcaattcgggctgaatcagtctagcggaacgggcaagaaacttaaaataacttttatttttacagatgagcaaactgcttaaagagccactatatcaaggaaaaaaccttgaaaattgctgggtaaacaattggcacagctctcacgaattattttgcggctgtaacaaagcccttcaacactttctggaaataattaatcgccaaaacaaagcaccaaagccaccacaagaaattaaaaatataatatgccttattactggagaaaaagaagacaaagatggagacgccgtagacaaccttatcgatggcgaactagaagaatttttcaaagacgaatttggagacaacgaaaaagaagaagaaactgggtaagaagacgcctttttaaaaaaaaactattatacatacctttaaaacaatttcaaccaaagactataaaacgctgtaatattattggaaatgtatgcttatttcaaggatctccttttagagctattaacaattatgtacaatacttatattcctatgtaccagatgatgaaccgggagggggaggatggactctaatggttgaaagtttaagtagcttatgggaagacttccaacacttaaaaaatatatggacacgatcaaacaaaggtttacctttagtaaaatacagaggagttacattaaccttttttcaaagtccatatacaaactatgcagtacaaatatttagatgctacccaataacagacacaaaataccaacatgcagacctagcaccaagtagaatgatgctaaaaaaagacgttattaagatcccaagcttagaaacaagaaaaaaaagaaaaccatacaaaagaatatatgtgccacccccttcccaaatgcaaaacaaatggtactttcaaaagcaaatttgtaatattcctttagtaatgatagcagcaactgctatagacttaagatatccctttgcatgcagtagcagcaaaagtaataacataacattaaaagcactaaaccccaacttatttcaaagacatgactttgatcacccatcagacacgttaggctactttcctaaatctaacacatacctatactccacaaaaggaataagtaccacagcaaaaccaacaaaaaaaagtcagctaatttacttaggtaacacaaaaaacaatcaaccaggaaagggaatagataaattttcagactggggaaacccattctatcatgactacatagaccaaggtcacccagtatgggtatgcacaaaagctccaacacaactacaagaaactttagtagacactgactggacacaattatctcaaccatactttatagacattagatataaccctgaaaaagacacaggagaaggaaacagtattttcttagtaccaaactatgcaggacagcactgggataaaccgggtaaccaagacttaatattagaaggctttccgttatatgacatggtatggggatttactgattggcaaaaaaaaataaaagtagcaacaaacatagataactcatggatagttgtaataacatctccattttttaatgaacctcttacaagctatatatttatagacgaaagttttatagaaggatttgggccatatcacacaaaaaacattccaagacaacaccaacaacactgggcacctaaatttacttttcaacaaaaatcaataaacacaataggactatcaggacctgcagcacccagaccaccttatgacaattacatgcaagccagaatgaaatataactttcatgtaaaatggggaggatgccctaaaaagttagatgaaccttacgatccttgttcacagccagactggactatacccagtaacatcaatgagggattacaaatccaggatccagcaacagaccccaaaaccgaactccaagagtgggactggagacgagattatgttacagaaacagctattgctagaatccaagaacacacgccaactgatgtctctttacaaatccctacagaatccagacacatcgctccaatactacgccaaaccagggaaacaacgagttcatcggactcggactcagaaacggaaaaagagaaaacaccatcactccaggaacagatcaccctcctcaagcgaaagcagcgacagctcaagcacaggatcctccacagactagcacaccaaagtttagaataataaaagacaaaacagtagtagaactttttcctaaacctaaaccctttagaaaccgtagatttcacccctgggaagaacaaacagaagcagaatgtgctaaactgtttcaaagacctaaaagaacttttttttatgacacccctatatacccaatatttccaataactccacttgtaaattttgacctaaaatatgaataaacaaggccaacaatattcacttagtggtgtctgtttctttaagtttaactatactaaactgactccgcctcccaataatttgggcgccaaaagggggctccgcccccttaaacccccgggggggcccccccaataagttacaaaactttaagtaatacttacattaaccgcaaaatttgcattgccaaccacaaacagaacaggaaaccacaaaatttgcattgccgaccacaaacgtatatgctaattaacttccctaaaccatgcctgtacttccccaaaaattaattaataatcaccgtcataaaaggaggagcctacaaaatatataaccaagtgcactttcgaatggctgagtttatgccgctagacggagacgacacagacaactgcgtcggctgattcaggg

SEQ ID NO: 3531 - protein, 649 aa, Betatorquevirus sp.
MPYYWRKRRQRWRRRRQPYRWRTRRIFQRRIWRQRKRRRNWVRRRLFKKKLLYIPLKQFQPKTIKRCNIIGNVCLFQGSPFRAINNYVQYLYSYVPDDEPGGGGWTLMVESLSSLWEDFQHLKNIWTRSNKGLPLVKYRGVTLTFFQSPYTNYAVQIFRCYPITDTKYQHADLAPSRMMLKKDVIKIPSLETRKKRKPYKRIYVPPPSQMQNKWYFQKQICNIPLVMIAATAIDLRYPFACSSSKSNNITLKALNPNLFQRHDFDHPSDTLGYFPKSNTYLYSTKGISTTAKPTKKSQLIYLGNTKNNQPGKGIDKFSDWGNPFYHDYIDQGHPVWVCTKAPTQLQETLVDTDWTQLSQPYFIDIRYNPEKDTGEGNSIFLVPNYAGQHWDKPGNQDLILEGFPLYDMVWGFTDWQKKIKVATNIDNSWIVVITSPFFNEPLTSYIFIDESFIEGFGPYHTKNIPRQHQQHWAPKFTFQQKSINTIGLSGPAAPRPPYDNYMQARMKYNFHVKWGGCPKKLDEPYDPCSQPDWTIPSNINEGLQIQDPATDPKTELQEWDWRRDYVTETAIARIQEHTPTDVSLQIPTESRHIAPILRQTRETTSSSDSDSETEKEKTPSLQEQITLLKRKQRQLKHRILHRLAHQSLE

SEQ ID NO: 3532 - protein, 102 aa, Betatorquevirus sp.; identical to SEQ ID NO: 2751

SEQ ID NO: 3533 - DNA, 2843 bp, Gammatorquevirus sp.
cgggagcccgaggtgagtgcaaccaccgaggtctaggggcaattcgggctagggcagtctagcggaacgggcaagaaacttaaaatatgctttttattttagatgtccaaaatacaagcaaaagacttctacactccgacaccctataatcaggacacgaaaaatcaaatttggatgtctcaaattgctgatgctcacgacaatatctgcagttgtaaccatccctttgctcatctcattgctaatatctttcctgtgggtcacaaagatcgtgatctcacaattaataaaattcttttgagagattacagagaaaaatgcctttctggtgggccagaaggcgcaagccatggtatggcagatggaggtaccgccgcaacaagtactacaggcgcagaaagaaaccaagaagaagaagactttccagaagacgaggtagacgctttactcgccgccgccatagaagacggcgcaaggtaagaagaaaacttaaaaaaattaatatacaacaatggcaaccagatagaattaagaaatgtaagattaaaggatactcctgcctagtactaggcagtgaaggcagacaaatgtactgttatacaaatgaagcctcagaatacttacagcctaaagctccaggagggggaggttttggaacagaagttttctctttaaaatggctacaccaagaatggttagcacacaacaacatatggactgccagtaatgaaaatactgatctttgcagatatacaggcactaagataacagtatacagacacccaactgtagactttattttctcctatgacagaatgccaccatttactattaataaatttacctatccagaattacaaccacaaaacatgctactgcacagacataaaaaaatcattttaagcagaagaactaatcctaaaggaaaaattaaacacacatttaaaataggccctccaaaacaaatggtaactaaatggttctttcaaagagactttgcacctgcacatctttttagaatatctgctacagcagccacttttgaataccctagatatggaaagggcaatgccagtaacatactaacagtacctgcattaaacacttttttttttgcaaacagtgactgggcacaagcaagaaaaggaccatacacaaacatacatacagcccctgcaaaatactattataaatatagagatagcagaggcaatgaaattaaaggcacttatgaaaaacccgaaaagcatgatgaacagtcttactacgactccatagactacaccaaaggcattttccaatcaggaatgctacaagcattttacattagtgcaactggtcatgaaggcacttcacaggcagcattacccattatttacttaagatacaatccacatgaagatacaggccatggtaatgaagtatacttaacctctgttttcaatggccaatacaacaagccaggtgcaactgcacctgacttacaatttaacaacgtccctctttggatggccttttggggatactacaactacctactaataagtacagctaataaaggcctatacttaacacatatgtttgtagttaaaagcccagcactaaaaccattatcacaagctacagaccaattacactatccaatactagaccaagattttatactaggtagactaccatggggtgaatacctttcaaaaaatgaaaaaaaactatggtacccaacagcagaaaaacaaacacaaattataaatcaaatagttagcactggcccttatgttcctaaactgaacaatcagccagacagcacatgggaattaccttacaaatatatttcttattttaagtggggaggaccacaagttcaagacccaaatgttgaagacccaaccagcagaaacaaatacaatgtccccgatacagtccaacaatcagtacaaatcgctgacccgtcaaaattacacccagaaaccattttccatgactgggactacagaaggggtattattacacaaacagctattaaaagaatgtcagaaaacctcgaaattgattcaattatctcatctgatgactcagaatcgccacccaagaaaagaaaagtcaccaaggaactcccatgcatcaaccaaaaagagaaaaaaatcaaggactgtctcctctcgctctgcgaagagcctacctgccaagaaaccccacaaacacttcagcagcacatcgagcagcagcagcagcagcagcacaagctcagaaaaaacatcttgtacctcctaaccaacttaaagaaaacacagagacacatggagctacaaacaggaatattagactaactagatttaaacctggctttgaagaagaaactgaaaaagaactatctagaatttttaaaagaccacctagaacctaccaagaagatccccctttttatccctggcttccaattgaacccaaagttaactttaacctcaactttaatttctaggccaacaatgtacacttagtaaaacatgtttaataaagtttgcacccaaaaaaaaaaaattgcaaaaattcggcgctcgcgcgcgctgcgcgcgcgcgagcgccgtcccccccccgcaccccccctacgtcacaagccacgcccccgccgccatcttgggtgcggctgggcgggggctaaaatggcgggacccaattattttatactttcactttccaattacaacctgccacgtcactacacaggggtggagactttaaaactatataaccaagtggggtgacgaatggctgagtttaccccgctagacggtgcagggaccggatcgagcgcagcgaggaggtccccggctgcccatggg

SEQ ID NO: 3534 - protein, 670 aa, Gammatorquevirus sp.
MPFWWARRRKPWYGRWRYRRNKYYRRRKKPRRRRLSRRRGRRFTRRRHRRRRKVRRKLKKINIQQWQPDRIKKCKIKGYSCLVLGSEGRQMYCYTNEASEYLQPKAPGGGGFGTEVFSLKWLHQEWLAHNNIWTASNENTDLCRYTGTKITVYRHPTVDFIFSYDRMPPFTINKFTYPELQPQNMLLHRHKKIILSRRTNPKGKIKHTFKIGPPKQMVTKWFFQRDFAPAHLFRISATAATFEYPRYGKGNASNILTVPALNTFFFANSDWAQARKGPYTNIHTAPAKYYYKYRDSRGNEIKGTYEKPEKHDEQSYYDSIDYTKGIFQSGMLQAFYISATGHEGTSQAALPIIYLRYNPHEDTGHGNEVYLTSVFNGQYNKPGATAPDLQFNNVPLWMAFWGYYNYLLISTANKGLYLTHMFVVKSPALKPLSQATDQLHYPILDQDFILGRLPWGEYLSKNEKKLWYPTAEKQTQIINQIVSTGPYVPKLNNQPDSTWELPYKYISYFKWGGPQVQDPNVEDPTSRNKYNVPDTVQQSVQIADPSKLHPETIFHDWDYRRGIITQTAIKRMSENLEIDSIISSDDSESPPKKRKVTKELPCINQKEKKIKDCLLSLCEEPTCQETPQTLQQHIEQQQQQQHKLRKNILYLLTNLKKTQRHMELQTGILD

SEQ ID NO: 3535 - protein, 125 aa, Gammatorquevirus sp.
MSKIQAKDFYTPTPYNQDTKNQIWMSQIADAHDNICSCNHPFAHLIANIFPVGHKDRDLTINKILLRDYREKCLSGGPEGASHGMADGGTAATSTTGAERNQEEEDFPEDEVDALLAAAIEDGAR

SEQ ID NO: 3536 - protein, 120 aa, Gammatorquevirus sp.
MHQPKREKNQGLSPLALRRAYLPRNPTNTSAAHRAAAAAAAQAQKKHLVPPNQLKENTETHGATNRNIRLTRFKPGFEEETEKELSRIFKRPPRTYQEDPPFYPWLPIEPKVNFNLNFNF

SEQ ID NO: 3537 - DNA, 2842 bp, Alphatorquevirus sp.
gtctacctctataagtcactaagcactccgagcgaggggcaattcgggctcgggactggccgggctatgggcaaggctcttaaaaaagctatgtttcttggtcgcgtttacagaaagaaaaggcgcctgtcactgtccccactgcagtctccacaaacgtttggcaaactactaaaaggtatgtggaggccccctactcaaaatgtatcaggacaggagagaaactggtacgactcagtggtttattcgcatgctgccttttgtggctgtggggactgtgttggccatcttagctatctggctactcacctgggccgaccacctagtgcacaacccccgccacaactccagccacctgtcataagacgcctgcctgctctcccggcacccccaaacccctccggtgatcgagcggcatggcctactggtggtggagacgccgcagaagacggccctggagaaggaggcgccgctggaggcttcgcagacctcgcagacgaagagctacttaccgccgccgtcgaggccgccgaagagtaagaaagaggagggggaggtggagacggacttacagacgctggcgtagaaagagggggcgacgcaaacacagacctaaaataatccttaaacagtggcaaccaaactttattagaaactgctacatagtgggttttatgccactgatattttgtggtgagaacactgtaagccaaaactatgccacccactctgatgacttagtggctaagggaccctacgggggaggcatgaccaccacaaaattcactctcagaatcttgtttgacgaacacctaagatggatgaactactggactgttagtaacgaagacttagatctctgtagatatgtaggagccaggttttacttttacagacaccccactgtagattttatggtgcaaattcacacacaggcccccttcttagacacagaactaacaggccccagcatacacccaggcatgatgattcttaacaagaaaaagatatttgtacccagtctcaaaaccaggcctaacagaaagcacaaagtaaaagttagagtaggggccccccgcttgtttgaagacaagtggtacccccagtcagaactctgtgacaccaccctagtggccatctatgcaacggcctgtgacttgcaatttccgttcggctcaccactaactgacaacccttgcgtcaacttccaggttttaggttccgcttacaaacagcaccttagtattctaagcacagaaaccgcaaagaacaaaatgcactatgatgaagctctttacaaaaaaataccatactataatacattccaaactatagcacaccttagagaaacaggcaaacaagacgcagcaaatcctacatggggccaatgcctaaataccaccacactaacattcagtggcaacaatcaaacaacatgtaatgacacctggtactatggcaacgcatacacaccccacatagcagagctatgtaaaaaaaccaaagaaaaatactttaatgccaccaagcaagcctttcctgcttatgctacacttgtagatgacctgtatgagtaccacggaggcatctactcctccatattcctatcggcaggcagatcctactttgaaactctaggtgcttactctgacattatatataatccctttgtggacaaaggcataggcaatatagtgtggatagactacctctcaaagtcagacgctgtctggaaaccccctcaaagtaaatgcaccattaaagaccaacccctatgggcagcctttaatggatacagtgaattctgtgccaaaagcacaggagacggagcagttaacataaactgcagagtagttgtgaggtgcccctacacatctcccatgctaatagacaacaaaaacccagagcaaggctttgtcccctactccaaaaactttggcaatgcaaaaatgaaaggtggctctgcagacgtgcccctcagctggagggttaagtggtatgtcaatatgtaccaccaacaagaatttatggaagaaatagtacagagcggaccgtgggcctacaagggcgacgaaaagagtgcgacactaaacatgaaatatgtattcaaatggaaatggggcggtaaccctatatctggacaggttgtcagaaacccctgcaagacctccagttccagtcgagagcctcgttcaatacaagcagttgacccgaagagagtcgcaccgccactcgtattccactcgtgggactaccgacgagggtactttggccacgcaagtattaaaagaatgtcagaagaatcagaacctcctacgctttttacaggaccatcaggcaagcgcccccgcaaagacaccaacgtacagcaagaagaaccgcaaaaagaaagctcgactttcagagtccagcgacagctccagccgtggatccagtccagtcaagaaacgcaaagcagccaagaagagatccaggcgcaggggtcgatacaagaacaactcctccagcagctcggagaacagcgagccctccgaaagcagctggagctcctcgccggacaagtcctcaaagtccaagcaggccaccacctacacccccttttatcttcccaagcataaacaaagtctttatgtttgagcccaaaggcccaaaacccataaaaggttatgaggcctggctagatgagtaccagacagcaggtgtctgggataggccagtgagaaactaccacacagacacccccttctacccctggatgcctaaaccccccgaccaattccgtgtcagctttaaacttggctttcaataaaatttcaaggcagtacactgttcacctgtcggt

SEQ ID NO: 3538 - protein, 733 aa, Alphatorquevirus sp.; identical to SEQ ID NO: 2489

SEQ ID NO: 3539 - protein, 157 aa, Alphatorquevirus sp.
MGKALKKAMFLGRVYRKKRRLSLSPLQSPQTFGKLLKGMWRPPTQNVSGQERNWYDSVVYSHAAFCGCGDCVGHLSYLATHLGRPPSAQPPPQLQPPVIRRLPALPAPPNPSGDRAAWPTGGGDAAEDGPGEGGAAGGFADLADEELLTAAVEAAEE

SEQ ID NO: 3540 - protein, 59 aa, Alphatorquevirus sp.; identical to SEQ ID NO: 2491

SEQ ID NO: 3541 - DNA, 2841 bp, Betatorquevirus sp.
cgggtaccgaaggtgagtgaaaccaccgtagttaaggggcaatatgggcacagtcagtctcggcagaagggcaactgtcttaattttatcttatagatgtcagactatattcaaccaactctatacaatggaaaaggactggaaaaccaactaaaaaacctttgctacaacgctcacgacctctgctgtggctgccaaaacccaactaaacatcttaaacacctgtttacggaaaaatggctccctacaaccgctactacaaaagaagatggagaaaatacttcagaaaccgtcgccccagaagacggtttcgacgctggggatttagaaagaattttcgccttagaagaagaaaaaacagggtaagaagaaaatattttaaaaactttaaatataaaaaactaagaaaaatagttcttaaacaatggcaaccaagccacataaaaaaatgtaaaattaaaggtacaatacagctttttcaagctggactcggtagatacagctataattatactatgtacaaagaatcttatgttccaccacatgaaccaggaggaggaggctggtgctacttaatgttatctttaggaaacttatacactgaaaatcaaagactacaaaactggtggactgtttccaacaaaggactaaaccttgtaagatatcaaggtgttatactaaaattttacagacaaaaacatacagactatgttgttacatggagtaatgaatatccaatggaagtaggaaagtatcactttccaagcattcatccacaaagaatgcttcaatacaatcataaaattgttgtaccaagctacgatactctacctcaatgtaaaaaaccatataaaagagtatatgtacctcctccaaaagaaatgatagataaatggtattttcaacaatttttccaaagatacccacttgtacttattgctagtactgcctgttctttaaacaatatgtatgttggaaaccaagcaatgaataacaactgttctataaactgtttaaatacaaacctgtttaaacataaatgttttcaatatcaaggaacaactggttatcaaccaaagggtggtatgtacttgtatgcactcgataacggtcaaattgaccctttaagcggaaaagtaggagaaatgacatacctaggaaactccatggactaccaacctggagaaaacttaaactcaacttctgacgttcaaacctacaaccaaaaaaaatggggtaatccattctatactcaatatataaatgaacaaagaaaaattgtgactacttcaaaacaatataccgctttatggtcaaaaaaaaacgaacaaatgaaacaagagagcatacaattacaaattgaacccttttactatgaatgccgatataacccttgtaaagatgatggcataggcaatgaagtatactgggtaaaaaactttgcagaagaaaatggctgggacacaaaaactgacccagacttagctattgacggatttccattatggatagcactttggggctggtatgattggtcaaaaaaattaaacaaagctaaaaacatatggaatgactacatattagtaattaaaacaagatatatggaaccaaaattacctgcctatgtttttttaaatgatgaatttccactaggactaggaaattatgatgaacctttaaaaaaaatagaccccaacgacttaaaacactggtatccaaaatggaaatttcaaaaagaagcagtagaaacattactaatgacaggcactgcagtatgcagaccagaaaacgctaggcaaatccaagctcattgtggttataaatttctttttaagtggggaggcaaccctgcctcaatggaacaagtcgttgatcccacagcacagcctcaataccctgtgcccagtggactcttccaaagccctgaaatcgttgatccaagcacatccatctttaactacttgtacaacttcgacgtcagacgtcacctccttacacaaacagctgaaaaaagaattaaaaacctctcagacactgacatctctatgttcacagatggaactcaacaaccactctacgagccaccaatccaaacaccgcaaacaacatggacggaagagacatcggaagaagagaaaaagacattactcctccagctccaacagctccaacaacacaacctacacctcctccagcgataccaacaactcaaattaatgactctaaatacataatatacaaatgtaaagaacctgcattactttttgctcctaataaaataaaaccccgtagattcagaccacatgaatgggaagacgaaaaatatttagctagctggatgaaacgcccccttagacacttttttactgataccccattttacccatggtgtgtacctgaacctaaagttaactttgaccttaatttcattaaataaaggccaacaaacttcacttgaggtgtccatttatttaagtttaaacctatacaaacatccaccgcctccctaatacgcaggcgcagcagggggctccgccccctaacccccagggggggggcaaagcccccccccccttaccccacccccccccaaacgtcaccaaactcatgaatattcataaaccacaaaatttaaattgccgaccacaaacagtcacaggaaaccacaacttctctttttttactttaacttccttaaattataaccactcctactaattaattaataaacaacatcatatccaccacgtcacaaccactactataaaactaagtacactttcgaatggctgagtttatgctgccagacggagacgcgacaacttcgcggctgactgtggg

SEQ ID NO: 3542 - protein, 665 aa, Betatorquevirus sp.
MAPYNRYYKRRWRKYFRNRRPRRRFRRWGFRKNFRLRRRKNRVRRKYFKNFKYKKLRKIVLKQWQPSHIKKCKIKGTIQLFQAGLGRYSYNYTMYKESYVPPHEPGGGGWCYLMLSLGNLYTENQRLQNWWTVSNKGLNLVRYQGVILKFYRQKHTDYVVTWSNEYPMEVGKYHFPSIHPQRMLQYNHKIVVPSYDTLPQCKKPYKRVYVPPPKEMIDKWYFQQFFQRYPLVLIASTACSLNNMYVGNQAMNNNCSINCLNTNLFKHKCFQYQGTTGYQPKGGMYLYALDNGQIDPLSGKVGEMTYLGNSMDYQPGENLNSTSDVQTYNQKKWGNPFYTQYINEQRKIVTTSKQYTALWSKKNEQMKQESIQLQIEPFYYECRYNPCKDDGIGNEVYWVKNFAEENGWDTKTDPDLAIDGFPLWIALWGWYDWSKKLNKAKNIWNDYILVIKTRYMEPKLPAYVFLNDEFPLGLGNYDEPLKKIDPNDLKHWYPKWKFQKEAVETLLMTGTAVCRPENARQIQAHCGYKFLFKWGGNPASMEQVVDPTAQPQYPVPSGLFQSPEIVDPSTSIFNYLYNFDVRRHLLTQTAEKRIKNLSDTDISMFTDGTQQPLYEPPIQTPQTTWTEETSEEEKKTLLLQLQQLQQHNLHLLQRYQQLKLMTLNT

SEQ ID NO: 3543 - protein, 89 aa, Betatorquevirus sp.; identical to SEQ ID NO: 3309

SEQ ID NO: 3544 - protein, 109 aa, Betatorquevirus sp.; identical to SEQ ID NO: 3310

SEQ ID NO: 3545 - DNA, 2841 bp, Betatorquevirus sp.
cgggtgccgaaggtgagtgcaaccaccgtagtcaaggggcaattcgggctagatcagtctggtggaacgggcaagaaactaaaatatatattttttacagaatgtccaagtttttaaaaccaacaatatacaaaaatggagccctagaaacacagtggatgaactccatcttcacaacacacgacattgtctgcggctgccaagacaccattaaccacttaaaatttttaattgaaaaccaacaatgccattctattatcgaaggaaatggaacaacaactactttcgcagacgccgatatcgacgcaggggacctagaaagacttttcgcagaaaacgaagacaacgaagggtaagaagaaaacgctttaaaaaatatagactaagaaaacttaaaactataatacaaagacaataccaacctgaacaaataagaaaatgtaaaataagaggatttctagaacttatagaatgcggatatggcagactttcagataactgggcattatacaaagaaagctatgcacctgaacatgaaccaggagggggagggtggagcatacaacaactaactttgggaaatttatatatacaaagcaaatatgcaatgaactactggacacatacaaacagaggttacaatttagctagatacctaggagtaaacataagactctacagacaaccacaaacagactatatatttcattacaatttacaagacccacaaataataactaaatacacatatccatcatatcacccatacaaaatactacaataccatcaacgaattgtagttccaagcttacaaactgcaccacataaaaaaaaactatacaaacaaagatttattaaaccaccaaaaaaaatgaaaaatcaatggtactttcaagaacaactaacagacttcccactgttaacattttatacaacagcagtagacctacaatcaatgtttatttcccccaaagcacaaaacaataacataacattaaatgtattaaacacacaactttttcacaacccaaattttcaatttccaccagaaacatcaggatacaaaccagattcacaaaattacttatatggttatacaggaccacatatacattggccaaacgaaggcgttcccctaaaaaatttcatattattagcagacacaacaaacaataccccaggagaaccaatactaaataacagtatgccaccaaaaaaaaaatggggtaacccattttttcatgaattttttaatatggacgcagcaacaacattacaaagtataaaacccggggataaagcctttgctgaaaaaaatattaaagaaagtgacctaaaagtacaaccatactatgaacaagtgagatataacccaaacaaagatgacggagacggtaatgaggcatatataataaaaaattttacaagtgctcaacaaccaaattgggatccaccaaaagatgaagatctcatattaagaggacacccattatggctaatgctttggggtctacaaagttacatagaaaaaaagaaactatttaatgacttagacaaaaacggaatacttgtaataagaacaaaaaagtttagtgggccaccattacctgcatacgttatactaaatgatagcttttgtagaggacaaggcccatacgaccaaccaagagaagaaataactttatacaataacacacactggtatccacgctttaaatatcaaaaagaagcactagaacaaatattagaaacaggaccaggagtttacaaaactaacagaggaacatccatacagtctcacttacactatacttttctttttaagtggggaggcaacccatcaaagatggaaacaattgcagacccaacaacacaaccaacaggacctgaccccaataacctcctattctcaaatgaaatcaatagtccagaacaaacaatccttaactacatctacaagtgggatgtcagacgagacctccttacacaaaaagctacaaacagaattacagaactccaaattcctaaacaaactgtatttacagatggaaaagcaacttcaacagacatcccaatctggacacaaacaacaccacaaacgaaagagaccacggaagaagaaaaccaagagatacagcagcagctcgagctcgtccaactgtacaaccaacaactccagcagcgactcagacaactaatattatccaacaacccataaatataaaatgcattaaaaaagtatacctatttgatcctccaaaaccacgtaaaaatgaaagatttacagggtgggaatgggaaactgagttacaactatgtaaagcctttaaaagacctatgagaacctttaaaaatgatcccccttattacccatggttgcctccagaacccattgttaactttgatttaaactttaataaaggccagcattaattcacttaacaagtctgtttatttaagtataaacttaataaaccaacaccgcctccctaatacgcaggcgcaaagggggctccgcccccttaaacccccagggggggaaaaaaaccacaaaatttacatttaaaaccacaaacggtccggaaaccacaaaatttgcattgccgaccacaaacggtccggaaaccacaaaatttgcattgccgaccacaaacggtacatttttacaacacagttaacaacttccttaaaattatataaatattcatgaaattaattaataatcactgtcacacataggaggggccttaaacatatataactaactacacttccgaatggctgagtttatgccgccagacggagacagaaccacttcagtgacttctggctgatcttggg

SEQ ID NO: 3546 - protein, 657 aa, Betatorquevirus sp.; identical to SEQ ID NO: 2653

SEQ ID NO: 3547 - protein, 84 aa, Betatorquevirus sp.; identical to SEQ ID NO: 2654

SEQ ID NO: 3548 - protein, 118 aa, Betatorquevirus sp.; identical to SEQ ID NO: 2655

SEQ ID NO: 3549 - DNA, 2840 bp, Betatorquevirus sp.
cgggagccggaggtgagtgaaaccaccgtagtctaggggcaattcgggctagatcagtctggcggggcaattcgggctagatcagtctggcggaacgggcaagaaacttaaaatatttttaattacagatgtcaaagtttttacaaccaacttcatacaatggacgccaacaagaaaccaactggataaacttcaacattcactttcatgactccttctgtggatgccctgaacccctaacacacctaagacacctactaaaccaacaatgccaccatatcaaagacgccgctacttctacagaaactggtggaattcaagaagaaaacgatattggaatcgacgatggagacctagaaagactgttcgcaatcgaaaacgaagacaacgacgggtaagaagacgcttttataaaaaaaatagaaaacttaaaagactaagaataaatgaatggcaacctagctcaattaaaaaatgtaaaatagaaggatacctagtactgtttcaagcgggatacggacgctattctaataactatccattatggaaagaagtaatatttccacctcattatccaggtggaggtggatggggaatacaacaattaaacctaggaaatttatatactcaacataaagaacttatgaactactggactaaaagtaatgatagaatgaatatgtgtagatatatgggtgtaacacttacattatttagagagcaacacacagactggatattctcatactatgactcattaccaaaaacagtaacaaaatatttttacacctcacatcaccctatgcttatgcttacacacaaaagaaaaaaaacaataccaagttttgactcccagccacacaaaagaaaaccatacaaaaaaatatttgtaagaccaccaagactaatgagaaaccaatggtactttcaacaacaattagcagattttcctttactaacatttgccgcttcagcatgcagtcttcaaggcatgtttggatctataaactcagtaaacaataatgctacaatgtactgcatagaccacgcagtatttacaaaacctatatttcaatacaaaacacaaacacatccagaatggggctacaggcctagtgacaccatttacctatacggcctacaaaatggagcacacatttttactgaaaaccaatacaaagacagcatttacctaggaaacacaatgaacaatcaaagaggtgctgttattaacagttaccaagagtcacaatttacacaaaaatacccctttggagaatggggaaacccttttttttggggatacatgacaggaaacttaacagttttccaaaacaatacagaccccaagaccatggcaaaaaaccctacacaaaaactaacacaaagctggttaagagaaaacccttatgtttttaaagtcagatacaacccttttaaagataaaggacgaggaaaccaagtatactttgtaccaaattatgactccagccataacacatgggaacccaccaaagacccagatattctgttcgaaaattacccactatggttattactatggggcctagaagatatagttaaaagaatgggaaaatgcaaaaacttagacaatgactggactctagtaataaaatctaattggatactgccaccacaagcatactatataccagttagttatgactttgtacatggcagaggcccatatgatacagaaagagaagaaatgtctagagatgactatactaactggtaccctagatttaaataccaaagacaagcaatacaaaatattataatgacagggcctgctgttgctagaggagactatgctaaaaacatacaagctaaattgaaatatacttttcattttaagtggggaggcaactccgaaccgcaagaatcagtatttgacccaaccaaccaaccaattacacctgcaccccctaacatctacagcatccatgaaatcacaaatccgaattcaagcattacgggagaaatctacccatgggatttcagacgagatatgcttacaacaacagctacagaaagaattagacaaagcccaactaatgaaacatatatgttcacagatggagacgaaacttcgacagacctcaaaatctacacaccggagacacaaaaggaaaagaccccgaaaacacaaaagaaaacacttctcgagcagctccagctcatccaatcctacaaccaacagctccaactcagattcagaaaactaaaacaattatcaaaggacccataaaccaagtacaattgtttccaaaatacaaaaacagaagatttaaaccctatgaatttgaattagaattaacaatggctaaaatttttcacagacgccctagatattacttctatgatatgccaacttatgactggttaccccctgaacctaaagtaaactttgaccttgtacatggatttaataaaggccagcattaattcacttgaggtgtccgtttatttattattaaacttaactaaacatccaccgcctccccaatacgcaggcgcaaagggggctccgcccccttaaaccccccggggggggaaacccccccgaaccccccccaactcattaatattcaacaggaaaaccacctaatttaaattgccgaccacaaaccgtcaactagttcccctttttataaaacttcccgttttactcataaatattcattgtattaattattaatcaccgtcacaagaggaggagcaaccacaactataaaacaaacaacactttcgaatggctgagtttatgctgccagacgtagacagcaagcacgcagtgactgctgactgatcttggg

SEQ ID NO: 3550 - protein, 667 aa, Betatorquevirus sp.
MPPYQRRRYFYRNWWNSRRKRYWNRRWRPRKTVRNRKRRQRRVRRRFYKKNRKLKRLRINEWQPSSIKKCKIEGYLVLFQAGYGRYSNNYPLWKEVIFPPHYPGGGGWGIQQLNLGNLYTQHKELMNYWTKSNDRMNMCRYMGVTLTLFREQHTDWIFSYYDSLPKTVTKYFYTSHHPMLMLTHKRKKTIPSFDSQPHKRKPYKKIFVRPPRLMRNQWYFQQQLADFPLLTFAASACSLQGMFGSINSVNNNATMYCIDHAVFTKPIFQYKTQTHPEWGYRPSDTIYLYGLQNGAHIFTENQYKDSIYLGNTMNNQRGAVINSYQESQFTQKYPFGEWGNPFFWGYMTGNLTVFQNNTDPKTMAKNPTQKLTQSWLRENPYVFKVRYNPFKDKGRGNQVYFVPNYDSSHNTWEPTKDPDILFENYPLWLLLWGLEDIVKRMGKCKNLDNDWTLVIKSNWILPPQAYYIPVSYDFVHGRGPYDTEREEMSRDDYTNWYPRFKYQRQAIQNIIMTGPAVARGDYAKNIQAKLKYTFHFKWGGNSEPQESVFDPTNQPITPAPPNIYSIHEITNPNSSITGEIYPWDFRRDMLTTTATERIRQSPTNETYMFTDGDETSTDLKIYTPETQKEKTPKTQKKTLLEQLQLIQSYNQQLQLRFRKLKQLSKDP

SEQ ID NO: 3551 - protein, 89 aa, Betatorquevirus sp.; identical to SEQ ID NO: 3361

SEQ ID NO: 3552 - protein, 61 aa, Betatorquevirus sp.
LFPKYKNRRFKPYEFELELTMAKIFHRRPRYYFYDMPTYDWLPPEPKVNFDLVHGFNKGQH

SEQ ID NO: 3553 - DNA, 2840 bp, Betatorquevirus sp.
caggtaccgaaggtgagtgaaaccaccggagttaaggggcttattgggctaaagcagtcttggcggaacgggcaagaaactaaaataaactattattttacagcaatgagctcctaccttacaccagttatctacagcaagaatgctttagaaaaccagtgggtaaatactattttcaacacacacgatctttgctgtggatgcaacgacgccattaaacacctagccgccattttacaaagaaaaggaacacaactatgcctcccttcaacttctaccggagacgctactacccaaaccgatggagacgccgtagatactttagacgccggagatttagaccttctattcgccgaagattttggagaagacgaacggtaagaagacgccgtttttttaaaaaatataaaagaaaacttactaaaattaaacttaaccaatggcaaccacaaactataaacaaatgccacataaaaggaaatctttgtgcttttacttgtggaagaggtagagaaaaccacaattttattttaacacaagaaagctatgtacctacatctcaacctggagggggatcttggtctatactacaatttaccttaagagtactatatgatgaacataaagcaggcagaaattggtggacaaaaggaaatacaggtttaccacttgtaagatatatactatgcaaacttaaattttacagaagtaaagacacagactacctagtaacaatacaaagaacaccacctttcgaagtaactagagactcatacttaagcacacaaccatctagacacttaatgcaccacaaatctattatagttcctaaactaggaagaggaccaaacaaaaaaacatatataaaaagaaaagttctccctccagcaatgtttcaaaacaaatggtactttcaacaagacatatataatataccattttttatgttaaccatttcagcactagaactagatcaaatgtacgccccagaagaccaaataagctcaaatataacacttatatcactaaatacaaatgcatttcaaatgagtaactgggaacgacaaccatacagcacaaaatcagcaggaacatataacatatacttatggagttaccaaaatggtgacgataaagataaaaaatggcaaaacatatattttttaggaaactgtaaagaatacacagaaggaactaagttaaatacattgcaagactgcaaagaggtagcagaaattaaaaataaacaaaaatggggaaatccatttacacactggtataaccataaagatgcaagaatattttatggtgctataccaacaacagcacaacaaaccgatgatgctaacatattagaattagaagatttgtttatagaatgcagatacaacccatttaaagacaaaggcacaggaaacaaagtatacttagtacccacagacacaggcctaggtagctttttaacattaccaacaaaaaatgaattattaatagaaaatttaccactatggcttatattttggggttgggcagactggataaaaaagtctaaaccaatagcacacttagaagaagaataccaaataataatacaaactccatatatatttccaaaattaccatgttatgtactaacagacaaatactttctacacccaccaaatgacggaacacacacaaccacactatcacaaacagaccaactacattggcacataaaatacaactttcaagaacaacaatttaacttactagcaaaaacaggaccagcagcaccaaaaataaatgaagttaaacaaatagaagcacactttaactataacttttattttaagtggggaggaagcccagctccaatggaacaaattagtgacccagcagaccaagaaaaattccccacgcccaatacgcaactccaaagacttgagattgagagtccaacaaaacccaaacaacacttcttgtacaccttcgacgaaaagcgacacacactcacactcaaagctgcaaaaagacttaaaaaagactattcaactccaacattttttacagactttggagcaaaagacatcccgctcaaagcacaaacggaaagcgacagctcatcggaggaggaagaaatccaaacatcactccagagagaagacaaactcaagcagtacctccagcgaaagcgactccagtacagacagcgaatccacaacctcctaaaaacaaaaaaattattccccctttaagagacatgtttggacaaccttactataaaaaccgtagatttaatgctaaagaatttgaacaagaattgcttgatgctaaatgctggaaaagacgccccagactgtatatctttgataaacctgattatgaattacctactattgaaccacttgtaaacattggtgtaaatttttcattaaactttaaagagtaggccagcaaatattcacttgtcggtgtcagtttatataagtaataaccttaataaacatccatcacctccctaatacgcaggcgcacaagggggctccgcccccttaaacccccaagggggctccgcccccttaaacccccaggctccgcccccttacaccccctaattaatattcaacaggaaaaccacctaattataattgccgaccacaaactgtcaaccgttgcatatacttccctaaattaaactgcacttctgctttttcagaaacactcccactaattcattaataatcagacgctattcctgggaggagcaacacatctatataaccaagtgcactgacgaatggctgagtttaccccgccagacggagaccagacaggacactgactgggctgcttttggg

SEQ ID NO: 3554 - protein, 659 aa, Betatorquevirus sp.
MPPFNFYRRRYYPNRWRRRRYFRRRRFRPSIRRRFWRRRTVRRRRFFKKYKRKLTKIKLNQWQPQTINKCHIKGNLCAFTCGRGRENHNFILTQESYVPTSQPGGGSWSILQFTLRVLYDEHKAGRNWWTKGNTGLPLVRYILCKLKFYRSKDTDYLVTIQRTPPFEVTRDSYLSTQPSRHLMHHKSIIVPKLGRGPNKKTYIKRKVLPPAMFQNKWYFQQDIYNIPFFMLTISALELDQMYAPEDQISSNITLISLNTNAFQMSNWERQPYSTKSAGTYNIYLWSYQNGDDKDKKWQNIYFLGNCKEYTEGTKLNTLQDCKEVAEIKNKQKWGNPFTHWYNHKDARIFYGAIPTTAQQTDDANILELEDLFIECRYNPFKDKGTGNKVYLVPTDTGLGSFLTLPTKNELLIENLPLWLIFWGWADWIKKSKPIAHLEEEYQIIIQTPYIFPKLPCYVLTDKYFLHPPNDGTHTTTLSQTDQLHWHIKYNFQEQQFNLLAKTGPAAPKINEVKQIEAHFNYNFYFKWGGSPAPMEQISDPADQEKFPTPNTQLQRLEIESPTKPKQHFLYTFDEKRHTLTLKAAKRLKKDYSTPTFFTDFGAKDIPLKAQTESDSSSEEEEIQTSLQREDKLKQYLQRKRLQYRQRIHNLLKTKKLFPL

SEQ ID NO: 3555 - protein, 91 aa, Betatorquevirus sp.; identical to SEQ ID NO: 1300

SEQ ID NO: 3556 - protein, 62 aa, Betatorquevirus sp.; identical to SEQ ID NO: 1301

SEQ ID NO: 3557 - DNA, 2840 bp, Betatorquevirus sp.
ggcgggtgctgaggtgagtgaaaccaccgaatcaaggggcaattcgggctagagcagtctagcggaacgggcaagtaacttaaattattttacaaatgtccgactatgtggatccaaaatactctcctagacaacttaacttacaaatagttaattgctacgttggaatccatgatactcactgccactgcaaagagcctctgaaacatattattaaacaaatagaacaacaagaaccttctatcaaacaatggcgagatacttctaccgccgctactggaaaccaagatggagaagacgcactagacgcttttggacctggagaactagaaaagcttttcgcacaagacgacgaagaaaacgcagggtaagaagaaaactttctactttacatttaaaacaatggcaaccaagccatattagaaaactaactataaaaggcattttttgcttatttcaaatgcacaaagcccgctacaaccataactataaccaatatgaaactgtgactccaccacaaggactaccaaatgaaggaggctttactattttaagatttaacttaatgtcactgtatgaacaacatgaaaaagctcataatgtatggactataagcaatagtaactttccactgtttagatatacaggctgtaaaataagagtatacagaccagaatatactgatttagtcttaaaatttcaaacatgctatcctatgtgttgttctaaactaatgtacactggaacacaaccaagtataatgatgatgacacacggggctaaaagaattagatgcaaaaaaaatgcacctaattgtaaaccatacagaacatacaaactaaaacccccacaacaaatgacaaacagatggtattttcaacatgatcaatcacaaacaggtttcctattaatacaagcagcagcagcaagctttgaccaatactatgcatcaataaatgcagacagctcctcaataacattaagaacacttaatacaaaaatattccacaacctaaactttgcaaactttcctttaaaagaaggctacagccctaacccaaaaatgcacttatgggctacaaacggatcaataccagcacaaatagaagaccttatatggttaggacaatctaaaaaatataattggggaaaacaactaaaacaatttaaaacaggaagttcaacaaactatatagaaaacgcatacaaaaaatacatgtcagacccaaataactggggaaacatctttcacaaaagtcacttaaataaatcaaacacaatctggtttactcaaaaaccaccatcacaaatatttacagaagaaatactaaaaaaaacacaatttaatcaaaaattaagtgaatttaaaatagacaaccaattagtgtttcatgaacttacacaagaacttttctttgacataagatacaatccttttaaagacaaaggatacaataacaatatatacataaaacccaattggcaagacaacgaagatttagacccactaccagacacagacttagaaaatccaggctttccaaactggttaagctgcttcggatttgaagactacttaaaaaaattaggtactaaatcacaattaaacacacactatatgatggttcacaaaagcgaatacttcgaaccaaaacttgactactacatatttttagactccttcttctttaagggagacagtgatgattacgaaggcagaatagaatgggaaaatcaaaactggtatcctatgataacacatcaacaagaaatgctaaatgtattagcactaagtggacctggtacacctaaaatgggagacattaaactggcagaagcaaaaatagactattcattcttttttaagattggaggatgtgcaccaccagttcaaaaggttaaggaccctacaacacaaccaacttatgttacaccaaataacatccttgacacaaattcgttacagaatccagaacaaccaattgagagcttcttgtaccaattcgattggagacgagaccaaattactgaaacagctgcaaaacgaatcacaaaagacttctcaactgaaaaatatctattttcagatgcagcaacaactggaacagcagtcccactcatccaaacacaagaaaaagaactgctctcgtcggaggaggaggaaaccaaaacggagacactgctccagcagctcctcgtccacagaaacaagcaaaaacagctccgactccgaatcaagcaactaatgcaacaacttcaaacatcagaataagataccaaaaaattaaaataaacctatttggtgaaaataaacaacaaaaccgccgcatgactccaaaagaaaagcaagaagaaatacaagaagctagcatatggggacattatgttagagactatatcttagataggcctttttacaaagatatgcctataaccccaattgtaccccgcctttgctttgacttaaactataaagaataaggcctgcaaactttccttgtcggtgtccatttattataattaaaacttaaataaacatccaccactctcccaaatacgcaggcgcactagggggctccgccccctaaaacccccaaggggcccctaataaatattcaacaggaaaaccacataattagaattgccgaccacaaacggtcacttacttctgctttttaacaacacttcctcttttactcatgaatatttaacaaattaattaataaacaccgtatatcctgggtggagctaataacctataaaactaactacacttccgaatggctgagtttatgccgctagacggaggacgcacaggacactgctgcgaactgctcttg

SEQ ID NO: 3558 - protein, 673 aa, Betatorquevirus sp.; identical to SEQ ID NO: 2550

SEQ ID NO: 3559 - protein, 91 aa, Betatorquevirus sp.; identical to SEQ ID NO: 2551

SEQ ID NO: 3560 - DNA, 2839 bp, Gammatorquevirus sp.
cgggagcccgaggtgagtgaaaccaccgaggtctaggggcaattcgggctagggcagtctagcggaacgggcaacaaacttaaaacaatatttcttttacagatgtcccgcttctacactggcactaaatacaatggagccacactaaatcaaatgtggatgtctatgatagcagattcacatgatattcactgtgattgtaaaaaaccttttgctcacctacttgacagcatatttccagaaggtcacacagatagaaacaaaacaatagcacatattattcaaagagattatcaagaatgcctttctggtggagaagaagaagaaaaacctggtataccccttggaggcagcgccgctaccgccgccgcagatacaggcgtaaacgtagaagaccatttagcagaagacgcagacgaaatagaaaagctactcgccgccgcagaagaaaactacctaaggtaagaagaaagaaaaaatttttaaaacttgtacaatggcaaccagacagaataagaaaatgtactattaaagggagaggaactctagtaatgggagctcatggcagacaaatgatctgttttaccaatgttaaagacagactaacacctagcagagcacccgcgggaggtggatttggcatagaaagattttccttagggtacttatatgaagaatggaaagctagaaacaatatatggactgcaacaaatgaaaacacagacctagcaagatacctaggctgtgaatttaccttttacagacatcaagatacagactttataattaaatatgaaagacaaggtccttttaatttacaaaaatactcatacatgtatatgcagccacaagaactactactaggaaaacataaaaaaatactactaagtaaacaaacaaatccaaatggaaagttaaaacttagactaaaaatagggccaccaaaactactaacaaataaatggttattacaatcagaactagcaaaacaagacttagtacaaatatcaggagcagcagctagctttagataccccacaataggatgctgcaatgaaaacagaattttaaacctatactcaataaacattgaattttacaaagatgcacactggatgcaagcatactctgccgaggcatactataaaccatacgctacaattccttcagacttaaattttcactataaaacacaagcaggaggagaaggcactgttaaaggaccacaatctaaagacaaagcattgaccttagaatcaggatggtttcaatcaaaaatattaggagcttataaagtaactaaggcagagtcatccacacaatatggcgaactcccaatggtcctacttagatacaatccagcagctgaccaaggaccaggtaacttagtaactatagtagatttagtagcagggcaatggcaaggaccataccctcctgaatatacaatacaagatgtaccactatggctagcactaaatggatatgttaactacataatacaaaaatctggagacaaaggcatcatgaaacataaaattgtttgtattaaaagcccagcactatacagactaccaacagttagtgctcaaaaaatatttccaataataggatccaaatttgtaaatgcaaagccaccatatgaccaaccactaacacccgacatgtctagaaattggtaccctacatatgaacaccaacaagaacccttaaatgacattgtttgctgtggacctttagtaccaaaattttataatcaaactaacagtacatgggaattacaatacttttatcgtttttactttaagtggggaggccctgaaattggagacccaacagttgatgatccaaaaaccaaaggagaaaaaaccactgactatacaatgccccgcacaatacaaatatttaacccactcaaaaataaaacagaatccattctacacccctgggacttcagaaggggcattgttacaaaaagagctcttgaaagaatgtgccaaaacctcgaaactgattcaaatttctacccagatggagaaacaccaaagaaaaagaaaaagacaacctgcgagctcagaaacccagaggaagaaatcaaagaagtgcagaactgtgtcctctcactctgccaaacagaaacatcggaggaagaggaccccaacaacctccagcagctcatcctcaagcaaaagctcaagcagcagcagctcaagcacaacatcctagtactactaacagacctgaaaaccaagcaaaactctttgagactacaaacaggaaatttacagtagaagcatttaaacctggctttgaacttcaaacagaaaaagagcttgctattgctttttgcagaccaccaagacattataaaaatgaccccccattttatccatggctaccacctgcaccccttgttaactttaaccttaactacaaatgctaggccaacaatgtacacttagtaaagcatgtttaataaagtttacacccaaaaaaaaagcaatagcaagctctttttctgtttgaagttcaaagccaggtttaaatgtagcccccccccacaccccccgcgggggggggcagagccccccccgcaccccccctacgtcacaaaccacgcccccgccgccatcttgggtgcggcagggcggggactaaaatggcgggacccaatcagtttatactttcactttccaattaaaacatcccacgtcactaaaaaggggtggagagttacaaactatataactaagtgcggtgacgaatggctgagtttaccccgctagacggtgcagggaccggatcgagcgcagcgaggaggtccccagctgcccgtggg

SEQ ID NO: 3561 - protein, 663 aa, Gammatorquevirus sp.
MPFWWRRRRKTWYTPWRQRRYRRRRYRRKRRRPFSRRRRRNRKATRRRRRKLPKVRRKKKFLKLVQWQPDRIRKCTIKGRGTLVMGAHGRQMICFTNVKDRLTPSRAPAGGGFGIERFSLGYLYEEWKARNNIWTATNENTDLARYLGCEFTFYRHQDTDFIIKYERQGPFNLQKYSYMYMQPQELLLGKHKKILLSKQTNPNGKLKLRLKIGPPKLLTNKWLLQSELAKQDLVQISGAAASFRYPTIGCCNENRILNLYSINIEFYKDAHWMQAYSAEAYYKPYATIPSDLNFHYKTQAGGEGTVKGPQSKDKALTLESGWFQSKILGAYKVTKAESSTQYGELPMVLLRYNPAADQGPGNLVTIVDLVAGQWQGPYPPEYTIQDVPLWLALNGYVNYIIQKSGDKGIMKHKIVCIKSPALYRLPTVSAQKIFPIIGSKFVNAKPPYDQPLTPDMSRNWYPTYEHQQEPLNDIVCCGPLVPKFYNQTNSTWELQYFYRFYFKWGGPEIGDPTVDDPKTKGEKTTDYTMPRTIQIFNPLKNKTESILHPWDFRRGIVTKRALERMCQNLETDSNFYPDGETPKKKKKTTCELRNPEEEIKEVQNCVLSLCQTETSEEEDPNNLQQLILKQKLKQQQLKHNILVLLTDLKTKQNSLRLQTGNLQ

SEQ ID NO: 3562 - protein, 120 aa, Gammatorquevirus sp.
MSRFYTGTKYNGATLNQMWMSMIADSHDIHCDCKKPFAHLLDSIFPEGHTDRNKTIAHIIQRDYQECLSGGEEEEKPGIPLGGSAATAAADTGVNVEDHLAEDADEIEKLLAAAEENYLR

SEQ ID NO: 3563 - protein, 125 aa, Gammatorquevirus sp.
LRAQKPRGRNQRSAELCPLTLPNRNIGGRGPQQPPAAHPQAKAQAAAAQAQHPSTTNRPENQAKLFETTNRKFTVEAFKPGFELQTEKELAIAFCRPPRHYKNDPPFYPWLPPAPLVNFNLNYKC

SEQ ID NO: 3564 - DNA, 2839 bp, Alphatorquevirus sp.
gtcggtgtctacctctataagtcactaagcatcaaggggcaattcgggctcgggactggccgggctatgggcaaggctcttaaaaagatgcgtttctctaatatcgcccgcagaaagaaaaggaaactgtcactgctacctgtgcaccctccacaggagacacttaccatgagctttgtagaacccttaattagcagcaaccacagagaaatagcatactaccatggctgtgttgaaatgcacaaagccttctgtggctgcgacaactttctcacccacctgcaacgcataacaacatacatttctgctaaccaacacactccacccagcacaccttcaaacaccctccgtagagcccgggccctgcccgcggctccggagcctcttccatggcgtggtcctggtggtggcagaggagacgccgaaggaggccgtggacaaggagaaggtggagaagactacgcaccagaagacctagacgccctgttcgacgccgtcgcaagagatacagagtaaggagacggaggcggtggggcaggagacgtgggcgacgcacataccttaggcgcagacttaaaaagagaaagagacgaaaaaagctaagactgactcagtggaaccctagcacaatcagaggatgtacaataaagggaatggctcctttaataatatgtggccacaccatgtcaggcaacaactttgccattcgaatggaagactatgtttctcagattaggccattcggaggttcttttagcactacaacctggagccttaaagtactttgggacgaacacaccagattccacaacacctggagctacccaaacacccagctagacctggcaaggtttaaaggagtaaacttttacttctacagagacaaagacacagactttatagtaacatacagctcagtaccaccatttaaaatagacaggtactcatcagccatgctacacccaggcatgctaatgcagagaaagaaaaagatattaataccaagctttacaaccagaccgagaggccgaaaaaaaattaaagtacatataaaacctcctgtattatttgaagacaaatggtacacccagcaggacctatgcgacgttaatcttttgtcacttgcggtttctgcggcttcctttagacatccgttctgcccaccacaaactgacaacatttgcataaccttccaagtgttgaaagacttctactatgaacaaatgtcagttacaccaaatgataacgcaaaagacgaaactataattgatacactgtacagcaatgcagaatactatcaaactgtacacacaactggcattataaacaaaacacaaagaatagctaaatattccacatccaagaatacactaggcgatctagatactataaataattatttaaatcctccatcaatagccacagtaggcgaaacattatctactggtaacaactcaatatatggctttccatcatataaaccagacaaacacaaacttagaaaaatagctaactggttttgggaacaagaaacaaacaaagagaatgtagttacaggctcatactctatgcccaccaacaaatatgtaagctatcacctaggaaaatacagcccaatctttttaagctcttatagaaccaacctacaatttagaacagcatacacagatgtcacatacaatccactaaatgacaaaggcaaaggtaatcaaatatgggtacagtatgtaacaaaaccagatacaaagttcaatcccacacaatgcaaatgtcacatagtagacatacccctatgggcagcattccatggctacatagactttgtacaaagtgaattaggcatacaacaagaaatacttaacattgccattatagtagtcatatgcccatatacacaacctaaactaatacacgacccaccaaatgaaaaccaaggctttgtattctatgacacacaatttggagatggtaaaatgccagaaggctcaggcctagtaccaatatactaccagaacagatggtaccctagaataaagtttcaaagtcaagtagtacatgacttcatactaacaggcccctttagctataaagatgatcttaaaaacacagtactaacagtagaatacaagtttaaattcttatggggcggcaatatgattcctgaacaggttatcagaaacccatgtaaaacagaaggacacgacctccctcacaccagtagactccatcgcgacttacaagttgttgaccctcacaccgtgggcccccaatgggcgctccacacctgggactggcgacgtggactctttggtacagaggctatcaaaagagtgtcagaacaacaagtacatgatgaattgtattacccaccttcaaagaaacctagattcttccctccaatatcaggcctccaagagcaagaaagagactacacttcgcaggaagaaaaagagcagtcctccacagaagaagagacggacccgaagaaaaaagagcaaatacagcagcgacgactccacctccagttccaagagcagcagcgactcggaaaccaactcagactcatcttcagggagctgcagaaaacccaagcgggtctccacataaaccctatgttatcaaaccggctgtaaataaagtatacctattctctccccaggggcctaaacccatctctggctacagagactgggaagaagagttcacatgctgtaaatactgggacaggcctagtagaattaaccacacagacccccctttttacccctggatgcccaaatacaatgtaagcttcaaacttggctggaaataaaattacaaggccgtacactgttcactt

SEQ ID NO: 3565 - protein, 747 aa, Alphatorquevirus sp.
MAWSWWWQRRRRRRPWTRRRWRRLRTRRPRRPVRRRRKRYRVRRRRRWGRRRGRRTYLRRRLKKRKRRKKLRLTQWNPSTIRGCTIKGMAPLIICGHTMSGNNFAIRMEDYVSQIRPFGGSFSTTTWSLKVLWDEHTRFHNTWSYPNTQLDLARFKGVNFYFYRDKDTDFIVTYSSVPPFKIDRYSSAMLHPGMLMQRKKKILIPSFTTRPRGRKKIKVHIKPPVLFEDKWYTQQDLCDVNLLSLAVSAASFRHPFCPPQTDNICITFQVLKDFYYEQMSVTPNDNAKDETIIDTLYSNAEYYQTVHTTGIINKTQRIAKYSTSKNTLGDLDTINNYLNPPSIATVGETLSTGNNSIYGFPSYKPDKHKLRKIANWFWEQETNKENVVTGSYSMPTNKYVSYHLGKYSPIFLSSYRTNLQFRTAYTDVTYNPLNDKGKGNQIWVQYVTKPDTKFNPTQCKCHIVDIPLWAAFHGYIDFVQSELGIQQEILNIAIIVVICPYTQPKLIHDPPNENQGFVFYDTQFGDGKMPEGSGLVPIYYQNRWYPRIKFQSQVVHDFILTGPFSYKDDLKNTVLTVEYKFKFLWGGNMIPEQVIRNPCKTEGHDLPHTSRLHRDLQVVDPHTVGPQWALHTWDWRRGLFGTEAIKRVSEQQVHDELYYPPSKKPRFFPPISGLQEQERDYTSQEEKEQSSTEEETDPKKKEQIQQRRLHLQFQEQQRLGNQLRLIFRELQKTQAGLHINPMLSNRL

SEQ ID NO: 3566 - protein, 149 aa, Alphatorquevirus sp.
MGKALKKMRFSNIARRKKRKLSLLPVHPPQETLTMSFVEPLISSNHREIAYYHGCVEMHKAFCGCDNFLTHLQRITTYISANQHTPPSTPSNTLRRARALPAAPEPLPWRGPGGGRGDAEGGRGQGEGGEDYAPEDLDALFDAVARDTE

SEQ ID NO: 3567 - DNA, 2838 bp, Betatorquevirus sp.
cgggtgccgaaggtgagtgaaaccaccggagtctaggggcaatatgggctagatcagtctggcggaacgggcaagacacttaatatatattttttttacagatatgacacactttttaaaagaccctgtttacaatggccgtgctatggaattacaattaatgaatgcaactattaactgccatgacctctgctgtggatgtatgactcctgttcttcatcttaaagaaattatcaatacattttcctattcaccatgcccccgtactactggcggcggcgacgaccaccatggagacaaagaaactaccgacgccttagaaggcctagaagatggagaattagatcgcttattcgccgacgatggagaagacgccactgggtaagaaaaaaaagacgatttttaagacaaaaaaaactgacgagactgactttaaaagaatggcagcctaaaaaaattaaaaaatgttccataaaaggaatattacctgcatttatatgtggaaaatcaagaatagcaaataattttgtactgttttcagaaagcatagtaccagtaaaagaacccagtggcggaggatggtcaattctacaaataaacttaagagtactatatgaccaatttataaaatttaaaaactggtggactactagcaaccaaggcctaccactgtttagatacttaggaatgaaactcacattttacaaaactcaatatgtagactatatagttgtaccacaactttgccctccattttcagtagttagagacaactacctaaacatacatcctgttagaatgctcctaaatagacataaaattatagtaccacaaagacaaaaaggaaagaaaaactacataaaaaaatggttcagaccacctgacctaatgcaaaacaaatggtactttcaacaagactttataaacataccatttattgtactacatataacagcagctagcttagaccaatacagcattgcagaaaaccaaataagtacaaacataacattatattcattaaacacagacttttttagaaataaccaatttactggctacgaagacacaggctacataccaaaaacatatggaacacaagcttactacttatatacagaaggaaatggaactgaacaccctaataaatttaacgaaatgattccactaagaaataccaccacatacacagacggaaaaaaagcaacaacttttaaccaatgggaaaacaaaacaaactggggtaatccatttacacaaaaccactctcaccacgacgtaccaatatactataacaataataaaccaacatcaagtaactatgataacgacaccacatttactccattacatgaactattctttgaatgcagatataacccagaaaaagacacaggaataggaaacacagtattttttaaatccaacaaactaaaacaaggagaaattgacactattcctgacaaagatgacatagtaataacaaactttccactatggctaatattttactcatggataagctggatacaaaagtcaaaaccaatacaacatataatgaatgactactactttatagtacttacaccatttatagaaccaaaaagaaagagctacttatttttagatccatactttgtatttccaaattcacaaattctaacaccaactgaaaaactacattggtatccacaaacaggataccaaacagatgtaattttcagctttgcacaaacaggcccagcagcacctaaaatagacagatcacaatcaatacaagcacaatttaaatacaatgtaaaattaaaatggggaggatgtcctgcaccaatggaactaattacagacccatcattacaggacaaatttcccatccccaatacaatcttcaaaacacttgagatccaagatccagcaacaaacaaaaggacactcctttacgacttcgacgaaagacatgacggacttacggacagagctgcaaaaagaattaaaacagaacaaatacttgaaacatcttttgcaggacaactaccaacagatccaaacatcaggatccaaacacaagaaacgacctcatcgtcggaggaagaaagcgaaacatcactccaggaggagctccagctcctcaagcgaaaaaacaagcagctcagaaacaagctcctcagactaacatcttactaaaacctaaaattatatatgctccatacactatgtttggagataaaactactaaaaaactaacacctataaggggaaagagttgggaggcggaactacaactagctaaattatttaaaagaccactaagaacatatgaagaagaccctccttactatccctgggttgtacctgaaccagttgtaaactttcacttaaactttaaagaataaaggccagcattaattcactctcggtgtccatttatttaagtttaaactttaataaacatccatgtcctccctaatacgcaggcgcacaagggggctccgcccccttaaacccccaagggggctccgcccccttaaacccccaagggggctctgccccccttacacccccaagggggctctgcccccttacacccccttattaatattcaacaggaaaaccacataattagaattgccgaccacaaactgccaaccgttgcatacacttccctaaattaactactacttcctttttttaagaactcctcctactaattcattaataatcagacgctattcctgggaggagcaaaccatctatataaccaagtggggtgacgaatggctgagtttacgccgccagacggaggactgatcacttcagtgactcaggactgatcttggg

SEQ ID NO: 3568 - protein, 642 aa, Betatorquevirus sp.
MPPYYWRRRRPPWRQRNYRRLRRPRRWRIRSLIRRRWRRRHWVRKKRRFLRQKKLTRLTLKEWQPKKIKKCSIKGILPAFICGKSRIANNFVLFSESIVPVKEPSGGGWSILQINLRVLYDQFIKFKNWWTTSNQGLPLFRYLGMKLTFYKTQYVDYIVVPQLCPPFSVVRDNYLNIHPVRMLLNRHKIIVPQRQKGKKNYIKKWFRPPDLMQNKWYFQQDFINIPFIVLHITAASLDQYSIAENQISTNITLYSLNTDFFRNNQFTGYEDTGYIPKTYGTQAYYLYTEGNGTEHPNKFNEMIPLRNTTTYTDGKKATTFNQWENKTNWGNPFTQNHSHHDVPIYYNNNKPTSSNYDNDTTFTPLHELFFECRYNPEKDTGIGNTVFFKSNKLKQGEIDTIPDKDDIVITNFPLWLIFYSWISWIQKSKPIQHIMNDYYFIVLTPFIEPKRKSYLFLDPYFVFPNSQILTPTEKLHWYPQTGYQTDVIFSFAQTGPAAPKIDRSQSIQAQFKYNVKLKWGGCPAPMELITDPSLQDKFPIPNTIFKTLEIQDPATNKRTLLYDFDERHDGLTDRAAKRIKTEQILETSFAGQLPTDPNIRIQTQETTSSSEEESETSLQEELQLLKRKNKQLRNKLLRLTSY

SEQ ID NO: 3569 - protein, 108 aa, Betatorquevirus sp.
LAERARHLIYIFFTDMTHFLKDPVYNGRAMELQLMNATINCHDLCCGCMTPVLHLKEIINTFSYSPCPRTTGGGDDHHGDKETTDALEGLEDGELDRLFADDGEDATG

SEQ ID NO: 3570 - protein, 59 aa, Betatorquevirus sp.
MFGDKTTKKLTPIRGKSWEAELQLAKLFKRPLRTYEEDPPYYPWVVPEPVVNFHLNFKE

SEQ ID NO: 3571 - DNA, 2838 bp, Betatorquevirus sp.
caggtgccgaaggtgagtgaaaccaccgtagtcaaggggcaatatgggctagttcagtctagcagaacgggcaactaacttaaattatattttacagatgagcaaatttctaaaagaacctgtataccatggaaaagcaattgaaaatcaactaaccaacagcttaatttcatgccatgatctttgctgcggctgcgaggaaccatttaaacacattcaatttttaattaatcaagcaacatgccgttctacttcagaagaaacttctacaaaacaagaaaaagatacccctggagacaacaacgatggtttcgacgaaggagatctacaggccctattcgacgcaagcgacgacgccgaagggtaagaagaaacaaacttaaatttaaaaaacttaagcttaaaaaaattaaattagttcaatggcaacccagccacataaaaaaatgtagaattaaaggaacctttcaactttttcaatgtggcaaaggcagagcaagccataattaccaactatttaaagaaagcttagtacctccacatgaacccggaggaggaggatggtcttatatatactttagcttaaataacttatatacagaaaacaaaagactacaaaactggtggacacgatccaacaaaggactacctttatgtagatttcaaggtgtaaaatttaaattttatagacaaccttttacagactatattgtaacatacagtaatgaatatccaatggaagttggaaaataccattaccctagcattcacccacaaagaatgctaacatataaccacagaattatagttcccagctacaatactatgcctttgtggaaaaaaacctacaaaaaatgctttattaaaccaccaaaagaaatgatagataaatggtattttcaaaaccactttcaaagatatccattatgtatgctagcagttaccgcatgtaatttactatcactatatgtatcaccaaatgccttaaacaacaattgtactgtaaatgctttaaatacaaatttattcaaaagaaaaagctttcaatacccttcaataacaacaggatactttcctaaagcttctgtatatctatatgcttcacctaatggagacgaggacattaccaaaattccaattaaagacataacgtacctgggaaacccaggcccatattttaaaggagaacctttacaagaaaatacacaaacgcaatataataaaactaaatggggaaacccttttcattatgattatatgaatcaacaaagaaacattattattagtgaaaaacaatacacatattggttccaaaacccaggacaaaaacctaaaccaggaaatatacaacacggtgaagctcaattttatacagaacctttatactatgaatgtagatacaatccatctgctgacacaggagatggaaatgaagcttattgggtatcaaacttaattgaagaagacggatgggaaacccaaaaagatcctgacttaattataaggggatttccattatggatattactatggggttggtatgactggacaaaaaaattagacaaaattaaacacgtagagaatgactatgtattagtagttaaaacaaaatttataaaacctatactaccacattatgttttcttaagtgaaagcttttgtatgggtcttgccccctacaaacaaccattacatactatgtctccatatgaactaaatcattggtatcccagatacaaatttcaagaagaggcaatagaacaaatactaaatacaggaacaggagtttgtagatttgaccatgaacaacaaatacaagctcattgttattatcaattttattttaagtggggcggcaatccagctacctttgaaacagtcgttgatccaaccacccaaccttactaccctgtgcccggtggaatcgttccagcaaatgagatcattgatccaagcacctctcccttgtccttcttctacaacttcgactcccgtagaaaccttattaaacaaacagctattgaaagaattcaaaacctcacagaccttgaaaactttgtgttcacagatggaacaaaccatacacaccaaacaacagaaacacaagaaacatcaccgaaaacagcccaggaaaaagaaacgcaaaaggaaatactcttccagctccagcagtacaagctactcaaccaacaactcctgcagcgattccaacaactcagacaattagtggaagatacataatacataaatgtaaaaatgctgtaactctttttccacctaaagaacccaaaaatagacgcttttaccctcatgaactagaaactgaaaaacaattagcaacattgtttaaaagaccccttagatcctttattagagaccacccatattacccctatatacctcctgaacccttggtaaatcaaactagagtgtgctttgacttaaactatcaataaactaggccaacagtaattcacttgtggtgtctgttcctttaagtaaaaacttttataaacaaactccgcctccctaaaattcgggcgccaaaagggggctccgcccccttaaacccccggggggggcacagcccccccccataccccctaaaacttcctgttttactcatgaataataattaaccacaaaattagaattgccgaccacaaactgtcaaaaaaccacaacttcactttttttatagaccactcctaccaattaattaataatcatcgtcacaacttccttttttctacactgtatataactaactacactgacgaatggctgagtttatactgctagacggagacgcgaatagacttcgcggctgaacttggg

SEQ ID NO: 3572 - protein, 666 aa, Betatorquevirus sp.
MPFYFRRNFYKTRKRYPWRQQRWFRRRRSTGPIRRKRRRRRVRRNKLKFKKLKLKKIKLVQWQPSHIKKCRIKGTFQLFQCGKGRASHNYQLFKESLVPPHEPGGGGWSYIYFSLNNLYTENKRLQNWWTRSNKGLPLCRFQGVKFKFYRQPFTDYIVTYSNEYPMEVGKYHYPSIHPQRMLTYNHRIIVPSYNTMPLWKKTYKKCFIKPPKEMIDKWYFQNHFQRYPLCMLAVTACNLLSLYVSPNALNNNCTVNALNTNLFKRKSFQYPSITTGYFPKASVYLYASPNGDEDITKIPIKDITYLGNPGPYFKGEPLQENTQTQYNKTKWGNPFHYDYMNQQRNIIISEKQYTYWFQNPGQKPKPGNIQHGEAQFYTEPLYYECRYNPSADTGDGNEAYWVSNLIEEDGWETQKDPDLIIRGFPLWILLWGWYDWTKKLDKIKHVENDYVLVVKTKFIKPILPHYVFLSESFCMGLAPYKQPLHTMSPYELNHWYPRYKFQEEAIEQILNTGTGVCRFDHEQQIQAHCYYQFYFKWGGNPATFETVVDPTTQPYYPVPGGIVPANEIIDPSTSPLSFFYNFDSRRNLIKQTAIERIQNLTDLENFVFTDGTNHTHQTTETQETSPKTAQEKETQKEILFQLQQYKLLNQQLLQRFQQLRQLVEDT

SEQ ID NO: 3573 - protein, 89 aa, Betatorquevirus sp.
MSKFLKEPVYHGKAIENQLTNSLISCHDLCCGCEEPFKHIQFLINQATCRSTSEETSTKQEKDTPGDNNDGFDEGDLQALFDASDDAEG

SEQ ID NO: 3574 - DNA, 2837 bp, Alphatorquevirus sp.
cgggctcgggactggccgggctatgggcaaggctcttaaaaaagccatgtttcttggtcgcgtttacagaaagaaaaggcgcctgtcactgtcctcactgcaccctctacaaaaagctcgcaaactactaagaggtatgtggaggccccctactcaaaatgtatcaggacaggagagaaactggtacgattctgtgttttattcgcatgctgccttttgcggctgtggggactgtgttggtcatcttagctatctggctactcacctgggccgaccacctagtacacaacccccgccgcaactccagccacctgccctgagacgcctgcctgctctcccggcacccccaaacccctccggtgatcgagcggcatggcctactggtggtggagacgccggagaagacggccctggagaaggaggcgccgctggaggcttcgcagacctcgcagacgaagagctccttaccgccgccgtcgaggccgccgaagagtaagaaaaaggagggggaggtggagacggacttacagacgatggcgcaggcgaaaagggcgacgcagacacagaaaaaaaattataatgaaacagtggcaaccaaactttatcagacactgttatatagtgggatttatgccactaatattctgtggggagaacaccacctcccaaaactatgccactcactcagacgatctggtggccaagggaccttatgggggaggcatgaccaccacaaaattcactctgagaatcctctatgacgaacaccttagatttatgaacttctggactgttagtaacgaagatctagacctctgtaggtacctaggtgttaaactaattttttacagacaccccactgtagactttatggtgcagatacacacacaacctccttttctagacacagaactcacaggccccagcatacatcctggcatgatgattctcaacaagaaaaaaatatttgtgcccagcttaaaaaccaggcctaacagaaaacacaaagtaagagttaaaatagggccccctcgcctctatgaggacaagtggtacccccagtcagagctctgtgacacaaccctactaaccgtctatgcaaccgcatgtgacctgcaatttccgttcggctcaccactaactgacaacccttgcgtcaacttccaggtgctaggttccgcttacaaacggcaccttagtattctctccaccaatgactctaaaaatttagcacactatgaaacagctttattctctaaaacagcttactacaacacctttgagactatagcacaattaaaacccacagggcaaaccacaggagtatctcctacatggcaagacgtacagaacacaactaatttagatgccttaggcacaaaccaagcctcaagtaatgacacctggtactatggtaacacatacaaagacaacattaaagacttaactaaaaaggccagagaaagatacctagcagcaacacaaaaagcatttccagcttatgccactttaacctcacctctctacgaataccacggaggctgctactcctctatatttctgtcagcaggcagggcatactttgaaactctaggtgcttactcagacattatatacaatccctttgtagacaaaggcataggcaacatggtgtggatagactacctcagcaaagaagatgcagtttacactcccagaaccagcaaatgcctcataaaagaccagcccttgtgggcctcctttaacgggtacagcgaattctgtgccaaaagcacaggagacggtgctgtgaacataaacactagagtagttatcaagtgcccctacacaactcctatgctagcagacaactccaatgagaaccaaggctttgtaccttactccctaaactttggcaaaggcaaaatgaaaggaggcagctcacaagtgcccctcagctggaggtgcaagtggtatgccatgatgtaccaccaacaagagtttatggaggccatagtgcagagcggaccgtgggcttacaagggcgacgaaaagagcgcggtactggccatgaaatacgtgtttaactggaagtggggcggcaaccccatatctggacaggttgtcagaaatccctgcaagacctccggttccagtcgagagcctcgttcaatacaagcagttgacccgaaaagagtcgcgccaccgctcgtattccacagctgggactaccgacgagggctctttggccacgcaagtattaaaagaatgtcagaggaatcagcaactcctacactttttacaggaccagcgggcaaacggccccgcagagataccagtgtccaacaggcggaagaagaacagcaaaaagaaagctcatctttcagagtccagcgacagctccagccctggatccagtccagtcaagaaacgcaaagcagccaagaagagatgcaagcgcaggggacgatacaagagcaactcgtccagcagctgggagaacagcgagctctcagaaagcagctcgagttcctcgccagtcaagtcctcaaagtccaagcagggcaacacatacacccccttttatcttcccaagcataaacaaggtttatatgtttgagcctaaaggcccaaaacccatacagggctaccaggcctggctagatgagtatcaaacagccggagcctgggacaggcccgtcagaaaataccacacagataccccctactacccctggatgcctaagccccccgaccagttccgtgtaactttcaaacttggctttcaataaaattgcaaggcagtacactgttcacctgtcggtgtctacctctataagtcactaagcactccgagc

SEQ ID NO: 3575 - protein, 735 aa, Alphatorquevirus sp.
MAYWWWRRRRRRPWRRRRRWRLRRPRRRRAPYRRRRGRRRVRKRRGRWRRTYRRWRRRKGRRRHRKKIIMKQWQPNFIRHCYIVGFMPLIFCGENTTSQNYATHSDDLVAKGPYGGGMTTTKFTLRILYDEHLRFMNFWTVSNEDLDLCRYLGVKLIFYRHPTVDFMVQIHTQPPFLDTELTGPSIHPGMMILNKKKIFVPSLKTRPNRKHKVRVKIGPPRLYEDKWYPQSELCDTTLLTVYATACDLQFPFGSPLTDNPCVNFQVLGSAYKRHLSILSTNDSKNLAHYETALFSKTAYYNTFETIAQLKPTGQTTGVSPTWQDVQNTTNLDALGTNQASSNDTWYYGNTYKDNIKDLTKKARERYLAATQKAFPAYATLTSPLYEYHGGCYSSIFLSAGRAYFETLGAYSDIIYNPFVDKGIGNMVWIDYLSKEDAVYTPRTSKCLIKDQPLWASFNGYSEFCAKSTGDGAVNINTRVVIKCPYTTPMLADNSNENQGFVPYSLNFGKGKMKGGSSQVPLSWRCKWYAMMYHQQEFMEAIVQSGPWAYKGDEKSAVLAMKYVFNWKWGGNPISGQVVRNPCKTSGSSREPRSIQAVDPKRVAPPLVFHSWDYRRGLFGHASIKRMSEESATPTLFTGPAGKRPRRDTSVQQAEEEQQKESSSFRVQRQLQPWIQSSQETQSSQEEMQAQGTIQEQLVQQLGEQRALRKQLEFLASQVLKVQAGQHIHPLLSSQA

SEQ ID NO: 3576 - protein, 157 aa, Alphatorquevirus sp.
MGKALKKAMFLGRVYRKKRRLSLSSLHPLQKARKLLRGMWRPPTQNVSGQERNWYDSVFYSHAAFCGCGDCVGHLSYLATHLGRPPSTQPPPQLQPPALRRLPALPAPPNPSGDRAAWPTGGGDAGEDGPGEGGAAGGFADLADEELLTAAVEAAEE

SEQ ID NO: 3577 - protein, 127 aa, Alphatorquevirus sp.
LDPVQSRNAKQPRRDASAGDDTRATRPAAGRTASSQKAARVPRQSSPQSPSRATHTPPFIFPSINKVYMFEPKGPKPIQGYQAWLDEYQTAGAWDRPVRKYHTDTPYYPWMPKPPDQFRVTFKLGFQ

SEQ ID NO: 3578 - DNA, 2836 bp, Betatorquevirus sp.
cgggtaccgaaggtgagtgaaaccaccggagttaaggggcttaatgggcaaatgcagtctaacggaacgggctacaaacttaaaaataccttctctttcagatgagcaaacagctacaaaatacaatttactacggaaaagcacttgaaaatcaatggagaaacaacatatttagctcacacgacttaatgtgtggctgcaacaatcctattttacacttactaattattctaaacagagaaggaaacgcacctaaaccagaagaagatattaaaaatatactatgccttattactggagaacccgataccaaaactggagaaccagaagaagacgttttaaaagaaggagacctagacatacttttcaaagaagactttggagaagacgatggagacgaccccggaacttctgggtaagaagacgtaaaaaacttaaatatatacctttaaaacaatttcaacctgatgtaataagacgctgtacaattaaaggcactgtatgtctatttcaaggacatccttttagagcaattaacaattatattcaatatatatactctaaagtccctgaaaatgaacccggagggggaggatggacaataatgactgaaagcttaacaagcttatgggaagactgggaacatttaaaaaatgtctggacaaacagtaatgctggcctaccacttgtaagatacggaggagttaccttacttttttatcaagatccatatacagattacattgtagaaattcataactgttaccccatgacagataccaaatatcaacatgcagatttatcccccagtagaatgctacaaaaaagaaaagtaattgtagttccaagtatggaaactaaaaagagaagaaaaaactataaaaaagtaaaagtacctcctccgtctcaaatgcaaaacaaatggtattttcaaagagatatttgtagaattcctcttatacttatagctgctacagcagtaagcttaagatatccctttgccgcaagcaatgcaaagagtaataattatacatttcactgtttaaacacaaccttttttcaaagacacgactttgataacttttctgcaacaacaggttactttcctaaaccaaacacttatatgtactcaagtaacacacacaccaccaaaaaaccaacaaaaaaaacagaattagtatacttaggagacacaaaagatatgaaacaaggtacaggaatagaaagaaatcagtggggaaatcctttctttcatcactatctagatggtactttacctatatggatatctacaaagcaaccatcacaactaacagaatcactagaagacacagacctaacagacttaacacaagagctaataattaaagtgagatacaatccagaaaatgacacaggagcagcaaacacaatatacttagtcccaaattaccaaccaggagcatgggatataccacaaaataaagacttagttctagatggctttccactatataatttaatttggggctataaagactggcaagaaaaaataaaagtagcaacaaatatagacaatgcttggatattagttatacaaacagatcaatttgatcaacccctaccagcatatgtaattttagactcaagttttatagaaggatttggaccataccacactgaacctatacctaggagacacatacaacactggtcacctaaatatacttttcaacaaaaatcagcaaatgacttaggtatttctggccccggagcacctagaccaccatatgataactacatgcaagctaaaatgagatacttttttcacatgaaatggggagggtgccctagaactttagaaaaaccatatgatccttgttcacagccaaactggactatacccagtaaccagcatgaaggacttcaaatccagaacccagaaactatgccacaaacagaactacaaaagtgggactgggaaggagactatgttaaacaaaaagctattaaacgaatacaagaatacacaaaaactgatgaaactttgcaaatccctacagagtccagacacaatgttccagcactacaagaaacatccaaagagatcagctcgacagactcagaaacggagacggaagaagagcaaacatcactccaacaacagatcagaaacctcaagcgaaagcagctacagctcaagcgacacctgctcaagcgactaaaaatccaaaatttagaataataaaaagtaaatacaaagcagaattatttcctactcctaaaaagcatgtaaatagacgctttcacccatgggaattacaaacagaaaaagaaatagcacaaataatgaaaagacctatgagacacttttttcatgattttccccattacccatatcttgtacctgaacctcgtgtaaactttttgctaaactacaaataaacaaggccctaattttcacttagtggtgtctgtttctttaagttaaccttaataagcaaactccgcctccctaaattagggcgccaaaagggggctccgcccccttaaaccccaagggggctccgcccccttataccccctagggggctccgccccctaacaccccctaataaatattcatacaggaaaccacaaaattagaattgccgaccacaaccacaaaattagaattgccgaccacaaacgaatatgctaattaacttccctaaattacacctctacttccctaaaaattaattagtaaacaccatcacactgggaggagccaacacactataaaattaagtacacttccgaatggctgagtttatgccgttagacggagacgagaaacttctcggctgcatttggg

SEQ ID NO: 3579 - protein, 646 aa, Betatorquevirus sp.; identical to SEQ ID NO: 3455

SEQ ID NO: 3580 - DNA, 2836 bp, Gammatorquevirus sp.
cgggagcccgaggtgagtgaaaccagcgaggtctaggggcaattcgggctagggcagtctagcggaacgggcaagaaactaaaaactatttttattttacagatgtcaatattttacaaaccaactccatacaatggatgtactaaaaaccaaatgtggatgtcctccataagtgatactcatgatatgcactgtggctgcactcaaccatttgctcacctactagatagcatttttcctgaaggacaccaagatagaaacaaaactatacaagaaattattgacagagacaaacaatgcctttctggtggccaagaagaagaagatggaggtctgcctataggttcaagcgccgcaaacctgcctacaggcgcagaaggcgaagaagaccaagataccaaagaaaatatagaagagcttttggccgtcgccgccgccgcagaagaaaggtaagaagaaaaagaaaaactttagttgttagacaatggcaaccagactctattagaaactgtaaaattaagctttttgggactcttgtattaggagctgaaggcactcaatacctatgctatagtaatgaaaaaaactcatggacaccaccacaaagacctggtggaggtggatttggtattgaaacttacaatttagcatggctatatgatcaatacagattaaaaagatgtatatggacagcatctaatgaatacaaagacttagttaggtttataaaagttaaatttttgttttttagacaccctaaaattgactttgttattaactatgacagacagttaccttttatactacaaaaacctacatacatgaattgtcacccactagcattactattatctcaacacaaaaaaattataccaagcaagacaaccaaaccaaaaggtaaaaatacagtgagcattactataaaaccaccaaaacaaatgatatctaaatggttttttgcaaaacaatttgctttgtatgatttactacaactacaaggtgcagcatgctcactaaactacccaaaactaggttgctgtaatgaaaacctaataattagtattttttatattaatccacaattttaccaagactctgattggggtgcctatcaaaaatcaccttaccttcctataaaaacaatagctactaatcttaaatatcactggaaaataggtaacaaaacaggaatattctcaccagattatttacatagacgtgatgacactgtatactatgaaagtgtagacttagaaaaaggcatgttttcaccctacatcctaaatacacaaaaaataacagttggtgaatcagaaacacatctctatgctcttcctctaggtgcagctagatacaatccagaaatagatgatggagtaggcaatgaaatatacttagtaccaattaaccttggaaactataaaaagccatcacaagataatttaatttttagaggcttaccactatggcttatgttttatggcctttatagttttataaagaagacacaagcagaatcctttttaggtttacacatgtttatagtaaaatcagaatatattttacctaaaccaaaagatccagcaagacaattttttccaatagtagacaacacatttgtaaatggaaagaatccatacaactcatacatatcaagcactgaaagaaagctatggtttccatctgctttacaccaagtacaagtaattaataactttgttaaatgtggaccctatgtgccaaagttagacaatgatagagaaagtacatgggaactaccatacaaatctattttctattttaaatggggtggtccacagatgccagaccagcaagtcactgacccaaaagaaaaaaccagctatattgtacccgatacaatccaacaaagactacaaattaccaaccctctcaaacaagcaactgaatcccttatacaccagtgggattacagacgaggactcattaaaacaaaagcttttaaacgaatgctcgaaaacctcggctctgaatcagatgtttactctgatacaggcacaccaaagaaaaggcaaaggatcgaaaatgcactccactaccaagaagaagagaacaaggaaatcaagacatgtctcctctcactctacgaaagttcttcctcagaaaaagaggaggaagaaccaaacctcctccagctcatcaacaaccagcgacagcagcaaaagcagctcaagctccagctcttaaccttaataaaacatttaaaagagaaacagaaccaactacaactacaaacaggagtaatctagttatattaacccgctttaaaaaaggctttgaagaagacactgaaaaagaagtagctaaagcattttgcagacccccaagaacctttaaagaagatcccccattttacccatggttacctccaacacccaaagtctgctttaagctcaattttaaaggctaggcccacaatgtacacttagtaaagcatgtttaataaagtttaacccaaaaaaaaaaacaaaaatttaacttttataaacctaactaagtctttgtattcattagacccacaccccccgcggggggggcagagcccccccccgcaccccccctacgtcacaggccacgcccccgccgccatcttgggtgcggcagggcgggggctaaaatggcgggacccaatcattttatacttttactttccaattaaaaccagccacgtcacaacaaagaggtggagactgtaacactatataactaactgcactgacgaatggctgagtttaccccgctagacggtgcagggaccggatcgagcgcagcgaggaggtccacagctgcccgtggg

SEQ ID NO: 3581 - protein, 663 aa, Gammatorquevirus sp.
MPFWWPRRRRWRSAYRFKRRKPAYRRRRRRRPRYQRKYRRAFGRRRRRRRKVRRKRKTLVVRQWQPDSIRNCKIKLFGTLVLGAEGTQYLCYSNEKNSWTPPQRPGGGGFGIETYNLAWLYDQYRLKRCIWTASNEYKDLVRFIKVKFLFFRHPKIDFVINYDRQLPFILQKPTYMNCHPLALLLSQHKKIIPSKTTKPKGKNTVSITIKPPKQMISKWFFAKQFALYDLLQLQGAACSLNYPKLGCCNENLIISIFYINPQFYQDSDWGAYQKSPYLPIKTIATNLKYHWKIGNKTGIFSPDYLHRRDDTVYYESVDLEKGMFSPYILNTQKITVGESETHLYALPLGAARYNPEIDDGVGNEIYLVPINLGNYKKPSQDNLIFRGLPLWLMFYGLYSFIKKTQAESFLGLHMFIVKSEYILPKPKDPARQFFPIVDNTFVNGKNPYNSYISSTERKLWFPSALHQVQVINNFVKCGPYVPKLDNDRESTWELPYKSIFYFKWGGPQMPDQQVTDPKEKTSYIVPDTIQQRLQITNPLKQATESLIHQWDYRRGLIKTKAFKRMLENLGSESDVYSDTGTPKKRQRIENALHYQEEENKEIKTCLLSLYESSSSEKEEEEPNLLQLINNQRQQQKQLKLQLLTLIKHLKEKQNQLQLQTGVI

SEQ ID NO: 3582 - protein, 116 aa, Gammatorquevirus sp.
MSIFYKPTPYNGCTKNQMWMSSISDTHDMHCGCTQPFAHLLDSIFPEGHQDRNKTIQEIIDRDKQCLSGGQEEEDGGLPIGSSAANLPTGAEGEEDQDTKENIEELLAVAAAAEER

SEQ ID NO: 3583 - protein, 113 aa, Gammatorquevirus sp.
MSPLTLRKFFLRKRGGRTKPPPAHQQPATAAKAAQAPALNLNKTFKRETEPTTTTNRSNLVILTRFKKGFEEDTEKEVAKAFCRPPRTFKEDPPFYPWLPPTPKVCFKLNFKG

SEQ ID NO: 3584 - DNA, 2836 bp, Betatorquevirus sp.
caggtaccgaaggtgagtgaaaccaccgtagttaaggggcaatatgggctgaagcagtctggggaaccgggcaagaaactaaaataaaattattttacagatatgagcactcttctaactccagcagtatacagcaaaaatggcttagaaaaccaatggattaactgcatttggaacacccacgacttaatttgtggctgcaacaacgctataaaacacctatttcaaatattaaataaaaaaggtgaacaactatgcctcccttcaacttctaccgaagacgctggcgtccaaacagaagatggcgatggagaagacgttttacaacaaggagatttagacgccctcttcgcagacgattttggagacgacactgggtaagaagacgctactttactaaaaaaaaaaagagaaaacttaaaaaaattagacttcaacaatggcaaccagatcaaataagaaaatgccgcattaaaggacaactatgtttattaacttgcggcaaaggaaaaataaataataactttactttaacttctgaaagctatgtacctacaagagaatccgggggaggaggttggagtataatgcaattaacattaagagctttatatgatgaatatatacattttagaaactggtggacaaatagtaactgtggattacctttaactagatatatgggagtaactgttaaattttataaaagtaatgacacagactacattgtaactacacaacacacaggaccatttgaggttactagagacatatacttaaacacacaaccaagcagacacatgatgaaccacaaaagctttataattccaaaactaaaccctaataaaaaaaagaaaccatacattaaaaagagattctacccaccagccatgtggctaaacaaatggtattttcaacaagacatttacaaccacccacttatactatttatagtaagtgcatgtagtcttgatcaaatgtactgtccaaatgacggagttagcacaaatataacatttttatcactaaacacagacctattccaaaaccctttctgggaaacagacaacaacgaaccatactatccaaaagtaacaggaacattaaacacaggcttatttgaacaaggcaatggtggagaacctaataaacaatccaattggaacaaaattgctttattaggaaacacaacacaatttaaaatactaaatcataatgaaatacaacaaataaacaactatgagacatacaacaagaaattaaactggggaaacccattttctacaacacatagagacagctcagaagacattccaatttattacggaaaccctccaactaatattacatataattctacacctaacatactacccattacaggactatatcaagaatgcagatacaatccatttagagacaaaggaaaagacaataaagtttacattaaatgcacaaaaaaatttgaaggctcatttacatcacttcccacagacgaaagactaattgtaaaagacatgcctttatggctaatattttggggctggcaatcatggctacaaaaatcaacaccagtacaccacttactagaagactatcagtttgtaatacaatctaactatatatatccaccaatgcgatgctacgtaccactagatcaatactttactacaccacaaaaaacaccattaacagaaacagacaaacaacactggcacccaaaagcagaataccaacaagaagtattagctgcatttgccgctacaggcccagcagcaccaaaaattaataaacaaaatcaaatacaaatacactgtttttatgatttttattttaagtggggaggatgcccaacacccatggaaacagtctgcaaccccgcagaccaagaaaagttccccacgcccaataacctcatacaagaacctacaatccagaatccagaaacaccaaaagaatactatttgtacaaattcgacgaacgacagggatttattacagcaccagctgcaaaaagacttaaaaaagacattgaaactccaaaatattttacagaatatggaacaagagaccccatactcgaagtcttcccaccgacggaccaaacacaaaagaaaaagaccacggaagaagaaaaagacccgctacagctccagctccagcaactccagctgtaccagcaacacctcagagaccgaatcaacagattaacaaaacgttcaaaattattccctatactatagacatgtttggacaaagtaaaaataaaaaccgtaggttaactgcaaaagaaagagcagatgatttagaagatgctataatatggggcagatatcctagaacatataaaaatgaatcttactattacaaagacatgaaacctgaacctgttgtaaactttgcattaaactttaaattctaagccagcaaatattcacttgtcggtgtccatttattaaagttaaaacttatataaacatccaccacttctccctaatacgcaggcgcaaagggggctccgcccccttaaaccccaagggggggcacagcccccccttacccccagggggctccgccccctaacaccccctaattaatattcaacaggaaaaccacctaattagaattgccgaccacaaactgtcaaccgttaaacttacttctcctttttacactgcacttctgcttttacagaacacacccacctaataaattattaatcagacgcatatcctgggaggaggaacacttctatataactaagtaccatgacgaatggctgagtttaccccgccagacggagacgagacaggatactgactcggctgcttcaggg

SEQ ID NO: 3585 - protein, 662 aa, Betatorquevirus sp.
MPPFNFYRRRWRPNRRWRWRRRFTTRRFRRPLRRRFWRRHWVRRRYFTKKKKRKLKKIRLQQWQPDQIRKCRIKGQLCLLTCGKGKINNNFTLTSESYVPTRESGGGGWSIMQLTLRALYDEYIHFRNWWTNSNCGLPLTRYMGVTVKFYKSNDTDYIVTTQHTGPFEVTRDIYLNTQPSRHMMNHKSFIIPKLNPNKKKKPYIKKRFYPPAMWLNKWYFQQDIYNHPLILFIVSACSLDQMYCPNDGVSTNITFLSLNTDLFQNPFWETDNNEPYYPKVTGTLNTGLFEQGNGGEPNKQSNWNKIALLGNTTQFKILNHNEIQQINNYETYNKKLNWGNPFSTTHRDSSEDIPIYYGNPPTNITYNSTPNILPITGLYQECRYNPFRDKGKDNKVYIKCTKKFEGSFTSLPTDERLIVKDMPLWLIFWGWQSWLQKSTPVHHLLEDYQFVIQSNYIYPPMRCYVPLDQYFTTPQKTPLTETDKQHWHPKAEYQQEVLAAFAATGPAAPKINKQNQIQIHCFYDFYFKWGGCPTPMETVCNPADQEKFPTPNNLIQEPTIQNPETPKEYYLYKFDERQGFITAPAAKRLKKDIETPKYFTEYGTRDPILEVFPPTDQTQKKKTTEEEKDPLQLQLQQLQLYQQHLRDRINRLTKRSKLFPIL

SEQ ID NO: 3586 - protein, 92 aa, Betatorquevirus sp.
MSTLLTPAVYSKNGLENQWINCIWNTHDLICGCNNAIKHLFQILNKKGEQLCLPSTSTEDAGVQTEDGDGEDVLQQGDLDALFADDFGDDTG

SEQ ID NO: 3587 - protein, 58 aa, Betatorquevirus sp.
MFGQSKNKNRRLTAKERADDLEDAIIWGRYPRTYKNESYYYKDMKPEPVVNFALNFKF

SEQ ID NO: 3588 - DNA, 2835 bp, Betatorquevirus sp.
cgggtaccgaaggtgagtgaaaccaccggagttaaggggcttaatgggcaaatgcagtctaacggaacgggctacaaacttaaaaataccttctctttcagatgagcaaacagctacaaaatacaatttactacggaaaagcacttgaaaatcaatggagaaacaacatatttagctcacacgacttaatgtgtggctgcaacaatcctattttacacttactaattattctaaacagagaaggaaacgcacctaaaccagaagaagatattaaaaatatactatgccttattactggagaacccgataccaaaactggagaaccagaagaagacgttttaaaagaaggagacctagacatacttttcaaagaagactttggagaagacgatggagacgaccccggaacttctgggtaagaagacgtaaaaaacttaaatatatacctttaaaacaatttcaacctgatgtaataagacgctgtacaattaaaggcactgtatgtctatttcaaggacatccttttagagcaattaacaattatattcaatatatatactctaaagtccctgaaaatgaacccggagggggaggatggacaataatgactgaaagcttaacaagcttatgggaagactgggaacatttaaaaaatgtctggacaaacagtaatgctggcctaccacttgtaagatacggaggagttaccttacttttttatcaagatccatatacagattacattgtagaaattcataactgttaccccatgacagataccaaatatcaacatgcagatttatcccccagtagaatgctacaaaaaagaaaagtaattgtagttccaagtatggaaactaaaaagagaagaaaaaactataaaaaagtaaaagtacctcctccgtctcaaatgcaaaacaaatggtattttcaaagagatatttgtagaattcctcttatacttatagctgctacagcagtaagcttaagatatccctttgccgcaagcaatgcaaagagtaataattatacatttcactgtttaaacacaaccttttttcaaagacacgactttgataacttttctgcaacaacaggttactttcctaaaccaaacacttatatgtactcaagtaacacacacaccaccaacaaaccaaaatacaaaaaagatttagtatacttaggagacacaaaagatatgaaacaaggtacaggaacagacagaaatcagtggggaaatcctttctttcatcactatctagatggtactttacctatatggatatctacaaagcaaccaacacaactaaccgaatcaataccagaccaagacctaacagagttaacacaagagctaataattaaagtgagatacaatccagaaaatgacacaggagcagcaaacacaatatacttagtcccaaattaccaaccaggagcatgggatataccacaaaataaagacttagttctagatggctttccactatataatttaatttggggctataaagactggcaagaaaaaataaaagtagcaacaaatatagacaatgcttggatattagttatacaaacagatcaatttgatcaacccctaccagcatatgtaattttagactcaagttttatagaaggatttggaccataccacactgaacctatacctaggagacacatacaacactggtcacctaaatatacttttcaacaaaaatcagcaaatgacttaggtatttctggccccggagcacctagaccaccatatgataactacatgcaagctaaaatgagatacttttttcacatgaaatggggagggtgccctagaactttagaaaaaccatatgatccttgttcacagccaaactggactatacccagtaaccagcatgaaggacttcaaatccagaacccagaaactatgccacaaacagaactacaaaagtgggactgggaaggagactatgttaaacaaaaagctattaaacgaatacaagaatacacaaaaactgatgaaactttgcaaatccctacagagtccagacacaatgttccagcactacaagaaacatccaaagagatcagctcgacagactcagaaacggagacggaagaagagcaaacatcactccaacaacagatcagaaacctcaagcgaaagcagctacagctcaagcgacacctgctcaagcgactaaaaatccaaaatttagaataataaaaagtaaatacaaagcagaattatttcctactcctaaaaagcatgtaaatagacgctttcacccatgggaattacaaacagaaaaagaaatagcacaaataatgaaaagacctatgagacacttttttcatgattttccccattacccatatcttgtacctgaacctcgtgtaaactttttgctaaactacaaataaacaaggccctaattttcacttagtggtgtctgtttctttaagttaaccttaataagcaaactccgcctccctaaattagggcgccaaaagggggctccgcccccttaaaccccaagggggctccgcccccttataccccctagggggctccgccccctaacaccccctaataaatattcatacaggaaaccacaaaattagaattgccgaccacaccacaaaattagaattgccgaccacaaacgaatatgctaattaacttccctaaattacacctgtacttccctaaaaattaattagtaaacaccatcacactgggaggagccaacacactataaaattaagtacacttccgaatggctgagtttatgccgttagacggagacgagaaacttctcggctgcatttggg

SEQ ID NO: 3589 - protein, 646 aa, Betatorquevirus sp.
MPYYWRTRYQNWRTRRRRFKRRRPRHTFQRRLWRRRWRRPRNFWVRRRKKLKYIPLKQFQPDVIRRCTIKGTVCLFQGHPFRAINNYIQYIYSKVPENEPGGGGWTIMTESLTSLWEDWEHLKNVWTNSNAGLPLVRYGGVTLLFYQDPYTDYIVEIHNCYPMTDTKYQHADLSPSRMLQKRKVIVVPSMETKKRRKNYKKVKVPPPSQMQNKWYFQRDICRIPLILIAATAVSLRYPFAASNAKSNNYTFHCLNTTFFQRHDFDNFSATTGYFPKPNTYMYSSNTHTTNKPKYKKDLVYLGDTKDMKQGTGTDRNQWGNPFFHHYLDGTLPIWISTKQPTQLTESIPDQDLTELTQELIIKVRYNPENDTGAANTIYLVPNYQPGAWDIPQNKDLVLDGFPLYNLIWGYKDWQEKIKVATNIDNAWILVIQTDQFDQPLPAYVILDSSFIEGFGPYHTEPIPRRHIQHWSPKYTFQQKSANDLGISGPGAPRPPYDNYMQAKMRYFFHMKWGGCPRTLEKPYDPCSQPNWTIPSNQHEGLQIQNPETMPQTELQKWDWEGDYVKQKAIKRIQEYTKTDETLQIPTESRHNVPALQETSKEISSTDSETETEEEQTSLQQQIRNLKRKQLQLKRHLLKRLKIQNLE

SEQ ID NO: 3590 - DNA, 2835 bp, Alphatorquevirus sp.
ggctcttaaaaaagccatgtttctcggtaaactttacagaaagaaaagggcactgtcactgcgcggcctgccaactccaaaggcgaaactacctgcaatgagttggagtcccccgctgcacaaccccaatgggatcgagagaaacctgtacgaggcattctttcgcatgcatgctgcagcttgtggttgcggcgatcttgttggccatcttactgtactggctggtcggtatggtgctcctcctcgtcccccggcccccggggctcccagaccacaaataagacgccagctggcccttcccgcgccccccgctgatccacagcaggccaacccacaatggcctggtggggacggtggagaagatggcgctggaggccccgccgctggcggcgccgtcgcagacgccgagtaccaagaagacgagctcaacgccctgttcgacgccgtcgaacaagaagagtaaggaggaggcgatgggggaggcggaggtggagacgggggtacaggcgcagactgagactgagacgcagacgaaagcgaaagcgcagactgatactgactcagtggcaccccgctaaagtaaggaggtgcagaatatcgggggtcctgcccatgatactatgcggggcgggcaggagtagctttaactacggactgcacagcgatgactttactaaacagaaaccaaacaaccagaacccgcacggcgggggcatgagcactgtaacttttaacctaaaagtgctctttgaccagtacgaaaggttcatgaacaagtggtcgtaccccaacgaccagctagacctggccagatacaagggctgtaaattcaccttctacagacacccagaagtagactttttagctcagtatgacaacgttccccctatgaaaatggacgaactgaccgctcccaacactcaccccgcactgctgctacagagcaaacacagggtaaagatatacagctggaaaaccaggccatttggccctaaaaaagtaacagtaaaagtagggcccccaaaattgtttgaagacaagtggtacagccagtctgacttgtgcaaggtatcccttgtcagttggcggttaaccgcatgtgactttaggtttccgttctgctcaccacaaactgacaacccttgtgtaaccttccaggtgctaggagaacagtattacgaagtctttggaacttccatattggacgttcctacaaaccataccacagaaatatccatatttgaaaattggctatataaacaatgcacccactatcaaacatttgccacagacagcagattagccccccaaaaaaaagcaaactcagacacgaaccaaacatatagccccagtggcaatacagaaactgcaacatggacacaaacaaactactcctcatttaaaccaggcaacagagacagcaactatggttactgcacttacacagtaaatgataacacattcgaagccattaaaaagtacagaaatcaaagattccaatggctaacaaaatacactggagaaaatcacataaacagcacatttgccaaaggcaaatatgaacaatacgagtaccacctagggtggtactctaacatattcataggcaaccttagacacaacttagcattccgcccagcatacatagatgtcacatacaaccccacagtagacaaaggcaaaggcaacattgtgtggtttcaatacctaacaaaacccaccacacagctaataagatcacaggcaaaatgcctaatagaaaacctgccactatactgtgccttctttggttacgaagactacatacagagaacactaggtccttaccaagacatagaaacagtaggtgttatatgctttataagtccttacacagaacctccctgtattagaaaagaagagggcaaaaaggactggggcttcgtattttatgacaccaactttggaaacggaaagactccagagggcataggccaagtacacccttactggatgcagaggtggagagtcatggcccagtttcaaaaagaaactcaaaacagaatcgccagaagcggaccgtttagctacagagacgagataccctcagccacactgactgccaactacaagttctactttaactgggggggcgactctatatttccacagattattaagaacccctgcccagacaccgggctgcgacccagtggcaatagagagcctcgctcagtacaagttgttagcccgctcatcatgggaccagaattcatattccaccgctgggactggcgacgggggttctataatccaaaagctctcaaaagaatgcttgaaaaatcagataatgatgcagagtcttcaacaggcccaaaagtgcctcggtggtttccagcactccacgaccaagagcaagaaagcgacttcgattcccaggaaacaaggtcgcagtcctcgcaagaagaagccgctcaagaagccctccaagacgtccaagagacgtcggtacagcagcacctcctcaagcagttccgagagcagcgggtactcggacagcaactccgcctcctcatgctccaactcaccaagacgcaaagcaatctccacataaatccccgcgtccttggccttgcataaataaagtgtacatgttttccccacaaaaacccaagcgcatacacgggtaccacgggtgggaaacagagtatcaggcctgcaaagcctttaacaggccccctagaaacttcctgtcagacaaacccatctatccctggctcccccgccctcaacctgaattcaaagtcagttttaagcttggttttcaataaacaaggccgtgggaatttcacttgt

SEQ ID NO: 3591 - protein, 760 aa, Alphatorquevirus sp.
MAWWGRWRRWRWRPRRWRRRRRRRVPRRRAQRPVRRRRTRRVRRRRWGRRRWRRGYRRRLRLRRRRKRKRRLILTQWHPAKVRRCRISGVLPMILCGAGRSSFNYGLHSDDFTKQKPNNQNPHGGGMSTVTFNLKVLFDQYERFMNKWSYPNDQLDLARYKGCKFTFYRHPEVDFLAQYDNVPPMKMDELTAPNTHPALLLQSKHRVKIYSWKTRPFGPKKVTVKVGPPKLFEDKWYSQSDLCKVSLVSWRLTACDFRFPFCSPQTDNPCVTFQVLGEQYYEVFGTSILDVPTNHTTEISIFENWLYKQCTHYQTFATDSRLAPQKKANSDTNQTYSPSGNTETATWTQTNYSSFKPGNRDSNYGYCTYTVNDNTFEAIKKYRNQRFQWLTKYTGENHINSTFAKGKYEQYEYHLGWYSNIFIGNLRHNLAFRPAYIDVTYNPTVDKGKGNIVWFQYLTKPTTQLIRSQAKCLIENLPLYCAFFGYEDYIQRTLGPYQDIETVGVICFISPYTEPPCIRKEEGKKDWGFVFYDTNFGNGKTPEGIGQVHPYWMQRWRVMAQFQKETQNRIARSGPFSYRDEIPSATLTANYKFYFNWGGDSIFPQIIKNPCPDTGLRPSGNREPRSVQVVSPLIMGPEFIFHRWDWRRGFYNPKALKRMLEKSDNDAESSTGPKVPRWFPALHDQEQESDFDSQETRSQSSQEEAAQEALQDVQETSVQQHLLKQFREQRVLGQQLRLLMLQLTKTQSNLHINPRVLGLA

SEQ ID NO: 3592 - protein, 148 aa, Alphatorquevirus sp.; identical to SEQ ID NO: 664

SEQ ID NO: 3593 - protein, 59 aa, Alphatorquevirus sp.; identical to SEQ ID NO: 665

SEQ ID NO: 3594 - DNA, 2835 bp, Betatorquevirus sp.
cgggtaccgaaggtgagtgaaaccaccggagttaaggggcttaatgggcaaatgcagtctaacggaacgggctacaaacttaaaaataccttctctttcagatgagcaaacagctacaaaatacaatttactacggaaaagcacttgaaaatcaatggagaaacaacatatttagctcacacgacttaatgtgtggctgcaacaatcctattttacacttactaattattctaaacagagaaggaaacgcacctaaaccagaagaagatattaaaaatatactatgccttattactggagaacccgataccaaaactggagaaccagaagaagacgttttaaaagaaggagacctagacatacttttcaaagaagactttggagaagacgatggagacgaccccggaacttctgggtaagaagacgtaaaaaacttaaatatatacctttaaaacaatttcaacctgatgtaataagacgctgtacaattaaaggcactgtatgtctatttcaaggacatccttttagagcaattaacaattatattcaatatatatactctaaagtccctgaaaatgaacccggagggggaggatggacaataatgactgaaagcttaacaagcttatgggaagactgggaacatttaaaaaatgtctggacaaacagtaatgctggcctaccacttgtaagatacggaggagttaccttacttttttatcaagatccatatacagattacattgtagaaattcataactgttaccccatgacagataccaaatatcaacatgcagatttatcccccagtagaatgctacaaaaaagaaaagtaattgtagttccaagtatggaaactaaaaagagaagaaaaaactataaaaaagtaaaagtacctcctccgtctcaaatgctaaacaaatggtattttcaaagagatatttgtagaattcctcttatacttatagctgctacagcagtaagcttaagatatccctttgccgcaagcaatgcaaagagtaataattatacatttcactgtttaaacacaaccttttttcaaagacacgactttgataacttttctgcaacaacaggttactttcctaaaccaaacacttatatgtactcaagtaacacacacaccaccacaaaaccaacaaaaaaaacagaattagtatacttaggagacacaaaagatatgaaacaaggtacaggaacagaaagaaatcagtggggaaatcctttctttcatcactatctagatggtactttacctatatggatatctacaaagcaaccatcacaactaaaagatacactagaagaaacagacctaacagacttaacacaagagctaataattaaagtgagatacaatccagaaaatgacacaggagcagcaaacacaatatacttagtcccaaattaccaaccaggagcatgggatataccacaaaataaagacttagttctagatggctttccactatataatttaatttggggctataaagactggcaagaaaaaataaaagtagcaacaaatatagacaatgcttggatattagttatacaaacagatcaatttgatcaacccctaccagcatatgtaattttagactcaagttttatagaaggatttggaccataccacactgaacctatacctagaagacacatacaacactggtcacctaaatatacttttcaacaaaaatcagcaaatgacttaggtatttctggccccggagcacctagaccaccatatgataactacatgcaagctaaaatgagatacttttttcacatgaaatggggagggtgccctagaactttagaaaaaccatatgatccttgttcacagccaaactggactatacccagtaaccagcatgaaggacttcaaatccagaacccagaaactatgccacaaacagaactacaaaagtgggactgggaaggagactatgttaaacaaaaagctattaaacgaatacaagaatacacaaaaactgatgaaactttgcaaatccctacagagtccagacacaatgttccagcactacaagaaacatccaaagagatcagctcgacagactcagaaacggagacggaagaagagcaaacatcactccaacaacagatcagaaacctcaagcgaaagcagctacagctcaagcgacacctgctcaagcgactaaaaatccaaaatttagaataataaaaagtaaatacaaagcagaattatttcctactcctaaaaagcatgtaaatagacgctttcacccatgggaattacaaacagaaaaagaaatagcacaaataatgaaaagacctatgagacacttttttcatgattttccccattacccatatcttgtacctgaacctcgtgtaaactttttgctaaactacaaataaacaaggccctaattttcacttagtggtgtctgtttctttaagttaaccttaataagcaaactccgcctccctaaattagggcgccaaaagggggctccgcccccttaaaccccaagggggctccgcccccttataccccctagggggctccgccccctaacaccccctaataaatattcatacaggaaaccacaaaattagaattgccgaccacaccacaaaattagaattgccgaccacaaacgaatatgctaattaacttccctaaattacacctctacttccctaaaaattaattagtaaacaccatcacactgggaggagccaacacactataaaattaagtacacttccgaatggctgagtttatgccgttagacggagacgagaaacttctcggctgcatttggg

SEQ ID NO: 3595 - protein, 646 aa, Betatorquevirus sp.
MPYYWRTRYQNWRTRRRRFKRRRPRHTFQRRLWRRRWRRPRNFWVRRRKKLKYIPLKQFQPDVIRRCTIKGTVCLFQGHPFRAINNYIQYIYSKVPENEPGGGGWTIMTESLTSLWEDWEHLKNVWTNSNAGLPLVRYGGVTLLFYQDPYTDYIVEIHNCYPMTDTKYQHADLSPSRMLQKRKVIVVPSMETKKRRKNYKKVKVPPPSQMLNKWYFQRDICRIPLILIAATAVSLRYPFAASNAKSNNYTFHCLNTTFFQRHDFDNFSATTGYFPKPNTYMYSSNTHTTTKPTKKTELVYLGDTKDMKQGTGTERNQWGNPFFHHYLDGTLPIWISTKQPSQLKDTLEETDLTDLTQELIIKVRYNPENDTGAANTIYLVPNYQPGAWDIPQNKDLVLDGFPLYNLIWGYKDWQEKIKVATNIDNAWILVIQTDQFDQPLPAYVILDSSFIEGFGPYHTEPIPRRHIQHWSPKYTFQQKSANDLGISGPGAPRPPYDNYMQAKMRYFFHMKWGGCPRTLEKPYDPCSQPNWTIPSNQHEGLQIQNPETMPQTELQKWDWEGDYVKQKAIKRIQEYTKTDETLQIPTESRHNVPALQETSKEISSTDSETETEEEQTSLQQQIRNLKRKQLQLKRHLLKRLKIQNLE

SEQ ID NO: 3596 - DNA, 2834 bp, Betatorquevirus sp.
cgggtaccgaaggtgagtaacaccaccgaagttaaggggcaattcgggctgggagagtctggcggccggggcaagaaactaaaaatacttattttacagaatggaactttggaaacctacaccctatggacccaacagaagagaactaaactggctaaactcctgtatgagtatacacgataccttctgcggctgcgacgaaccaggtgatcacctactacttcttttagcaaaaaaatcaggatacttttcaattaccaacagagctcttaaagaagccacaaaatgccttacttctggagaagaccattctactcccgttggaaaagatggagaacaagaggatattggaatagacgccggagatttagaactactgttcgcagaccacgaagaagaagaccacgatacagggtaagacgatactttcctaaaaaacttaagactataaaacttaaagagtggcaaccaaagactataagacgatgtagcataattggacatataccattagttatctgtggacgcggacgacaagtaaacaactggatgcaatactttgactcttatgtaccagttgacaaaccaggaggagggggatggtccagcatagtatttaacttagggggactatatcagcaatttcaaaaactactaaactggtggactcatgacaatgacggactaccattagtaagatttttaggatctgactggaaattctacagatcatgggacacagactacatagtaacagcacaaacatgcccacctatgacagacacagaatttaaacacttaaattcacatccctacagacaactcatgaacaaacaccccatagtagttccaaaccttgtaagacatcaatataaaaaacaatacgtaaaaaaacacttcccaccacctagcctactacaaaacaaatggtactttcaacaagacctctgcaacacaaacttactaatgcttacaacctctacatgtagcttagaccaattttggctaccaaacaacgaatactcaaataacataacattttactgcttaaacactaacatatttgctaaccctaacttcctacaaaacggaacaagaggttataacccaaaatccacaatgatactatggggtgagggcaacggacatacacaacaaccacagaccttttctaacctaatatacttaggaaacctaaaaacatttaagagaggactacctcaaagcacaggaaacccacctggtactgacacatcttggggaaacccttttcatggagaccatggctcacaagacacaaaaatatggtatagcacagatatgccagaaaaatttaccgacaaaacacaaggaaaaattacacaggcagaacacttattccaacaatgcagatacaacccactaaaagacacaggtttaggcaatgtagtcttttttaaatccgtctctataagcacaggaaacatatgggacacacctaaagaccccacagttaccatatcaggcttccctttatggctcattttctggggatggacagactggatacaaaaactaaaacccattcaacaaatagatttaaactactacatagtaatcatttctgactttatttacccaaaaatgcatggatatgtaccactagataaacactttgtatttccacaacaagacacactagatgacaatgacaaactacactggcacccaagattcaaataccaacaagaaacacttaaccaaataggcatatcaggcccagcaacacctaaagtaaacaaatctatttccatacaagtaaatgccttgtacaaatttcgttttaagtggggaggatgcccagctccaatgcagaacatcaaagacccctgtcaacaacccaaattccccgtgcccggtaacctcctacaaacaatacaagtccatgatccagcagaagacaaacaaacaacactctcagactttgacgaacgacgacaacaaattacagcaacagctacaaaaagaattaaacaagctaaagacagtaaaacacctttattcccagatctcctcaacccacaaattatctacgaagaaacatcggagagctcatcagaggaagaagaggaaacacaacaaacattctcccagcagctcatcagaatcaagcgacagagactctacctcctccgaaagctcaaccaactaagctcccatgcataaaccaagcttttttgtttaaacctaaaataaaaaccttaacacgtattcatccctatgtaaacaaacatgcatgggaaaacgaaaaaaatttagctagcatttttcgtagacctatgagatcctttgaagaagaccccccaacatacccatgggtgccaccagcaccacttgtacaatttaaccttaatttcaaagaataaaggccaacaaatttcactctcggtgtctgtctctttaattaaaaccttaataaacaaactccgcctccctaaactgttggcaaagggggctccgcccccttaaacccccagggggggcaaagccccccctaacccaactgttggcaaagggggctccgcccccttaaacccccaggggggggcaaagcccccccctaaccccccactaaacttcctctttaaagaggaaaccacaaaatttgcattgccgaccacaaacgaatatgcaaattaaacttccctaaaacacacaaaccccacccacaaattaattaataatcaccatcataaggggaggtactacataactataaaaccaactacacttccgaatggctgagtttatgccgccagccgtaggactgaatactattcaggactctcacaggg

SEQ ID NO: 3597 - protein, 639 aa, Betatorquevirus sp.
MPYFWRRPFYSRWKRWRTRGYWNRRRRFRTTVRRPRRRRPRYRVRRYFPKKLKTIKLKEWQPKTIRRCSIIGHIPLVICGRGRQVNNWMQYFDSYVPVDKPGGGGWSSIVFNLGGLYQQFQKLLNWWTHDNDGLPLVRFLGSDWKFYRSWDTDYIVTAQTCPPMTDTEFKHLNSHPYRQLMNKHPIVVPNLVRHQYKKQYVKKHFPPPSLLQNKWYFQQDLCNTNLLMLTTSTCSLDQFWLPNNEYSNNITFYCLNTNIFANPNFLQNGTRGYNPKSTMILWGEGNGHTQQPQTFSNLIYLGNLKTFKRGLPQSTGNPPGTDTSWGNPFHGDHGSQDTKIWYSTDMPEKFTDKTQGKITQAEHLFQQCRYNPLKDTGLGNVVFFKSVSISTGNIWDTPKDPTVTISGFPLWLIFWGWTDWIQKLKPIQQIDLNYYIVIISDFIYPKMHGYVPLDKHFVFPQQDTLDDNDKLHWHPRFKYQQETLNQIGISGPATPKVNKSISIQVNALYKFRFKWGGCPAPMQNIKDPCQQPKFPVPGNLLQTIQVHDPAEDKQTTLSDFDERRQQITATATKRIKQAKDSKTPLFPDLLNPQIIYEETSESSSEEEEETQQTFSQQLIRIKRQRLYLLRKLNQLSSHA

SEQ ID NO: 3598 - protein, 105 aa, Betatorquevirus sp.
MELWKPTPYGPNRRELNWLNSCMSIHDTFCGCDEPGDHLLLLLAKKSGYFSITNRALKEATKCLTSGEDHSTPVGKDGEQEDIGIDAGDLELLFADHEEEDHDTG

SEQ ID NO: 3599 - protein, 62 aa, Betatorquevirus sp.
LFKPKIKTLTRIHPYVNKHAWENEKNLASIFRRPMRSFEEDPPTYPWVPPAPLVQFNLNFKE

SEQ ID NO: 3600 - DNA, 2834 bp, Betatorquevirus sp.
caggagccgaaggtgagtgaaaccaccgtagtctaggggcaatatgggctagatcagtctggcggaacgggcaagaaactaaaatactattatgtttttacagatatgagttctttatggaagaaacctacatttacaccgagatccaacgaaaaccactgggtaaacaccatctttgaaacccacgacctgttttgttcctgtgaggatccctggcttcaccttttggatgttttaaaccgtcaaggaaacgcaagaaaaccactaaaagatattaataacataaaatgcctccttaccggtacacctggtacagaaaaagaagatatccccgacgcaatagatggattaaacccaggagatttagaaaagcttttcgaaaaagatacagaaccagaagataccgccgaagatacaaggtaaagaaaaaaagatactataaaaagaaactgaaaattgctatacaacaatttaatcctaaatctatgcgtaaatgtaaaataatcggatataaatgtttaatacaaggtagccctttaagactaagttttaactatgctcaatatgctaattctcatgtaccaccatttcaacccggagggggaggatggagcttaatggtattttcactagacagtttatttgatgattatgaaaaactacagaacgtatggacatattcaaactgtaacttaccgttagtacgataccatggtgtaacatttaagttttatcaagctgaagaaatggattatgttgtattctttgatagatgctggcctatggtagatactaaacatacacatgctaactgtagtccaactgcacagtttctaaaacaaaagaaaattactattcctagcagaaaaactcaaaaaaataaaaaaccatataaaaaagtacgcatacgtcctccaaatcaaatgcaaacaaaatggtactttcaatctgacatttgtaaaacacctttagtattactatctactactgctgtatcactcacaaacccattttgtgcaccagaagcaactagcaacaacataaccattccaatgttaaacacaatgcttattcaaagaccaaactttaaaaactatccacaaactagtggatattttataaaaactggacaatttcaacatgaagactccacatttgcagcatatttatatgctattcatagagaacaacacacacaaaaagaagctatagaactaaaacacaccaacttaacagactataacccaataccactttgcaacaccaaagacatgcaagaaggaaaaccagttacaagctcagactatcaaaataacgaaaaatattggggcaatccttttttccacatataccttgatgatgaaagttacagtttatacttttccgatatgtccccaatagacttatatgaattaaaaaccaacaataataaaacatatcacttaacccttacagatccaataattaaatactacagatataacccagacacagacaaaggagcaacaaacaaagtatatacagtaaacaattcagcagcaacatcatgggcagaaccacaaaatgaaaaccttatttttgaaggttttccactatatgttttactatggggatggccagactggcttaaaaaatcaaaattaactacagatccagacgaaaaccaaacactagttataaaaacagaccaactatttggtccaaagcaaacatactatgttcctattgacaaagattttatagaaggatttgcaccttattctccagacccacctaatcaactacttccaaacaactggtctaaaacacactggcatccaaaattagaattccaacttcaacaaatagaaaaaatatgcgcctccggtccaggatgcgctagaatgccctacaaacattatatgcaatcattttgtaaatacaaatttcacttcacatggggaggatgtccaaaaacacttgaaaatgcatgtaatccttgttttcagccaaaatgggccacaaccgatacaatccctggaggacttgaaatttcgaatccaaactgcaatccctacacccaactatacgacttcgactggaaaggagacttcgttaaaacaaaaagtattgacagaattaaacaacacacgtcagttaatccagaacttttctcaattacagaagggaaaaacattccagaaaccctcaaaaaaccgaaaacaccgacaacgaaagaagaggaagaggaattactcctccagctccagcagctccgacagtgccagctcaacctctacagcatcctcaaccaataagtaaatatgttataaaaggctgcacaattaaaaagttattgtttgaaaaagaaccaaaaaaccgaagactaactccacgagaattagaagacgaaaaaattgtagcagcaatttttaaaagacctttaagaacatttattcgcgatccccctacttatccttggcttccccctgaaccaatagtaaactttaaattaaactatgttgaataaagcaaggccaacaatattcacttgtcggtgtccatttatataagtttaactttaataaacagactccgcctcccaatcaataaggcctagaaaagtaaagggggctccgcccccttacacccccaatggggctccgcccccttacaccccccagggggctccgccccctaacacccccaagggggctacgcccccttacacccccttataaatattcaacaggaaaaccacctttatctatataactaactacacttccgaatggctgagtttatgccgccagacggagactgaatcactacagtgacttcaggctgatcttggg

SEQ ID NO: 3601 - protein, 669 aa, Betatorquevirus sp.
MPPYRYTWYRKRRYPRRNRWIKPRRFRKAFRKRYRTRRYRRRYKVKKKRYYKKKLKIAIQQFNPKSMRKCKIIGYKCLIQGSPLRLSFNYAQYANSHVPPFQPGGGGWSLMVFSLDSLFDDYEKLQNVWTYSNCNLPLVRYHGVTFKFYQAEEMDYVVFFDRCWPMVDTKHTHANCSPTAQFLKQKKITIPSRKTQKNKKPYKKVRIRPPNQMQTKWYFQSDICKTPLVLLSTTAVSLTNPFCAPEATSNNITIPMLNTMLIQRPNFKNYPQTSGYFIKTGQFQHEDSTFAAYLYAIHREQHTQKEAIELKHTNLTDYNPIPLCNTKDMQEGKPVTSSDYQNNEKYWGNPFFHIYLDDESYSLYFSDMSPIDLYELKTNNNKTYHLTLTDPIIKYYRYNPDTDKGATNKVYTVNNSAATSWAEPQNENLIFEGFPLYVLLWGWPDWLKKSKLTTDPDENQTLVIKTDQLFGPKQTYYVPIDKDFIEGFAPYSPDPPNQLLPNNWSKTHWHPKLEFQLQQIEKICASGPGCARMPYKHYMQSFCKYKFHFTWGGCPKTLENACNPCFQPKWATTDTIPGGLEISNPNCNPYTQLYDFDWKGDFVKTKSIDRIKQHTSVNPELFSITEGKNIPETLKKPKTPTTKEEEEELLLQLQQLRQCQLNLYSILNQ

SEQ ID NO: 3602 - protein, 105 aa, Betatorquevirus sp.
MSSLWKKPTFTPRSNENHWVNTIFETHDLFCSCEDPWLHLLDVLNRQGNARKPLKDINNIKCLLTGTPGTEKEDIPDAIDGLNPGDLEKLFEKDTEPEDTAEDTR

SEQ ID NO: 3603 - protein, 57 aa, Betatorquevirus sp.; identical to SEQ ID NO: 1257

SEQ ID NO: 3604 - DNA, 2833 bp, Gammatorquevirus sp.
cgggagcccgaggtgagtgaaaccaccgaggtctaggggcaattcgggctagggcagtctagcggaacgggcaagaaacttaaaatatttttatttttagatgtacaaattctacaagcaaaccacttacaatggagacaccctaaaccaaatgtggatgtctcttattgctgactctcatgacattcactgcaaatgtgaagctccctttgctcacctactgcaaagcatttttccaccaggacacaaagacagacaactaacaattgaacaaataactaccagagattttctacaatgccattctggtggaacagaagacgaaagccatggtatacaacttggagaaagcgccgctacttcagcagaaagaaaagaaaacccagatacaaaagaagatatagaagaccttatactcgccgccgccgccgccgcaggagaaagagaaaggtaagaagaaaacttcaaaaaattactgttaaacaatggcagcctgacagcatagtaaaatgtaaaataaaaggctttgggtgtttagtagcaggagcacaaggaagacaaccttactgctacactaacagtaaatatgactacccacaaccaaaagcaccaggcggcggtgggtttggagctgaactatattccttacaatacttatatgaagaatgggtagccagaaaaaacatttggactaaaagtaatgactacaaagatttagttagatttactggtgcaactttttatttttttaaacatgcaaccacagattttattgtaagctacataagacaaccaccatttttactagaaaaggacttttttaatgacatacacccaatgcaactactattaagcagacaccacaaagtagttcctagccttcaaagaaagcctttaggcaaatcatatgtaaaaattaaagttagacctcctaaacaaatgctaactaaatggtttttccaacaagactttgcaacccaaggtttacttatattgcgaggagcagcagccaacttatcatgggcttactggggaccagatacacaaagcagatgcttaactttatactctttaaacaccacttttttctataactcagattattcagctagccatggcccacaaaccatgtacataccatacaatcactacccagtcactaacggacttacatactggacagaagataacaaaggaaatccaacaccacaccaaataaaacctcaaagctatgctgattcagtttcctatgaaaaaggttttttctcacaaccagtattacaagcaaaaaaaattactacatatgacgaggcagacagaaagcgctataaagaatatccacaagctatggcaagcttaccaatagctgtatacagatataacccagaagaagatacaggggtaggtaatgtagtttggctagcaactacaattaccaacaaccactggcaaagacctgaattatcagacaaagttatagttggaaaacccctttggttagcattttatggatttgaaagctacatagccaaaacaacaaaagacaaaggctggcttctaagtagcatgtttgtattcaaatgtccatacttaaaatctgtatctggagtaactacacaaaacacatttgtgttagttgatttagactttatacaaggtaaaatgccttattcagaaactcttactatacacaaaaaagcattatggtaccccaatgtagaaaaccaagtaaactcaatatcatcactagtacaagtaggcccttacatacctaaatatgcctatcaagatgagagcagctgggaactaacatacaaatatattttttattttaagtggggaggcccatatgtcacagatgaaccagttcaaaatcccaaaaaacaaggaaaatatcccgttcccgatactatcacacaagcaatacaagttagcaacccgctcaaacaaacctgtaaaacaatgcttagagactgggactacagaaggggtattattacaacaacagctcttaaaagaatgtcagcaaacctccaatctgattcatctgtccaatctgatgactcagaaactccaaagaaaaagaaaaagatcacagcagagatcccccactatcaagaaaagacacaagaaatgcagagctgtctcctctcgctcttcgaagaagatacctgccaagaaacagaagacctccagcaactcatccaccagcagcagcagcagcagcaaaagctcaagcacagcatcctcaagctcctaatggacttaaaacaccaacaaagaatactacaacaccacacaggaatagactaacttgttttaaacctggatttgaacaagaaacagaagaacagttagcacaagcatttaaaagacccattagaaaatttaaagaagacccacccttttacccttggctacccactgctgtacccattgtaaactttcaccttagatttaaagactaggccgacactgttcacttagcggtgtttgtttatataagtttgcaccccaaaaaaattgtaaaataaaaaaaaaaaaaaaaacccccacaccccccgcgggggggggcaaagccccccccgcaccccccctacgtcacaggccacgccctcgccgccatcttgggtgcggcagggcgggggctaaaatggcgggatccaatcattttatagttttactttccaattaaaacccgccacatcacacaaaagaggtggagactctcaaactatataactaagttgtatgacgaatggctgagtttaccccgctagacggtgcagggaccggatcgagcgcagcgaggaggtccccggctgcccgtggg

SEQ ID NO: 3605 - protein, 671 aa, Gammatorquevirus sp.
MPFWWNRRRKPWYTTWRKRRYFSRKKRKPRYKRRYRRPYTRRRRRRRRKRKVRRKLQKITVKQWQPDSIVKCKIKGFGCLVAGAQGRQPYCYTNSKYDYPQPKAPGGGGFGAELYSLQYLYEEWVARKNIWTKSNDYKDLVRFTGATFYFFKHATTDFIVSYIRQPPFLLEKDFFNDIHPMQLLLSRHHKVVPSLQRKPLGKSYVKIKVRPPKQMLTKWFFQQDFATQGLLILRGAAANLSWAYWGPDTQSRCLTLYSLNTTFFYNSDYSASHGPQTMYIPYNHYPVTNGLTYWTEDNKGNPTPHQIKPQSYADSVSYEKGFFSQPVLQAKKITTYDEADRKRYKEYPQAMASLPIAVYRYNPEEDTGVGNVVWLATTITNNHWQRPELSDKVIVGKPLWLAFYGFESYIAKTTKDKGWLLSSMFVFKCPYLKSVSGVTTQNTFVLVDLDFIQGKMPYSETLTIHKKALWYPNVENQVNSISSLVQVGPYIPKYAYQDESSWELTYKYIFYFKWGGPYVTDEPVQNPKKQGKYPVPDTITQAIQVSNPLKQTCKTMLRDWDYRRGIITTTALKRMSANLQSDSSVQSDDSETPKKKKKITAEIPHYQEKTQEMQSCLLSLFEEDTCQETEDLQQLIHQQQQQQQKLKHSILKLLMDLKHQQRILQHHTGID

SEQ ID NO: 3606 - protein, 117 aa, Gammatorquevirus sp.
MYKFYKQTTYNGDTLNQMWMSLIADSHDIHCKCEAPFAHLLQSIFPPGHKDRQLTIEQITTRDFLQCHSGGTEDESHGIQLGESAATSAERKENPDTKEDIEDLILAAAAAAGERER

SEQ ID NO: 3607 - protein, 108 aa, Gammatorquevirus sp.
LSPLALRRRYLPRNRRPPATHPPAAAAAAKAQAQHPQAPNGLKTPTKNTTTPHRNRLTCFKPGFEQETEEQLAQAFKRPIRKFKEDPPFYPWLPTAVPIVNFHLRFKD

SEQ ID NO: 3608 - DNA, 2833 bp, Betatorquevirus sp.
cgggagctgaaggtgagtgaaaccaccgaaatctaggggcaattcgggctagatcagtctggcggaacgggcaagaaacttaaataatattatttttcagatgagcaaatttctacaagaacctatttactccaaaagaggactacaaaatcaatggattaacctaatttacacttcgcatgatatgatctgtggatgcaacaatccaattgatcacctacaagacatcttaaaacaacaaaaatgcctcccttcaaccgccgccgctacggctacagaagatggtggaactacagaaaacctagagcctactatcgacgaaggagatttggaaaagctgttttcagaagaaaacgacgtagacgaagggtaagaagaaaaaacttttttaaacataaaaaaactaaaactgttaaaataagacaatggcaacctactagcattaaaaaatgtaaaatacaaggctacctatgcatgtttcaagcaggcccaggtagatatggaaataactatgctctatggaaagaatcattctttccacaacattatcccggaggcggaggatggagtatacaacaattaagtttgggaactttatttagagaacacacagaatatatgaactattggactaaaagtaatgatagaatgaacctatgtagatatatgggatgcagtatacaactgtttagagaaccatatactgactggatatttacatactttgataatattcctaaaactgtaaacaaatggttttatgcttcacaccaccctataaaacttttaacaacaaaaagaaaaagaacaatccctagctttcaaacccaaccacataaaagaaagccatataaaaccatgtttataccacctccaaaactaatgaaaaaccaatggttttttcaatctaacctagcagactatccccttataacatttgccgcctcagcatgcagtttaacaggaatgtttggcagcacaaaatcaattagtaacaacgcaacattttactgcctagacactaaacaatttacaacaccaacatttcaatggagatccacaacaccagaaacacaatggggatacacatacggcacaaactacctatacggcctacaacatgcatatgaaacatggacacaaaataaagacatagatggaacatatttaggaaacacaatgaaacaacaaagtggaataccaatgacacaacaaacaacacccacatatacagtagacaaatggggaaaccccttttactggcaatatgcatcaggagactatccactttttacctcaacaaacacaccaaaagaaataatagaaagtaaaggaaaacccctaacagaaggccaaaagaaggactcacactatatatttaaagctagatacaatccatttcatgacaaaggaaaaggcaatgtagtatactttttaccaacttatgacaaatccaaaacagactgggaaccactatcagaccctgacttaaaatttgaaaactttccactatggttaacatgctggggaattgaagacattttaaaaagaatgggaaaatgtcataatttagatatggactgggtaatggtaataaaatccagctatattttaccacctgaaaaagcatatgttatattaagctatgactttgtacacggaaggggaccatatgatacagaaaaagaatttatgactactgatgacttaacacactggtacccaagatttaaatatcaaagacaagctatagacaacttaataagaactggtccagctgtagctactggagacaatgtacaaaatatacaagctaaaattaaatacaactttttctttaagtggggaggcaactcatcaccacaagaaactattcgagatcccaacagccaacccatcacccctagtcccgataacatctacagcaacaatgaaatcattgatccgtcaacagacattacatcagaaatatacccatgggactttagacgacatctccttacagaaacagctacagaaagaattaaacaaagctcaactaatgaacaaattatgtttacagatggaagacaaactgcaacggacctccccctgcaaacaaaaacacaagagaaagagacccaggaaacacaagaaaagacattactccagcagctcaaccagctccaacaatacaacctgcaactccagcaccgactccgaaagctaaaacaattatctatggacctataaaccgtgtagaattgtttaaaactaaacgtaaaaataggagactaactccttatgaagcagaaacagatctgcaattagcaaaatggttacatagacctgtaagacaatattttgatgatccccctttttacccatggttaccgccagcaccaaaagtttgctttgaccttgtaaaaggatttaataaaggccagcattaattcacttttggagtctgtttatttaagtttaaacttatacaaacatccaccgcctccctaatacgcaggcgcacaagggggctccgcccccttaataaacccccgggggggggaaacccccccccctaaccccccccaaaaaaaaccacaaaattagcattgccgaccacaaacggtacaggaaaccacaaaatttgcattgccgaccacaaaccgtcatttacttctcctttttacaaaacttccttttttactaattattattcattaaattaattaataaacaccgtaattccggggaggagcaaacactgtatataactaactacacttccgaatggctgagtttatgccgccagacggagacaggatcactttagtgactccgggctgatcttggg

SEQ ID NO: 3609 - protein, 662 aa, Betatorquevirus sp.
MPPFNRRRYGYRRWWNYRKPRAYYRRRRFGKAVFRRKRRRRRVRRKNFFKHKKTKTVKIRQWQPTSIKKCKIQGYLCMFQAGPGRYGNNYALWKESFFPQHYPGGGGWSIQQLSLGTLFREHTEYMNYWTKSNDRMNLCRYMGCSIQLFREPYTDWIFTYFDNIPKTVNKWFYASHHPIKLLTTKRKRTIPSFQTQPHKRKPYKTMFIPPPKLMKNQWFFQSNLADYPLITFAASACSLTGMFGSTKSISNNATFYCLDTKQFTTPTFQWRSTTPETQWGYTYGTNYLYGLQHAYETWTQNKDIDGTYLGNTMKQQSGIPMTQQTTPTYTVDKWGNPFYWQYASGDYPLFTSTNTPKEIIESKGKPLTEGQKKDSHYIFKARYNPFHDKGKGNVVYFLPTYDKSKTDWEPLSDPDLKFENFPLWLTCWGIEDILKRMGKCHNLDMDWVMVIKSSYILPPEKAYVILSYDFVHGRGPYDTEKEFMTTDDLTHWYPRFKYQRQAIDNLIRTGPAVATGDNVQNIQAKIKYNFFFKWGGNSSPQETIRDPNSQPITPSPDNIYSNNEIIDPSTDITSEIYPWDFRRHLLTETATERIKQSSTNEQIMFTDGRQTATDLPLQTKTQEKETQETQEKTLLQQLNQLQQYNLQLQHRLRKLKQLSMDL

SEQ ID NO: 3610 - protein, 104 aa, Betatorquevirus sp.; identical to SEQ ID NO: 3135

SEQ ID NO: 3611 - protein, 62 aa, Betatorquevirus sp.; identical to SEQ ID NO: 3136

SEQ ID NO: 3612 - DNA, 2831 bp, Betatorquevirus sp.
gaatggctgagtttatgccgccagacggaggcttaggggcaattcgggctagatcagtctggcggaacgggcaagaaacttaaaataaatttattttacagatatgttctcttcatggaagaatcctacatcctcacagagacagaaagaactccaatggattggcatcattaactctacacacgaccaaatttgccactgcgacgacccaacattacacctactttactgcctcaacaaattctctggatttaacaaaccagaattggatataaataatataaaatgcctccttaccggccctactaccaaaactacagaagaaaatacttccgaaaaagaagaaacaggttttatagaaggggagttagagcgacttttcgacgaagacaatggagaagaaaaagaaaatacaagcccaaatacaaggtaaagaaatttaaattttataaaaaaaagaagaaatcaattatactaagacagtttcaaccaactgctattaacaaatgtaaatgcatagggtttaaatgcttactacaaggatctatattaagagctatgaataactttgtacaatatatttactcatttgtacctgaaaagcaaccagggggtggcggatggagtattcaaatactaagtttagactctgtatacgaagactaccaacacttacaatgcatttggactaaaggaaatgcaggcctaccattagtaagatatctaggaacaaaatttacactataccaatcacaagaaacagactacgtattcaaatacgacaactgctggcccatggtagacaccatacacacacacgcagactctgctccatttagaatgctacaaacaaaaaataaagtagtagtacccagcataaacaccaaaaaaaggagaaaaccatataaaaaagtatttgtacgcccaccagcacaaatgacaaacaaatggtactttcaaaaagaaatatgcaaaacaccactcgtaatgtttacaacaactgccgtctcactaacatttccatttgctgatccaaaagctaaaagcaataatgtaacagtactctgtataaacccatacatttttaaaaaccctgactttcaacactacggaactacagggtattcacctaaatccactaatgacggaacgccattatacttatacggcagcaatcaaccaaatgttacttatgaaaaattaaaatcaagcaaccacaaaccgctgataacagcattagtagacacaaaaaaccacacaccaggaacaccactaaataactcacagaaccaaagtatagataaaattgccggaaacccattccatgagcaatggaccagcggagatcaatacatatacttttcactaatgacacccacagaaatggaagctcttataacaaaaaatcaagagccaactgatactaaaaaaaaatccatcacaaacacgggtgaaattatttacacattcagatataacccagacaaagatgatggatccaccaacaaacaatacattgttagcacatcttcaggacgaataatacaaccaccagacaatgaaaaccacatactatcaggctttccatttccatacatgctatggggatggacagactggataaaaaaactaggagaaacaccatcattcgacacaaacaaactagtagtacttgaatcaaaagcctttaacgataccactattccattatttattccaatagacccacaatttgcacacggctttgacccatactcagacatgaatgaaccaaaccacactatctcaccttacaatgccaaaaactggtttcctagatatgaatatcagaaatatacaataaatgaaatatgtttatctggacctgcgtgtcctagaccaccttggaatcactatttacaagccttatgtaaatatactatgtattttaaatggggaggatgtcctaaaaacctacaaaaagcttataatccttgttcacagtcaatatggcccacgcccgataacaagtatggacgatctgaggtgcagaatcctaacatcttcccacaaacagaactatactcatgggactggcaaaaagactatgttacagaagaagctattaaaagaatcaaaagatatacagacattgatccaacaatattctcagttacaggaccaaagtcaaacccgccaccactcaaaaagatcaagaaacaagacgaagaagaagaggaggagaagaaactccagttccagctccacaagctgcgattccagaaagtcatcctccaactccagctccagcagcaattaaaatctataaatcaaaaataaaagtaaacttatttgaacccacaaaaccaaaaaataggagaatgacaccaagagaaaaagaagaagaaaaactagacgcagcaatatggaaaagaccacaaagagactttatactcgatatacctttctaccctggtataccccctaccccactagtaaactttgacttaaaatacaaatatgaataaacaaggccaacattaattcacttagtggtgtccatttatttaagttcaacttatataaacatccaccgcctccctgaaattcgggcgccaaaatttaaaagggggctccgcccccttcaacccccaagggggctccgcccccttacacccccttataaatattcaacaggaaaaccacctaatttaaattgccgaccacaaaccgtcgtttacttccccttttaacactacttcctcaaattctcattattattcattacattcattagtaaacaccgtaattccggggaggagactattcactatataactaactacacttcc

SEQ ID NO: 3613 - protein, 677 aa, Betatorquevirus sp.
MPPYRPYYQNYRRKYFRKRRNRFYRRGVRATFRRRQWRRKRKYKPKYKVKKFKFYKKKKKSIILRQFQPTAINKCKCIGFKCLLQGSILRAMNNFVQYIYSFVPEKQPGGGGWSIQILSLDSVYEDYQHLQCIWTKGNAGLPLVRYLGTKFTLYQSQETDYVFKYDNCWPMVDTIHTHADSAPFRMLQTKNKVVVPSINTKKRRKPYKKVFVRPPAQMTNKWYFQKEICKTPLVMFTTTAVSLTFPFADPKAKSNNVTVLCINPYIFKNPDFQHYGTTGYSPKSTNDGTPLYLYGSNQPNVTYEKLKSSNHKPLITALVDTKNHTPGTPLNNSQNQSIDKIAGNPFHEQWTSGDQYIYFSLMTPTEMEALITKNQEPTDTKKKSITNTGEIIYTFRYNPDKDDGSTNKQYIVSTSSGRIIQPPDNENHILSGFPFPYMLWGWTDWIKKLGETPSFDTNKLVVLESKAFNDTTIPLFIPIDPQFAHGFDPYSDMNEPNHTISPYNAKNWFPRYEYQKYTINEICLSGPACPRPPWNHYLQALCKYTMYFKWGGCPKNLQKAYNPCSQSIWPTPDNKYGRSEVQNPNIFPQTELYSWDWQKDYVTEEAIKRIKRYTDIDPTIFSVTGPKSNPPPLKKIKKQDEEEEEEKKLQFQLHKLRFQKVILQLQLQQQLKSINQK

SEQ ID NO: 3614 - protein, 109 aa, Betatorquevirus sp.; identical to SEQ ID NO: 27

SEQ ID NO: 3615 - DNA, 2831 bp, Betatorquevirus sp.
cgggagccgaaggtgagtgaaaccaccgaagtctaggggcaattcgggctagatcagtctggcggaaagggcaagaaacttaaaatattttattttgcagatatgtcatctgtatggaagaaacctaccagcacaccgagatatcaagaacaacaatggatgagcgctattcaccacttccatgatattttctgccactgtgaagaccctcaactacatttttgcattttaatcaacaaacaatcaccgtgcccaaaaccagaatctgatataaggaatataaaatgcctccttactggacgtaccgacgcagacgatggagaacaagaaaaagaagacgaccctattttcgaacctggagaactcgacagacttttcgacgaaacagatacaaaagaaaatggagaagacaacgaaaggtaaaaagacgccgctttaaaaaaaaactatctaaaattactattaaagaatttcaacctaaatctataaagaaatgtaagattaaaggaactaaatgtctatttcaaggaagtcctttaagatccaataataactttatacaatatatatactcatttactcctgaacatcaaccaggaggaggaggatggactttaataatacatagtttagaaactctatacgaagactggttacatttagaaaatatatggacagaaactaatgcaggattacctttaattcgctacctaggatgctcttttaaattttatcaatcacaagacacagactatgtagtagtatatgataactgctggccaatggtagacacagaactatcacacgcagacgcagcacctcaaagaatgctacaaaaacaacataaaattataatacctagcttaaacacaagaaaaaaaagaaaaccatacaaaaaagtatgggtaaaacccccttcacaaatgcataaccgttggtacttttccaaagacatttgcaaaactcctttagtaatgctaaccgcaactgctgttgacttaagaaacccttttgcaaggcctgaagcaatcagcaacaatatctcactactttgcttaaacgttagactatttcaaaatactaacttccaacacccaccagaaacatcatactactcccccaaaatgctaaacaatacagacaaaatgtacctttatggaacatatgaaacacataatacagcaactataggaaacttatttcctctaggaaactcaaaacaattacaattaggaaaaacatacaatgaactaacaaactccgcagacattaaactatcaaaccttggaaacccatttcacagtgacacaaatgacaaagaagcatttactgtttactattctaaaaaaccatttacagactcttattggttcaataagaaacaacaaaaattacaaaacgatccaaatatacaaatattagactcaccttattacattacagttagatacaacccagataaagacacaggagcaaaaaacaaaatttatttagttcgtaactacgaagatactaactggaaagaaccagacaacaaaaacctaattttagaaggccttccactatactacatgctatggggatggctagattggcaaaaaaaactaaaagaagcagtaagagtatttaatgactacacactagtaataataacagaccaatttgatgtacaactaccatactacgtattaatagatgatgatttccgtgacggtttcgaaccttacggagaattaacaacaccacatgtacaaccaacacaatatactatagaaaactggtttcccaaaactacttttcaagaacaatcaatacaacacatatgtgacacaggcccatttacaccaaaaccaccatggaaacactatctacaagctagatacagctaccaatttcattttaaactaggaggatgtccaaaacttctaaaaaagccatctgatccttgtttacagtcaaaatggaccactcccgataacatcgcacgaccaactcaaatcacgaatccttcattaccaccagaaacagaactctattcatgggactgggaagaagactacgttaaaagaaaagctattaaaagaattaaacaatacacaccagttgataaaaacatactctcaattacagagtccacaagagagccaccaccactcaagaaaagaaaaacaacgacgacatcggaaacggaggaagaggaggagaacaacctcttccagcagctcctcaagctcagacaacagcgacgacaactccaacagctcctccaactagaaggtataccataaaaaactgcaaaataaaagtgaagcttttccccacaaaatcacctgtaaaaaatagaccttttaaaccacatgaatatgaaacagaaaaacaactatgcagtatatttaaaagacctcctagacacttcttttatgacaccccttactatccatacttgcctcctgaacccaaagtacccaaaataaactttgatcttggttacaaattgtaaacaataaaactttcaaggccaacgaatttcacttgtcggtgtccatttattaaacttaaacttatataaacatccaccactctcccaacattgttggcgccaaaagggggctccgcccccttacacccccaagggggctccgccccctactacttccccctttccactttacttccccttctcctcattattattcattacattaattaataatcaccgtaattccggggaggatctaataaactatataaccaacaacacttccgaatggctgagtttatgccgccagacggagacaggatcacttcagtgactccgggctgatcttggg

SEQ ID NO: 3616 - protein, 667 aa, Betatorquevirus sp.
MPPYWTYRRRRWRTRKRRRPYFRTWRTRQTFRRNRYKRKWRRQRKVKRRRFKKKLSKITIKEFQPKSIKKCKIKGTKCLFQGSPLRSNNNFIQYIYSFTPEHQPGGGGWTLIIHSLETLYEDWLHLENIWTETNAGLPLIRYLGCSFKFYQSQDTDYVVVYDNCWPMVDTELSHADAAPQRMLQKQHKIIIPSLNTRKKRKPYKKVWVKPPSQMHNRWYFSKDICKTPLVMLTATAVDLRNPFARPEAISNNISLLCLNVRLFQNTNFQHPPETSYYSPKMLNNTDKMYLYGTYETHNTATIGNLFPLGNSKQLQLGKTYNELTNSADIKLSNLGNPFHSDTNDKEAFTVYYSKKPFTDSYWFNKKQQKLQNDPNIQILDSPYYITVRYNPDKDTGAKNKIYLVRNYEDTNWKEPDNKNLILEGLPLYYMLWGWLDWQKKLKEAVRVFNDYTLVIITDQFDVQLPYYVLIDDDFRDGFEPYGELTTPHVQPTQYTIENWFPKTTFQEQSIQHICDTGPFTPKPPWKHYLQARYSYQFHFKLGGCPKLLKKPSDPCLQSKWTTPDNIARPTQITNPSLPPETELYSWDWEEDYVKRKAIKRIKQYTPVDKNILSITESTREPPPLKKRKTTTTSETEEEEENNLFQQLLKLRQQRRQLQQLLQLEGIP

SEQ ID NO: 3617 - protein, 106 aa, Betatorquevirus sp.
MSSVWKKPTSTPRYQEQQWMSAIHHFHDIFCHCEDPQLHFCILINKQSPCPKPESDIRNIKCLLTGRTDADDGEQEKEDDPIFEPGELDRLFDETDTKENGEDNER

SEQ ID NO: 3618 - DNA, 2831 bp, Gammatorquevirus sp.
cgggagcccgaggtgagtgaaaccaccgaggtctaggggcaattcgggctagggcagtctagcggaacgggcaagaaacttaaaacaaattctttttttttagatgtcaaagattcaagctaaagacttttatactcccacacccttcaatcaagagacaaaaaatcaaatatggatgtctcaaattgctgatgctcacgataatatctgccattgtaaccatccctttgctcatctgcttgccaatatctttcctgtgggtcacaaagatcgcgatctcacaattaatcaaattcttttgagagactacaaagaaaaatgccattctggtggaacagaagaagaaagccatggtacggacgctggaggcacaggcggaggtttcaaaggtataaaagaagaaagccacgaagaagatttgccagaagacgaactagaaggcttactcgccgccgcagaagaaagcgcaaggtaagaagaaaaagaaaaaaaattaatatacaacaatggcaaccagaaagcattgttaaatgtaaaattaagggcttctctactttagtactgggggcagaaggcagacagtatatttgttggactaatgaagcccttgactacactcagccaaaagcaccagggggaggaggatttggctgtgaaaatataactttagaatggttatatcatgaacatagagcacacaactgtatatggaccaaaagcaatcaatacaaagatctatgcagatatacaggttgtaaaataactttatttagacacccaaatatagactttatttttcaatacaacctacaaggtccatttaacataacaaaattcacatatacagacatacaaccacagaacatgctactacaaccccataacagactaattcttagccaaaaaacaaaaccccatggcaaacttgctgttaaagttaaaataaaaccaccaaaacaaatgactaccagatggttttttgctaaagaattttcagaagctgtactagtacaactaaaagctgtagcctgttcatttacatttcctagaatagcacctaaggcacaaagtcaaatggtaacagtttactacttaaatgaaagcttttatccatctccaatttggggacaagtacacccaggtggctacatacctattagtacaagaacaggtatatataaattctcaaatacaaaaaccaaacctgcatactcagactttacaattaacacaaacacctttgaaagaggagaagcaggatattatgcctccattaactattccacaggcttttttaatgccaaagtactaaatgcatccaaagttacaataaataatgtagaatttggctcactacctttactaactgcaagatacaatcccaacgatgacacaggagatggaaatgtagtttatgcactttctattctacaaaattcatataacccaccaacagtacaatcagactatgttattagaggtcaaccactatggatggcatttcatggcttttggagctggattaaatatttatcaaaagacaaagcattttacacacactatatgtttgttgttcagagccgtgccataaaacccatctcacaaaacacagcacaaaaaagatttgcatttcttgacttatcttttatatctggcaaactaccttttgatgaatatttatctgacaatgaaaagaagctgtggtatccaaaagcacaataccagactgaaactataaattcttttgttcaatctggaccatttatacctaaactttcaaacataccagaaagcacttgggaattagactacaaatataacttttactttaaatggggtggtccacagattacagacagaccagttgacgaccctcaataccaaccagactaccctgttcccggtaaccgcacagaagcagtacagatatccaatcccaaaacccttgcgacagaaactctgctccatgaatgggacttcagaaggggcattgttacacacacagctcttaaaagaatgtcagaaaactttgaatctgaaacagatatctactctgatgactcaggaacaccaaaaaagaaaagaaagatcaccaaagaactcccataccaaagaccacagcaagaagccctcaaaacatgtctccaggagctctgcgaagaaaatacctgccaagaaacaccacaaacattacaagagctcatccagcagcagcagcagcagcagcagctcaaacacaacatcctccagctcctcacaaagctaaagaaggaccaacgctttttgggacttcaaacaggccttctagaatgacaccctttaaaaaaggctttgaaatggacacagaaagacagttagcacaagcattcaaaagaccccctagactgtttaaagaagacactcccttttacccctggttacccagaccagtgccccttgttaactttcaccttaattttaagttctaggcctccaaatttcacttagtggtggatgtttatataagtttgcaccccaaaaaaattgtaaaataaaaaaaaaaaaaaaaaaataaaaaattgcaaaaattcggcgctcgcgcccccgcaccccccctacgtcacaaaccacgcccccgccgccatcttgggtgcggctgggcgggggctaaaatggcgggacccaatcattttatactttcactttccaattaacacccgccacgtcaaaacaaaggggtggagactctaaaactatataaccaagtaacctgacgaatggctgagtttaccccgctagacggtgcagggaccggatcgagcgcagcgaggaggtccccggctgcccatggg

SEQ ID NO: 3619 - protein, 664 aa, Gammatorquevirus sp.
MPFWWNRRRKPWYGRWRHRRRFQRYKRRKPRRRFARRRTRRLTRRRRRKRKVRRKRKKINIQQWQPESIVKCKIKGFSTLVLGAEGRQYICWTNEALDYTQPKAPGGGGFGCENITLEWLYHEHRAHNCIWTKSNQYKDLCRYTGCKITLFRHPNIDFIFQYNLQGPFNITKFTYTDIQPQNMLLQPHNRLILSQKTKPHGKLAVKVKIKPPKQMTTRWFFAKEFSEAVLVQLKAVACSFTFPRIAPKAQSQMVTVYYLNESFYPSPIWGQVHPGGYIPISTRTGIYKFSNTKTKPAYSDFTINTNTFERGEAGYYASINYSTGFFNAKVLNASKVTINNVEFGSLPLLTARYNPNDDTGDGNVVYALSILQNSYNPPTVQSDYVIRGQPLWMAFHGFWSWIKYLSKDKAFYTHYMFVVQSRAIKPISQNTAQKRFAFLDLSFISGKLPFDEYLSDNEKKLWYPKAQYQTETINSFVQSGPFIPKLSNIPESTWELDYKYNFYFKWGGPQITDRPVDDPQYQPDYPVPGNRTEAVQISNPKTLATETLLHEWDFRRGIVTHTALKRMSENFESETDIYSDDSGTPKKKRKITKELPYQRPQQEALKTCLQELCEENTCQETPQTLQELIQQQQQQQQLKHNILQLLTKLKKDQRFLGLQTGLLE

SEQ ID NO: 3620 - protein, 123 aa, Gammatorquevirus sp.; identical to SEQ ID NO: 1016

SEQ ID NO: 3621 - protein, 109 aa, Gammatorquevirus sp.; identical to SEQ ID NO: 1017

SEQ ID NO: 3622 - DNA, 2831 bp, Betatorquevirus sp.
gcgggtgccggaggtgagtttaccaccgtagtcaaggggcaattcgggctaattcagtctagcggaacgggcaagaaacttaataactttattttacagatgagcaaattccaaaaaaaatcttgctatgatggacgcgccctggataatcaatgggtaaacaacatatacagctcccacgacttattttgcggctgtcttcaaccaattaaacatttgttggatataataaaagacacaccatggctccgttcctatacagaagaagatacaaaaattactacaacagaaaaccctggtggagacgacttcaatatagacgccgaagacttagaaaaacttttcgaacaaaaagacaacgaaaatactgggtaagaagatttttttctaaaaaatattacagaaaaaaacttaaaaaaataactcttaaacaatggcagcctataaaaataagaaaatgtagaattaaaggatacttacaactatttgaagcgggaatgggacgctttgaaaataactttgcaatgtataaagaaagttttacacctccttatgaaccggggggagggggatggagtatacaacaacttggccttggtatattgtatgcacaaaatcaaatgtttttaaactggtggactgtatctaacaagggactacctttaacaagatataatggtgtaaaaataacattatttagacaaccagaaacagattacatattttggtatgataatgagggaccaataccaataacaaaatacacatatcctagtttacaccctattaaattactactagaaaaacacaaagtaatagtaccatcaatgcaaacacaacctcataaaagaaaaccttttaaaactaaatggatatcccctccaaaagaaatgataaacaaatggcacttccaatcacacatagcttcctttccattattaacctttggtgccgcggcagttagcttacaatctatgtttcaacctcgaactgccataaacaactccataactttacactcagtaaatactagattcttccaaaacccacgctttcaatatccaggcacatcaacaacaggctaccaaccaaaatcaaacacaagtatatacggtatacacaacggagtaatacctcttaaagacaatccaattaaaaacttagtatacttaggaaatacaatgattaatgacgctggagatgaaagaggaacaaacagtatatcaacgtatggaccagcacactggggtaatcccttttatgtaaaatacctagacggcagtatgagaacatttatagccacacaagcttacacagacttaatgaaagacacaaatgtaaatgaaaaactaagcaaaattattcccactcccacagaaaaacatgaaccatacatatacacatttagatacaacccagacaaagacaaaggcacaggaaacataatatactggaaaagcaatttagactcaaacaactgggatcccccagatgacccagacttaaaaatagaaaactttccactatggctttccctatggggtttcgaagactacactagaaaactaggaaaattaagaaacttagaccaagactggatgctttgtattagaactagatacttctcagagtcattaccaacatatgtattagtatcacaacaatttgtagacggagaaggaccatataatgtaggccaagaacaattatcattacaagacatacaacactggtacccaagatttagataccaaaaagaaagtgtatctgcaatatgtcaaacagggccagcagtatgtaaatcagaataccaaaaaagtatacaagctcatataaaatatgattttcgttttaagtggggaggcaatccaccgacaatggaaaacatctttgatccgaactcccaaccaacctacgatactcccgataacatcagactccttaatgaaattacaagtccaacaacaaacattaccaactacctctacaactgggatgttagacgggactttcttacacaagcagctacaaaacgaattacagaaagcccacaaaatgacttctctgtgttcacagatggaatcccaactacaacagacgtcccgatccaaaaagaaaaaacacaagagaaaacaacccaggaagaaacacaagagaagatactccagcagctcagcaacatcctccagtacaaccaacaactcagactcagactccaactcttaaaatctcaaatagaacatacataataaaaaaatgcacaacacctgctctgctatttccacaaaaaaacaaaaatagacgctttaataaatgggaatgggagacagaactagcagcagcacgagcttttaaaagacccttacgcacatttaaagatgacatgcctttttatccttactgtgtacctgaacctaaagtaaactttgatttgtatcataaattttaataaaaatttcaaggcctgcattaattcacttgtggtgtccatttatataagtatcaacttaaataaacatccaccgcctccctaatacgcaggcgcacaagggggctccgcccccttaaggggggggcaagcccccccctaacccccccaaaatttaaatattcataaaggaaaccacaaaattagaattgccgaccacaaacgaatatgctaattaacttccctaaaataatgttttacttccctaaaaattaattagtaaacaccgtcaaattactttttcctgggaggagcataaacactatataactaagtacactgacgaatggctgagtttataccgctagacgaagacgagacaacagctctcgactgaatttgg

SEQ ID NO: 3623 - protein, 668 aa, Betatorquevirus sp.
MAPFLYRRRYKNYYNRKPWWRRLQYRRRRLRKTFRTKRQRKYWVRRFFSKKYYRKKLKKITLKQWQPIKIRKCRIKGYLQLFEAGMGRFENNFAMYKESFTPPYEPGGGGWSIQQLGLGILYAQNQMFLNWWTVSNKGLPLTRYNGVKITLFRQPETDYIFWYDNEGPIPITKYTYPSLHPIKLLLEKHKVIVPSMQTQPHKRKPFKTKWISPPKEMINKWHFQSHIASFPLLTFGAAAVSLQSMFQPRTAINNSITLHSVNTRFFQNPRFQYPGTSTTGYQPKSNTSIYGIHNGVIPLKDNPIKNLVYLGNTMINDAGDERGTNSISTYGPAHWGNPFYVKYLDGSMRTFIATQAYTDLMKDTNVNEKLSKIIPTPTEKHEPYIYTFRYNPDKDKGTGNIIYWKSNLDSNNWDPPDDPDLKIENFPLWLSLWGFEDYTRKLGKLRNLDQDWMLCIRTRYFSESLPTYVLVSQQFVDGEGPYNVGQEQLSLQDIQHWYPRFRYQKESVSAICQTGPAVCKSEYQKSIQAHIKYDFRFKWGGNPPTMENIFDPNSQPTYDTPDNIRLLNEITSPTTNITNYLYNWDVRRDFLTQAATKRITESPQNDFSVFTDGIPTTTDVPIQKEKTQEKTTQEETQEKILQQLSNILQYNQQLRLRLQLLKSQIEHT

SEQ ID NO: 3624 - protein, 91 aa, Betatorquevirus sp.
MSKFQKKSCYDGRALDNQWVNNIYSSHDLFCGCLQPIKHLLDIIKDTPWLRSYTEEDTKITTTENPGGDDFNIDAEDLEKLFEQKDNENTG

SEQ ID NO: 3625 - protein, 58 aa, Betatorquevirus sp.
LLFPQKNKNRRFNKWEWETELAAARAFKRPLRTFKDDMPFYPYCVPEPKVNFDLYHKF

SEQ ID NO: 3626 - DNA, 2831 bp, Betatorquevirus sp.
caggtgccggaggtgagtgaaaccaccgtagtcaaggggcaatatgggctatgtcagtctggcggaacgggcaagaaactaaataatattattttacagatgtccatcttctggaaaccaacaccatttggacccagagaaagagaaaaccaatggattaactactgcattcaaggacacgaccaaatttgcggctgtgactcacccggagaccacctactttactgccttgctgaaagaagtggaaaacttaatatttccaaaaacatactagaagaatcaacaaaatgccttactacccacgctggagacgacgccgctactggagaacaagacgccatagaccttctagatggagacctagaaaaattattcgaagaagatatcgccgatcctactactgggtaagaagacgccgctttcttaaaaaactatttaaaataactcttaaacaatttcaacctagaaaaattattaaatgtaaaatacaaggtgaaatatgcttatttcaagcaggaaaaggacttatatttcaaaactatgctcaatatcaagatagctttgtacctgagggagaaccgggaggagggggatggtcagcactagtttttaacttaggaggactttaccaagaaaatcaaaaactacacaatagatggtctaaatctaacaaaggcctgccactagctagatacaatggctgtaaatttaaattttggagatcttgggacacagactacataatacactggcaaacatgtccaccaatgacagacacagaactcttacacttaaacgcacaacccttcatgacaatgctaacaaaaaatcattttatagttccaaacttaacaagaccaccatacacaaaaaaaccctactttactaaaagatttccaccaccctcacaattaacaaacaaatggtactttcaagaagacatttgcaacacaggattactactcctaaccacaagtgcaatgtcacttgaccaatggtttttacctaacaacgaactaagcaacaacattacactaacagcccttaataccacattctttcaaaactctaacttccaagttagaggcacaagaggttacctaccaaaatctaacttatatatatatggacaaggaaacggttctccatctccaacatggggagaactaacatacttaggaaatgcagagtggtaccaagaaggaagcaaaatgaataaaacaaatttaaacgactttacagcctggggaaacatttttcatgcacaacacgtacacgcagacacacacgtttactacggaaccaaatttccagaatccaccgatatatcaaaacaagcaacaaatataacaaaactagattacttataccacacatgcagatacaaccctaacagagacacaggcgaaggaaacgaagtattttttgttagcaactctattaacccaaaactgatatttgatccaccaaaagacccagacctacacatctatggttatccactatggcttatagcctggggatgggcagactggcaaaaaaaattagctaaaatcaaccaaatagaacaaaactacatcatggtagccaaaactaaatttataaaccccccactaccagcatatgtatttttagacaactattttactaacccagaaaaatactcagaacattacactgaaacagacaaaaaacacttttaccctaaatatgagtaccaaaaagaacaatggaacttaatagcacaatcaggaccagctgcacctaaaatagacaaaagccactccatacaagccagagctcactactcatttttctttaagtggggaggctgcccagcaccaatggaagaagtcaaagacccatgccaacaaggaaaataccccatccccaattaccagttacaagcatctcaaatccaagatccaaaaacagacaaaagatcatttatctgggactttgacgaaagaagagaaacaattacccctaaagcagctaaaagacttaaacacatctcaacttttgaaactgtattcacagatcgaccacccttcgacctccaattaccggaaaaggagacggaggaagaaacatcgtcagaggaagaaatccaaacatcactctcccacaaaatcgaccacctccaactcaagcacagactcctcagaagaaagctcaacagactaataaaacaaaaactttcaacattataaacaaaaactgtaaagttgaactatttccaacaaaaagacaaaacagacgcttttacaatcatgaactacaaactgagcgtgatttagctaccattttcaaaagacctatgagacattttattaatgatcctcccttttacccctggctccccctagagccaaaagtgaactttctgttaaactttaaagacaaataaacaaggccctattgattcactttcggtgtccgtttatattaatataaaacttaaataaacatccaccacctccctatcacacaggcctaggggctccgcccctagaaccccaagggggggggggcaaagtcccccccccttaccccccttacccccccccttaaacacgcctttaaccgcaaaattaacatggctcaccacaaacgaacaggaaaaccactaaatttgcattgccgaccacaaactgaactatgctaatttacttcttctttttactacacacacccctaataaattaataatcaccatcatatcctaggcggagcttcaaatacatataactaactacactgacgaatggctgagtttatcacgccagacggcgaacgcatcacatcagtgactgcgagctgacattggg

SEQ ID NO: 3627 - protein, 641 aa, Betatorquevirus sp.
MPYYPRWRRRRYWRTRRHRPSRWRPRKIIRRRYRRSYYWVRRRRFLKKLFKITLKQFQPRKIIKCKIQGEICLFQAGKGLIFQNYAQYQDSFVPEGEPGGGGWSALVFNLGGLYQENQKLHNRWSKSNKGLPLARYNGCKFKFWRSWDTDYIIHWQTCPPMTDTELLHLNAQPFMTMLTKNHFIVPNLTRPPYTKKPYFTKRFPPPSQLTNKWYFQEDICNTGLLLLTTSAMSLDQWFLPNNELSNNITLTALNTTFFQNSNFQVRGTRGYLPKSNLYIYGQGNGSPSPTWGELTYLGNAEWYQEGSKMNKTNLNDFTAWGNIFHAQHVHADTHVYYGTKFPESTDISKQATNITKLDYLYHTCRYNPNRDTGEGNEVFFVSNSINPKLIFDPPKDPDLHIYGYPLWLIAWGWADWQKKLAKINQIEQNYIMVAKTKFINPPLPAYVFLDNYFTNPEKYSEHYTETDKKHFYPKYEYQKEQWNLIAQSGPAAPKIDKSHSIQARAHYSFFFKWGGCPAPMEEVKDPCQQGKYPIPNYQLQASQIQDPKTDKRSFIWDFDERRETITPKAAKRLKHISTFETVFTDRPPFDLQLPEKETEEETSSEEEIQTSLSHKIDHLQLKHRLLRRKLNRLIKQKLSTL

SEQ ID NO: 3628 - protein, 102 aa, Betatorquevirus sp.
MSIFWKPTPFGPRERENQWINYCIQGHDQICGCDSPGDHLLYCLAERSGKLNISKNILEESTKCLTTHAGDDAATGEQDAIDLLDGDLEKLFEEDIADPTTG

SEQ ID NO: 3629 - DNA, 2831 bp, Betatorquevirus sp.
caggtaccgaaggtgagtgaaaccaccgtagttaaggggcaatatgggctgaagcagtcttggcggaccaggcaagaaacttaaaataatatattattttacagatatgagcagctttcttactccttgtgtatactctggaaaaagcctagaaaatcaatgggtaaacagcatttataactgccacgacctattctgcggctgcaacgacgccattaaacatctggcatccattttacaaacaaaacaactatgcctcccttcaacttctaccgccgaagatggtacccaaacagaacctggacccgcagaagaagatggattcgacgaaggagatttagagcgcctcttcgaagacgatttcaccgacgacgatgggtaagaagacgatttttaaaatttaaaagacgaagaaaacttaaaaaactaagacttaatcaatggcagcctaagactattcataaatgtaaaatacaaggcattttatgtactgtatgttgtggaagacagagacaaaaccataattttactttaacagcagaatcttatgtacctaaagctgaaccgggagggggaggatggtctataatgcaattaactttaagagttttatatgaagactatatagcatgtagaaactggtggacaaaaagtaacatgggtttaccattacaaagatacgtaggaggatatttaaaactttatagaagtactcaaacagactatattgcacttataaatacatgcccaccatttgaagtaacaagagacagttacttttccacacaacctagtagaatgctaatgcacagacacaaaattatagttccaaaactagacagaaaatacaaaagaaaaccttacataaaaataccaataaaaccaccagcactatggcaaaacaaatggtattttcaacaagatatgtacaatcaaccatttgttatgataactacatcttgttgctctttagaccaagtatttgaaaaacaagatgaaatatccacaaacatatcatttaaatcacttaacttagaatttttccaaaacccacaatgggcaaacttaccaaacaaaggctacagacctaaattttcaggcacaacaaacacatacttatttgtaacagaaaatggaaccgcagacccaacaataacaggatacaaaaatttaacacctcttttcaacacaaaaacacttactaaaggacaaaaactaccaatagaacacacagaggtattcgacgcagaacaaaatataaaagatcagtattggggtaatccatttgacccagacctagtacacagcggaagacgctatgtgtttggcccatatccaacaaaagaaaattacaaatctgcagtactaacagacatacattcagtatacgaagaaataagatacaatccatttcgagacaaaggaacaggaaacaaaatttaccttaaatcagtttcactgccacaaagttcatttttagtactaccaactaatgaaaacttattagttgaaaaccttcctatttggctagtattatgggcatgggaagactggttactaaaatcaaaaccagtacaacatctttatcaagactaccaactagtaatagtaactaaatacttctttcctcaaagacaagcatatttaatattagacaaatactttacagacgacacacatccaacacagcaaccactaacagaaacagacaaagcaaactggcacccaaaactagaaatgcaacaatacacaacaaacttaatatcattaactggcccatacacacctaaaattaactttacaaagtctatagaaactcatttattatatacacttttctttaagtggggaggatgcccagcaccaatggaacaaattgcagatccagcagcacaagaaaaatttccctcacccagtaacctcattgaaacagttgaaatccaggatccagacacaccaaaagaatacacattatgggaatgggaccaaagaagagacatacttacagggaaagctacaaaaagaattaaactataccaagaacctaaaaactattttacagaatatggagcaaaagatccagaaacgcaaacaccacaagaaatcgaattcaacccaccgacgccaccaaaaagcaaagaaaagcaggaggagtacatcaacgacctccagcagctccagcgacatctcaagcgacgaatccacaacctcctaaaaaacccaaaattattccccttgtaaaagacatgtttgggaactctataaaaaacaaccgcagactaaatgctaaagaaagggcagatgatttagaagatgcaaaaatatggggtagatatcctaaatctcgcctttatgaaactcattactataaagatattatacctgaacccattgtaaacttttcattaaactttaatttctaagccagcaaatattcacttgtcggtgtccatttatttaagttaaaaccttaataaacatccaccacactccctaatacgcaggcgcacaagggggctccgcccccttaaacccccaagggggctccgcccccttaaacccccaagggggctccgcccccttacactattaatattcaacaggaaaaccacataattagaattgccgaccacaaaccgtcaaccattgcaactacttccctaaatccccactttacttccttttttagagccacacctcctactaaattattaatcagacgtatatcctgggaggagacacattactatataaccaactacactgacgaatggctgagtttaccacgccagacggagaccagacaggacactgactgggctgcttcaggg

SEQ ID NO: 3630 - protein, 662 aa, Betatorquevirus sp.
MPPFNFYRRRWYPNRTWTRRRRWIRRRRFRAPLRRRFHRRRWVRRRFLKFKRRRKLKKLRLNQWQPKTIHKCKIQGILCTVCCGRQRQNHNFTLTAESYVPKAEPGGGGWSIMQLTLRVLYEDYIACRNWWTKSNMGLPLQRYVGGYLKLYRSTQTDYIALINTCPPFEVTRDSYFSTQPSRMLMHRHKIIVPKLDRKYKRKPYIKIPIKPPALWQNKWYFQQDMYNQPFVMITTSCCSLDQVFEKQDEISTNISFKSLNLEFFQNPQWANLPNKGYRPKFSGTTNTYLFVTENGTADPTITGYKNLTPLFNTKTLTKGQKLPIEHTEVFDAEQNIKDQYWGNPFDPDLVHSGRRYVFGPYPTKENYKSAVLTDIHSVYEEIRYNPFRDKGTGNKIYLKSVSLPQSSFLVLPTNENLLVENLPIWLVLWAWEDWLLKSKPVQHLYQDYQLVIVTKYFFPQRQAYLILDKYFTDDTHPTQQPLTETDKANWHPKLEMQQYTTNLISLTGPYTPKINFTKSIETHLLYTLFFKWGGCPAPMEQIADPAAQEKFPSPSNLIETVEIQDPDTPKEYTLWEWDQRRDILTGKATKRIKLYQEPKNYFTEYGAKDPETQTPQEIEFNPPTPPKSKEKQEEYINDLQQLQRHLKRRIHNLLKNPKLFPL

SEQ ID NO: 3631 - protein, 91 aa, Betatorquevirus sp.
MSSFLTPCVYSGKSLENQWVNSIYNCHDLFCGCNDAIKHLASILQTKQLCLPSTSTAEDGTQTEPGPAEEDGFDEGDLERLFEDDFTDDDG

SEQ ID NO: 3632 - protein, 58 aa, Betatorquevirus sp.
MFGNSIKNNRRLNAKERADDLEDAKIWGRYPKSRLYETHYYKDIIPEPIVNFSLNFNF

SEQ ID NO: 3633 - DNA, 2830 bp, Betatorquevirus sp.
caggtaccgaaggtgagtgaaaccaccgaagttaaggggcaatatgggctgtagcagtctggaggaacgggcaagaaacttaaaaaaatattatattttacagatatgagctcttttttatcaccctgcatttactcaaaaaaaggattagaaaaccaatgggtaaactgcatttggaacacccatgaaatgttctgcggctgcaacaaaccttggaaacatttagaagacatactaaaaagacaaggagcacaactatgcctcccttctactaccgtagacgttggaaccgctacagaaccagacgttacagaagacgaccatggattagagcctggagacctagacaaacttttctcagaagatttcaccgaagaagacgggtaagaaaaagacgttttattactaagagaaaaagaaaactaaaaaaaataactgtaagacaatggcaaccttctcatataagaaaatgccacattaaaggacaactatgcttgctaacatgtggtataaatagaattaacaataattatacattaacttctgaaagctatgtaccagtgtctgaaccgggaggtgggggatggagtataatgcaattaactttaagagccttatatgacgaatacgaacactatagaaactggtggacaaacagtaactgtggactacctttagtaagatacaacggatgtaaatttaaattttataatagtaatgactgtgactatatagtaactccacaacacacaggaccgtttgaagtaacaagagacacatacttaaacacacaacccagtagacacataatgaaccaccttagctttatagtaccaaaactaaaccctaataaaaaaaaaagaccatatataacaaagcgatttccaccaccagcactatttcaaagcaaatggtactttcaacaagacatactaaacacaccactaatactattaacagtatcatcatgctcactagaccaaatgtacgcaccaaacgatcaaataagcactaacataacatttaattctttaaacacaaccatgtttcaaaacccatactgggaaacagaacaaccatactattgtaaagtaacaggcacaatacaaacaggactatatacatatggaaatggaaacgaaaacgaagcaaaaaaaaattggaaatatttacaaccactagcaaacacaactagatttattccaccaaactacaccacagcaaaaaacatagacgactatacaaagtttacaaataataaaaattttgcaaacccttttgctaccttggacgaagacacaccacatacagacataaaaatattttacggacagcaaccaaaactagaagaatacgagaaaccagctaccattttagaaacaactttatttcaacaatgcagatataacccatttaaagacaaaggaataggtaacaaagtatacttaaaatgcacaaaaacacaacaaggaagctttctctccataccaacagaccccagactaaccattacagactttccactatggctaatattttggggctggccctcctggctagaaaaatcaaaaccagtacaccacatagcagaagactatcaatttgtaatacaatcaccatatatatacccaccaatgccatgctacgtaccactagacaactactttacacatccaaaacacacaatactaaatgaaacagacaaacaacactggcacccaaaagcagcataccaaacagaagtactagcaaaatttgcagaaacaggaccagcagctacaaaaataaacaaacaaaaacaaattcaaatacacgcattttataacttttattttaagtggggaggatgcccagcaccaatggaaacaatatgcaatccagcagaccaagaaaaattccccatgcccaatcacatcttacaagaacttacgctcgagaatccagaaacacacaaagaacactacatatacagatttgacgaacgagacggacagcttacagagccagctgcaaaaagacttaaaaaagactatgaatctccaaaatattttacagaatttggaacaaaagacccaatactacaaatcttcccaccgacacaagaaacacaagagaaaacaaccccgaaaaaaacggaagaactacagcagcagctccagctcctccgagaccaccaacaccaactcagagagcgaatcaacagactaaaaaaaagatcaaaatattaccctataacatagatatgtttggtgaaagaaaaattaaaaaccgtagatttaatgcaaaagagtatgaacaagaattacaggaaagcaaaatatggaaacgtagacctagacagtatatttttgatccccctgattatgaactaaatataattgaacctcttgtaaactttgatgtaaacttttcattaaactttaaattctaggccagcaaatattcacttgtcggtgtccatttattaaagttaaaacttatataaacatccaccactctcccaaatacgcaggcgcacaagggggctccgcccccttaaacccccagggggctccgccccctaaaacccccaagggggctccgcccccttacaccccctaattaatattcaacaggaaaaccacataattagaattgccgaccacaaactgtcaaccgttacatttacttcctcatttttactactacttcccattttctagaccactcccacctacttcattaataatcagacgtatatcctgggaggaggaacaccactatataactaactacactgacgaatggctgagtttaccccgccagacggagacgagacaggacactgggg

SEQ ID NO: 3634 - protein, 681 aa, Betatorquevirus sp.
LRLQQTLETFRRHTKKTRSTTMPPFYYRRRWNRYRTRRYRRRPWIRAWRPRQTFLRRFHRRRRVRKRRFITKRKRKLKKITVRQWQPSHIRKCHIKGQLCLLTCGINRINNNYTLTSESYVPVSEPGGGGWSIMQLTLRALYDEYEHYRNWWTNSNCGLPLVRYNGCKFKFYNSNDCDYIVTPQHTGPFEVTRDTYLNTQPSRHIMNHLSFIVPKLNPNKKKRPYITKRFPPPALFQSKWYFQQDILNTPLILLTVSSCSLDQMYAPNDQISTNITFNSLNTTMFQNPYWETEQPYYCKVTGTIQTGLYTYGNGNENEAKKNWKYLQPLANTTRFIPPNYTTAKNIDDYTKFTNNKNFANPFATLDEDTPHTDIKIFYGQQPKLEEYEKPATILETTLFQQCRYNPFKDKGIGNKVYLKCTKTQQGSFLSIPTDPRLTITDFPLWLIFWGWPSWLEKSKPVHHIAEDYQFVIQSPYIYPPMPCYVPLDNYFTHPKHTILNETDKQHWHPKAAYQTEVLAKFAETGPAATKINKQKQIQIHAFYNFYFKWGGCPAPMETICNPADQEKFPMPNHILQELTLENPETHKEHYIYRFDERDGQLTEPAAKRLKKDYESPKYFTEFGTKDPILQIFPPTQETQEKTTPKKTEELQQQLQLLRDHQHQLRERINRLKKRSKYYPIT

SEQ ID NO: 3635 - protein, 93 aa, Betatorquevirus sp.; identical to SEQ ID NO: 3145

SEQ ID NO: 3636 - protein, 62 aa, Betatorquevirus sp.; identical to SEQ ID NO: 3146

SEQ ID NO: 3637 - DNA, 2830 bp, Alphatorquevirus sp.
ctatgggcaaggctcttaaaaaagccatgtttctcggtaaactttacagaaagaagaggctcctgtcactgtccccactgcacactccacagaaagcttgcaggcttctgactgctatgtggagaccccccgctcacaatgtacaaggccaagaaaggcagtggtacgagtcatgctttaggtctcacgctgctatgtgtggctgtggcgattttatcaggcatctttgtcatcttgctgataattttggacgccctcccactgtccctcggcctccggcacccacacctccagtaaggccactgccagctctcccggcaccccccaacccctccggtagcagagcggcatggcctactggtggtggagacggagaagacgagccccgtggaggaggagacggcgctggaggactcgcagaactcgcagacgaagagctgctttccgccgccgtggacatcgccgaagagtaagaaagaggagggggaggtggagaaggacttatagaaaatggcggaggggcaaaaagagacgcaggcacaggagacgcttaatactgactcagtggcaacccgcctttataagacgctgctatatagtgggctacctgcccctcataatatgcggagaaaacacctccgccagaaactttgccacccactcagacgaccttatatccaacggaccttacggggggggcatgactactaccaaatttactcttagaatactgtatgacgaacacctgagacaccttaactactggactgtcagtaacgaggacctagacctgtgtagatacctggggggcaccttctacgcgtacagacaccccactgtagactttatcatacagatacacaccagtcccccctttctagacactccactcaccggtcccagcatacacccgggcatgctcatgctcacaaaacacaaaatactaatacctagcctaaaaaccagacccagcaaaaaacacaaagtaaaaattagattcaggccccctaaactatttcaagacaagtggtacccccagtcagagctctgtgacaccacactcctaaccgtctttgcaaccgcatgtgacctgcaatttccgttcggctcaccactaacgaacaacccttgcgtcaacttccaggtgctaggttccgtttacaaaaatcacctcagcatacttcctgaaaaactgacttcatataataatcactatgatactaacttatatagcaatctacaactatatcaaacatttcaaacaatagctcaaattaaacccagtactcaagaaaatggctttaatcctacatggcaagaatgtcaaaatactgtaaagcttaacgtcacaggcactaaccaatctacatgtaatgacacctggtactatggaaaaacttatacatctaacataaaagaagcagcaaaacacattagaactaaatacctaaatgctacaagagcagccctaccactactacaaacacatggaaatgaactactagagtaccacacaggtgtgtacagttctatattcctatctgcaggcagaacatactttgaaaccacaggggcctacacagacatagtttacaaccccctggtagacaaaggcataggaaacaaagtgtggctagaccccctaactaaagaggacgcggtgctaaatagaaaacaagcaaaagtactgttagaagacatacccatatgggcagccctatttggatacacagaatttgcagctaaatacacaggagactctgccatatcagcaaactacagacttacaatacgatgcccctacacagaccccatgctagtagacagaaacaacgaagaccaaggctttgtgccctactctaagaactttggcaacggaaaaatgccaggagggtcctccaacgttccactgactatgagaatcaagtggtaccccatgttattccaccaactagaactcatggaagaactagtacagtccggaccgtttgcatacaggggcgacgaaaagatgtgtgtattagccataaaatataacttcagatggaaatggggaggtaaccctgtttctcaccagattgtgcgcaacccctgtaaaggagggtccggtgcccgtcgagagcctcgctcaatacaagcagttgacccgaaatacgtcacaccgacgctatccttccactcgtgggacttcagacgagggctatttggcaaggcaagtattgagagaatgtcaagagaatcagagactaatgtctatcctacaggcccaccaagaaaaagaccaaaaagggacacggacccgtacgactcacagcaagaagaaaactcactttcaagacacctccagctccagccgtgggtccactccagtcaggaagtccaaagcgaagaagaaacgcaagtcccggagaacctacaagaacaactcctccagcagctccgagagcaacagcagctccgagtccatctccagtccctcgcctcacaagtcctcaaaatcagggcgggatacgggatacaccccctattatcttcccaagcctaaacaaggtctatatgtttgaccccccaggtcctaagcccatacagggctaccaggactgggtggaagagtacaccgcctgtaagtattggaacaggccccccagaaagtaccacacagatttgcccttctacccagacgtccccaaagtcccagaccagataagggtctcgtttaagcttggctttcaataaacacacctgttcactgtactaggccgtgggagtttcactcgtcggtgtctacctctaaaggtcactaagcactccgagcgccagcgaggagtgc

SEQ ID NO: 3638 - protein, 731 aa, Alphatorquevirus sp.
MAYWWWRRRRRAPWRRRRRWRTRRTRRRRAAFRRRGHRRRVRKRRGRWRRTYRKWRRGKKRRRHRRRLILTQWQPAFIRRCYIVGYLPLIICGENTSARNFATHSDDLISNGPYGGGMTTTKFTLRILYDEHLRHLNYWTVSNEDLDLCRYLGGTFYAYRHPTVDFIIQIHTSPPFLDTPLTGPSIHPGMLMLTKHKILIPSLKTRPSKKHKVKIRFRPPKLFQDKWYPQSELCDTTLLTVFATACDLQFPFGSPLTNNPCVNFQVLGSVYKNHLSILPEKLTSYNNHYDTNLYSNLQLYQTFQTIAQIKPSTQENGFNPTWQECQNTVKLNVTGTNQSTCNDTWYYGKTYTSNIKEAAKHIRTKYLNATRAALPLLQTHGNELLEYHTGVYSSIFLSAGRTYFETTGAYTDIVYNPLVDKGIGNKVWLDPLTKEDAVLNRKQAKVLLEDIPIWAALFGYTEFAAKYTGDSAISANYRLTIRCPYTDPMLVDRNNEDQGFVPYSKNFGNGKMPGGSSNVPLTMRIKWYPMLFHQLELMEELVQSGPFAYRGDEKMCVLAIKYNFRWKWGGNPVSHQIVRNPCKGGSGARREPRSIQAVDPKYVTPTLSFHSWDFRRGLFGKASIERMSRESETNVYPTGPPRKRPKRDTDPYDSQQEENSLSRHLQLQPWVHSSQEVQSEEETQVPENLQEQLLQQLREQQQLRVHLQSLASQVLKIRAGYGIHPLLSSQA

SEQ ID NO: 3639 - protein, 156 aa, Alphatorquevirus sp.
MGKALKKAMFLGKLYRKKRLLSLSPLHTPQKACRLLTAMWRPPAHNVQGQERQWYESCFRSHAAMCGCGDFIRHLCHLADNFGRPPTVPRPPAPTPPVRPLPALPAPPNPSGSRAAWPTGGGDGEDEPRGGGDGAGGLAELADEELLSAAVDIAEE

SEQ ID NO: 3640 - protein, 59 aa, Alphatorquevirus sp.
MFDPPGPKPIQGYQDWVEEYTACKYWNRPPRKYHTDLPFYPDVPKVPDQIRVSFKLGFQ

SEQ ID NO: 3641 - DNA, 2829 bp, Betatorquevirus sp.
cgggtgccgaaggtgagtgcaaccaccgtagtcaaggggcaattcgggcttgatcagtctagcggaacgggcaagaaacttaaaaatatatttgttttacagatgagcaaacaattatgtccaccagcatacagtggaaaacatctagaatcccaatggcttaaccacttttactcctcacacgacctttgctgtggctgtaaagatcctgttcttcactttttaattgctgtaaataaacgaggcaacgcacccaaacctgaagacgacattaaaaacataaaatgccttattactggagaagaagaagatggcgacgacccttttggtcctggagaactagaagagcttttcaaggaagaagacggagatggagacgcagacgacccatctactacggggtaagaaagtacatttttaaaaagaaacttaaaagaattagacttacacaatggcaaccaaaaactatcagaaaatgtactattattggaaacattgtactgtttcaaggatctccagaaagagcaaacaataactatattcaaactatttatagctatgtacctcctgacgaaccaggaggaggaggatggactctaataactgaaagcttaagcagcttgtgggaagactgggaacacttaaaaaatatctggacaagcagtaatgcagcattacctttagtaagatatatgggtgtagacttaattttttggcaatctccttacacagactatattgttgaagttactaactgtttaccaatgaaagataccaaactaaaacatgcagacagtgcgccaaatagaatgttattaaaaagaaatgttgtaaaagtacccagtttagaaactagaaaaaaaaagaaaccttttaaaagaattcatgtacctccgccgcctcaaatggaaaacaaatggtattttcaaaaagatatttgtgaaattcctcttgtaatgataacagctgtagcagttgatttcagatatcctttttgtgctagtaactgtagatcaaacaacctcactcttagatgcttaaatatctccttttttcaataccacaactttgacaaatatgcagacacaacaggatatgtacctaaatcaggtacttacatgtattcacactcaggtagacttgaccaaaaaccaacaaaaaatacacttatatacttaggtaacacaaaaacaaatacaccaggtaaagctccaaccaatatgaaagactatacaaaaccagaaaactggggaaacccattttggcaccagtacattaatggagaactaccagtatatacatcacaatatcatcccactgctttaaaatcagacattagtcaagaagagtccaaaatatcagctatgacacttatggcagatgtatactttgaaacctttagatacaatccagaaagagacaaaggcacatcaaacagaatatatttagtcgaaaattaccaaaacacaggatggggacccccaacaaatgtaaacctaattttagaaggctttcctttatatgacatatgctggggttacacagactggatagaaaaactacatgaaatacaagatataggacaacattacatatttgtgatacaaacagacacttttaatgaacatagacaagcttatgtacctttagatatgttttttttaacaggacacggtccatatgataccaacataaataactatgactataatcactggcaaccaaaacttagatttcaaacaaagagcataaatgatatttgcttaactggaccaggttgtgctagatctccttttggaaattatatgcaagctaaaatgacatataaatttagagtaaaatttggtggctgtccaaaaacattagaacaaccttatgatccttgttcacagccaaactggactatacccagtaacttcactgaaggacttcaaatccagaatccaaacaccaacccccaaaccgaactgcaagaatgggactggagaagggactacattacaccaaaagctttgcgtcgaatcaaaaaatttccaaaaactgacgaaactttacaactctctacaggatccaagcacaaccctgcaatactacaccaaacactccaggaaacaacggactcgagctcggaaacggaagaagaccaaacatcgatccaagaacaaatactcaagctcaagcgacagcagcgactactcaagcagcggatcagacaccgactaatgcaacaaccattaccttaaataactgtaaaaacaaagtgtacttattcccagaacgcaaaccctttaaaaatcgtagattttctgtatatgaaagagaactagaaaaatatgtagctactgcttttaaaagaccacaaagaacatttttttatgaccccccaatatacccgtggcttccaccagaacctcttgtaaattttgacttaaaatttgaataaacaaggccaacaaatttcacttagtggtgtccatttatataagttaaactttaataaacagactccgcctcccaacattgttggcgccaaaaagggggctccgcccccttaaacccccgggggggggcaagcccccccctaaccccctaataaatattcaacaggaaaaccacctaatttaaattgccgaccacaaaccgtcacttacttccctatttaccattacttcctcttcacttaataaatattcattacattaattagtaattagcatcacttcctaggaggagctaaattactataaaactaactacacagacgaatggctgagtttatgccgctagacggaggacgcatcactacagtgactgcggactgatcacggg

SEQ ID NO: 3642 - protein, 652 aa, Betatorquevirus sp.
MPYYWRRRRWRRPFWSWRTRRAFQGRRRRWRRRRPIYYGVRKYIFKKKLKRIRLTQWQPKTIRKCTIIGNIVLFQGSPERANNNYIQTIYSYVPPDEPGGGGWTLITESLSSLWEDWEHLKNIWTSSNAALPLVRYMGVDLIFWQSPYTDYIVEVTNCLPMKDTKLKHADSAPNRMLLKRNVVKVPSLETRKKKKPFKRIHVPPPPQMENKWYFQKDICEIPLVMITAVAVDFRYPFCASNCRSNNLTLRCLNISFFQYHNFDKYADTTGYVPKSGTYMYSHSGRLDQKPTKNTLIYLGNTKTNTPGKAPTNMKDYTKPENWGNPFWHQYINGELPVYTSQYHPTALKSDISQEESKISAMTLMADVYFETFRYNPERDKGTSNRIYLVENYQNTGWGPPTNVNLILEGFPLYDICWGYTDWIEKLHEIQDIGQHYIFVIQTDTFNEHRQAYVPLDMFFLTGHGPYDTNINNYDYNHWQPKLRFQTKSINDICLTGPGCARSPFGNYMQAKMTYKFRVKFGGCPKTLEQPYDPCSQPNWTIPSNFTEGLQIQNPNTNPQTELQEWDWRRDYITPKALRRIKKFPKTDETLQLSTGSKHNPAILHQTLQETTDSSSETEEDQTSIQEQILKLKRQQRLLKQRIRHRLMQQPLP

SEQ ID NO: 3643 - protein, 100 aa, Betatorquevirus sp.
MSKQLCPPAYSGKHLESQWLNHFYSSHDLCCGCKDPVLHFLIAVNKRGNAPKPEDDIKNIKCLITGEEEDGDDPFGPGELEELFKEEDGDGDADDPSTTG

SEQ ID NO: 3644 - DNA, 2829 bp, Betatorquevirus sp.
cgggagctgaaggtgagtgaaaccaccgaaatctaggggcaattcgggctagatcagtctggcggaacgggcaagaaaattaaatattatttttttacagatgagcaaattttacaaagaacctatttataacaaaagaggactggaaaaccaatggattaacctcatctaccaaagccacgatctaatctgcggctgcaacacaccaattgatcacctaaaacatattattcaacaacaacaatgcccccgttccgacgccggaactactaccgccgctggtggcactggagaagaccccgaacctactttcgacgccggagacctcgaaagacttttttcaccagaaaacgacgtagacgaagggtaagaagaaaacgcttttttaaattacgtaaaaaaaacaaaactgttagaatacaacaatggcaaccaacaagtataaaaaaatgtaaaattcaaggttacttatgcatgtttcaagcgggaccaggacgctatagcaataactatgctttatggaaagaatcattctttccacaacattacccgggaggaggaggatggagcattcagcaattaagcttaggaattctttttaaagaacatacagaccaaatgaactattggactaaaagtaatgacagactaaacttatgtagatatttaggatgcaacattcaactatttagagaaccatttacagactgggtattttactactttgataatttaccaaaaactgttagcaaatggttttacagttctcaacatccaattagactactaaactcaaaaagaaagagaaccataccaagctttcaaacacaaccacataaaagaaagccttacaaatcaatattcataccaccacccaaattaatgaaaaaccaatggttttttcaatcaaatttagcagactacccattactaacatttgcagccagtgcagttagtctaacaggaatgtttggaagcacaaaagcaattagtaacaacgcaactttttactgtttagacactaaacaatttacaacaccaaattttcaatggagaaaaggaacaccacacggacaatggggatacacatacggcacaaactatttatatggactagaaagaccaagtgaaacttgggaaaacaacaaaatgggtgatggaacatacctaggaaacacaatgaatcaacaaagtgggttaccaatgacctataaacaagaaaatcaatacacaatgaaagactggggaaatcccttttactgggaatatgcatcaggagatgcagcattatttcaaagcacatacaatcctaatgaaataataaaatctcacaaagacagaaaactaacacaagcagaaagaaaaacttcacattacatttttaaagcaagatacaatccatttcacgacaaaggaaaaggaaatgtagtatactttttacccacatacgacacaagcaaaacagactgggaacccacttcagacccagacataaaatgggaaaatcaaccattatggttaactatgtggggattagaagacattttaaaaaggatgggtaaatgcacaaatttagacatggactggataatggtagtaaaatcatcatacatactaccaccagaaagacactatgtatttttaagctatgactttgtacatggtagaggcccatatgacacagaaaaagaattcatgacaacagatgacctaacaaactggtaccctagatttaaataccaaagacaggcactagacaacctagttaaaacaggaccagcagtaccaacaggtgacaatgtacaaaacctacaagctaaaataaaatacaactttttttttaagtggggaggcaactcagaaccacaagaaactgttcgagatcccaacagccagcccatcacacctagtcccaataacttcgacctcagcaatgaaatcattgatccatcaacagacattacaacagaaatctacccttgggactttagacgggacatacttacaacaacagctacagaaagaattaaacaaatcaaaactaatgaacaaactatgtttacagatggaagggaaactgcaacggacgtccccctgcaaacagaaacacaaaagaaagagaccaagaaaacacaagaagaaacattactccagcagctcaaccagctccaacaatacaacctccaactccagcaccgactcagaaacctaaagcagttatctatggacctataaataaagtagaactttttaaaactaaacgtaaaaatagaagactactaactccctacgaaactcaaacagatctagaaatagctaaatggttaaaaagacctgtacgttctttctttgatgataacccctattacccttggttaccacctacacctcttgtacaatttgatcttgtaaaagcatttaataaaggccagcattaattcacttaacaaggctgtttatttaagttataacttaaacaaacgtccaccgcctccctaatacgcaggcgcacaagggggctccgcccccttaaacccccgggggggaaacccccccctaacccccccaaaaaaccacaaaattagcattgccgaccacaaacggcacaggaaaccacaaaatttgcatggctaaccacaaacggtcacttatttccccatttttaataacttctgctttttaacataaatattcattaaattaattaataaacaccgtaattcctgggcgtgacttaaacactatataactaactacacttccgaatggctgagtttatgccgccagacggaggacggatcacaacagtgactccgaactgatcttggg

SEQ ID NO: 3645 - protein, 663 aa, Betatorquevirus sp.
MPPFRRRNYYRRWWHWRRPRTYFRRRRPRKTFFTRKRRRRRVRRKRFFKLRKKNKTVRIQQWQPTSIKKCKIQGYLCMFQAGPGRYSNNYALWKESFFPQHYPGGGGWSIQQLSLGILFKEHTDQMNYWTKSNDRLNLCRYLGCNIQLFREPFTDWVFYYFDNLPKTVSKWFYSSQHPIRLLNSKRKRTIPSFQTQPHKRKPYKSIFIPPPKLMKNQWFFQSNLADYPLLTFAASAVSLTGMFGSTKAISNNATFYCLDTKQFTTPNFQWRKGTPHGQWGYTYGTNYLYGLERPSETWENNKMGDGTYLGNTMNQQSGLPMTYKQENQYTMKDWGNPFYWEYASGDAALFQSTYNPNEIIKSHKDRKLTQAERKTSHYIFKARYNPFHDKGKGNVVYFLPTYDTSKTDWEPTSDPDIKWENQPLWLTMWGLEDILKRMGKCTNLDMDWIMVVKSSYILPPERHYVFLSYDFVHGRGPYDTEKEFMTTDDLTNWYPRFKYQRQALDNLVKTGPAVPTGDNVQNLQAKIKYNFFFKWGGNSEPQETVRDPNSQPITPSPNNFDLSNEIIDPSTDITTEIYPWDFRRDILTTTATERIKQIKTNEQTMFTDGRETATDVPLQTETQKKETKKTQEETLLQQLNQLQQYNLQLQHRLRNLKQLSMDL

SEQ ID NO: 3646 - protein, 103 aa, Betatorquevirus sp.
LAERARKLNIIFLQMSKFYKEPIYNKRGLENQWINLIYQSHDLICGCNTPIDHLKHIIQQQQCPRSDAGTTTAAGGTGEDPEPTFDAGDLERLFSPENDVDEG

SEQ ID NO: 3647 - DNA, 2828 bp, Gammatorquevirus sp.
cgggagcccgaggtgagtgaaaccaccgaggtctaggggcaattcgggctagggcagtctagcggaacgggcaagaaacttaaaatattttattttacagatgcaaaacctttgcagcagagacttcttcaaaaaatgtacttataactcagatacccaaactcaaatttggtgttctcaaattgctgattctcatgacaatatttgctgctgcaactggccatttgcacacctgctagccagcttgtttccacctggacatccagacagacaactaaccattaatcaaatacttgaaagagactacaagcaactatgccattctggtggggccgcagaagaaagccatggtatggcaggtttcgatggagaaggagatatcaaacaaccaaaagaagaagaaaacccagaagaagatttcgaaccagaagaaatagaagaaatgctaatcgccgctataaaagaaggcgcaaggtaagaagaaagcttaaaagaataactttaaaacaatggcaaccagactctataaaaaaatgtaaaattaagggttattcctgcttggtactggggggtgaaggaacccaaatgttttgctataccaatgaagcaagtagctacccacagcctaaagctccagggggagggggatttggagtagaaataattactttgcaatggctataccaagaattccttaaacataacaacatatggactagaagtaataactatacagacctttgcagatacacaggctgccaaattattttttacagacaccctacaattgacttcattgcaggctatgacatagcaccaccctttgaccttaataaatattcatatgctgaaatgcaaccacaaaatttactacttagaagacatagaaaactaatattaagtagagcatctaatcctaaaggtagactaactgttaaaatgaaaataaaaccaccaaaacaattaattactaagtggttttttcaaaaagacttttgtaaatatggtctagtaaaaatatttgcttctgcatgtgactttaattaccctagaatatcaccaatagcacccagcactgttttaactgtatacagccttagcaccaccttttacaataacagtgactgggcaaaagcagaagaagaaggatacaaaaatatttctactcaagccttaccacttaccttttattacaaaaacaaacaaggtcaggaacaaaaatttaactacaaccctacctccattgagaaaaaagatttagaaagatactactatacaataagcagagacactggattattttcaccaaaagtgctactatcatacaaatacacacatagtgaaaaaacatatgctaatttaccactcattgttttaagatacaacccacatgaagacacaggacatggcaatgaggtatacctaaccaacattttaggaggccactataataaaccatctatctctacagactactcatttaacaatgttccactacccatagcattttatggatactggaactatttacaacaatattctaaagacaaaaatatttttaaaagctacatgtttgtagttaaatgtcctgcactaaaacctattacacaaacaacagcacaagtatactaccctatactagactcagactttgtttatggtaacaaaccttgggatgaatttatatcagacacagacaaaaaactttggtaccccacagcagaaaaacaacaacaaataataaatgctattgtagagtcaggaccatatgtcccaagactatcaaatttaaagtacagtacatgggaactagattacagatacaaatttttttttaagtggggaggaccacaagtatcagacccagcagttgaagatccctgccagagaggaaaataccccgttcccgatacagtgcaaaaaaaattacaagttaccaacccagaaaaatgtaaaactgaagaattattccatgactgggacattagaagggggttcattacaagctcagctcttaaaagaatgtcagaaaacctccaaactgattcatctatccaatctgatgactcagaatcaccaaagaaaaaaaggaaaatcaccaaagagctacagtgccaaacacaggggaaagaaaagatccaggaatgtctcctctcactcttcgaagaaaatacatgccaagagtcgccagaaacactgcagcagtacatccagcagcagcagcagcagcagcaccagctcaagagaaacatcctccaactcctcacacacctgaaaaaggcccagagatgtacagaactacaaacaggccttttagagtagaaccattcaaaccaggttttgaatgggaaacagaaaaagaactagcaaaagcattttgtagaccacctagaacatacaaaaatgaccccccattttacccttggctgccacctgcaccccttgtacaatttaaccttaatttcaaaggctaggccaacaatgtacacttagacaagcttgtttaataaagtttaaccccaaaaaaaaaaaataaaaaattgcaaaaattcggcgctcgcgcgcgctgcgcgcgccccccccgcaccccccctacgtcacaggccacgcccccgccgccatcttgggtgcggcagggcgggggctaaaaaagcgggaaccaattgctttaaacttccactttccaattaaaacatgccacctcacacttaaagggtggagacttctacactatataactaactgcactgacgaatggctgagtttaccccgctagacggtgcagagaccgaccgagcgcagcgaggaggtcttcagctgcccaaggg

SEQ ID NO: 3648 - protein, 668 aa, Gammatorquevirus sp.
MPFWWGRRRKPWYGRFRWRRRYQTTKRRRKPRRRFRTRRNRRNANRRYKRRRKVRRKLKRITLKQWQPDSIKKCKIKGYSCLVLGGEGTQMFCYTNEASSYPQPKAPGGGGFGVEIITLQWLYQEFLKHNNIWTRSNNYTDLCRYTGCQIIFYRHPTIDFIAGYDIAPPFDLNKYSYAEMQPQNLLLRRHRKLILSRASNPKGRLTVKMKIKPPKQLITKWFFQKDFCKYGLVKIFASACDFNYPRISPIAPSTVLTVYSLSTTFYNNSDWAKAEEEGYKNISTQALPLTFYYKNKQGQEQKFNYNPTSIEKKDLERYYYTISRDTGLFSPKVLLSYKYTHSEKTYANLPLIVLRYNPHEDTGHGNEVYLTNILGGHYNKPSISTDYSFNNVPLPIAFYGYWNYLQQYSKDKNIFKSYMFVVKCPALKPITQTTAQVYYPILDSDFVYGNKPWDEFISDTDKKLWYPTAEKQQQIINAIVESGPYVPRLSNLKYSTWELDYRYKFFFKWGGPQVSDPAVEDPCQRGKYPVPDTVQKKLQVTNPEKCKTEELFHDWDIRRGFITSSALKRMSENLQTDSSIQSDDSESPKKKRKITKELQCQTQGKEKIQECLLSLFEENTCQESPETLQQYIQQQQQQQHQLKRNILQLLTHLKKAQRCTELQTGLLE

SEQ ID NO: 3649 - DNA, 2828 bp, Betatorquevirus sp.
cggctgaatttgggcgggtgctgaaggtgaatcaaggggcaattcgggctaattcagtctggcggaccgggcaagaaacttaaaaatatttattttacagatgagcaaataccaaaaaccaactctttacaacagcagaggacttcaaaatggctggataaatttagtatatggaacccacgaccagatttgcggctgcaacgaccctattgctcacctaaacgacctaattaacaaacaaaaatgcccccgttcagaagaaacttctactaccgtcgcaactactggaattacagaaacccaagacgcaggtttcgaagacggagacctagaaaaactcttcgcagaagatacccaagacaaagaagggtaagaaaacgcttttatactaaaagacttaagaaaaaacttaaaaaaataactttacaacaatggcaacctactacaattaaaaaaagccatgttaaaggatacttaatattatttgaaggtgcaaaaggacacctaggaaacaattatactcaatataaagaaagttttgtacctccacgaacaccaggaggaggaggatggtcaatccaacaacttggacttggcaatttatttatacaaaatgaatattttatgaactggtggactgtatcaaatagaggcttaaatatggttagatatcacggatgtaatattaaattgtatagacaaaaaactacagattatatatttacttactttactgaaaaaccagaacatgcagataaattttggtttccaacatttcatcccatgagattattactagacaaacgtagagttatagttcccagtttacaaactcaaccattaaaaagaaaattatacaaaagaattcatattagaccaccaaaaatgctgcaaactaactggtattttcaacaaaacattagtacattcccattaatttactttgcagctacagcctgtgacttaaaccatatgtttataagtagtaaagcagaaaactcaaacatatcaataccaactttaaacacaggcttttttcaacaatcttgctttcaatataatggaaattacggttaccaaccaaaaacaaatgtgtatgtgtatggtttagaaaatggtgaaatagacattaaacaagaacccagaagaaatgtaatttacctaggaaatactcatgttagagacccaggcctaaaaataggtccaaacggctgggaaacatacaaacaaaaaaaagaacaatggggaaatatattttatcatgaatactttggcttatacaaaacagtatttctaggtccagaaccatcaacttggttaaataaaacaaacatgaataaaaaaataggagaccccgacggctcctcagctcccccaattacaactaaagtagaacccttatattttgaatttcgctacaatccatataaagataaaggtaatggaaatgtagcctactggaaatcagtttctgactttactaaaaataattgggatgaaccccaaaacccaaatctaattatacgaggatacccattttggctaatgttatggggttgggaagatcatacaagaagattatctgaaattagaaacttagatgacaattatatgctagttttacgatcatcatactttaataacaatttacaagcagtagttccaataagcttttcttttattaacggaagagctccctataacaatgacccagaagatataacacccacagacctaagaaactggtttcctaaatggcaatttcaaaaagaagttatagatgctttattaatgtcaggcccaggagtagtaagagcagaaaacgatacaagcatacaggcatttatgaaatatgatttcttttttaagtggggaggagaaccagcaacaatggaaagcattgcagacccaaacagccaaccaattacacctttgccccgtgaactctttacaacaaatgaaatcactaatccaacagaatccattcaaaacctcatctacaagtgggactgtagacgtgacctacttacgcaaacagcttacaaacgaatatcagaatgcacaactgatgacaaacctttgttcacagatggaagacaaacttcaacggacatcccacaaacaacacaaacaccgacctcgcaaacaaccacggaaaaagaaaaagagacattactcctccagctcaaccagctccaacaactcaaccaacaactccagcacagattccagcaactaaaaacattaacacaggaataataaactttacttgtattaaaagagcatatctttttgaacctaaaaaaacaaaactaacacctataagagggagggactgggaagatgaattatggcttgctaaaaaatttaaaagaccaatgcgtaaatttttagaagataaaccaatatatccatggtgtgttcctgaacccattgttaactttgaccttgtaaaaggatttaataaaggccagcattaattcacacttagtgtctgtttctttaagtaaaaccttactaaaccaacaccgcctccctaatacgcaggcgcagaagggggctccgcccccttaaacccccaggggggggaaaccccccctaacccccccaccttataaatattcataaaggaaaccacaaaattagaattgccgaccacaaactgtcactaacttccctatttttgctgacttccgtttttactcataaatattcatacaattaattattacacagcgtaaatccggggaggagccacttacctatataactaagtacccagacgaatggctgagtttatactgccagacggagacgcgacaacttcg

SEQ ID NO: 3650 - protein, 671 aa, Betatorquevirus sp.
MPPFRRNFYYRRNYWNYRNPRRRFRRRRPRKTLRRRYPRQRRVRKRFYTKRLKKKLKKITLQQWQPTTIKKSHVKGYLILFEGAKGHLGNNYTQYKESFVPPRTPGGGGWSIQQLGLGNLFIQNEYFMNWWTVSNRGLNMVRYHGCNIKLYRQKTTDYIFTYFTEKPEHADKFWFPTFHPMRLLLDKRRVIVPSLQTQPLKRKLYKRIHIRPPKMLQTNWYFQQNISTFPLIYFAATACDLNHMFISSKAENSNISIPTLNTGFFQQSCFQYNGNYGYQPKTNVYVYGLENGEIDIKQEPRRNVIYLGNTHVRDPGLKIGPNGWETYKQKKEQWGNIFYHEYFGLYKTVFLGPEPSTWLNKTNMNKKIGDPDGSSAPPITTKVEPLYFEFRYNPYKDKGNGNVAYWKSVSDFTKNNWDEPQNPNLIIRGYPFWLMLWGWEDHTRRLSEIRNLDDNYMLVLRSSYFNNNLQAVVPISFSFINGRAPYNNDPEDITPTDLRNWFPKWQFQKEVIDALLMSGPGVVRAENDTSIQAFMKYDFFFKWGGEPATMESIADPNSQPITPLPRELFTTNEITNPTESIQNLIYKWDCRRDLLTQTAYKRISECTTDDKPLFTDGRQTSTDIPQTTQTPTSQTTTEKEKETLLLQLNQLQQLNQQLQHRFQQLKTLTQE

SEQ ID NO: 3651 - protein, 104 aa, Betatorquevirus sp.
LADRARNLKIFILQMSKYQKPTLYNSRGLQNGWINLVYGTHDQICGCNDPIAHLNDLINKQKCPRSEETSTTVATTGITETQDAGFEDGDLEKLFAEDTQDKEG

SEQ ID NO: 3652 - DNA, 2827 bp, Betatorquevirus sp.
cgggtgctgaaggtgagtgaaaccaccgaaatcaaggggcaatatgggcacagtcagtctggtggaacgggcaactaacttaaattattttacagatgagcgactatgtaccgccaagatatacaaaaagacaacttaatttacaacaagtaaactgctatgttggaatccatgacctaaactgcaactgcaaagaaccacttcaacacatcataaaacaaattataacccaggaaccatctcttaaaccatggctcgctactactatagaagaagatggacgccaagatggagaaccagatatagatggtttcggccctggagaattagagcgcctcttcgcagaaccagaaggcgaaaacgcagacgggtaagaagaaaaaagccttttttaccactaaaacaatggcaacctaaatatatacacaaactaactgtaaaaggactattttgcttattacaagtacataaagtagactataaccaaaactttaatcaatatgcaaatactgtaacagccgaaggactctctaatggaggcggctttactcttgtaagattcaacctgaacagcctatttgaacaacatgaaaaagcaagaaattactggactaaatcaaatagaaatatgcctctatttagatatactggatgttgtataaaagtatatagacctgaatatatagaccttgttataaaatttcaaagatgttatcctatgtgctgtacaaaactaatgtatactggatgtcaacctagcttattaatgatgtctagaggatctaaattaataagatgcagacaaaatgctccaaattccagaccatacaaaaaatttaaatttaaaccaccagaacaaatgctaaacaaatggtattttcaacacaatgaatcacaaacaggactaattatgatacaagctgcagcagcctcattttcaaactactacactagctcacatgcagaaagcagctcaataacactttggggcattaacacaagaatttttcaaaacttaaactttcaaactaaaaatacacaaggttacaaccctaaaacacaattttacttatatgccactaatggagaagaaaaactaaaagacattatatatctaggacagtcccaactatacaatgaaggtatacctataaaagaaacaccaggctacacaccatcaaactggacacaaacacttacaaactactttagcaacccaaaaaactggggaaatccttttcaccaagaacacgcacataaaatatatggaaagtactatttttcacaaacaccaccattacaaacattaaaaggaaacactcacacaggagaagaaaaaataaacagcgtacaagcactaaaagaatttacacaggaaatatttgtaaaatttagatacaacccattcacagacacaggatataataacatatacattttaccaaactttcaagacaataacgataatttagaaccacctgaagatatagacttacaaaacccaggattcccaaactggttatcatgctttggatttagagactatttaataaaactaggaaaaaaacccagaatcacacaagactgggtagttctaattaaaacaaaccacatatacccaaaagaaacttactacatgctaatagatgaatactttctacatggagactccgataaatataaaggcagaacagactgggataatgaacactggtatcctaactttacacaccaacaaggagctctaaacactctagcactatgtggtccaggagcacctaaactaggagacataaaactagcagaagcaaaaatagaatatcaattttattttaaggttggaggatgtgctacaccagctgaaaaaattacagaccctgcaacacaaccgacttatgttacaccaactaatatccttgacacaaattcgttacagagtccagaggaatcaattgaaagtttcctctaccaattcgactggagacgacaccaaattactgaaacagctgcaaaacgaatcactaaagacttcccaactaaaacacatctatttacagatgcaggaagcagttcaacagaagtacccttcatcgaaacatacaaagaggagctcgaaacatcggaggaggaggaagcccaaaaagagacactattcgagcagctccagcgacagcgacacaagcagaaggacctccgactcagaatcaaacacctcctaaaccaactacaaaaattagaataaaacaccaaacagtaactgttaacctatttggggaaccaccagtaaaaaatcgcagaatgacaccaagagaatatcaagaggagctgcaagaagcagctatatgggaccattaccctagacagtatattttcgataaaccttggtataaaaacatgcctataacaccacttgtaccctctcttaattttgacttaaacttcaaagaataaaggcctgcaaacttcatacctcggtgtccatttattaagtttaaacttaaataaacatccaccacactccctaatacgcaggcgcacaagggggctccgcccccttaaacccccaagggggctccgcccccttcaacccccaataaatattcaacaggaaaaccacctaatttgaattgccgaccacaaaccgtcacttacttccccaaaatacataacttccctaaaaactaataaatattcattaaattatttaataatcaccgtaattccggggaggagccatatacctatataactaactacagtttcgaatggctgagtttacgccgccagacggagacgggagcataacaatcgaccggctgactgtggg

SEQ ID NO: 3653 - protein, 663 aa, Betatorquevirus sp.
MARYYYRRRWTPRWRTRYRWFRPWRIRAPLRRTRRRKRRRVRRKKPFLPLKQWQPKYIHKLTVKGLFCLLQVHKVDYNQNFNQYANTVTAEGLSNGGGFTLVRFNLNSLFEQHEKARNYWTKSNRNMPLFRYTGCCIKVYRPEYIDLVIKFQRCYPMCCTKLMYTGCQPSLLMMSRGSKLIRCRQNAPNSRPYKKFKFKPPEQMLNKWYFQHNESQTGLIMIQAAAASFSNYYTSSHAESSSITLWGINTRIFQNLNFQTKNTQGYNPKTQFYLYATNGEEKLKDIIYLGQSQLYNEGIPIKETPGYTPSNWTQTLTNYFSNPKNWGNPFHQEHAHKIYGKYYFSQTPPLQTLKGNTHTGEEKINSVQALKEFTQEIFVKFRYNPFTDTGYNNIYILPNFQDNNDNLEPPEDIDLQNPGFPNWLSCFGFRDYLIKLGKKPRITQDWVVLIKTNHIYPKETYYMLIDEYFLHGDSDKYKGRTDWDNEHWYPNFTHQQGALNTLALCGPGAPKLGDIKLAEAKIEYQFYFKVGGCATPAEKITDPATQPTYVTPTNILDTNSLQSPEESIESFLYQFDWRRHQITETAAKRITKDFPTKTHLFTDAGSSSTEVPFIETYKEELETSEEEEAQKETLFEQLQRQRHKQKDLRLRIKHLLNQLQKLE

SEQ ID NO: 3654 - protein, 92 aa, Betatorquevirus sp.; identical to SEQ ID NO: 3496

SEQ ID NO: 3655 - DNA, 2827 bp, Betatorquevirus sp.
cggctgaatttgggcgggtgctgaaggtgaatcaaggggcaattcgggctaattcagtctggcggaccgggcaagaaacttaaaaatatttattttacagatgagcaaataccaaaaaccaactctttacaacagcagaggacttcaaaatggctggataaatttagtatatggaacccacgaccagatttgcggctgcaacgaccctattgctcacctaaacgacctaattaacaaacaaaaatgcccccgttcagaagaaacttctactaccgtcgcaactactggaattacagaaacccaagacgcaggtttcgaagacggagacctagaaaaactcttcgcagaagatacccaagacaaagaagggtaagaaaacgcttttatactaaaagacttaagaaaaaacttaaaaaaataactttacaacaatggcaacctactacaattaaaaaaagccatgttaaaggatacttaatattatttgaaggtgcaaaaggacacctaggaaacaattatactcaatataaagaaagttttgtacctccacgaacaccaggaggaggaggatggtcaatccaacaacttggacttggcaatttatttatacaaaatgaatattttatgaactggtggactgtatcaaatagaggcttaaatatggttagatatcacggatgtaatattaaattgtatagacaaaaaactacagattatatatttacttactttactgaaaaaccagaacatgcagataaattttggtttccaacatttcatcccatgagattattactagacaaacgtagagttatagttcccagtttacaaactcaaccattaaaaagaaaattatacaaaagaattcatattagaccaccaaaaatgctgcaaactaactggtattttcaacaaaacattagtacattcccattaatttactttgcagctacagcctgtgacttaaaccatatgtttataagtagtaaagcagaaaactcaaacatatcaataccaactttaaacacaggcttttttcaacaatcttgctttcaatataatggaaattacggttaccaaccaaaaacaaatgtgtatgtgtatggtttagaaaatggtgaaatagacattaaacaagaacccagaagaaatgtaatttacctaggaaatactcatgttagagacccaggcctaaaaataggtccaaacggctgggaaacatacaaacaaaaaaaagaacaatggggaaatatattttatcatgaatactttggcttatacaaaacagtatttctaggtccagaaccatcaacttggttaaataaaacaaacatgaataaaaaaataggagaccccgacggctcctcagctcccccaattacaactaaagtagaacccttatattttgaatttcgctacaatccatataaagataaaggtaatggaaatgtagcctactggaaatcagtttctgactttactaaaaataattgggatgaaccccaaaacccaaatctaattatacgaggatacccattttggctaatgttatggggttgggaagatcatacaagaagattatctgaaattagaaacttagatgacaattatatgctagttttacgatcatcatactttaataacaatttacaagcagtagttccaataagcttttcttttattaacggaagagctccctataacaatgacccagaagatataacacccacagacctaagaaactggtttcctaaatggcaatttcaaaaagaagttatagatgctttattaatgtcaggcccaggagtagtaagagcagaaaacgatacaagcatacaggcatttatgaaatatgatttcttttttaagtggggaggagaaccagcaacaatggaaagcattgcagacccaaacagccaaccaattacacctttgccccgtgaactctttacaacaaatgaaatcactaatccaacagaatccattcaaaacctcatctacaagtgggactgtagacgtgacctacttacgcaaacagcttacaaacgaatatcagaatgcacaactgatgacaaacctttgttcacagatggaagacaaacttcaacggacatcccacaaacaacacaaacaccgacctcgcaaacaaccacggaaaaagaaaaagagacattactcctccagctcaaccagctccaacaactcaaccaacaactccagcacagattccagcaactaaaaacattaacacaggaataataaactttacttgtattaaaagagcatatctttttgaacctaaaaaaacaaaactaacacctataagagggagggactgggaagatgaattatggcttgctaaaaaatttaaaagaccaatgcgtaaatttttagaagataaaccaatatatccatggtgtgttcctgaacccattgttaactttgaccttgtaaaaggatttaataaaggccagcattaattcacacttagtgtctgtttctttaagtaaaaccttactaaaccaacaccgcctccctaatacgcaggcgcagaagggggctccgcccccttaaacccccagggggggaaaccccccctaacccccccaccttataaatattcataaaggaaaccacaaaattagaattgccgaccacaaactgtcactaacttccctatttttgctgacttccgtttttactcataaatattcatacaattaattattacacagcgtaaatccggggaggagccacttacctatataactaagtacccagacgaatggctgagtttatactgccagacggagacgcgacaacttcg

SEQ ID NO: 3656 - protein, 671 aa, Betatorquevirus sp.; identical to SEQ ID NO: 3650

SEQ ID NO: 3657 - protein, 104 aa, Betatorquevirus sp.; identical to SEQ ID NO: 3651

SEQ ID NO: 3658 - DNA, 2826 bp, Betatorquevirus sp.
cgggagccggaggtgagtgaaaccaccgtagtctaggggcaattcgggctagggcaattcgggctagatcagtctggcggaacgggcaagaaacttaaaatatttttaattacagatgtcaaagtttttacaaccaacttcatacaatggacgccaacaagaaaccaactggataaacttcaacattcactttcatgactccttctgtggatgccctgaacccctaacacacctaagacacctactaaaccaacaatgccaccatatcaaagacgccgctacttctacagaaactggtggaattcaagaagaaaacgatattggaatcgacgatggagacctagaaagactgttcgcaatcgaaaacgaagacaacgacgggtaagaagacgcttttataaaaaaaatagaaaacttaaaagactaagaataaatgaatggcaacctagctcaattaaaaaatgtaaaatagaaggatacctagtactgtttcaagcgggatacggacgctattctaataactatccattatggaaagaagtaatatttccacctcattatccaggtggaggtggatggggaatacaacaattaaacctaggaaatttatatactcaacataaagaacttatgaactactggactaaaagtaatgatagaatgaatatgtgtagatatatgggtgtaacacttacattatttagagagcaacacacagactggatattctcatactatgactcattaccaaaaacagtaacaaaatatttttacacctcacatcaccctatgcttatgcttacacacaaaagaaaaaaaacaataccaagttttgactcccagccacacaaaagaaaaccatacaaaaaaatatttgtaagaccaccaagactaatgagaaaccaatggtactttcaacaacaattagcagattttcctttactaacatttgccgcttcagcatgcagtcttcaaggcatgtttggatctataaactcagtaaacaataatgctacaatgtactgcatagaccacgcagtatttacaaaacctatatttcaatacaaaacacaaacacatccagaatggggctacaggcctagtgacaccatttacctatacggcctacaaaatggagcacacatttttactgaaaaccaatacaaagacagcatttacctaggaaacacaatgaacaatcaaagaggtgctgttattaacagttacaaagagccagaatttacaaaaaaatacccctttggagaatggggaaacccttttttttggggatacatgacaggaaacttaacagttttccaaaacaatacagaccccaaaaccatggcaacaaaccctacacaaaaactaaaacaaagctggttaagagaaaacccttatgtttttaaagtcagatacaacccttttaaagataaaggacgaggaaaccaagtatactttgtaccaaattatgactccagccataacacatgggaacccaccaaagacccagatattctgttcgaaaattacccactatggttattactatggggcctagaagatatagttaaaagaatgggaaaatgcaaaaacctagacaatgactggactctagtaataaaatctaattggatactgccaccacaagcatactatataccagttagttatgactttgtacatggcagaggcccatatgatacagaaagagaagaaatgtctagagatgactatactaactggtaccctagatttaaataccaaagacaagcaatacaaaatattataatgacagggcctgctgttgctagaggagactatgctaaaaacatacaagctaaattgaaatatacttttcattttaagtggggaggcaactccgaaccgcaagaatcagtatttgacccaaccaaccaaccaattacacctgcaccccctaacatctacagcatccatgaaatcacaaatccgaattcaagcattacgggagaaatctacccatgggatttcagacgagatatgcttacaacaacagctacagaaagaattagacaaagcccaactaatgaaacatatatgttcacagatggagacgaaacttcaacagacctcaaaatctacacaccggagacacaaaaggaaaagaccccgaaaacacaaaagaaaacacttctcgagcagctccagctcatccaatcctacaaccaacagctccaactcagattcagaaaactaaaacaattatcaaaggacccataaaccaagtacaattgtttccaaaatacaaaaacagaagatttaaaccctatgaatttgaattagaattaacaatggctaaaatttttcacagacgccctagacattacttctatgatatgccaacttatgactggttaccccctgaacctaaagtaaactttgaccttgtacatggatttaataaaggccagcattaattcacttgaggtgtccgtttatttattattaaacttaactaaacatccaccgcctccccaatacgcaggcgcaaagggggctccgcccccttaaaccccccgggggggaaacccccccgaaccccccccaactcattaatattcaacaggaaaaccacctaatttaaattgccgaccacaaaccgtcaactagttcccctttttataaaacttcccgttttactcataaatattcattgtattaattattaatcaccgtcacaagaggaggagcaaccacaactataaaacaaacaacactttcgaatggctgagtttatgctgccagacgtagacagcaagcacgcagtgactgctgactgatcttggg

SEQ ID NO: 3659 - protein, 667 aa, Betatorquevirus sp.; identical to SEQ ID NO: 3364

SEQ ID NO: 3660 - protein, 89 aa, Betatorquevirus sp.; identical to SEQ ID NO: 3361

SEQ ID NO: 3661 - protein, 61 aa, Betatorquevirus sp.; identical to SEQ ID NO: 3362

SEQ ID NO: 3662 - DNA, 2826 bp, Alphatorquevirus sp.
ctcgggactggccgggctatgggcaaggctcttaaaaaagccatgtttctcggtaaactttacagaaagaagaggcacctgtcactgtccccactgcacactccacagaaagctcgcaggcttctgactaatatgtggagaccccccacttacaatgtacaaggccaagaaaggcagtggtacgactcatgctttaggtctcacgctgctatgtgtggctgtggcgattttatcaggcatctttgtcatcttgctgataattttggacgccctccaactgtccctcggcctcccgcacccacacctccagtaaggccactgccagctctcccggcacctcccaatccctccggtagcagagcggcatggcctactggtggtggagacggagaagacgagccccgtggaggaggagacggcgctggaggactcgcagaactcgcagacgaagagctgctttccgccgccgtggacgtcgccgaagagtaagaaagaggagggggaggtggagaaggacttatagaaaatggcggaggggcaaaaacagacgcaggcacaagagacgcttaatactaactcagtggcaacccgcctttataagacgctgctatatagtgggctacctgcccctcataatctgcggagaaaacacctccgccagaaactttgccacccactcagacgaccttatatccaacggaccgtacggggggggcatgactaccaccaaatttactctcagaatactatatgacgaacacctcaggcaccttaactactggactgtcagtaacgaggacctagacctgtgtagatacctggggggcaccttctacgcgtacagacaccccactgtagactttattatacaaatacacaccagtcccccctttctagacactccactcacgggtcccagcatacacccgggcatgctgatgctcacaaaacacaaaatactaataccaagcctaaaaaccagacccagcaagaaacacaaagtaaaaattagattcagaccccctaaactatttcaagacaagtggtacccccagtcagagctttgcgacaccacactcataaccatctttgcaaccgcatgtgacctgcaatttccgttcggctcaccactaacgaacaacccttgcgtcaacttccaggtgctaggttccgtttacaaaaggcacctcagcatacttcctgacaaactgtcagcatatgaaagccactatgaaacaaacttatataacaatatacaactatatcaaacattccaaacaatagctcaaattaaacctagtgctcaacaaagtgacttttctcctacatggcaaagttgtcaaaatactagtaaccttacctacacaggcaataaccaaccacaatgtaatgacacttggtattatggaaagacttatacaaataaaattaaagaagcagctaagaaaattaaaacaaaatacttaaacgctacaaggttagccctaccagtactagcaacacatggacatgaactactagagtaccacacaggtatatacagttctatattcctatctgcaggcagaacatactttgaaaccacaggggcctacacagacataatttacaacccccttgtagacaaaggcataggaaacaaagtgtggctagaccccctaagtaaagaagacgcggtgctaaacagaaaacaggcaaaagtactgttagaagacatacccatatgggcagccctatttggatacacagaatttgcagctaaatacacaggagactctgccatatcagcaaactacagactgacaatacggtgcccctacacagaccccatgctagtagacagaaacaacgaagaccaaggctttgtgccctactctaagaactttggcaacgggaaaatgccaggagggtcctccaacgttccacttaccatgagaatcaagtggtaccccatattattccaccaactagaactcatggaagagctagtacagtctggaccgtttgcatacaggggcgacgaaaagatgtgtgtattagccataaaatataacttcagatggaaatggggaggtaaccctgtttctcaccagattgtgcgcaacccctgtaaaggagggtccggtgcccgtcgagagcctcgctcaatacaagcagttgacccgaaatacgtcacaccgacgctatccttccactcgtgggacttcagacggggactatttggcaaggcaagtattgagagaatgtcaagagaatcagaaactaatatctatcctacaggcccaccaagaaaaagaccaaaaagggacacggacccatacgactcgcagcaagaagaaaactcaatttcaagacacctccagctccagccgtggatccactccagtcaagaagtccaaagcgaagaagaaacgcaagtcccggaaaacctacaagaacaactcctccagcagctccgagagcagcagcagctccgactccatctacagtccctcgcctcgcaagtcctcaaaatcagggcgggatacgggatacaccccctattatcttcccaagcctaaacaaagtctatatgtttgaccccccaggtcctaagcccatacagggctaccatgactgggtggaagagtacaccgcctgtaaatattggaacaggccccccagaaagtaccacacagattttcccttctacccagacgtccccaaagtcccagaccagataagggtctcctttaagcttggctttcaataaacacacctgttcactgtactaggccgtgggagtttcacttgtcggtgtctacctctaaaggtcactaagcactc

SEQ ID NO: 3663 - protein, 731 aa, Alphatorquevirus sp.
MAYWWWRRRRRAPWRRRRRWRTRRTRRRRAAFRRRGRRRRVRKRRGRWRRTYRKWRRGKNRRRHKRRLILTQWQPAFIRRCYIVGYLPLIICGENTSARNFATHSDDLISNGPYGGGMTTTKFTLRILYDEHLRHLNYWTVSNEDLDLCRYLGGTFYAYRHPTVDFIIQIHTSPPFLDTPLTGPSIHPGMLMLTKHKILIPSLKTRPSKKHKVKIRFRPPKLFQDKWYPQSELCDTTLITIFATACDLQFPFGSPLTNNPCVNFQVLGSVYKRHLSILPDKLSAYESHYETNLYNNIQLYQTFQTIAQIKPSAQQSDFSPTWQSCQNTSNLTYTGNNQPQCNDTWYYGKTYTNKIKEAAKKIKTKYLNATRLALPVLATHGHELLEYHTGIYSSIFLSAGRTYFETTGAYTDIIYNPLVDKGIGNKVWLDPLSKEDAVLNRKQAKVLLEDIPIWAALFGYTEFAAKYTGDSAISANYRLTIRCPYTDPMLVDRNNEDQGFVPYSKNFGNGKMPGGSSNVPLTMRIKWYPILFHQLELMEELVQSGPFAYRGDEKMCVLAIKYNFRWKWGGNPVSHQIVRNPCKGGSGARREPRSIQAVDPKYVTPTLSFHSWDFRRGLFGKASIERMSRESETNIYPTGPPRKRPKRDTDPYDSQQEENSISRHLQLQPWIHSSQEVQSEEETQVPENLQEQLLQQLREQQQLRLHLQSLASQVLKIRAGYGIHPLLSSQA

SEQ ID NO: 3664 - protein, 156 aa, Alphatorquevirus sp.
MGKALKKAMFLGKLYRKKRHLSLSPLHTPQKARRLLTNMWRPPTYNVQGQERQWYDSCFRSHAAMCGCGDFIRHLCHLADNFGRPPTVPRPPAPTPPVRPLPALPAPPNPSGSRAAWPTGGGDGEDEPRGGGDGAGGLAELADEELLSAAVDVAEE

SEQ ID NO: 3665 - protein, 59 aa, Alphatorquevirus sp.; identical to SEQ ID NO: 817

SEQ ID NO: 3666 - DNA, 2826 bp, Alphatorquevirus sp.
ctcgggactggccgggctatgggcaaggctcttaaaaaagccatgtttctcggtaaactttacagaaagaagaggctcctgtcactgtccccactgcacactccacagaaagctcgcaggcttctgactgatatgtggagaccccccacttacaatgtacaaggccaagaaaggcagtggtacgactcatgctttaggtctcacgctgctatgtgtggctgtggcgattttatcaggcatctttgtcatcttgctgataattttggacgccctccaactgtccctcggcctcccgcacccacacctccagtaaggccactgccagctctcccggcacctcccaatccctccggtagcagagcggcatggcctactggtggtggagacggagaagacgagccccgtggaggaggagacggcgctggaggactcgcagaactcgcagacgaagagctgctttccgccgccgtggacgtcgccgaagagtaagaaagaggagggggaggtggagaaggacttatagaaaatggcggaggggcaaaaacagacgcaggcacaagagacgcttaatactaactcagtggcaacccgcctttataagacgctgctatatagtgggctacctgcccctcataatctgcggagaaaacacctccgccagaaactttgccacccactcagacgaccttatatccaacggaccgtacggggggggcatgactaccaccaaatttactctcagaatactatatgacgaacacctcaggcaccttaactactggactgtcagtaacgaggacctagacctgtgtagatacctggggggcaccttctacgcgtacagacaccccactgtagactttattatacaaatacacaccagtcccccctttctagacactccactcacgggtcccagcatacacccgggcatgctgatgctcacaaaacacaaaatactaataccaagcctaaaaaccagacccagcaagaaacacaaagtaaaaattagattcagaccccctaaactatttcaagacaagtggtacccccagtcagagctttgcgacaccacactcataaccatctttgcaaccgcatgtgacctgcaatttccgttcggctcaccactaacgaacaacccttgcgtcaacttccaggtgctaggttccgtttacaaaaggcacctcagcatacttcctgacaaactgtcagcatatgaaagccactatgaaacaaacttatataacaatatacaactatatcaaacattccaaacaatagctcaaattaaacctagtgctcaacaaagtgacttttctcctacatggcaaagttgtcaaaatactagtaaccttacctacacaggcaataaccaaccacaatgtaatgacacttggtattatggaaagacttatacaaataaaattaaagaagcagctaagaaaattaaaacaaaatacttaaacgctacaaggttagccctaccagtactagcaacacatggacatgaactactagagtaccacacaggtatatacagttctatattcctatctgcaggcagaacatactttgaaaccacaggggcctacacagacataatttacaacccccttgtagacaaaggcataggaaacaaagtgtggctagaccccctaagtaaagaagacgcggtgctaaacagaaaacaggcaaaagtactgttagaagacatacccatatgggcagccctatttggatacacagaatttgcagctaaatacacaggagactctgccatatcagcaaactacagactgacaatacggtgcccctacacagaccccatgctagtagacagaaacaacgaagaccaaggctttgtgccctactctaagaactttggcaacgggaaaatgccaggagggtcctccaacgttccacttaccatgagaatcaagtggtaccccatattattccaccaactagaactcatggaagagctagtacagtctggaccgtttgcatacaggggcgacgaaaagatgtgtgtattagccataaaatataacttcagatggaaatggggaggtaaccctgtttctcaccagattgtgcgcaacccctgtaaaggagggtccggtgcccgtcgagagcctcgctcaatacaagcagttgacccgaaatacgtcacaccgacgctatccttccactcgtgggacttcagacggggactatttggcaaggcaagtattgagagaatgtcaagagaatcagaaactaatatctatcctacaggcccaccaagaaaaagaccaaaaagggacacggacccatacgactcgcagcaagaagaaaactcaatttcaagacacctccagctccagccgtggatccactccagtcaagaagtccaaagcgaagaagaaacgcaagtcccggaaaacctacaagaacaactcctccagcagctccgagagcagcagcagctccgactccatctacagtccctcgcctcgcaagtcctcaaaatcagggcgggatacgggatacaccccctattatcttcccaagcctaaacaaagtctatatgtttgaccccccaggtcctaagcccatacagggctaccatgactgggtggaagagtacaccgcctgtaaatattggaacaggccccccagaaagtaccacacagattttcccttctacccagacgtccccaaagtcccagaccagataagggtctcctttaagcttggctttcaataaacacacctgttcactgtactaggccgtgggagtttcacttgtcggtgtctacctctaaaggtcactaagcactc

SEQ ID NO: 3667 - protein, 731 aa, Alphatorquevirus sp.; identical to SEQ ID NO: 3663

SEQ ID NO: 3668 - protein, 156 aa, Alphatorquevirus sp.
MGKALKKAMFLGKLYRKKRLLSLSPLHTPQKARRLLTDMWRPPTYNVQGQERQWYDSCFRSHAAMCGCGDFIRHLCHLADNFGRPPTVPRPPAPTPPVRPLPALPAPPNPSGSRAAWPTGGGDGEDEPRGGGDGAGGLAELADEELLSAAVDVAEE

SEQ ID NO: 3669 - protein, 59 aa, Alphatorquevirus sp.; identical to SEQ ID NO: 817

SEQ ID NO: 3670 - DNA, 2825 bp, Betatorquevirus sp.
cgggagccggaggtgagtgaaaccaccgtagtctaggggcaattcgggctagggcaattcgggctagatcagtctggcggaacgggcaagaaacttaaaatatttttaattacagatgtcaaagtttttacaaccaacttcatacaatggacgccaacaagaaaccaactggataaacttcaacattcactttcatgactccttctgtggatgccctgaacccctaacacacctaagacacctactaaaccaacaatgccaccatatcaaagacgccgctacttctacagaaactggtggaattcaagaagaaaacgatattggaatcgacgatggagacctagaaagactgttcgcaatcgaaaacgaagacaacgacgggtaagaagacgcttttataaaaaaaatagaaaacttaaaagactaagaataaatgaatggcaacctagctcaattaaaaaatgtaaaatagaaggatacctagtactgtttcaagcgggatacggacgctattctaataactatccattatggaaagaagtaatatttccacctcattatccaggtggaggtggatggggaatacaacaattaaacctaggaaatttatatactcaacataaagaacttatgaactactggactaaaagtaatgatagaatgaatatgtgtagatatatgggtgtaacacttacattatttagagagcaacacacagactggatattctcatactatgactcattaccaaaaacagtaacaaaatatttttacacctcacatcaccctatgcttatgcttacacacaaaagaaaaaaaacaataccaagttttgactcccagccacacaaaagaaaaccatacaaaaaaatatttgtaagaccaccaagactaatgagaaaccaatggtactttcaacaacaattagcagattttcctttactaacatttgccgcttcagcatgcagtcttcaaggcatgtttggatctataaactcagtaaacaataatgctacaatgtactgcatagaccacgcagtatttacaaaacctatatttcaatacaaaacacaaacacatccagaatggggctacaggcctagtgacaccatttacctatacggcctacaaaatggagcacacatttttactgaaaaccaatacaaagacagcatttacctaggaaacacaatgaacaatcaaagaggtgctgttattaacagttacaaagagccagaatttacaaaaaaatacccctttggagaatggggaaacccttttttttggggatacatgacaggaaacttaacagttttccaaaacaatacagaccccaaaaccatggcaacaaaccctacacaaaaactaaaacaaagctggttaagagaaaacccttatgtttttaaagtcagatacaacccttttaaagataaaggacgaggaaaccaagtatactttgtaccaaattatgactccagccataacacatgggaacccaccaaagacccagatattctgttcgaaaattacccactatggttattactatggggcctagaagatatagttaaaagaatgggaaaatgcaaaaacctagacaatgactggactctagtaataaaatctaattggatactgccaccacaagcatactatataccagttagttatgactttgtacatggcagaggcccatatgatacagaaagagaagaaatgtctagagatgactatactaactggtaccctagatttaaataccaaagacaagcaatacaaaatattataatgacagggcctgctgttgctagaggagactatgctaaaaacatacaagctaaattgaaatatacttttcattttaagtggggaggcaactccgaaccgcaagaatcagtatttgacccaaccaaccaaccaattacacctgcaccccctaacatctacagcatccatgaaatcacaaatccgaattcaagcattacgggagaaatctacccatgggatttcagacgagatatgcttacaacaacagctacagaaagaattagacaaagcccaactaatgaaacatatatgttcacagatggagacgaaacttcaacagacctcaaaatctacacaccggagacacaaaaggaaaagaccccgaaaacacaaaagaaaacacttctcgagcagctccagctcatccaatcctacaaccaacagctccaactcagattcagaaaactaaaacaattatcaaaggacccataaaccaagtacaattgtttccaaaatacaaaaacagaagatttaaaccctatgaatttgaattagaattaacaatggctaaaatttttcacagacgccctagacattacttctatgatatgccaacttatgactggttaccccctgaacctaaagtaaactttgaccttgtacatggatttaataaaggccagcattaattcacttgaggtgtccgtttatttattattaaacttaactaaacatccaccgcctccccaatacgcaggcgcaaagggggctccgcccccttaaaccccccgggggggaaacccccccgaacccccccaactcattaatattcaacaggaaaaccacctaatttaaattgccgaccacaaaccgtcaactagttcccctttttataaaacttcccgttttactcataaatattcattgtattaattattaatcaccgtcacaagaggaggagcaaccacaactataaaacaaacaacactttcgaatggctgagtttatgctgccagacgtagacagcaagcacgcagtgactgctgactgatcttggg

SEQ ID NO: 3671 - protein, 667 aa, Betatorquevirus sp.; identical to SEQ ID NO: 3364

SEQ ID NO: 3672 - protein, 89 aa, Betatorquevirus sp.; identical to SEQ ID NO: 3361

SEQ ID NO: 3673 - protein, 61 aa, Betatorquevirus sp.; identical to SEQ ID NO: 3362

SEQ ID NO: 3674 - DNA, 2825 bp, Betatorquevirus sp.
caggtgccgaaggtgagtgaaaccaccgaagtcaaggggcaatatgggctagatcagtctggcggaacgggcaagaaacttaatgtatactttctttacagatatgacacattacttaaaaacaccacaatacaatggacgcgcaatggaacttcaattaatgaatacaattattggaaaccatgatctctgctgtggatgcatgacaccagttcttcatattaaagaaataatcaacaccttttcatatacaccatgcccccgtactactggagacaaagaagaccaacatggagacaaagaaactaccgacgctttagaaggcctagaagatggagaattagatcgcttgttcgccgccgatggagaagacgacgaagggtaagaaacaaaagactgtttttccgacgaaaaaaactgactcgactgactttaaaagaatggcaacctaaaaaaattaaaaaatgttccataaaaggaatactacctgcattcatatgcggaaaatcaagaatagcaaacaactatatattattttcagaaagcatagtaccggtgggagaacccggaggaggggcctggtcaatactacaaataaacttaagagtattatatgaccaatttataaaatttaaaaactggtggactgctagcaaccaaggcctaccactaacaagatacttaggaatgaaagtgacattctacaaaactcaatttgtagactacatagttataccacaactatgccctccattttctgtaacaagagacaactacctaaacatacatccagttagaatgttaatgaacagacacaaaattataataccacaaagacaaaaaggaaagaaaaactacattaaaaaatggtttagaccacctgacttaatgcaaaacaaatggtatttccaacaagacatagtaaacataccacttatagtactacacatatcagcagcaagccttgaccaatatagtataccagaaaaccaaatatcaacaaacataacactttggtctctaaacacagacttctttagaaacaaccaattcacaggttatgaagactcaggatacataccaaaaacatttggaacacaaaactactatttatacactgaaggtaatggtgtttctcgcccaactaaattcagtcaaatgataccattaaaaaacacaacaacatatacaaacggaaaaaaagcagcaaccatagaaaactggaaagaaaacagttattggggtaatccatttacacaaaaccacgctagtccagatgtaccaatttactacaacaacacaacacccagcgaaaacaactacagcacaccacaaacattcaccccattacatgaactctacttccaatgcagatacaatccagaaaaggacacaggcataggtaacaaagtattttttaaatcaaacaaactaaaacaaggagaaattgacactattccagacaaagacgaaatagttataacagactttccactatggttaatattttactcttggattagctggatacaaaaaagcaaacctatacaacatataatgaatgactactactttattgttataacaccatttatagaaccaaaaagaaaaagctacctatttttagacacttactttgtacagccaataacaaacagattaacagaaacagaaaaacaacactggtatccacaaactggataccaaacagatgtaatttttagctttgcacaaacaggcccagcaacacctaaaatagatagatcacaatcaatacaagcacaatttaaatacaatgtaaaactaaaatggggcggatgtcctgcaccaatggaactaataactgatccatcattacaggacaaatttcccatccccaatacaatcttcaaaacacttgagatccaaaatccagaaacaaacaaaaggactctactgtacgacttcgacgaaagacatgacggacttacggacagagctgcaaaaagaattaaaacagaacaaatatttgaaacatcttttacaggacaactaccaacagatcccaatatcaggatccaaacacaagaaacgacctcatcgtcggaggaagaaagcgaagtatcactcaaggaggagctcaagctcctcaagcgaaaaaacaagcagctcagaaacaagctcctcagactaacatcttactaaaaccaaaaattatatacgctccatacactatgtttggagacaaagccactaaaaaactaacacctattaagggtaaaagttgggaggcagaacttcagttagctaaaatgttcaaaagaccacttagaacttatgaagaggaccccccatattatccctgggttgttcctgaaccagttgtaaactttcacttaaattttaaagaataaaggccagcattatttcacagtcggtgtccgtttctttaagttaaaacttatataaacatccattacctccctaatacgcaggcgcacaagggggctccgcccccttaaacccccaagggggctccgcccccttacaccccaagggggctccgcccccttacacccccaagggggctccgcccccttacacccccttattaatattcaacaggaaaaccacctaatttaaattgccgaccacaaacggtcttttatttcctcattcacacaatacttcctctttacctaattattattcattacattaattaataatcaccatcacaaagggcggagactgctatctatataactaactacacagacgaatggctgagtttatgccgccagacggaggactcatcacttcagtgactgaggactgatcttggg

SEQ ID NO: 3675 - protein, 642 aa, Betatorquevirus sp.
MPPYYWRQRRPTWRQRNYRRFRRPRRWRIRSLVRRRWRRRRRVRNKRLFFRRKKLTRLTLKEWQPKKIKKCSIKGILPAFICGKSRIANNYILFSESIVPVGEPGGGAWSILQINLRVLYDQFIKFKNWWTASNQGLPLTRYLGMKVTFYKTQFVDYIVIPQLCPPFSVTRDNYLNIHPVRMLMNRHKIIIPQRQKGKKNYIKKWFRPPDLMQNKWYFQQDIVNIPLIVLHISAASLDQYSIPENQISTNITLWSLNTDFFRNNQFTGYEDSGYIPKTFGTQNYYLYTEGNGVSRPTKFSQMIPLKNTTTYTNGKKAATIENWKENSYWGNPFTQNHASPDVPIYYNNTTPSENNYSTPQTFTPLHELYFQCRYNPEKDTGIGNKVFFKSNKLKQGEIDTIPDKDEIVITDFPLWLIFYSWISWIQKSKPIQHIMNDYYFIVITPFIEPKRKSYLFLDTYFVQPITNRLTETEKQHWYPQTGYQTDVIFSFAQTGPATPKIDRSQSIQAQFKYNVKLKWGGCPAPMELITDPSLQDKFPIPNTIFKTLEIQNPETNKRTLLYDFDERHDGLTDRAAKRIKTEQIFETSFTGQLPTDPNIRIQTQETTSSSEEESEVSLKEELKLLKRKNKQLRNKLLRLTSY

SEQ ID NO: 3676 - protein, 108 aa, Betatorquevirus sp.; identical to SEQ ID NO: 3448

SEQ ID NO: 3677 - protein, 59 aa, Betatorquevirus sp.; identical to SEQ ID NO: 3449

SEQ ID NO: 3678 - DNA, 2824 bp, Betatorquevirus sp.
cgggagccggaggtgagtgaaaccaccgtagtctaggggcaattcgggctaggcaattcgggctagatcagtctggcggaacgggcaagaaacttaaaatatttttaattacagatgtcaaagtttttacaaccaacttcatacaatggacgccaacaagaaaccaactggataaacttcaacattcactttcatgactccttctgtggatgccctgaacccctaacacacctaaaacacctactaaaccaacaatgccaccatatcaaagacgccgctacttctacagaaactggtggaattcaagaagaaaacgatattggaatcgacgatggagacctagaaagactgttcgcaatcgaaaacgaagacaacgacgggtaagaagacgcttttataaaaaaaatagaaaacttaaaagactaagaataaatgaatggcaacctagctcaattaaaaaatgtaaaatagaaggatacctagtactgtttcaagcgggatacggacgctattctaataactatccattatggaaagaagtaatatttccacctcattatccaggtggaggtggatggggaatacaacaattaaacctaggaaatttatatactcaacataaagaacttatgaactactggactaaaagtaatgatagaatgaatatgtgtagatatatgggtgtaacacttacattatttagagagcaacacacagactggatattctcatactatgactcattaccaaaaacagtaacaaaatatttttacacctcacatcaccctatgcttatgcttacacacaaaagaaaaaaaacaataccaagttttgactcccagccacacaaaagaaaaccatacaaaaaaatatttgtaagaccaccaagactaatgagaaaccaatggtactttcaacaacaattagcagattttcctttactaacatttgccgcttcagcatgcagtcttcaaggcatgtttggatctataaactcagtaaacaataatgctacaatgtactgcatagaccacgcagtatttacaaaacctatatttcaatacaaaacacaaacacatccagaatggggctacaggcctagtgacaccatttacctatacggcctacaaaatggagcacacatttttactgaaaaccaatacaaagacagcatttacctaggaaacacaatgaacaatcaaagaggtgctgttattaacagttactcacagtcagaatttacacaaaaatacccctttggagaatggggaaacccttttttttggggatacatgacaggaaacttaacagttttccaaaacaatatagaccccaaaaccatggcaaaaaaccctacaaaaaaactaacacaaagctggttaagagaaaacccttatgtttttaaagtcagatacaacccttttaaagataaaggacgaggaaaccaagtatactttgtaccaaattatgactccagccataacacatgggaacccaccaaagacccagatattctgttcgaaaattacccactatggttattactatggggcctagaagatatagttaaaagaatgggaaaatgcaaaaacttagacaatgactggactctagtaataaaatctaattggatactgccaccacaagcatactatataccagttagttatgactttgtacatggcagaggcccatatgatacagaaagagaagaaatgtctagagatgactatactaactggtaccctagatttaaataccaaagacaagcaatacaaaatattataatgacagggcctgctgttgctagaggagactatgctaaaaacatacaagctaaattgaaatatacttttcattttaagtggggaggcaactccgaaccgcaagaatcagtatttgacccaaccaaccaaccaattacacctgcaccccctaacatctacagcatccatgaaatcacaaatccgaattcaagcattacgggagaaatctacccatgggatttcagacgagatatgcttacaacaacagctacagaaagaattagacaaagcccaactaatgaaacatatatgttcacagatggagacgaaacttcgacagacctcaaaatctacacaccggagacacaaaaggaaaagaccccgaaaacacaaaagaaaacacttctcgagcagctccagctcatccaatcctacaaccaacagctccaactcagattcagaaaactaaaacaattatcaaaggacccataaaccaagtacaattgtttccaaaatacaaaaacagaagatttaaaccctatgaatttgaattagaattaacaatggctaaaatttttcacagacgccctagatattacttctatgatatgccaacttatgactggttaccccctgaacctaaagtaaactttgaccttgtacatggttttaataaaggccagcattaattcacttgaggtgtccatttatttattattaaacttaactaaacatccaccgcctccctaatacgcaggcgcaaagggggctccgcccccttaaaccccccgggggggaaacccccccgaacccccccaactcattaatattcaacaggaaaaccacctaatttaaattgccgaccacaaaccgtcaactagttcccctttttataaaacttcccgttttactcataaatattcattgtattaattattaatcaccgtcacaagaggaggagcaaccacaactataaaacaaacaacactttcgaatggctgagtttatgctgccagacgtagacagcaagcacgcagtgactgctgactgatcttggg

SEQ ID NO: 3679 - protein, 667 aa, Betatorquevirus sp.
MPPYQRRRYFYRNWWNSRRKRYWNRRWRPRKTVRNRKRRQRRVRRRFYKKNRKLKRLRINEWQPSSIKKCKIEGYLVLFQAGYGRYSNNYPLWKEVIFPPHYPGGGGWGIQQLNLGNLYTQHKELMNYWTKSNDRMNMCRYMGVTLTLFREQHTDWIFSYYDSLPKTVTKYFYTSHHPMLMLTHKRKKTIPSFDSQPHKRKPYKKIFVRPPRLMRNQWYFQQQLADFPLLTFAASACSLQGMFGSINSVNNNATMYCIDHAVFTKPIFQYKTQTHPEWGYRPSDTIYLYGLQNGAHIFTENQYKDSIYLGNTMNNQRGAVINSYSQSEFTQKYPFGEWGNPFFWGYMTGNLTVFQNNIDPKTMAKNPTKKLTQSWLRENPYVFKVRYNPFKDKGRGNQVYFVPNYDSSHNTWEPTKDPDILFENYPLWLLLWGLEDIVKRMGKCKNLDNDWTLVIKSNWILPPQAYYIPVSYDFVHGRGPYDTEREEMSRDDYTNWYPRFKYQRQAIQNIIMTGPAVARGDYAKNIQAKLKYTFHFKWGGNSEPQESVFDPTNQPITPAPPNIYSIHEITNPNSSITGEIYPWDFRRDMLTTTATERIRQSPTNETYMFTDGDETSTDLKIYTPETQKEKTPKTQKKTLLEQLQLIQSYNQQLQLRFRKLKQLSKDP

SEQ ID NO: 3680 - protein, 89 aa, Betatorquevirus sp.
MSKFLQPTSYNGRQQETNWINFNIHFHDSFCGCPEPLTHLKHLLNQQCHHIKDAATSTETGGIQEENDIGIDDGDLERLFAIENEDNDG

SEQ ID NO: 3681 - protein, 61 aa, Betatorquevirus sp.; identical to SEQ ID NO: 3552

SEQ ID NO: 3682 - DNA, 2824 bp, Betatorquevirus sp.
caggtgccggaggtgagtgaaaccaccgtagtcaaggggcaatatgggctatgtcagtctggcggaacgggcaagaaactaaataatattattttacagatgtccattttctggaaaccaacaccatttggacccagagaaagagaaaaccaatggattaactactgcattcaaggacacgaccaaatttgcggctgtgactcacccggagaccacctactttactgccttgctgaaagaagtggaaaacttaatatttccaaaaacatactagaagaatcaacaaaatgccttactacccacgctggagacgacgccgctactggagaacaagacgccatagaccttctagatggagacctagaaaaattattcgaagaagatatcgccgatcctactactgggtaagaagacgccgctttcttaaaaaactatttaaaataactcttaaacaatttcaacctagaaaaattattaaatgtaaaatacaaggtgaaatatgcttatttcaagcaggaaaaggacttatatttcaaaactatgctcaatatcaagatagctttgtacctgagggagaaccgggaggagggggatggtcagcactagtttttaacttaggaggactttaccaagaaaatcaaaaactacacaatagatggtctaaatctaacaaaggcctgccactagctagatacaatggctgtaaatttaaattttggagatcttgggacacagactacataatacactggcaaacatgtccaccaatgacagacacagaactcttacacttaaacgcacaaccctttatgacaatgctaacaaaaaatcattttatagttccaaacttaacaagaccaccatacacaaaaaaaccctactttactaaaagatttccaccaccctcacaattaacaaacaaatggtactttcaagaagacatttgcaacacaggattactactcctaaccacaagtgcaatgtcacttgaccaatggtttttacctaacaacgaactaagcaacaacattacactaacagcccttaataccacattctttcaaaactctaacttccaagttagaggcacaaaaggttaccaaccaaaatctaacttatatatatatggacaaggaaacggtagtgaagatccaacatgggaagacttaacatacttaggaaatgcagagtggtaccaagaaggacaaaaaatgtcttcaactaatttaaacgactttacaacatggggaaacatttttcatgcacaacacgtacacgcagacacacacgtttactacggaaccacatttccagagcccacaaaaatacatacaacagcacaaaatataacaaaactagattacttataccacacatgcagatacaaccctaacagagacacaggcgaaggaaacgaagtattttttgttagcaactctattaaccccaaactaatctttgatccaccaaaagacccagacctacacatctatggttatccactatggcttatagcctggggatgggcagactggcaaaaaaaattagctaaaatcaaccaaatagaacaaaactacatcatggtagccaaaactaaatttataagccccccactaccagcatatgtatttttagacaactattttactaacccagaaagatacgcagaacattacactgaaacagacaaaaaacacttttaccctaaatatgagtaccaaaaagaacaatggaacttaatagcacaatcaggaccagctgcacctaaaatagacaaaagccaatccatacaagccagagctcactactcatttttctttaagtggggaggctgcccagcaccaatggaagaagtcaaagacccatgccaacaaggaaaataccccatccccaattaccagttacaagcatctcaaatccaagatccaaaaacagacaaaagatcatttatctgggactttgacgaaagaagagaaacaattacccctaaagcagctaaaagacttaaacacatctcaacttttgaaactatattcacagatcgaccacccttcgacctccaattaccggaaaaggagacggaggaagaaacatcgtcagaggaagaaatccaaacatcactctcccacaaaatcgaccacctccaactcaagcacagactcctcagaagaaagctcaacagactaataaaacaaaaactttcaacattataaacaaaaactgtaaagttgaactatttccaacaaaaagacaaaacagacgcttttacaaacatgaactacaaactgagcgtgatttagctaacattttcaaaagacctatgagacattttattgatgatcctcccttttacccctggctccccctagagccaaaagtaaactttctgttaaactttaaagacaaataaacaaggccctattgattcactcttggtgtccgtttatattaatataaaacttaaataaacatccaccacctccctatcacacaggcctaggggctccgcccctagaaccccaagggggggggtaaacgcacaaccctttatgacaatgctaacaaaaaatcattttatagttccaaattaacatggctcaccacaaacgaacaggaaaaccactaaatttgcattgccgaccacaaactgaactatgctaatttacttcttctttttactacacacacccctaataaattaataatcaccatcatatcctaggcggagcttcaaatacatataactaactacactgacgaatggctgagtttatcacgccagacggcgaacgcatcacatcagtgactgcgagctgacattggg

SEQ ID NO: 3683 - protein, 641 aa, Betatorquevirus sp.
MPYYPRWRRRRYWRTRRHRPSRWRPRKIIRRRYRRSYYWVRRRRFLKKLFKITLKQFQPRKIIKCKIQGEICLFQAGKGLIFQNYAQYQDSFVPEGEPGGGGWSALVFNLGGLYQENQKLHNRWSKSNKGLPLARYNGCKFKFWRSWDTDYIIHWQTCPPMTDTELLHLNAQPFMTMLTKNHFIVPNLTRPPYTKKPYFTKRFPPPSQLTNKWYFQEDICNTGLLLLTTSAMSLDQWFLPNNELSNNITLTALNTTFFQNSNFQVRGTKGYQPKSNLYIYGQGNGSEDPTWEDLTYLGNAEWYQEGQKMSSTNLNDFTTWGNIFHAQHVHADTHVYYGTTFPEPTKIHTTAQNITKLDYLYHTCRYNPNRDTGEGNEVFFVSNSINPKLIFDPPKDPDLHIYGYPLWLIAWGWADWQKKLAKINQIEQNYIMVAKTKFISPPLPAYVFLDNYFTNPERYAEHYTETDKKHFYPKYEYQKEQWNLIAQSGPAAPKIDKSQSIQARAHYSFFFKWGGCPAPMEEVKDPCQQGKYPIPNYQLQASQIQDPKTDKRSFIWDFDERRETITPKAAKRLKHISTFETIFTDRPPFDLQLPEKETEEETSSEEEIQTSLSHKIDHLQLKHRLLRRKLNRLIKQKLSTL

SEQ ID NO: 3684 - protein, 102 aa, Betatorquevirus sp.; identical to SEQ ID NO: 3628

SEQ ID NO: 3685 - DNA, 2824 bp, Gammatorquevirus sp.
cgggagcccgaggtgagtgaaaccaccgaggtctaggggcaattcgggctagggcagtctagcggaacgggcaagaaacttaaaacaatactttgttttacagatgagcaattattctgcatctcacttttttaaaccaacaccttacaacaatgacaccaaaaatcaaatgtggatgtccatgatagctgatggacacgactgtatctgcaactgcaatagtccttttggccatctgcttgcttctatttttcctcctggtcatcaagaccgcctacttaccattgaagaaattattaacagagatattaaagaatgcctttctggtggagacgcaggagaaggccatggttcggccgctggagaaaatataaaaagagatacccaagaagaagaaggcgcccactttataaaagacgaagaactagacgccttaatcgccgcaggagaagacgccggtggaaggtaagaagaaaaaagaagagaattaatgtaacacaatggcagcctgagtctattagaaaatgtaaaataataggaatagaacctttgtgtgttggagctgaaggctcacaaatagactgctatactgtaactaaaacagactatgtaccaccaaaagtaccttggggagggggctttggattagaaaactttaccttaaaatacttgtactctgaatatcagtatcacaacaacatatggacaagtagcaacagtcaaaaagatttgtgtagatatacaggaggtaaatttatagtatttagacaccctacacaagactttgttataagctatgatatacaaccaccacataccttaaacaaattcacatttccaagctgtcacccacatcaacaactactatctaaacaccataaaattatacttagtcaagctagcaacccacatggaaaatattataaaaaaattaaatttaaaccacctaaacaaatgctaactaaatggttctttacaaaaacattttcaccagccagtttaatagtagtaaaagctgctgctgcaaactttcaacatgttaaccttagtggaaaaaataccaatatgctagtaacactgtattcacttaatttaggattttataaaaatcctgcatgggcattaaaacctgcaactggagggtattggcctcaaccatcagcaaaatctaactttccctatgttattaaaaacaaacaaggacaagaagtaaacaaaacaatgaaccttaccccctcatctgattattcagcaaccattaactactcaacaggctggtttaagtctgaatttttacaagctgtaaaattaggtacaattgaacaacccactgcattacaccagatagtagctggcagatataacccaaatatagatgatggctcaggcaatgaaatttactgtgccacaattgtaggcacaagttggcaaccacccgcaacagacaaacaactactaattacagatatgcctttatggctaggcctctatggttactactcctatattagagaaaccaaaaccgaagacttttggaaactacatgttatagtagttaaatcaaaagcaattcattgttacccagaaataggtagctgtgacagatatgtatttatagattgggattatatacaaggcaaaaaaccatatgaccaaactataacagacagagaaaaaacatactggtatccagacatgtcatggcaaaaaaaatcaatgaatgctatagttgaatcaggaccattcatacctaaattatcagaagaaacttacagtacctgggaacttaacatgagatattatttttattttaagtggggaggtgctaacacaggagaagcccaagttgaaaatccagaattgctacccacctatgatgttcccgattcaatgccaaaaacaatacaaattgttaacccagaaaaacaagctccagaaaccatcttacacccctgggactaccgcaggggatttattaaagaaacagctcttaaaagaatgtgctcaaacatcgaaactgatacagaatttcaataccctacagaacaagcaccaaagaaaagaaaaagagtacaagcaactcttccaaatccccaagaagaaaaccaagaaatcaagagctgtctcctctcactctgcgaaaaaagttcatcgcaagaggaggaagaaccagacctccacaagctcatcctcaagcaacagcacaagcaggaaaagctcaagtacaacatgttcaagctcctcctcgacttgaaagaaaaacagagaataatacaacaccacacaggactcctagaatgacaccctttaaaaaagggtttgaaatagaaacagaaaaagagttagcacaagcatttagtaggccacctagaatgtttaaagaagacactcctttttatccatggttaccaagacctgtaccccttgtaaactttcaccttaatttcaaattctaggcctacaacttacacttagtggagtatgtttatataagtcacacccccaaaaaaattgtaaaataaaaaaaaaaaaaaaaaaataaaaaattgcaaaaattcggcgctcgcgcgccccccccgcaccccccctacgtcacaggtcacgcccccgccgccatcttgggtgcggcagggcggagactaaaatggcggcacccaatcattttatactttcactttccaattaaaacccgccacgtaacaacaaaggggtggagactttaaaactatataaccaagtgaggtgacgaatggctgagtttaccccgctagacggtgcagggaccggatcgagcgcagcgaggaggtccccggctgcccatggg

SEQ ID NO: 3686 - protein, 661 aa, Gammatorquevirus sp.
MPFWWRRRRRPWFGRWRKYKKRYPRRRRRPLYKRRRTRRLNRRRRRRRWKVRRKKKRINVTQWQPESIRKCKIIGIEPLCVGAEGSQIDCYTVTKTDYVPPKVPWGGGFGLENFTLKYLYSEYQYHNNIWTSSNSQKDLCRYTGGKFIVFRHPTQDFVISYDIQPPHTLNKFTFPSCHPHQQLLSKHHKIILSQASNPHGKYYKKIKFKPPKQMLTKWFFTKTFSPASLIVVKAAAANFQHVNLSGKNTNMLVTLYSLNLGFYKNPAWALKPATGGYWPQPSAKSNFPYVIKNKQGQEVNKTMNLTPSSDYSATINYSTGWFKSEFLQAVKLGTIEQPTALHQIVAGRYNPNIDDGSGNEIYCATIVGTSWQPPATDKQLLITDMPLWLGLYGYYSYIRETKTEDFWKLHVIVVKSKAIHCYPEIGSCDRYVFIDWDYIQGKKPYDQTITDREKTYWYPDMSWQKKSMNAIVESGPFIPKLSEETYSTWELNMRYYFYFKWGGANTGEAQVENPELLPTYDVPDSMPKTIQIVNPEKQAPETILHPWDYRRGFIKETALKRMCSNIETDTEFQYPTEQAPKKRKRVQATLPNPQEENQEIKSCLLSLCEKSSSQEEEEPDLHKLILKQQHKQEKLKYNMFKLLLDLKEKQRIIQHHTGLLE

SEQ ID NO: 3687 - protein, 121 aa, Gammatorquevirus sp.
MSNYSASHFFKPTPYNNDTKNQMWMSMIADGHDCICNCNSPFGHLLASIFPPGHQDRLLTIEEIINRDIKECLSGGDAGEGHGSAAGENIKRDTQEEEGAHFIKDEELDALIAAGEDAGGR

SEQ ID NO: 3688 - protein, 111 aa, Gammatorquevirus sp.
LSPLTLRKKFIARGGRTRPPQAHPQATAQAGKAQVQHVQAPPRLERKTENNTTPHRTPRMTPFKKGFEIETEKELAQAFSRPPRMFKEDTPFYPWLPRPVPLVNFHLNFKF

SEQ ID NO: 3689 - DNA, 2824 bp, Gammatorquevirus sp.
cgggagcccgaggtgagtgaaaccaccgaggtctaggggcaattcgggctagggcagtctagcggaatgggcaagaaacttaaaacaatactttattttacagatgcaaaacctttctgcaaaagacttctacaaacctactccttttaattctgaaactaaaaaccaaatatggatgtcacaaatagctgatgcccatgacaatatctgtaactgcaaccatccttttgctcacctgcttgctagtatttttcctcctggtcataaggaccgtgatcttacaattcaacaaatcctgcaaagagactaccaagaacgatgccgttctggtggagacgcagacgaaaaccttggtttggccgttggagacgctataaaagaagatttacaaccagaaagagaagaagaagaccttataaaagacgaagaactgcaagatataatcgccgcaggagaagacgcagaaaatacaaggtaaggaaaaaaagaaaaaccttacctgttcaacaatggcagccagatagcataagaaaatgtaaaattaagggattaggactcctagtactaggagcagaaggaaaacaaatggactgctactctgtagaaaaacaaaaatatgtacctcctaaaacacctgggggaggaggatttggctgtgagacttacagtcttgaatacttatatgaccaatgggtttttcataataacatatggactcacacaaatattaacagagacttatgtagatatctttggtgtaaaattgtagttttcagacatcctcacacagactttgtagtacaatatgatagacaaccaccatttgacttaaccaaagaaacatatccttcatgtcacccacaacaaatgcttttacaaaaacatcataaaattattcttagcagagatagtaaacccaatggtagatattcaaaaaaatttattataaaaccacctaaacaaatgctaacaaaatggttttttacacatgaattttgtaaatatgatttatttcttataaaagctgcagctgccagttttagatttggatatctcagttgttgtaaccaaagtcaactggtaaacatttattcactaaataccttttggtatgaagatgctagctggggacaatctagatcaccagacacagcatacctacctagacccaacatacaaagacaactaaaataccaagtaaaaactaacacaggcacacaagatttaaccatggatgagtcagcctataacagcagagcagacagtctgtcctataaaaaaggatggtttaaatctaccttactacaagccacaggcatttatagtggagcaagtttaacagcaacaacacctatagtaggagctagatacaatcccaatatagacactggtaaaaacaacaagatatatttatcatccataacaaccacacactatgatccacctacacttgacaaatctatattgatagaaggcatgcctctatggcttggcctttatggctttttatcatatgtagaaactattaaaacagcaccaggatttctagatttacatgtagtactactacaatctccagctattttatgctcacaagcaccagaaagttgtaaaatttacctaccacttgaccttagctttataaaaggacaaaatccttgggaccaacctgtagttagaaaccatgaccttcaaaactggtacccctctataaaacatcaaagaaaagctttgaatgctataatagaatcaggaccatttataccaaaatatccagaaacaaaagacagtacatgggaattaaaaataaaatactcatttctttttaagtggggcggaccagaaaccacagatgaagttgttaaagacccatacacatttaccacatatgatgttcccgataaaatgccaaaaacaatacaaatacagaacccaacaaaacaaataccaggcagcaacttgtacccctgggactacaggagaggacttattaaaaacaaagctcttaaaagaatgcaagacaaccaatcaactgatacagagtttgaatatgttacagagggattgccaccaaaaaagaaaaagagacagggaaaccacctcagaaacccccaagaagaaacggaggaaatccaaacatgtctccaacagctcttcgaagaaaataccttccaagaaatccagacagaagaggacatacacctcctcatccagcagcagcaccagcagcagcagcaaatcaagagagacatcctcaagctcatcatgaacataaaacacaaacaaaacctcttgagtcttcacacaggaatgataacctaagatttaaacctggatttgaacaagaaacagaagaacaactagctagaatttttaaaagacctgtaagaacatttaagcatgatactcccttttatccctggttacctccatcacccattgtaaattttcaccttaactttaaaggctaggccttcaatgttcacttagtggagtttgtttaataaagtttgccccccaaaaaaaaaaaaaaaaaaataaaaaattgcaaaaattcggcgctcgcgcgcgctgccccgcaccccccctacgtcactaaccacgcccccgccgccatcttgggtgcggctgggcgggggctaaaatggcgggacccaattattttatactttcactttccaatgaaaacccaccacgtcacaacaaaggggtggagactttaaaactatatagccaagtggggtgacgaatggctgagtttaccccgctagacggtgcagggaccggatcgagcgcagcgaggaggtccccggctgcccatggg

SEQ ID NO: 3690 - protein, 667 aa, Gammatorquevirus sp.
MPFWWRRRRKPWFGRWRRYKRRFTTRKRRRRPYKRRRTARYNRRRRRRRKYKVRKKRKTLPVQQWQPDSIRKCKIKGLGLLVLGAEGKQMDCYSVEKQKYVPPKTPGGGGFGCETYSLEYLYDQWVFHNNIWTHTNINRDLCRYLWCKIVVFRHPHTDFVVQYDRQPPFDLTKETYPSCHPQQMLLQKHHKIILSRDSKPNGRYSKKFIIKPPKQMLTKWFFTHEFCKYDLFLIKAAAASFRFGYLSCCNQSQLVNIYSLNTFWYEDASWGQSRSPDTAYLPRPNIQRQLKYQVKTNTGTQDLTMDESAYNSRADSLSYKKGWFKSTLLQATGIYSGASLTATTPIVGARYNPNIDTGKNNKIYLSSITTTHYDPPTLDKSILIEGMPLWLGLYGFLSYVETIKTAPGFLDLHVVLLQSPAILCSQAPESCKIYLPLDLSFIKGQNPWDQPVVRNHDLQNWYPSIKHQRKALNAIIESGPFIPKYPETKDSTWELKIKYSFLFKWGGPETTDEVVKDPYTFTTYDVPDKMPKTIQIQNPTKQIPGSNLYPWDYRRGLIKNKALKRMQDNQSTDTEFEYVTEGLPPKKKKRQGNHLRNPQEETEEIQTCLQQLFEENTFQEIQTEEDIHLLIQQQHQQQQQIKRDILKLIMNIKHKQNLLSLHTGMIT

SEQ ID NO: 3691 - protein, 124 aa, Gammatorquevirus sp.
MQNLSAKDFYKPTPFNSETKNQIWMSQIADAHDNICNCNHPFAHLLASIFPPGHKDRDLTIQQILQRDYQERCRSGGDADENLGLAVGDAIKEDLQPEREEEDLIKDEELQDIIAAGEDAENTR

SEQ ID NO: 3692 - protein, 110 aa, Gammatorquevirus sp.
MSPTALRRKYLPRNPDRRGHTPPHPAAAPAAAANQERHPQAHHEHKTQTKPLESSHRNDNLRFKPGFEQETEEQLARIFKRPVRTFKHDTPFYPWLPPSPIVNFHLNFKG

SEQ ID NO: 3693 - DNA, 2823 bp, Betatorquevirus sp.
caggtgccgaaggtgagtgaaaccaccgtagtcaaggggcaatatgggctagttcagtctagcagaacgggcaactaacttaaattatattttacagatgagcaaatttctaaaagaacctgtatatcatggaaaagcaattgaaaatcaactaaccaactgcctaatttcatgccatgatctttgctgcggatgcctgaatccatttaaacacattcaacttttaattaatcaagcaacatgccattctacttcagaagaaacttctacaaaacaagaaaaagatacccctggagacaacaacgatggtttcgacgaaggagatctacaggccctattcgacgcaagcgacgacgccgaagggtaagaagaaataaacttaaatttaagaaacttaagcttaaaaaaattaaattagttcaatggcaacccagccacataaaaaaatgcaaaattaaaggaacatttcaactttttcaatgtggcaaaggcagagcaagccacaattaccaactatttaaagaaagtttagtacctccacatgaacccggaggaggaggatggtcttatatatactttagcttaaataatttatatacagaaaacaaaagactacaaaactggtggacgcggtccaacaaaggactacctttatgtagatttcaaggtgtaaaatttaaattttatagacaaccttttacagactatattgtaacatacagtaatgaatatccaatggaagttggaaaataccactaccctagcattcacccgcaaagaatgctaacatataaccatagaattattgttcccagctacaatactatgcctttgtggaaaaaaacttacaaaaaatgctttataaaaccaccaaaagaaatgatagataaatggtattttcaaaaccactttcaacgatatccattatgtatgctagccgttactgcatgtaatttactatcactatatgtatcaccaaatgccttaaataacaactgtactgtcaatgctttaaatacaaatttatttaaaagaaaaagctttcaatatccctcagtaacaacaggatactatcctaaagcttctgtatacttatatgcttcacctaatggagacgacgaaattacaaaaattgcaataaaagacataacctacctgggaaacccaggcccaaattttaaaggagaacctttaggagaaaacacacaaactcaatatactaaaactaaatggggcaacccgtttcattatgactatatgaatcaacaaagaaacattataataagtgaaaaacaatacatatattggttccaaaacccaagccaaaaacctaaagaaggaaatataaaacaaggtgaagctcaattttatacagaacctttatactatgaatgtagatacaatccatctgctgacacaggagatggaaatgaagcttattgggtatcaaacttaattgaagaagacggatgggaaacccaaaaagaccctgacttaattataaggggatttccattatggatattactatggggttggtatgactggacaaaaaaattagacaaaattaaacacgtagaaaatgactatgtattagtagttaaaacaaaatttataaaacctgtactaccacattatgttttcttaagtgaaagcttttgtatgggatctgccccctacaaacaacctctacatactatgtctccttttgaactaaatcattggtatcccagatacaaatttcaagaagaagcaatagaacaaatactaaatacaggaacaggagtatgtagatttgaccatgaacaacaaatacaagctcattgttattatcaattttattttaagtggggcggcaatccagcaacctttgaaacagtcgttgatccaaccacccaaccttactaccctgtgcccggtggaatcgttccagcaaatgagatcattgatccaagcacctctcccttgtccttcttctacaacttcgacacccgtagaaaccttattaaacaaacagctattgaaagaatacaaaacctcacagaccttgaaaactttgtgttcacagatggaacaaaccatacagaccaaacaacagaaacacaagaagcatcaccgaaaacagcccaggaaaaagaaacgcaaaaggagatactcctccagctccagcagtacaaactactcaaccaacaactcctgcagcgattccaacaactccgacaattagtggaagatacataatacataaatgtaaaaatgctgtaactctttttccacctaaagaacccaaaaatagacgctttaaacctcatgaactagaaactgaaaaacaattagcaactttgtttaaaagacctcttagaacctttattagagaccacccatattacccctatatacctcctgaacccttggtaaatcaaactaaagtgtgttttgatttaaactatcaataaactaggccaacagtaatacacttgtggtgtctgtttctttaagttaaaactaatataaacaagctccgcctccctaaaattcgggcgccaaaagggggctccgcccccttaaacccccggggggggccccccctaaaacttcctcttttactcatgaataataattaaccacaaaattagaattgccgaccacaaactgtcaaaaaaccacaacttcactttttccatagaccactcctaccaattaattaataatcatcgtcacaacttccctttttggacactgtatataagtaactacactgacgaatggctgagtttatactgctagacggagacgcgaatagacttcgcggctgaacttggg

SEQ ID NO: 3694 - protein, 666 aa, Betatorquevirus sp.
MPFYFRRNFYKTRKRYPWRQQRWFRRRRSTGPIRRKRRRRRVRRNKLKFKKLKLKKIKLVQWQPSHIKKCKIKGTFQLFQCGKGRASHNYQLFKESLVPPHEPGGGGWSYIYFSLNNLYTENKRLQNWWTRSNKGLPLCRFQGVKFKFYRQPFTDYIVTYSNEYPMEVGKYHYPSIHPQRMLTYNHRIIVPSYNTMPLWKKTYKKCFIKPPKEMIDKWYFQNHFQRYPLCMLAVTACNLLSLYVSPNALNNNCTVNALNTNLFKRKSFQYPSVTTGYYPKASVYLYASPNGDDEITKIAIKDITYLGNPGPNFKGEPLGENTQTQYTKTKWGNPFHYDYMNQQRNIIISEKQYIYWFQNPSQKPKEGNIKQGEAQFYTEPLYYECRYNPSADTGDGNEAYWVSNLIEEDGWETQKDPDLIIRGFPLWILLWGWYDWTKKLDKIKHVENDYVLVVKTKFIKPVLPHYVFLSESFCMGSAPYKQPLHTMSPFELNHWYPRYKFQEEAIEQILNTGTGVCRFDHEQQIQAHCYYQFYFKWGGNPATFETVVDPTTQPYYPVPGGIVPANEIIDPSTSPLSFFYNFDTRRNLIKQTAIERIQNLTDLENFVFTDGTNHTDQTTETQEASPKTAQEKETQKEILLQLQQYKLLNQQLLQRFQQLRQLVEDT

SEQ ID NO: 3695 - protein, 89 aa, Betatorquevirus sp.
MSKFLKEPVYHGKAIENQLTNCLISCHDLCCGCLNPFKHIQLLINQATCHSTSEETSTKQEKDTPGDNNDGFDEGDLQALFDASDDAEG

SEQ ID NO: 3696 - DNA, 2823 bp, Gammatorquevirus sp.
cgggagcccgaggtgagtgaaaccaccgaggtctaggggcaattcgggctagggcagtctagcggaatgggcaagaaacttaaaacaatactttattttacagatgcaaaacctttctgcaaaagacttctacaaacctactccttttaattctgaaactaaaaaccaaatatggatgtcacaaatagctgatgcccatgacaatatctgtaactgcaaccatccttttgctcacctgcttgctagtatttttcctcctggtcataaggaccgtgatcttacaattcaacaaatcctgcaaagagactaccaagaacgatgccgttctggtggagacgcagacgaaaaccttggtttggccgttggagacgctataaaagaagatttacaaccagaaagagaagaagaagaccttataaaagacgaagaactgcaagatataatcgccgcaggagaagacgcagaaaatacaaggtaaggaaaaaaagaaaaaccttacctgttcaacaatggcagccagatagcataagaaaatgtaaaattaagggattaggactcctagtactaggagcagaaggaaaacaaatggactgctactctgtagaaaaacaaaaatatgtacctcctaaaacacctgggggaggaggatttggctgtgagacttacagtcttgaatacttatatgaccaatgggtttttcataataacatatggactcacacaaatattaacagagacttatgtagatatctttggtgtaaaattgtagttttcagacatcctcacacagactttgtagtacaatatgatagacaaccaccatttgacttaaccaaagaaacatatccttcatgtcacccacaacaaatgcttttacaaaaacatcataaaattattcttagcagagatagtaaacccaatggtagatattcaaaaaaatttattataaaaccacctaaacaaatgctaacaaaatggttttttacacatgaattttgtaaatatgatttatttcttataaaagctgcagctgccagttttagatttggatatctcagttgttgtaaccaaagtcaactggtaaacatttattcactaaataccttttggtatgaagatgctagctggggacaatctagatcaccagacacagcatacctacctagacccaacatacaaagacaactaaaataccaagtaaaaactaacacaggcacacaagatttaaccatggatgagtcagcctataacagcagagcagacagtctgtcctataaaaaaggatggtttaaatctaccttactacaagccacaggcatttatagtggagcaagtttaacagcaacaacacctatagtaggagctagatacaatcccaatatagacactggtaaaaacaacaagatatatttatcatccataacaaccacacactatgatccacctacacttgacaaatctatattgatagaaggcatgcctctatggcttggcctttatggctttttatcatatgtagaaactattaaaacagcaccaggatttctagatttacatgtagtactactacaatctccagctattttatgctcacaagcaccagaaagttgtaaaatttacctaccacttgaccttagctttataaaaggacaaaatccttgggaccaacctgtagttagaaaccatgaccttcaaaactggtacccctctataaaacatcaaagaaaagctttgaatgctataatagaatcaggaccatttataccaaaatatccagaaacaaaagacagtacatgggaattaaaaataaaatactcatttctttttaagtggggcggaccagaaaccacagatgaagttgttaaagacccatacacatttaccacatatgatgttcccgataaaatgccaaaaacaatacaaatacagaacccaacaaaacaaataccaggcagcaacttgtacccctgggactacaggagaggacttattaaaaacaaagctcttaaaagaatgcaagacaaccaatcaactgatacagagtttgaatatgttacagagggattgccaccaaaaaagaaaaagagacagggaaaccacctcagaaacccccaagaagaaacggaggaaatccaaacatgtctccaacagctcttcgaagaaaataccttccaagaaatccagacagaagaggacatacacctcctcatccagcagcagcaccagcagcagcagcaaatcaagagagacatcctcaagctcatcatgaacataaaacacaaacaaaacctcttgagtcttcacacaggaatgataacctaagatttaaacctggatttgaacaagaaacagaagaacaactagctagaatttttaaaagacctgtaagaacatttaagcatgatactcccttttatccctggttacctccatcacccattgtaaattttcaccttaactttaaaggctaggccttcaatgttcacttagtggagtttgtttaataaagtttgccccccaaaaaaaaaaaaaaaaaaataaaaaattgcaaaaattcggcgctcgcgcgcgctccccgcaccccccctacgtcactaaccacgcccccgccgccatcttgggtgcggctgggcgggggctaaaatggcgggacccaattattttatactttcactttccaatgaaaacccaccacgtcacaacaaaggggtggagactttaaaactatatagccaagtggggtgacgaatggctgagtttaccccgctagacggtgcagggaccggatcgagcgcagcgaggaggtccccggctgcccatggg

SEQ ID NO: 3697 - protein, 667 aa, Gammatorquevirus sp.; identical to SEQ ID NO: 3690

SEQ ID NO: 3698 - protein, 124 aa, Gammatorquevirus sp.; identical to SEQ ID NO: 3691

SEQ ID NO: 3699 - protein, 110 aa, Gammatorquevirus sp.; identical to SEQ ID NO: 3692

SEQ ID NO: 3700 - DNA, 2822 bp, Gammatorquevirus sp.
cgggagcccgaggtgagtgaaaccaccgaggtctaggggcaattcgggctagggcagtctagcggaacgggcaagaaacttaaattatttttttattacagaatgaacagcttgactcctactgacttttaccaaccaacaaaatacaatcctgaaactttaaatcaaatatggatgtctacactgagtgacacccatgacatttggtgcgactgcaaaggtccttttgctcatctgcttgcttctatttttcctcctggtcatacagaccgtgataaaacaattaatcaaattattaaaagagactacaaagaagcatgcctttctggtggtccaggagaaaaaagccatggtatacaaactacagccggtacagacgcaggtataaaagaagaagatggcctagaaggagacgcagaagaattccttatggccgccgccgccgccgccgcagaagaaaaagaaaggtaagaagaaagagacaaagaattattgttaaacaatggcagccagaatcaatagttaaatgtaaaattaaaggcttgggttgtttagtagctggggcacaaggcagacagccattttgctataccaacagtaaatatgactaccctcaaccaaaagccccgggcggcggtggctttggagcagaactattctcactgcaatatttatatgatgaatgggtagccagaagaaacatatggactaaaagtaatgactataaagacttagtaagatttctaggggctaccttttatttatataaacacccaactacagactttatatttaactacaataatcaacctccatttttacttgagaaagacttttacaatgatttacacccacaaatgttacttcttgctaagcatcacagagtaataccaagcagagagagaaagccactaggcagaccatatattaaagttaaaataaagccacccaaacaaatgttaactaaatggttttttcaacaagactttgccaaacaagggctattttctatacacgcagctgctgcaaatatgcagtgggcatatttcaatccagaccaacaaagcagatgtcttactctgcactcactcaatataaaattttttcaaaatacagactggagtgcaacacacacaggtacacaaatgtattttccatacaatacatggccccacacctccgggttaaatttttggaccattgattcaaaaggcactaaaacacctcatttaataaaacctgaaaactatcatcaaagtgttaactatttaaaaggatttttttcacaatttgtactacaagcccaaaaaataacaaaagcagatgaaaataacccaaaagattatgatacctatccagcagcaatggcaacattaccaatagctacttttagatataatcctgaagaagacacaggccaaggcaatgtagtatggttaactagcaccctatccaacacacattgggaaagaccacaactatctgacttagtaattgttggaaaaccattgtggctagcattttatggctttgaaagttttatacaaaaaactaaacatgacaaaggatggctactatcaggaatttatgtatgtaaatgcccctacttaaaaacactgtcagccacaacacaacaaacatatgtatttattgacttagattttatacaaggcaaactaccatatggagaaacaatcacaattcaaaaacaagctctttggtaccccaatgtagaaaaccaagtgaacactgtagctaacttagtacaatgtggaccatacataccaaaatatgcttttcaagatcaaagcacatgggaactaacatataaatatattttttattttaagtggggaggtccttacacctcagaccagcctgttcaaaatcccacaacacaaggaaaataccctgtacccgatacaatctcacaagcaatacaaattagcaacccgctcaaacaaacctgtaaagcaatgcttagagactgggattacaggagggggattgttacaacaacagctcttaaaagaatgtcagaacacctccaaactgattcatctatccaatctgatgactcagaaactccaaaaaaaaagaaaaagacaacagcagaaataccctactaccaagaaaagacggaagagatccagagttgtctcctctcactcttcgaagaaagtacatgccaagaaccagaagacctccagcagctcatccttcaccagcagcagcagcagcaaaagctcaagtcaaacatcctcaaactcctaatggatttaaaacatcaacagagaattctacaacatcacacaggcatagaatgactgaatttaaacctggatttgaacaagaaacagaagaacagttagcacaagcatttaaaagaccagtgagaaaatttaaagaagaccccccattttacccctggttaccaattacaccaattgtatactttaaccttaactacaaatgctaggccgacactgttcacttagcggtgtctgtttaataaagtttgcaccccaaaaaaattgtaaaaaaaaaaaaaaaaaaaataggcagagcccccccccgcaccccccctacgtcacaaaccacgcccccgccgccatattgggtgcggcaggctgggggctaaaaaagcgggaaccaatcaatttgtactttcactttccaattaaaaactgccacctcactaacaaggggtggagactattaaactatataactaagtgcagtgacgaatggctgagtttaccccgctagacggtgcagggaccggatcgagcacagcgaggaggtccccggctgcccgtggg

SEQ ID NO: 3701 - protein, 669 aa, Gammatorquevirus sp.
MPFWWSRRKKPWYTNYSRYRRRYKRRRWPRRRRRRIPYGRRRRRRRRKRKVRRKRQRIIVKQWQPESIVKCKIKGLGCLVAGAQGRQPFCYTNSKYDYPQPKAPGGGGFGAELFSLQYLYDEWVARRNIWTKSNDYKDLVRFLGATFYLYKHPTTDFIFNYNNQPPFLLEKDFYNDLHPQMLLLAKHHRVIPSRERKPLGRPYIKVKIKPPKQMLTKWFFQQDFAKQGLFSIHAAAANMQWAYFNPDQQSRCLTLHSLNIKFFQNTDWSATHTGTQMYFPYNTWPHTSGLNFWTIDSKGTKTPHLIKPENYHQSVNYLKGFFSQFVLQAQKITKADENNPKDYDTYPAAMATLPIATFRYNPEEDTGQGNVVWLTSTLSNTHWERPQLSDLVIVGKPLWLAFYGFESFIQKTKHDKGWLLSGIYVCKCPYLKTLSATTQQTYVFIDLDFIQGKLPYGETITIQKQALWYPNVENQVNTVANLVQCGPYIPKYAFQDQSTWELTYKYIFYFKWGGPYTSDQPVQNPTTQGKYPVPDTISQAIQISNPLKQTCKAMLRDWDYRRGIVTTTALKRMSEHLQTDSSIQSDDSETPKKKKKTTAEIPYYQEKTEEIQSCLLSLFEESTCQEPEDLQQLILHQQQQQQKLKSNILKLLMDLKHQQRILQHHTGIE

SEQ ID NO: 3702 - protein, 122 aa, Gammatorquevirus sp.
MNSLTPTDFYQPTKYNPETLNQIWMSTLSDTHDIWCDCKGPFAHLLASIFPPGHTDRDKTINQIIKRDYKEACLSGGPGEKSHGIQTTAGTDAGIKEEDGLEGDAEEFLMAAAAAAAEEKER

SEQ ID NO: 3703 - protein, 107 aa, Gammatorquevirus sp.
LSPLTLRRKYMPRTRRPPAAHPSPAAAAAKAQVKHPQTPNGFKTSTENSTTSHRHRMTEFKPGFEQETEEQLAQAFKRPVRKFKEDPPFYPWLPITPIVYFNLNYKC

SEQ ID NO: 3704 - DNA, 2818 bp, Betatorquevirus sp.
cgggagctgaaggtgagtgaaaccaccgaaatctaggggcaattcgggctgaatcagtctagcggaacgggcaagaaacttaaaataacttttatttttacagatgagcaaactgcttaaagagccactatatcaaggaaaaaaccttgaaaattgctgggtaaacaattggcacagctctcacgaattattttgcggctgtaacaaagcccttcaacactttctggaaataattaatcgccaaaacaaagcaccaaagccaccacaagaaattaaaaatataatatgccttattactggagaaaaagaagacaaagatggagacgccgtagacaaccttatcgatggcgaactagaagaatttttcaaagacgaatttggagacaacgaaaaagaagaagaaactgggtaagaagacgcctttttaaaaaaaaactattatacatacctttaaaacaatttcaaccaaagactataaaacgctgtaatattattggaaatgtatgcttatttcaaggatctccttttagagctattaacaattatgtacaatacttatattcctatgtaccagatgatgaaccgggagggggaggatggactctaatggttgaaagtttaagtagcttatgggaagacttccaacacttaaaaaatatatggacacgatcaaacaaaggtttacctttagtaaaatacggaggagttacattaaccttttttcaaagtccatatacagactatgcagtacaaatatttagatgctacccaatgacagacacaaaataccaacatgcagacctagcaccaagtagaatgatgctaaaaaaagacgttattaagatcccaagcttagaaacaagaaaaaaaagaaaaccatacaaaagaatatatgtgccacccccttcccaaatgcaaaacaaatggtactttcaaaagcaaatttgtaatattcctttagtaatgatagcagcaactgctatagacttaagatatccctttgcatgcagtagcagcaaaagtaataacataacattaaaagcactaaaccccaacttatttcaaagacatgactttgatcacccatcagacacgttaggctactttcctaaatctaacacatacctatactccacaaaaggaataagtaccacagcaaaaccaacaaaaaaaagtcagctaatttacttaggtaacacaaaagacaatcaaccaggaaagggaatagataaattttcagactggggaaacccattctatcatgactacatagaccaaggtcacccagtatgggtatgcacaaaagctccaacacaactacaagaaactttagtagacactgactggacacaattatctcaaccatactttatagacattagatataaccctgaaaaagacacaggagaaggaaacagtattttcttagtaccaaactatgcaggacagcactgggataaaccgggtaaccaagacttaatattagaaggctttccgttatatgacatggtatggggatttactgattggcaaaaaaaaataaaagtagcaacaaacatagataactcatggatagttgtaataacatctccattttttaatgaacctcttacaagctatatatttatagacgaaagttttatagaaggatttgggccatatcacacaaaaaacattccaagacaacaccaacaacactgggcacctaaatttacttttcaacaaaaatcaataaacacaataggactatcaggacctgcagcacccagaccaccttatgacaattacatgcaagccagaatgaaatataactttcatgtaaaatggggaggatgccctaaaaagttagatgaaccttacgatccttgttcacagccagactggactatacccagtaacatcaatgagggattacaaatccaggatccagcaacagaccccaaaaccgaactccaagagtgggactggagacgagattatgttacagaaacagctattgctagaatccaagaacacacgccaactgatgtctctttacaaatccctacagaatccagacacatcgctccaatactacgccaaaccagggaaacaacgagttcatcggactcggactcagaaacggaaaaagagaaaacaccatcactccaggaacagatcaccctcctcaagcgaaagcagcgacagctcaagcacaggatcctccacagactagcacaccaaagtttagaataataaaagacaaaacagtagtagaactttttcctaaacctaaaccctttagaaaccgtagatttcacccctgggaagaacaaacagaagcagaatgtgctaaactgtttcaaagacctaaaagaacttttttttatgacacccctatatacccaatatttccaataactccacttgtaaattttgacctaaaatatgaataaacaaggccaacaatattcacttagtggtgtctgtttctttaagtttaactatactaaactgactccgcctcccaataatttgggcgccaaaagggggccccccccaataagttacaaaactttaagtaatacttacattaaccgcaaaatttgcattgccaaccacaaacagaacaggaaaccacaaaatttgcattgccgaccacaaacgtatatgctaattaacttccctaaaccatgcctgtacttccccaaaaattaattaataatcaccgtcataaaaggaggagcctacaaaatatataaccaagtgcactttcgaatggctgagtttatgccgctagacggagacgacacagacaactgcgtcggctgattcaggg

SEQ ID NO: 3705 - protein, 649 aa, Betatorquevirus sp.
MPYYWRKRRQRWRRRRQPYRWRTRRIFQRRIWRQRKRRRNWVRRRLFKKKLLYIPLKQFQPKTIKRCNIIGNVCLFQGSPFRAINNYVQYLYSYVPDDEPGGGGWTLMVESLSSLWEDFQHLKNIWTRSNKGLPLVKYGGVTLTFFQSPYTDYAVQIFRCYPMTDTKYQHADLAPSRMMLKKDVIKIPSLETRKKRKPYKRIYVPPPSQMQNKWYFQKQICNIPLVMIAATAIDLRYPFACSSSKSNNITLKALNPNLFQRHDFDHPSDTLGYFPKSNTYLYSTKGISTTAKPTKKSQLIYLGNTKDNQPGKGIDKFSDWGNPFYHDYIDQGHPVWVCTKAPTQLQETLVDTDWTQLSQPYFIDIRYNPEKDTGEGNSIFLVPNYAGQHWDKPGNQDLILEGFPLYDMVWGFTDWQKKIKVATNIDNSWIVVITSPFFNEPLTSYIFIDESFIEGFGPYHTKNIPRQHQQHWAPKFTFQQKSINTIGLSGPAAPRPPYDNYMQARMKYNFHVKWGGCPKKLDEPYDPCSQPDWTIPSNINEGLQIQDPATDPKTELQEWDWRRDYVTETAIARIQEHTPTDVSLQIPTESRHIAPILRQTRETTSSSDSDSETEKEKTPSLQEQITLLKRKQRQLKHRILHRLAHQSLE

SEQ ID NO: 3706 - protein, 102 aa, Betatorquevirus sp.; identical to SEQ ID NO: 2751

SEQ ID NO: 3707 - DNA, 2818 bp, Betatorquevirus sp.
caggtgccggaggtgagtgaaaccaccgtagtcaaggggcaatatgggctatgtcagtctggaggaacgggcaagacactaaaatacctttttttacagatgtcaattttttggaaaccaacaccatttggacccagagaaagagaaaaccaatggattaactactgcattcaaggacacgatcaaatttgcggctgcgactcaccaggagaccaccttctatactgcatcgccgaaagaagtggaaaacttaacatctctaaaaagatactagaagaatcaacaaaatgccttactacccacgatggcgccgacgccgctactggagaaaaagacgccctcgaccttatagatggagaactagaaaacctattcgcagaagatatagacgatcctactactgggtaagaagacgtcgatttcttaaaaaactatttaaaataactcttaaacaatttcaacctaaaaaaattgttaaatgtaaaatacaaggtgaaatatgcttatttcaagcaggaaaaggacttatttttcaaaattatgctcaataccaagacagctttgtaccagaaggtgaaccgggaggagggggctggtcagcacttgtttttaacttaggaggcctataccaagaaaatcaaaaactacacaatagatggtctaaatctaacaaaggccttccactagcaagatacacaggcagtaaatttaaattctggagatcttgggacacagactacataatacactggcaaacatgcccaccaatgacagacacagaacttttacacttaaacgcacaacccttcatgacaatgctaacaaaaaatcattttatagttccaaacttaacaagaccaccatacacaaaaaaaccctactttactaaaaaatttccaccaccttcacaattaacgaacaaatggtactttcaacaagacatttgcaacacaggattactactactaaccacaagtgcaatgtcacttgaccaatggtttttacctaataacgaactcagcaacaatattacactaacagcccttaataccacattttttcaaaattctaacttccaagtcagaggcacaaaaggttatcaaccaaaatctaacttatatatttatggccaaggaaatggcactactagcccaaaatggaacgaattaacatacctcggaaatgcagaatggtaccaagaaggcaaaaaaatgacaaatgaaaatttagacaattttacagactggggaaatattttccatgaagtacacgttcacgcagacacacacgtttactacagtacaacatttccaaccgtaagccaactaaacctacaagcctcacatatcacaaaactagactacttataccacagttgcagatataaccctaacagagacacaggagagggcaacgaagtattcttcgtaagcaactccattaatccaaaactcatatatgatccaccaaaagacccagacctacacatatatggatacccactatggcttatagcctggggctgggctgactggcaaaaaaaattagcaaaaataaaccaaatagaacaaaactacattatggtagccaaaactaagtttattaacccaccattacctgcatatgtattcctagacaattactttactaacccagaaaaatacgctgaacattacactgaaacagacaaaaaacacttttacccaaaatatgaattccaaaaagaacaatggaacttaatagcacaatcaggtccagcagcacctaaaatagacaaaagccaatccatacaagcaagagctcactactcatttttttttaagtggggaggctgcccagcaccaatggaagaagtcaaagacccctgccaacaaggaacataccccatccccaattaccagttacaagcatctcaaatccaagatccaaacacagacaaaagatcatttatatgggactttgacgaaagaagagaaacaattacccctaaagcagctaaaagacttaaacacatcccaacttttgaaactgtattcacagatcgaccacccttcgacctccaactacagaaaacggagacggaggaagaaacatcgtcagaggaagaaatccaaacatcactctcccacaaagtcgaccacctccgactcaagcacaaactcctccgacgaaagctcaacagactaatccaagaaaaactatcaacattataaataaacactgtaaagttgaactatttcccaaaaaaagacaaaacagacgtttttaccaccatgaaatacaaactgaacgagagttagctcaaatatttaaaagacctataagaacttttatacatgatcctcccttttacccctggctcccactagagcctaaagtaaactttatgttaaactttaaagataaataaacaaggccctattgattcactctcggtgtccgtttatattattataaaacttaaataaacatccaccgcctccctatcacaaaggcctaggggctccgcccctagaaccccaagggggggggcgccgaaagaagtggaaaacttaacatctctaaaaagatactagaagaatcaacatagctaaccacaaacagacagaaaaaccactaaatttgcattgccgaccacaaacagaaatatgctaatttacttccctttttttgctaacacgcccctaatacattaataatcaccgtcacatcctaggcggagctacacctcaatataactaactacactgacgaatggctgagtttaccccgccagacggcgaacgcatcacaacagtgactgcgagctgacattggg

SEQ ID NO: 3708 - protein, 641 aa, Betatorquevirus sp.
MPYYPRWRRRRYWRKRRPRPYRWRTRKPIRRRYRRSYYWVRRRRFLKKLFKITLKQFQPKKIVKCKIQGEICLFQAGKGLIFQNYAQYQDSFVPEGEPGGGGWSALVFNLGGLYQENQKLHNRWSKSNKGLPLARYTGSKFKFWRSWDTDYIIHWQTCPPMTDTELLHLNAQPFMTMLTKNHFIVPNLTRPPYTKKPYFTKKFPPPSQLTNKWYFQQDICNTGLLLLTTSAMSLDQWFLPNNELSNNITLTALNTTFFQNSNFQVRGTKGYQPKSNLYIYGQGNGTTSPKWNELTYLGNAEWYQEGKKMTNENLDNFTDWGNIFHEVHVHADTHVYYSTTFPTVSQLNLQASHITKLDYLYHSCRYNPNRDTGEGNEVFFVSNSINPKLIYDPPKDPDLHIYGYPLWLIAWGWADWQKKLAKINQIEQNYIMVAKTKFINPPLPAYVFLDNYFTNPEKYAEHYTETDKKHFYPKYEFQKEQWNLIAQSGPAAPKIDKSQSIQARAHYSFFFKWGGCPAPMEEVKDPCQQGTYPIPNYQLQASQIQDPNTDKRSFIWDFDERRETITPKAAKRLKHIPTFETVFTDRPPFDLQLQKTETEEETSSEEEIQTSLSHKVDHLRLKHKLLRRKLNRLIQEKLSTL

SEQ ID NO: 3709 - protein, 102 aa, Betatorquevirus sp.
MSIFWKPTPFGPRERENQWINYCIQGHDQICGCDSPGDHLLYCIAERSGKLNISKKILEESTKCLTTHDGADAATGEKDALDLIDGELENLFAEDIDDPTTG

SEQ ID NO: 3710 - DNA, 2817 bp, Gammatorquevirus sp.
cgggagcccgaggtgagtgaaaccaccgaggtctaggggcaattcgggctagggcagtctagcggaacgggcaagaaacttaaaatatattttattttttagatgtcaagattctactgcaaaactaaatacaatgcagccaccttaaatcaaatgtggatgtctatgatagctgactcccatgacatacattgtgattgtaaagctccatttgcccacctactagacaacatttttccagaaggacacacagacagaaacaaaaccattggagccataattgctagagatcttaaagaatgcctttctggtggagaagaagacgaaagccatggtatacaacttggagaaagcgccgctaccgcaggcgtttctacaataaaagaagaaggccatacaaaagaagaagacgcagaactagaagaactactcgccgccgtagaaaaagaacatacaaggtaagaaagaaaaagcaatttcttaccttaaaacaatggcaaccagatagaattagaaaatgtaccattaaaggaagagggactcttgtaatgggagcacatggaagacaaatgatttgttttaccaatgtaaaagacagactaacaccctccagagctcctggagggggaggctttggagttgaaagatttacattgcaatacttatatcaacaatggagagctaggaacaacatatggacagctacaaaccaaaatacagacctaggtagatacctaggctgtaaaattacattgtacagacatccagacacagactttatagtaagatttgacagacaaggccctttcaacttagaaaaagacacttatatgctaatgcagccacaagaaatgttactaggtagacacaaaagaattatattatcaaagctaacaaatcccacaggtagacttaaacacacacttaaaatcaaaccacctaaactacttactaacaaatgggtattccaatcagaactagctaaagttgaccttttacaacttagtggcacagcctgcaactttagatacccaaccttaggttgctgcaatgaaaacagaatattaaatttgtattctctaaacacagaattttaccaatacccaaactggatgcaagcacacttaaaagataaatataagccatatccaacaatgagcacaaggttaaaatttcattataaaacatccacaggagaagacagtataactattacttcacaggaagaccaatggctaacactagaaaaaggctggtttcaacctaaaattttggcagcctttaaagttacacttgatgacaagttatttgctgaattacctatggtactacttagatataatccagccgcagatgaaggaccaggcaatattataactgcaatagatgtagtatcaggtaattggaaaggaccctacaatgacatgttaacaattagaaatgtaccactttggttaggactcaatggttttgctagctatgttacagccaaaacaggtgataaaggaatattaaaacacaaaattatatgtgttggaagtaatgcactaagtagactaccaacagtaagcacacaaaaaatatttcctatattaggttcaaaatttgtaaatggcaaaccaccatatgaccaaccaccaacacctgattatagtaaaaattggtatcccacttatgaacaccaacaagaaccactaaatgatatagtttgctgtggtccacttacacctaagttttataaccaaactaatagtacttgggaattacaatatttttaccgtttttactttaagtggggaggcccagaacttggagatccacaagtggacgatcccaaaggaaaaacacaagcagatactcagtattcaatcacaaggccaatacaagttaccaacccactcaaaaataaaacagaatcccttttacacccctgggacctcagaaggggttttattacaaaaagagcttatgaaagaatgtgcgaaaacctcgaaactgatacagatttctgcccagatgcagagacgccaaaaaagaaaaagagaattacctgcgaacttcgaaacccagagaaagaagcacaagaaatccaagaatgcctcctatcactctgccaaacagaagactcggaggaagaggaccccaacaacctcaagcaactcatcctcaagcagaagcagcagcagctccaactcaagcacaacatcttaatattactatcagatctgaaagcaaagcagaactctttaagactgcaaacaggcaatttagagtagaaccatttaaacctggctttgaacaagatacagaaaaagaactagcagcagcctttttaagaccacctagaacatacaaaaatgaccctcctttctatccttggctacctcctgcaccccttgtaaactttaaccttaactacaagtgctaggccaacaatgtacacttagtaaagcatgtttaataaagtttgctccccaaaaaaaaaaaaaaaaaaaacaaaaaataaaaaggggaagtggggggggcatagcccccccacaccccccgcggggggggcaaagccccccccccgcaccccccctacgtcactagccacgcccccgccgccatcttgtgtgcggctgggcggggactgaaatggcgggacccaatgaatttatactttcactttccaattaaaacccgccacgtcacaaacacagggtggagtctcttaccctatataactaactggggtggcgaatggctgagtttaccccgctagacggtgcagggaccggatcgagcgcagcgaggaggtccccggctgcccatggg

SEQ ID NO: 3711 - protein, 658 aa, Gammatorquevirus sp.
MPFWWRRRRKPWYTTWRKRRYRRRFYNKRRRPYKRRRRRTRRTTRRRRKRTYKVRKKKQFLTLKQWQPDRIRKCTIKGRGTLVMGAHGRQMICFTNVKDRLTPSRAPGGGGFGVERFTLQYLYQQWRARNNIWTATNQNTDLGRYLGCKITLYRHPDTDFIVRFDRQGPFNLEKDTYMLMQPQEMLLGRHKRIILSKLTNPTGRLKHTLKIKPPKLLTNKWVFQSELAKVDLLQLSGTACNFRYPTLGCCNENRILNLYSLNTEFYQYPNWMQAHLKDKYKPYPTMSTRLKFHYKTSTGEDSITITSQEDQWLTLEKGWFQPKILAAFKVTLDDKLFAELPMVLLRYNPAADEGPGNIITAIDVVSGNWKGPYNDMLTIRNVPLWLGLNGFASYVTAKTGDKGILKHKIICVGSNALSRLPTVSTQKIFPILGSKFVNGKPPYDQPPTPDYSKNWYPTYEHQQEPLNDIVCCGPLTPKFYNQTNSTWELQYFYRFYFKWGGPELGDPQVDDPKGKTQADTQYSITRPIQVTNPLKNKTESLLHPWDLRRGFITKRAYERMCENLETDTDFCPDAETPKKKKRITCELRNPEKEAQEIQECLLSLCQTEDSEEEDPNNLKQLILKQKQQQLQLKHNILILLSDLKAKQNSLRLQTGNLE

SEQ ID NO: 3712 - protein, 119 aa, Gammatorquevirus sp.
MSRFYCKTKYNAATLNQMWMSMIADSHDIHCDCKAPFAHLLDNIFPEGHTDRNKTIGAIIARDLKECLSGGEEDESHGIQLGESAATAGVSTIKEEGHTKEEDAELEELLAAVEKEHTR

SEQ ID NO: 3713 - protein, 139 aa, Gammatorquevirus sp.
LPRCRDAKKEKENYLRTSKPRERSTRNPRMPPITLPNRRLGGRGPQQPQATHPQAEAAAAPTQAQHLNITIRSESKAELFKTANRQFRVEPFKPGFEQDTEKELAAAFLRPPRTYKNDPPFYPWLPPAPLVNFNLNYKC

SEQ ID NO: 3714 - DNA, 2816 bp, Betatorquevirus sp.
cgggtgccgaaggtgagtgaaaccaccggagtctaggggcaatatgggctagatcagtctggcggaacgggcaagacacttaatatatattttttttacagatatgacacactttttaaaagaccctgtttacaatggccgtgctatggaattacaattaatgaatgcaactattaactgccatgacctctgctgtggatgtatgactcctgttcttcatcttaaagaaattatcaatacattttcctattcaccatgcccccgtactactggcggcggcgacgaccaccatggagacaaagaaactaccgacgccttagaaggcctagaagatggagaattagatcgcttattcgccgacgatggagaagacgccactgggtaagaaaaaaaagactatttttaagacgaaaaaaactgacgagactgactttaaaagaatggcagcctaaaaaaattaaaaaatgttccataaaaggaatattacctgcatttatatgtggaaaatcaagaatagcaaataattttgtactgttttcagaaagcatagtaccagtaaaagaacccagtggcggaggatggtcaattctacaaataaacttaagagtactatatgaccaatttataaaatttaaaaactggtggactactagcaaccaaggcctaccactgtttagatacttaggaatgaaactcacattttacaaaactcaatatgtagactatatagttgtaccacaactttgccctccattttcagtagttagagacaactacctaaacatacatcctgttagaatgctcctaaatagacataaaattatagtaccacaaagacaaaaaggaaagaaaaactacataaaaaaatggttcagaccacctgacctaatgcaaaacaaatggtactttcaacaagactttataaacataccatttattgtactacatataacagcagctagcttagaccaatacagcattgcagaaaaccaaataagtacaaacataacattatattcattaaacacagacttttttagaaataaccaatttactggctacgaagacacaggctacataccaaaaacatatggaaaagaagcttactacttatatacagaaggaaatggaactcaaaaccctaataaatttagccaaatgattccactaagaaataccaccacatacacagacggaaaaaaagcaacaacttttgaccaatgggaaaacaaaacaaactggggtaatccatttacacaaaaccactctcaccacgacgtaccaatatactataacaatactaaaccaacatcaagtaactatactacagacaccacatttactccattacatgaactattctttcaatgcagatataacccagaaaaagacacaggaataggaaacacagtattttttaaatccaacaaactaaaacaaggagaaattgacactattcctgacaaagatgacatagtaataacaaactttccactatggctaatattttactcatggataagctggatacaaaagtcaaaaccaatacaacatataatgaatgactactactttatagtacttacaccatttatagaaccaaaaagaaagagctacttatttttagatccatactttgtatttccaaattcagatattctaacaccaactgaaaaactacattggtatccacaaacaggataccaaacagatgtaattttcagctttgcacaaacaggcccagcagcacctaaaatagacagatcacaatcaatacaagcacaatttaaatacaatgtaaaattaaaatggggaggatgtcctgcaccaatggaactaattacagacccatcattacaggacaaatttcccatccccaatacaatcttcaaaacacttgagatccaagatccagcaacaaacaaaaggacactcctttacgacttcgacgaaagacatgacggacttacggacagagctgcaaaaagaattaaaacagaacaaatacttgaaacatcttttacaggacaactaccaacagatccaaacatcaggatccaaacacaagaaacgacctcatcgtcggaggaagaaagcgaaacatcactccaggaggagctccagctcctcaagcgaaaaaacaagcagctcagaaacaagctcctcagactaacatcttactaaaacctaaaattatatatgctccatacactatgtttggagataaaactactaaaaaactaacacctataaggggaaagagttgggaggcggaactacaactagctaaattatttaaaagaccactaagaacatatgaagaagaccctccttactatccctgggttgtacctgaaccagttgtaaactttcacttaaactttaaagaataaaggccagcattaattcactctcggtgtccatttatttaagtttaaactttaataaacatccatgtcctccctaatacgcaggcgcacaagggggctccgcccccttaaacccccaagggcaagggggctccgcccccttaaacccccaagggggctctgcccccttacacccccttattaatattcaacaggaaaaccacataattagaattgccgaccacaaactgccaaccgttgcatacacttccctaaattaactactacttcctttttttaagaactcctcctactaattcattaataatcagacgctattcctgggaggagcaaaccatctatataaccaagtggggtgacgaatggctgagtttacgccgccagacggaggactgatcacttcagtgactcaggactgatcttggg

SEQ ID NO: 3715 - protein, 642 aa, Betatorquevirus sp.
MPPYYWRRRRPPWRQRNYRRLRRPRRWRIRSLIRRRWRRRHWVRKKRLFLRRKKLTRLTLKEWQPKKIKKCSIKGILPAFICGKSRIANNFVLFSESIVPVKEPSGGGWSILQINLRVLYDQFIKFKNWWTTSNQGLPLFRYLGMKLTFYKTQYVDYIVVPQLCPPFSVVRDNYLNIHPVRMLLNRHKIIVPQRQKGKKNYIKKWFRPPDLMQNKWYFQQDFINIPFIVLHITAASLDQYSIAENQISTNITLYSLNTDFFRNNQFTGYEDTGYIPKTYGKEAYYLYTEGNGTQNPNKFSQMIPLRNTTTYTDGKKATTFDQWENKTNWGNPFTQNHSHHDVPIYYNNTKPTSSNYTTDTTFTPLHELFFQCRYNPEKDTGIGNTVFFKSNKLKQGEIDTIPDKDDIVITNFPLWLIFYSWISWIQKSKPIQHIMNDYYFIVLTPFIEPKRKSYLFLDPYFVFPNSDILTPTEKLHWYPQTGYQTDVIFSFAQTGPAAPKIDRSQSIQAQFKYNVKLKWGGCPAPMELITDPSLQDKFPIPNTIFKTLEIQDPATNKRTLLYDFDERHDGLTDRAAKRIKTEQILETSFTGQLPTDPNIRIQTQETTSSSEEESETSLQEELQLLKRKNKQLRNKLLRLTSY

SEQ ID NO: 3716 - protein, 108 aa, Betatorquevirus sp.; identical to SEQ ID NO: 3569

SEQ ID NO: 3717 - protein, 59 aa, Betatorquevirus sp.; identical to SEQ ID NO: 3570

SEQ ID NO: 3718 - DNA, 2813 bp, Alphatorquevirus sp.
ctatgggcaaggctcttaaaaaagccatgtttctcggtaaactttacagaaagaagaggcgcctgccactgtccccactgcacactccacagaaaactcgcaggcttctgactgctatgtggaggccccccacgcacaatgtccgcgggcaggagagacagtggtacgagtcctgctttcggtctcacgcttgcttttgtggctgtggtgattttattcggcatctttgtgatctggcgaatgattttggacgtcctcctaccgtccctcgacccccggcaccaccacctccagtaaggcctctgccagctctcccggcacccccaaacccccccggtagcagagcggcatggcctactggtggtggagacggagaagacgagccccgaggtggaggagacgacgctggaggactcgcagaactcgcagacgacgagctcctttccgccgtcgtggacgccgccgaagagtaagaaagaggagggggaggtggaggaggacttatagaaaatggcggaggggcagaaagagacgcaggcacaaaagacgcttaatactgactcagtggcaaccagcctttataagacgctgctatatagtgggctacctgcccctcttaatatgcggagaaaacacctccggcagaaactttgctacccactcagacgacctaatatccaacggaccttacgggggaggcatgaccactaccaaattcaccctcagaatactgtatgacgaacacctgagacaccttaactactggactgtcagtaacgaggacttagacctgtgcagataccttgggggaaccttctacgcgtacagacaccccactgtagactttatcatacaaatccacaccagtccccctttcctagacactcccctaacgggtcccagcatacacccaggcatgctaatgctgacaaaaaacaaaatactaatacccagcttaaaaaccagacctaacaaaaagcacaaagtaaaaattagattcaggccccctaaactattccaagacaagtggtacccccagtcagagctctgtgacacaacactactaaccatctttgcaaccgcatgtgacctgcaatttccgttcggctcaccactaacgaacaacccttgcgtcaacttccaggtgctaggttccgtttacaaacggcacctcagtatacttcctgaaaaactagattcatatgaagtacactataaaagtaacctatatgaagtaatacaatattatgatacattccaaactatagcacaaataaaacctagcgccacacaaccagacttctcaccctcatggaatgatatgcaaaataaaacaacattaaatgcatcaggcttaaaccaatccttaagcaatgacacctggtacctaggccatgcatatatgaaagacaaagcacaacaagcagcctataaaattagagagaaatacttaaccgcaacaagagcagcactaccagcactagcaacactaggacacaaaatgctagaataccacacaggcatctacagctctatattcttatctgcaggcagatcttactttgaaaccctaggggcctacacagacataatttacaacccactagtagacaaaggcataggtaacaaattgtggctagaccccctatcaaaagaagacgcagtgctaaacagaaaacaagcaaaagtactaatagaagacatacctctatgggcagccctatttggctacacagaatttgcagccaagtacacaggagactctgccataacagccaactacagactgacaatacggtgcccctacacagaccccatgctgacagacagaaacaacgaagaccagggctttgtaccctactctaaaaactttggcaacggaaaaatgcccggaggcagtgccaatgttccactgactatgagaataaggtggtaccccatactattccatcagctagaatggctagaagaaatgattcagtctggaccgtttgcataccggggcgacgaaaaaagctgtgtgttagccataaagtacattttcagatggaaatggggaggtaaccctgtgtctcaccagattgtgcgaaatccctgcaaaggagggtccggttcccgtcgagagcctcgctcaatacaagcagctgacccgaaatacatcacaccgagactatccttccactcgtgggacttcagacgagggctttttggctcggcaagtattaaaagaatgtcagaagaatcaacagctcctgtctatcctacaggcccaccaagaaaaagaccaagaaaagacacggacccgtacgagtcggggcaagaagaaaactcactttcaagacacctccagctccagccctgggtccactccagccaagaagcccaaagcgaagaagaaacgcaagtcccgacggacctacaggaacaactcctccagcagctccgagaccaacagcagctccgacagcacctgcagtccctcgcctcacaagtcgtcaaaatcagggcgggatacagcatacaccccctattatcttcccaagcctaaacaaggtctttatgtttgagcccgaaggccccaaacccatacagggctatgaggcctggttagatgagtaccagacagcaggcgtctggaataggccggtaagaacataccacacagacacccccttctatccctgggcacccaaaccccccgaccaattccgtgtcagcttcaaactcggctttcaataaaatttcaaggcctttgactgttcacttgtcggtgtctacctctataagtcactaagcactccgagcgtcagcga

SEQ ID NO: 3719 - protein, 732 aa, Alphatorquevirus sp.
MAYWWWRRRRRAPRWRRRRWRTRRTRRRRAPFRRRGRRRRVRKRRGRWRRTYRKWRRGRKRRRHKRRLILTQWQPAFIRRCYIVGYLPLLICGENTSGRNFATHSDDLISNGPYGGGMTTTKFTLRILYDEHLRHLNYWTVSNEDLDLCRYLGGTFYAYRHPTVDFIIQIHTSPPFLDTPLTGPSIHPGMLMLTKNKILIPSLKTRPNKKHKVKIRFRPPKLFQDKWYPQSELCDTTLLTIFATACDLQFPFGSPLTNNPCVNFQVLGSVYKRHLSILPEKLDSYEVHYKSNLYEVIQYYDTFQTIAQIKPSATQPDFSPSWNDMQNKTTLNASGLNQSLSNDTWYLGHAYMKDKAQQAAYKIREKYLTATRAALPALATLGHKMLEYHTGIYSSIFLSAGRSYFETLGAYTDIIYNPLVDKGIGNKLWLDPLSKEDAVLNRKQAKVLIEDIPLWAALFGYTEFAAKYTGDSAITANYRLTIRCPYTDPMLTDRNNEDQGFVPYSKNFGNGKMPGGSANVPLTMRIRWYPILFHQLEWLEEMIQSGPFAYRGDEKSCVLAIKYIFRWKWGGNPVSHQIVRNPCKGGSGSRREPRSIQAADPKYITPRLSFHSWDFRRGLFGSASIKRMSEESTAPVYPTGPPRKRPRKDTDPYESGQEENSLSRHLQLQPWVHSSQEAQSEEETQVPTDLQEQLLQQLRDQQQLRQHLQSLASQVVKIRAGYSIHPLLSSQA

SEQ ID NO: 3720 - protein, 156 aa, Alphatorquevirus sp.
MGKALKKAMFLGKLYRKKRRLPLSPLHTPQKTRRLLTAMWRPPTHNVRGQERQWYESCFRSHACFCGCGDFIRHLCDLANDFGRPPTVPRPPAPPPPVRPLPALPAPPNPPGSRAAWPTGGGDGEDEPRGGGDDAGGLAELADDELLSAVVDAAEE

SEQ ID NO: 3721 - protein, 126 aa, Alphatorquevirus sp.
LGPLQPRSPKRRRNASPDGPTGTTPPAAPRPTAAPTAPAVPRLTSRQNQGGIQHTPPIIFPSLNKVFMFEPEGPKPIQGYEAWLDEYQTAGVWNRPVRTYHTDTPFYPWAPKPPDQFRVSFKLGFQ

SEQ ID NO: 3722 - DNA, 2813 bp, Betatorquevirus sp.
caggtactggaggtgagtgaaaccaccgaaattaaggggcttaatgggcttaagcagtcttggcggaacgggcaactaacttaatcactttattacagatgtccaaatttatgaaaccatgcctgtactcacaaaaaggagtagaaggacaatggctaaataatatttgcggatctcacgacctattctgtggatgctgtaacccctttgaccacctaaaagacatcttgaaaagacaaacatggcaccctaccagagatattggaacttctacagaaaatggagacgacccagatttccctactatcgacgccggagacttagaaaaccttttccgaaccgccgacgaagaaaacgaacggtaagaagacgccgccattttaaaacttataaaaagaaactaaaaagaattaaaatacaacagtggcaaccatctactattaaaaaatgccacattaaaggatatttatgcctttttcaggcgggacaaggtagagaatccaacaactacactttattcaaagaaagctacaccccggaacatgaaccgggcggtggcggttggtctctacaacaactatcacttggaaatttattccaacaaaacaatgacttaatgaactactggactaaaagcaattatagactaaatatgtgtagatactatggagtaacattctacctatttagacaacaatttactgactatgtattttcatacttctgggacgcccctaaaaatgtaaccaaatattactatgcaagctaccacccaatgaaaatgttagaatatcatagaaaagtagtagttccaagctttgcatcacaaccacacaaaagaaaaccatacaaaaaaattaaaataaaaccaccaaaactaatgaaaacccaatggttctttcaacaacacttatcagactacccactaatatacttttcagcaacagcttgctcactagacaacatgtttggttcagacaaagcagaaaacagtaatgcctctatatacatgctaaatacaggcttttttaaacatccctgtttccaattcaaatcaccagtagaacccacatatggatacacaccaaactcagaaaactacctatggggaatacaaaatgaatatgaaatttttaaacaaaacaaaagatcccaagctatatacctaggacaatcaatgctaaatgaacccggcacagctatgggacaatatgccgcatccaaaaaaggcacctggggcaacccatttcactggcaatacttaacaggttcacataaaacctttataacattagcaacacaaacaccaagcgaattcctacaatcacctacagacctactaaaaaatttagaagacacacaagaaagacacttaccatcagtactaacagtaagatataacccatacaaagacaaaggaaaaggaaataaagtatattttatacctacatacaacagttctcataataattgggaaccaacatcagacccagacttaatgctcactgattatccactatggatactattatggggcttagaagacataatgaaaaaaatgggaaaatgcccaaatatagacaatgactggatactagtaatacaaactagctatttttcagactcagaaaaatactacgtaccactttcatgggactttgtacatggacagggcccctacggaaaaccacacgaagaaataaacccacacgacaatacatactggtttccaaaattcagatttcaaagacaagctttaaatgacattatacaaacaggaccagctgtagttagatttgaccacacaaaaaatatacaagccttatgtaaatatgatttttcttttaagtggggaggcaacccatcaccaatggaaaacgtctacgacccaaacagtcaacccattacccccacccccggtggattcggcctacaaaatgaaatcactaatccagcaacagggatcgaaacattcctatatcccttcgacattagacgcgacttccttacacagtcagctacaaaaagaattacagaaagcacaactgatgaaagatgtttgttcacagatggaacagaaaatccaacagacgtcaaactcttcccgcaagaaacacaaacgaaaaagaccccggaaacacaagaggagacactactccagcagctcgagcacctcagacaattcaacctacaactccaacagcgattcaacaacctaaaacaatcgtttttacaaatgtaaaaaaagcatacttatttccaccagaaaaacctaaaaaaccccgtagatttaccccatacgaatgggaaacagaaaaacaaatagcatcatggctaaaaaggccaatgagatactttgccacagatgaccccttttacccatgggtacccccagaacctctcgttaactttgatattgtaactaagtactcaaataaaggccagcattaattcacttagtggtgtctgtttcttttattataaacttaaataaacatccaccgcctccctaatacgcaggcgcaaagggggctccgcccccttaaacccccaggggggaaaccccccctaagccccccctactcattaatattcaacaggaaaaccacctaattagaattgccgaccacaaactgtcaaccagttcctcttttgaaaacacttccccatttactaattattattcattatattaattattaaacaccgtaaatccggggaggagctaaaacactatataactaactacacttccgaatggctgagtttatgccgccagacggagacaagaaaacttcttggctgcttaaggg

SEQ ID NO: 3723 - protein, 666 aa, Betatorquevirus sp.
MAPYQRYWNFYRKWRRPRFPYYRRRRLRKPFPNRRRRKRTVRRRRHFKTYKKKLKRIKIQQWQPSTIKKCHIKGYLCLFQAGQGRESNNYTLFKESYTPEHEPGGGGWSLQQLSLGNLFQQNNDLMNYWTKSNYRLNMCRYYGVTFYLFRQQFTDYVFSYFWDAPKNVTKYYYASYHPMKMLEYHRKVVVPSFASQPHKRKPYKKIKIKPPKLMKTQWFFQQHLSDYPLIYFSATACSLDNMFGSDKAENSNASIYMLNTGFFKHPCFQFKSPVEPTYGYTPNSENYLWGIQNEYEIFKQNKRSQAIYLGQSMLNEPGTAMGQYAASKKGTWGNPFHWQYLTGSHKTFITLATQTPSEFLQSPTDLLKNLEDTQERHLPSVLTVRYNPYKDKGKGNKVYFIPTYNSSHNNWEPTSDPDLMLTDYPLWILLWGLEDIMKKMGKCPNIDNDWILVIQTSYFSDSEKYYVPLSWDFVHGQGPYGKPHEEINPHDNTYWFPKFRFQRQALNDIIQTGPAVVRFDHTKNIQALCKYDFSFKWGGNPSPMENVYDPNSQPITPTPGGFGLQNEITNPATGIETFLYPFDIRRDFLTQSATKRITESTTDERCLFTDGTENPTDVKLFPQETQTKKTPETQEETLLQQLEHLRQFNLQLQQRFNNLKQSFLQM

SEQ ID NO: 3724 - protein, 101 aa, Betatorquevirus sp.; identical to SEQ ID NO: 3277

SEQ ID NO: 3725 - protein, 131 aa, Betatorquevirus sp.
MFVHRWNRKSNRRQTLPARNTNEKDPGNTRGDTTPAARAPQTIQPTTPTAIQQPKTIVFTNVKKAYLFPPEKPKKPRRFTPYEWETEKQIASWLKRPMRYFATDDPFYPWVPPEPLVNFDIVTKYSNKGQH

SEQ ID NO: 3726 - DNA, 2812 bp, Alphatorquevirus sp.
tatgggcaaggctcttaaaaaagccatgtttctcggtaaactttacagaaagaagaggcgcctgccactgtccccactgcacactccacagaaaactcgcaggcttctgactgctatgtggaggccccccacgcacaatgtccgcgggcaggagagacagtggtacgagtcctgctttcggtctcacgcttgcttttgtggctgtggtgattttattcggcatctttgtgatctggcgaatgattttggacgtcctcctaccgtccctcgacccccggcaccaccacctccagtaaggcctctgccagctctcccggcacccccaaacccccccggtagcagagcggcatggcctactggtggtggagacggagaagacgagccccgaggtggaggagacgacgctggaggactcgcagaactcgcagacgacgagctcctttccgccgtcgtggacgccgccgaagagtaagaaagaggagggggaggtggaggaggacttatagaaaatggcggaggggcagaaagagacgcaggcacaaaagacgcttaatactgactcagtggcaaccagcctttataagacgctgctatatagtgggctacctgcccctcttaatatgcggagaaaacacctccggcagaaactttgctacccactcagacgacctaatatccaacggaccttacgggggaggcatgaccactaccaaattcaccctcagaatactgtatgacgaacacctgagacaccttaactactggactgtcagtaacgaggacttagacctgtgcagataccttgggggaaccttctacgcgtacagacaccccactgtagactttatcatacaaatccacaccagtccccctttcctagacactcccctaacgggtcccagcatacacccaggcatgctaatgctgacaaaaaacaaaatactaatacccagcttaaaaaccagacctaacaaaaagcacaaagtaaaaattagattcaggccccctaaactattccaagacaagtggtacccccagtcagagctctgtgacaccacactcctaaccgtctttgcaaccgcatgtgacctgcaatttccgttcggctcaccactaacgaacaacccttgcgtcaacttccaggtgctaggttccgtttacaaacggcacctcagtatacttcctgaaaaactagattcatatgaagtacactataaaaataacctatatgaagtaatacaatattatgatacattccaaactatagcacaaataaaacctagcgccacacaaccagacttctcaccctcatggaatgatatgcaaaataaaacaacattaaatgtatcaggcttaaaccaatccttaagcaatgacacctggtacctaggccatgcatatatgaaagacaaagcacaacaagcagcctataaaattagagagaaatacttagccgcaacaagagcagcactaccagcactagcaacactaggacacaaaatgctagaataccacacaggcatctacagctctatattcttatctgcaggcagatcttactttgaaaccctaggggcctacacagacataatttacaacccactagtagacaaaggcataggtaacaaattgtggctagaccccctatcaaaagaagacgcagtgctaaacagaaaacaagcaaaagtactaatagaagacatacctctatgggcagccctatttggctacacagaatttgcagccaagtacacaggagactctgccataacagccaactacagactgacaatacggtgcccctacacagaccccatgctgacagacagaaacaacgaagaccagggctttgtaccctactctaaaaactttggcaacggaaaaatgcccggaggcagtgccaatgttccactgactatgagaataaggtggtaccccatactattccatcagctagaatggctagaagaaatgattcagtctggaccgtttgcataccggggcgacgaaaaaagctgtgtgttagccataaagtacattttcagatggaaatggggaggtaaccctgtgtctcaccagattgtgcgaaatccctgcaaaggagggtccggttcccgtcgagagcctcgctcaatacaagcagctgacccgaaatacatcacaccgagactatccttccactcgtgggacttcagacgaaggctttttggctcggcaagtattaaaagaatgtcagaagaatcaacagctcctgtctatcctacaggcccaccaagaaaaagaccaagaaaagacacggacccgtacgagtcggggcaagaagaaaactcactttcaagacacctccagctccagccctgggtccactccagccaagaagcccaaagcgaagaagaaacgcaagtcccgacggacctacaggaacaactcctccagcagctccgagaccaacagcagctccgacagcacctgcagtccctcgcctcacaagtcatcaaaatcagggcgggatacggcatacaccccctattatcttcccaagcctaaacaaggtctttatgtttgagcccaaaggccccaaacccatacatggctatgaggcctggttagatgagtaccagacagcaggcgtctgggataggccggtaagaacataccacacagacacccccttctatccctgggcacccaaaccccccgaccaattccgtgtcagcttcaaactcggctttcaataaaatttcaaggcctttaactgttcacttgtcggtgtctacctctataagtcactaagcactccgagcgtcagcga

SEQ ID NO: 3727 - protein, 732 aa, Alphatorquevirus sp.
MAYWWWRRRRRAPRWRRRRWRTRRTRRRRAPFRRRGRRRRVRKRRGRWRRTYRKWRRGRKRRRHKRRLILTQWQPAFIRRCYIVGYLPLLICGENTSGRNFATHSDDLISNGPYGGGMTTTKFTLRILYDEHLRHLNYWTVSNEDLDLCRYLGGTFYAYRHPTVDFIIQIHTSPPFLDTPLTGPSIHPGMLMLTKNKILIPSLKTRPNKKHKVKIRFRPPKLFQDKWYPQSELCDTTLLTVFATACDLQFPFGSPLTNNPCVNFQVLGSVYKRHLSILPEKLDSYEVHYKNNLYEVIQYYDTFQTIAQIKPSATQPDFSPSWNDMQNKTTLNVSGLNQSLSNDTWYLGHAYMKDKAQQAAYKIREKYLAATRAALPALATLGHKMLEYHTGIYSSIFLSAGRSYFETLGAYTDIIYNPLVDKGIGNKLWLDPLSKEDAVLNRKQAKVLIEDIPLWAALFGYTEFAAKYTGDSAITANYRLTIRCPYTDPMLTDRNNEDQGFVPYSKNFGNGKMPGGSANVPLTMRIRWYPILFHQLEWLEEMIQSGPFAYRGDEKSCVLAIKYIFRWKWGGNPVSHQIVRNPCKGGSGSRREPRSIQAADPKYITPRLSFHSWDFRRRLFGSASIKRMSEESTAPVYPTGPPRKRPRKDTDPYESGQEENSLSRHLQLQPWVHSSQEAQSEEETQVPTDLQEQLLQQLRDQQQLRQHLQSLASQVIKIRAGYGIHPLLSSQA

SEQ ID NO: 3728 - protein, 156 aa, Alphatorquevirus sp.; identical to SEQ ID NO: 3720

SEQ ID NO: 3729 - protein, 126 aa, Alphatorquevirus sp.
LGPLQPRSPKRRRNASPDGPTGTTPPAAPRPTAAPTAPAVPRLTSHQNQGGIRHTPPIIFPSLNKVFMFEPKGPKPIHGYEAWLDEYQTAGVWDRPVRTYHTDTPFYPWAPKPPDQFRVSFKLGFQ

SEQ ID NO: 3730 - DNA, 2812 bp, Gammatorquevirus sp.
cgggagcccgaggtgagtgaaaccagcgaggtctaggggcaattcgggctagggcagtctagcggaacgggcaagaaacttaaaacaataattgttttacagatgtccaagattcaagcgaaggacttttttaatcccacaccctacaatcaagacacgaagaatcaaatttggatgtctcaaattgctgatgctcacgacaatatctgcaattgtaaccatccctttgctcatttgcttgccaatatctttcctgtgggtcacaaagaccgtgattttacaattaaccaaattcttctaagagactacaaagaaaaatgccgttctggtggagaaggcgaaagaagccatggtggggcagatttagatatcgcagacgcttctacaaaaacagaaggagacggagaagaagactacccaggagaagaactcgaagaactactcgccgccgccatagaagaaaacgcaaggtaagaagaaaactacaaaaaatatctataaaacaatggcaacctgatagaattgttaaatgtaaaattaaaggcttttcttgccttgtactgggagctgagggcagacagatgtactgctacacaaatgaagcctcagactacccacaaccaaaagccccaggtggtggaggctttggatgtgaaactataactttaaaatggctattccaagaatatctaaggcataataatatttggactaaatcaaatgactatacagatctttgcagatacactggatgcaaaataactctatacagacatcctacaatagattttgttgtattctatgatatacaacctccttttgacattaacaaatttacataccctgaactacagccccaaaatgtactacttagaagaagaaaaagagttatactaagcagacaaactaatcctgctggcaaaattaaacatactattaaaataagaccaccaaaacaactaataactaaatggttttttcaaagagatttttgtacctatggcttactaaaactatgtgcttctgcagcagactttaactacccaagaatatcacccttatctcagagtactattttaacagttctagctttaaatataaacttttaccaaaacagtgactgggcactaacaaaaacaaccgagccatataaaaatataacaacacagaaactaccattatactttacatacacagacaaacaaggaagagaccagatatttaactacaacccagacagtgtcactccaacagaaccgacaaaaaaatattactactccattaacagagaaacaggcttattttcaccacaagtcttactagctaaaaaagtatccacacagaaagctagtactgaccctggactaggatctctaccactagtaacacttagatacaacccacaagaagacacaggccatggcaatgaagtatatcttaccagtattctaaatggtcactacaataagccaagcatatccactgactactcatttaatggtgttccactatatgtagccttttatggcttttggaattacttgcaaatctacagccataataaaggcttctacaaatcatatatgtttgtagttaagagtgatgcactaagaccactttcagtagcaactcctgaaaaatactttccaatactagatgctgactttgtctatggtaaactaccatgggacgaatacatgtcagcagacattaaaaaactgtggtatcctacagcagaaagacaacaggttataattaaccaaatagtagaatcaggaccatttatgcctaaactatccaatttaaaaaacagtacatgggaactaaattacaaatatcaatttttttttaagtggggaggcccatacaccacagatcaacccgttgaagatccatgcaccagaaacaaatacaatgtccccgatacactccaacaatcaatacaaattaccgaccctgaaaaaaacaaaacagaaggcatactccatgactgggactttagaaggggcttcattacacaaacagctcttaaaagaatgtcacaaaacctcccaattgattcatctctcgaatctgatgactcagaatcaccacaaaagaaaagaaaaatcaccaaggaactcccattccaacaaaagaaagaagaaaaaatccagaaatgtctcctctcactctgcgaagagccttcctgccaagaaacaccagaaacactccagcagtacatcctccagcagcgacagcagcagcgagagctcaagcacagcatcctccagctcctaactcacctaaagaagggccaaacctgtatggaactccaaacaggccttttagagtagagccattcaaaccaggatttgaatgggaaacagaatgtgaatgtgcaaaagcattttgtagaccacccagacattataaaaatgatcctccattttacccatggttacctctaacaccccttgtaaactttaaccttaactacaaatgctaggccctcaatgtacacttagtggtggatgtttaataaagtttgcccccaaaaaaaaaaaaaaaaaaaaaaataaaaaattgcaaaaattcggcgctcgcgcgcgccccccgccgccatcttgggcgcggcagggcgggggctaaaatggcgggaaccaatcattttatactttcactttccaattaaaacttgccacgtaacaaaaaatgggtggagactttaaaactatataaccaagtacagtgacgaatggctgagtttaccccgctagacggtgcagggaccgcatcgagcgcagcgagaaggtccccggcagcccatggg

SEQ ID NO: 3731 - protein, 672 aa, Gammatorquevirus sp.
MPFWWRRRKKPWWGRFRYRRRFYKNRRRRRRRLPRRRTRRTTRRRHRRKRKVRRKLQKISIKQWQPDRIVKCKIKGFSCLVLGAEGRQMYCYTNEASDYPQPKAPGGGGFGCETITLKWLFQEYLRHNNIWTKSNDYTDLCRYTGCKITLYRHPTIDFVVFYDIQPPFDINKFTYPELQPQNVLLRRRKRVILSRQTNPAGKIKHTIKIRPPKQLITKWFFQRDFCTYGLLKLCASAADFNYPRISPLSQSTILTVLALNINFYQNSDWALTKTTEPYKNITTQKLPLYFTYTDKQGRDQIFNYNPDSVTPTEPTKKYYYSINRETGLFSPQVLLAKKVSTQKASTDPGLGSLPLVTLRYNPQEDTGHGNEVYLTSILNGHYNKPSISTDYSFNGVPLYVAFYGFWNYLQIYSHNKGFYKSYMFVVKSDALRPLSVATPEKYFPILDADFVYGKLPWDEYMSADIKKLWYPTAERQQVIINQIVESGPFMPKLSNLKNSTWELNYKYQFFFKWGGPYTTDQPVEDPCTRNKYNVPDTLQQSIQITDPEKNKTEGILHDWDFRRGFITQTALKRMSQNLPIDSSLESDDSESPQKKRKITKELPFQQKKEEKIQKCLLSLCEEPSCQETPETLQQYILQQRQQQRELKHSILQLLTHLKKGQTCMELQTGLLE

SEQ ID NO: 3732 - protein, 123 aa, Gammatorquevirus sp.
MSKIQAKDFFNPTPYNQDTKNQIWMSQIADAHDNICNCNHPFAHLLANIFPVGHKDRDFTINQILLRDYKEKCRSGGEGERSHGGADLDIADASTKTEGDGEEDYPGEELEELLAAAIEENAR

SEQ ID NO: 3733 - protein, 109 aa, Gammatorquevirus sp.
MSPLTLRRAFLPRNTRNTPAVHPPAATAAARAQAQHPPAPNSPKEGPNLYGTPNRPFRVEPFKPGFEWETECECAKAFCRPPRHYKNDPPFYPWLPLTPLVNFNLNYKC

SEQ ID NO: 3734 - DNA, 2812 bp, Gammatorquevirus sp.
cgggagcccgaggtgagtgaaaccaccgaggtctaggggcaattcgggctagggcagtctagcggaacgggcaagaaacttaatatatacttttttttatagatgcaaaatatttctgctgaagacttttttaaaccaacaaactttaacaatacaactaaaaatcaactatggatgtccataattgctgattcccatgacagtctctgcaactgctggcatccttttgctcatatgcttgctagtctttttcctcctggccatcaagataggaataaaaccattgaacaaatactgcaaagagactttgctgaaacatgccattctggtggagaagaaggagaaagttctggggcggcaggtggaggaaacccagatacaacaaatataaaagaagaagaaaaccaagaagaagatatagacgcacttatggccgccgccgccgccgccacagaaaaagaagatacaaggtaagaagaaaaagaaaagctattgttttaaaacaatggcaacctgacagcattagaaaatgtaaaattaaagtaattgactcttttataataggagcacacggcacacaatttaaatgctatacaaatgaagctaaaaaatatccacagcctaaacaaccagcagggggtggttttgggatggaagtcttttctttagaagacttatatcttagatataaagctcataaaagtatatggacagcaacaaatgactataaagacctagtaagatacacaggctgtacatttactttttatagacatgcaacaacagactttatattaagctttaacacacagcccccatttacattagataaattctcatatacatcaatacatccactaaacatgctacttcagaaacataaaaaaattttatatagcttaaaaacaaaaccatggggtccctccaaagttaaatttaaaattaaacctccaaagcaaatgtctactaaatggtttttccaaaaattttttgctactgcaggcctagttgaaataaaagccactgctgctgactttaacttttcatacatacaaaacacaagtgtaaacaccaacttatccatagtgtatttaaacactgcattttaccaactaagcaactggggtaaattccttggtgcaagtcattacaaaccttatgccacaataaatgaaaaattatactactggttcaaatcaggaaaccaaacaaaacacatacaagttaaacatgaaaactactatgagtcagttaactacgcaacaggctactttcaaacaggagttttaaatgcaataaaaattacacttacagctgacattgctgctcaatctgcacaagcacacttaccagtagcagttgcaagatacaatccacaacttgacacaggagaaaaaaatgaactatgggtagtctcaattttaactgatcactatgacaaacccagagaaccccaactagtatactctggttatcctttatggatgatgttctttggctattataactttattttacaatataaaaatgatcaaacattcttagattcacatatgtttgtaataagatctccagccatattaaaactttcaacaaccactgatcaagactattttccctttatagacttttcctttttaaatggaaaaatgccatttcaagaatacttagacgaaaacagtaaaaaattttggtacccttctgttaaaaaacaagtagaaacaataaataatattgttacttgtggcccatacataccaaaatattctgacaatagggacagttcatgggatttaaaatataaatctactttttactttaagtttggaggtccacagatttcagaaacaccagttgttgacccacaaaaacaagaagactatgatgtgcccgataagttcaaaagcacaatacaaatatctgatccaatcacacaagcctgtgaaacaatgttccacaactgggactacagaagggggcttattacaccagcagctattaaaagagtgtcaaaacacctcgaaactgattcagatgtctcgtcaacttctacagaaccaccccacaaaaagatcaaaatcacaggagaagtcccctatctcccacaagaaacagaagaagtccaagcgtgtctcctctcactctgcgaagaagataccttccaagaagaagaagaggatctccacaagctcatcaagcagcagcacaaaaagcagcagcagctcaagcagcagctcctcaagctcctagcagaaatgaacaaaaaacaaactatgctacaacttcaaacaggaatcttaggctaactagatttaagcctggctttgaagaagacacagaaaaacaactagcaaaaatattcaaaagacctccaagaacttataaagaagaccctcccttttatccatggctacctataacacccaaagtaatttttgcgcttaattttaaaggctaggccaacaatgtacacttagtaaagcatgtttaataaagttttaccccccaaaaaaaaaaaaaaaaaaaataaataaaaaaaagcaaaaattcggcgctcgcgcgcgctgcgcgcgcgcgagcgccgtcacgcgccgcccgccgccatcttgggtgcggctgggcgggggctaaaatggcgggacccaatcactttatactttcacttcccaattaaaacctgccacgtcacagtaaaggggtggagactttcaaactatataactaagtggggtgacgaatggctgagtttaccccgctagacggtgcagggaccggatcgagcgcagcgaggaggtccccagctgcccgtggg

SEQ ID NO: 3735 - protein, 662 aa, Gammatorquevirus sp.
MPFWWRRRRKFWGGRWRKPRYNKYKRRRKPRRRYRRTYGRRRRRHRKRRYKVRRKRKAIVLKQWQPDSIRKCKIKVIDSFIIGAHGTQFKCYTNEAKKYPQPKQPAGGGFGMEVFSLEDLYLRYKAHKSIWTATNDYKDLVRYTGCTFTFYRHATTDFILSFNTQPPFTLDKFSYTSIHPLNMLLQKHKKILYSLKTKPWGPSKVKFKIKPPKQMSTKWFFQKFFATAGLVEIKATAADFNFSYIQNTSVNTNLSIVYLNTAFYQLSNWGKFLGASHYKPYATINEKLYYWFKSGNQTKHIQVKHENYYESVNYATGYFQTGVLNAIKITLTADIAAQSAQAHLPVAVARYNPQLDTGEKNELWVVSILTDHYDKPREPQLVYSGYPLWMMFFGYYNFILQYKNDQTFLDSHMFVIRSPAILKLSTTTDQDYFPFIDFSFLNGKMPFQEYLDENSKKFWYPSVKKQVETINNIVTCGPYIPKYSDNRDSSWDLKYKSTFYFKFGGPQISETPVVDPQKQEDYDVPDKFKSTIQISDPITQACETMFHNWDYRRGLITPAAIKRVSKHLETDSDVSSTSTEPPHKKIKITGEVPYLPQETEEVQACLLSLCEEDTFQEEEEDLHKLIKQQHKKQQQLKQQLLKLLAEMNKKQTMLQLQTGILG

SEQ ID NO: 3736 - protein, 123 aa, Gammatorquevirus sp.
MQNISAEDFFKPTNFNNTTKNQLWMSIIADSHDSLCNCWHPFAHMLASLFPPGHQDRNKTIEQILQRDFAETCHSGGEEGESSGAAGGGNPDTTNIKEEENQEEDIDALMAAAAAATEKEDTR

SEQ ID NO: 3737 - protein, 104 aa, Gammatorquevirus sp.
LRRRYLPRRRRGSPQAHQAAAQKAAAAQAAAPQAPSRNEQKTNYATTSNRNLRLTRFKPGFEEDTEKQLAKIFKRPPRTYKEDPPFYPWLPITPKVIFALNFKG

SEQ ID NO: 3738 - DNA, 2812 bp, Betatorquevirus sp.
cagataccggaggtgagtgaaaccaccgtagttaaggggcttattgggctgaagcagtcttgacggaacgggcaactaacttaaaaaatatttactttttagaaatgagctcttatttaactccatctatatactcaagaaatggattagaaaaccaatggcttaactctgtatggaatatccacgatcttatttgcggctgcaacaactgcttcaaacacctttttgatatattaaaagcaaaaaataacctgccatgcctcccttcaacttctaccgaagacgctggaacgcaaacaggtggagatggagatggagacgacgtgctagaggctggagacctagacaagctattcgaagaaagtttcgacgaagaagatgggtaagaagacgccgctatataaaaagatttaaaaagaaattatctaaaataactttaaaacaatggcaacctaagaaaataattaaatgtaacataaaaggcaatttatgcttatttgcttgcgggaaacaaagaactaatcataattatataattacttgtgaatcttatgtacctgaaagtgaacctgggggagggtcatggagtgtatttcaatttactttgagagttttatatgatgaatttttacactttagaaactggtggacaaacagtaaccaaggcttaccgttagcaagatacttaggctcaaactttagattttatagaagcgcacacacaagctacatagtaacacctataacatgtggaccatttgaagtaacaaaagaaacatactttgatacacaaccaagtagaagactaatggacagaaaatcatttatagtaccacaactaggacgaggaccactaaaaaaaacatacataaaaaagaaatttaaaccaccttcactatttctaaacaaatggtattttcaacaagacatttacaataccacactaataatgtttatggtatcagcatgtagctttgaccaaatgtacgccccacaagaccaaattagcacaaacataacattagtatctttaaatacaaacttatttcaaatgcctaactacaaaaaaataccatactcacctaaagccacaggcacattccaaacatacctatggtcatatggtaacggaaacaaacagaaatggagagatataattagcttaagtaatttacaattaatgcaagacggaacgcaaacaacagacataacacatatacaaccattaacagaaatacacaaaaatgaatatggaaatccatttacacaccactattcacaacctgatgtaagaatcttttacggttcagaaccaaaaagcaaagacacattagaaagcaaacctgacatatcagaaattacaggcctctttcaaagatgcagatacaacccttttagagataaaggaaaaggaaacaaagtatactggaaaccaacagacacagaccaaggctcactattatcactaccaacagacagtagactattaacagaagacttaccactttggctaatactctggggaatagaagactggacattaaaatcaaaaccaattacacatttatatgaagaatatcaattagtaattcaatcaccatatatagaaccaaagttaccctgctacgtatttttagattattactttacacaccccaaggaacacttatctgactacacagagacagacaaagcacactggcacccaaaatatggttatcaaatatatgcactagaacaactagcaaactcaggcccagcaacacctaaactaaacctagtaaaacaaatacaagctcacacattttataactttcattttaagtggggcggatgtccagcaccaatggaactcattacagacccagcagaccaagaaaaatttcccactcccaataaccagctccaaggacttgagatacaggatccagaaacccccaaagaatactgcttatacacatgggacgaaagacaaaaccaaattacagaaccagctgcaaaaagacttaaacaagactttacatctacaaaactttttacaggacttggagcaaaagacattccactcctcgaagcaccacaaaaaacatgggaaacggaggaagaggaaaaacaaaaagagatatcagtccagctccagcagctgcgagagcaccgaagactcctcaagcagcgactccaccagctcctaaaaagatcaaaatatgcgcccctacaataaacttatttggtgactgtaaacctaaaaacaggagatttactcctaaagaatacgaacaagagttacaagaagcaaaaatatgggacagaccccctagacaatttatttttgacattcctttttactataatactgtaccagaacctgttgtaaactttgcattaaactataaattctaagccagcaaatattcacttgtcggtgtccatttatataagtttaaactttaataaacatccaccactctcccaaatacgcaggcgcacaagggggctccgcccccttaaacccccagggggctccgcgccccctaaaacccccaagggggctccgcccccttacaccccctaattaatatttaacaggaaaaccacctaatttgaattgccgaccacaaactgccaaccgttgcaacaacttctgctttttatactccacttcctcttttacagaactccacctcctaattcattaataatcagacacatttcctgggaggagactcaccactatataacaaacatacgtgacgaatggctgagtttaccccgtcagacggagacgagaaaagacttctcggctgcttcaggg

SEQ ID NO: 3739 - protein, 654 aa, Betatorquevirus sp.
MPPFNFYRRRWNANRWRWRWRRRARGWRPRQAIRRKFRRRRWVRRRRYIKRFKKKLSKITLKQWQPKKIIKCNIKGNLCLFACGKQRTNHNYIITCESYVPESEPGGGSWSVFQFTLRVLYDEFLHFRNWWTNSNQGLPLARYLGSNFRFYRSAHTSYIVTPITCGPFEVTKETYFDTQPSRRLMDRKSFIVPQLGRGPLKKTYIKKKFKPPSLFLNKWYFQQDIYNTTLIMFMVSACSFDQMYAPQDQISTNITLVSLNTNLFQMPNYKKIPYSPKATGTFQTYLWSYGNGNKQKWRDIISLSNLQLMQDGTQTTDITHIQPLTEIHKNEYGNPFTHHYSQPDVRIFYGSEPKSKDTLESKPDISEITGLFQRCRYNPFRDKGKGNKVYWKPTDTDQGSLLSLPTDSRLLTEDLPLWLILWGIEDWTLKSKPITHLYEEYQLVIQSPYIEPKLPCYVFLDYYFTHPKEHLSDYTETDKAHWHPKYGYQIYALEQLANSGPATPKLNLVKQIQAHTFYNFHFKWGGCPAPMELITDPADQEKFPTPNNQLQGLEIQDPETPKEYCLYTWDERQNQITEPAAKRLKQDFTSTKLFTGLGAKDIPLLEAPQKTWETEEEEKQKEISVQLQQLREHRRLLKQRLHQLLKRSKYAPLQ

SEQ ID NO: 3740 - protein, 108 aa, Betatorquevirus sp.; identical to SEQ ID NO: 3324

SEQ ID NO: 3741 - protein, 103 aa, Betatorquevirus sp.; identical to SEQ ID NO: 3325

SEQ ID NO: 3742 - DNA, 2812 bp, Gammatorquevirus sp.
gagtttaccccgctagacggtgcagagatcgaccgagggcaattcgggctagggcagtctagcggaacgggcaagaaacttaaaacaatactttattttacagatgcaaaacttatctgccaaagacttttactctgcaaccaaatttaatcaagacaccaaaaatcaactatggatgtctttaatagctgactcccatgactgttcctgtgactgtgatactccttttgctcatttgcttgctagtatatttcctcctggtcacaaagatcgtgatcttacaattaatcaaatactggcaagagactacacagaaaaatgcctttctggtggagcaggaggagaaagcactggtggggtcgcttcaaatataaaaagagaagaccctacagaagaaggagacgcagactccctcgcaggagaagatatagaaaatctacttaccgccgccgcagaagaaaacgcaaggtaagaagaaaactgaaaaaactaactgttaaagtatggcagccagaaagtattagaaggtgtaaaataataggttatgggactctagttttaggagctgaaggaagacaatctttttgctggacaaatgaagctgatgaatacatacagccaaaagcaccaggagggggaggttttggatgtgaagttataactcttaaatacttataccaagaatacaaaagacacaactgcatatggactgaatctaataactataaagacttatgcagatatacaggctgtcaaattagactatacagacatcctactatagactttatagccagctacaatatacagccaccatttgacatagagaaatttacatatacagctatacaaccacaaaacatgctactagctagacaccacaaagtaattttatgcactaaaaaaactccaaaatctaaaccatgggttaccttaaaaataaaaccaccaaaacttatgtctaccagatggttttttcaaaaagacttttccaaataccctttactactactccaagctactgcagcagatatggggcatccaaaaatcggaccactaagtcaaagtcaaatgataaccatatattatttaaatactgtattttacccagagccagactgggcagttaaattaggaactccatacaaacctgtaaaaacaatctctttacctttaactgttaaatatagagatgctaaaggtgtagctcaagaatttaaactaggtgaaaactggccagaaactgaatcaggatactaccaaagcattaattatacaggtggctggtttgacaaaagactattaaatgcatatgaaatacatggtagaacaggccaagcacaaggtgctctacctatagctgtagctagatacaatccaaatgtagatacaggagaagaaaatttagtatattttatatcacttactaaaaatgactacaaaccaccaacatttacacctgattttattattaaaggcctacccctctggatggccttttttggatactggaattttattaaacacacaacacaagacaaaaccattatgaaaagccacatgtttgtagtaaaatctccagccatacaaagactttcaactacaacagaacaaacttactatccaattatagacaaagaatttgtagaaggaaaactaccatttgatgaatacttaagtgacaatattaaaaagttttggtacccaacagctgagagacaaactacaactataaatgctattgtagagagtggaccatatgtacctaaattaactaacttaaaagaaagtacttgggaactgccatacaaatataaatttttttttaaatggggtggtccccagattacagaaaaaccagttgatgatccagcaaaacaaggagactggcctatgcccaattcagtctaccaaacattacaaattgctgacccagaaaaacaaagtccagaaaccatgtttcatgactgggactacagaagggggattattacacaaacagctattaaaagaatgtcagaaaacctccaaactgattcagatctcgaatctgttcaatcagacccgccaacgaaaaagagaaaatacacaaaagagatcccatgcaaaaagaaagcccaagaaaaaatcaagagctgtctcctctctctctgcgaagaagatacatgccaagaccagaaccaagacatcctccaactcatccacaaccagcagcagcagcagcagcagctcaagcgaaacatctacacactcctcacagagctgaagaaacagcaaagatttttacaactccagacaggagcactagagtaaagccatttgctcctggacatgaatgggaaactgaagtacagtgtgcaaaagcatttcatagaccccctagatattataaaacagaccctcctttttacccttggctaccaataactccaaaagttatctttaaccttaactttaaagactaggcccttactgttcacttagtaaaggatgtttatataagtttgtacccccaaaaaaattgtaaaataaaaacaaataaataaaaataaaaaattgcaaaaattcggcgctcgcgcgcgctgcgcgcgcgcgagcgcacaccccccgcgggggggggcagagccccccccgcaccccccccctacgtcacaaaccacgcccccaccgccatcttgggtgcggcagggcgggggctaaaatggcgggagccaataaatttatactttcactttccaattaaatttagccacgtcacaacaaagaggtggagactatcacactatataaccaagtacacagacgaatggct

SEQ ID NO: 3743 - protein, 664 aa, Gammatorquevirus sp.
MPFWWSRRRKHWWGRFKYKKRRPYRRRRRRLPRRRRYRKSTYRRRRRKRKVRRKLKKLTVKVWQPESIRRCKIIGYGTLVLGAEGRQSFCWTNEADEYIQPKAPGGGGFGCEVITLKYLYQEYKRHNCIWTESNNYKDLCRYTGCQIRLYRHPTIDFIASYNIQPPFDIEKFTYTAIQPQNMLLARHHKVILCTKKTPKSKPWVTLKIKPPKLMSTRWFFQKDFSKYPLLLLQATAADMGHPKIGPLSQSQMITIYYLNTVFYPEPDWAVKLGTPYKPVKTISLPLTVKYRDAKGVAQEFKLGENWPETESGYYQSINYTGGWFDKRLLNAYEIHGRTGQAQGALPIAVARYNPNVDTGEENLVYFISLTKNDYKPPTFTPDFIIKGLPLWMAFFGYWNFIKHTTQDKTIMKSHMFVVKSPAIQRLSTTTEQTYYPIIDKEFVEGKLPFDEYLSDNIKKFWYPTAERQTTTINAIVESGPYVPKLTNLKESTWELPYKYKFFFKWGGPQITEKPVDDPAKQGDWPMPNSVYQTLQIADPEKQSPETMFHDWDYRRGIITQTAIKRMSENLQTDSDLESVQSDPPTKKRKYTKEIPCKKKAQEKIKSCLLSLCEEDTCQDQNQDILQLIHNQQQQQQQLKRNIYTLLTELKKQQRFLQLQTGALE

SEQ ID NO: 3744 - protein, 122 aa, Gammatorquevirus sp.
MQNLSAKDFYSATKFNQDTKNQLWMSLIADSHDCSCDCDTPFAHLLASIFPPGHKDRDLTINQILARDYTEKCLSGGAGGESTGGVASNIKREDPTEEGDADSLAGEDIENLLTAAAEENAR

SEQ ID NO: 3745 - protein, 120 aa, Gammatorquevirus sp.
MQKESPRKNQELSPLSLRRRYMPRPEPRHPPTHPQPAAAAAAAQAKHLHTPHRAEETAKIFTTPDRSTRVKPFAPGHEWETEVQCAKAFHRPPRYYKTDPPFYPWLPITPKVIFNLNFKD

SEQ ID NO: 3746 - DNA, 2812 bp, Betatorquevirus sp.
cagataccggaggtgagtgaaaccaccgtagttaaggggcttattgggctgaagcagtcttgacggaacgggcaactaacttaaaaaatatttactttttagaaatgagctcttatttaactccatctatatactcaagaaatggattagaaaaccaatggcttaactctgtatggaatatccacgatcttatttgcggctgcaacaactgcttcaaacacctttttgatatattaaaagcaaaaaataacctgccatgcctcccttcaacttctaccgaagacgctggaacgcaaacaggtggagatggagatggagacgacgtgctagaggctggagacctagacaagctattcgaagaaagtttcgacgaagaagatgggtaagaagacgccgctatataaaaagatttaaaaagaaattatctaaaataactttaaaacaatggcaacctaagaaaataattaaatgtaacataaaaggcaatttatgcttatttgcttgcgggaaacaaagaactaatcataattatataattacttgtgaatcttatgtacctgaaagtgaacctgggggagggtcatggagtgtatttcaatttactttgagagttttatatgatgaatttttacactttagaaactggtggacaaacagtaaccaaggcttaccgttagcaagatacttaggctcaaactttagattttatagaagcgcacacacaagctacatagtaacacctataacatgtggaccatttgaagtaacaaaagaaacatactttgatacacaaccaagtagaagactaatggacagaaaatcatttatagtaccacaactaggacgaggaccactaaaaaaaacatacataaaaaagaaatttaaaccaccttcactatttctaaacaaatggtattttcaacaagacatttacaataccacactaataatgtttatggtatcagcatgtagctttgaccaaatgtacgccccacaagaccaaattagcacaaacataacattagtatctttaaatacaaacttatttcaaatgcctaactacaaaaaaataccatactcacctaaagccacaggcacattccaaacatacctatggtcatatggtaacggaaacaaagagcaatggacagatataattagcttaagtaatttacaattaatgcaagacggaaagcaaacaaaagacataaaacatataagaccattaacagaaatatacaaaagtgaatatggaaatccatttacacaccactattcacaacctgatgtaagaatcttttacggttcagaaccaaaaaacacagacaaattaaaaaccaaacctgacatatcagaaattacaggcctctttcaaagatgcagatacaacccttttagagataaaggaaaaggaaacaaagtatactggaaaccaacagacacagaccaaggctcactattatcactaccaacagacagtagactattaacagaagacttaccactttggctaatactctggggaatagaagactggacattaaaatcaaaaccaattacacatttatatgaagaatatcaattagtaattcaatcaccatatatagaaccaaagttaccctgctacgtatttttagattattactttacacaccccaaggaacacttatctgactacacagagacagacaaagcacactggcacccaaaatatggttatcaaatatatgcactagaacaactagcaaactcaggcccagcaacacctaaactaaacctagtaaaacaaatacaagctcacacattttataactttcattttaagtggggcggatgtccagcaccaatggaactcattacagacccagcagaccaagaaaaatttcccactcccaataaccagctccaaggacttgagatacaggatccagaaacccccaaagaatactgcttatacacatgggacgaaagacaaaaccaaattacagaaccagctgcaaaaagacttaaacaagactttacatctacaaaactttttacaggacttggagcaaaagacattccactcctcgaagcaccacaaaaaacatgggaaacggaggaagaggaaaaacaaaaagacacatcactccagctccagcagctgcgagagcaccgaagactcctcaagcagcgactccaccagctcctaaaaagatcaaaatatgcgcccctacaataaacttatttggtgactgtaaacctaaaaacaggagatttactcctaaagaatacgaacaagagttacaagaagcaaaaatatgggacagaccccctagacaatttatttttgacattcctttttactataatactgtaccagaacctgttgtaaactttgcattaaactataaattctaagccagcaaatattcacttgtcggtgtccatttatataagtttaaactttaataaacatccaccactctcccaaatacgcaggcgcacaagggggctccgcccccttaaacccccagggggctccgcgccccctaaaacccccaagggggctccgcccccttacaccccctaattaatatttaacaggaaaaccacctaatttgaattgccgaccacaaactgccaaccgttgcaacaacttctgctttttatactccacttcctcttttacagaactccacctcctaattcattaataatcagacacatttcctgggaggagactcaccactatataacaaacatacgtgacgaatggctgagtttaccccgtcagacggagacgagaaaagacttctcggctgcttcaggg

SEQ ID NO: 3747 - protein, 654 aa, Betatorquevirus sp.
MPPFNFYRRRWNANRWRWRWRRRARGWRPRQAIRRKFRRRRWVRRRRYIKRFKKKLSKITLKQWQPKKIIKCNIKGNLCLFACGKQRTNHNYIITCESYVPESEPGGGSWSVFQFTLRVLYDEFLHFRNWWTNSNQGLPLARYLGSNFRFYRSAHTSYIVTPITCGPFEVTKETYFDTQPSRRLMDRKSFIVPQLGRGPLKKTYIKKKFKPPSLFLNKWYFQQDIYNTTLIMFMVSACSFDQMYAPQDQISTNITLVSLNTNLFQMPNYKKIPYSPKATGTFQTYLWSYGNGNKEQWTDIISLSNLQLMQDGKQTKDIKHIRPLTEIYKSEYGNPFTHHYSQPDVRIFYGSEPKNTDKLKTKPDISEITGLFQRCRYNPFRDKGKGNKVYWKPTDTDQGSLLSLPTDSRLLTEDLPLWLILWGIEDWTLKSKPITHLYEEYQLVIQSPYIEPKLPCYVFLDYYFTHPKEHLSDYTETDKAHWHPKYGYQIYALEQLANSGPATPKLNLVKQIQAHTFYNFHFKWGGCPAPMELITDPADQEKFPTPNNQLQGLEIQDPETPKEYCLYTWDERQNQITEPAAKRLKQDFTSTKLFTGLGAKDIPLLEAPQKTWETEEEEKQKDTSLQLQQLREHRRLLKQRLHQLLKRSKYAPLQ

SEQ ID NO: 3748 - protein, 108 aa, Betatorquevirus sp.; identical to SEQ ID NO: 3324

SEQ ID NO: 3749 - protein, 103 aa, Betatorquevirus sp.
MGNGGRGKTKRHITPAPAAARAPKTPQAATPPAPKKIKICAPTINLFGDCKPKNRRFTPKEYEQELQEAKIWDRPPRQFIFDIPFYYNTVPEPVVNFALNYKF

SEQ ID NO: 3750 - DNA, 2812 bp, Gammatorquevirus sp.
cgggagcccgaggtgagtgaaaccaccgaggtctaggggcaactcgggctagggcagtctagcggaacgggcaagaaacttaaaaccatatttgttttacagatgtccaaaattcaagctaaagacttttatactcccacaccctttaaccaagaaacgaaaactcaaatttggatgtctcaaattgctgattctcacgacaatatctgcaattgtaatcaccccttttctcatctgcttgcctctatctttcctgtgggtcacaaagatcgtgatctttcaattaatcaaattcttctaagagattatagagaaaaatgcctttctggtggcgccgacgcagaaagccctggtttgggagattcaggtacaacaggaggtttcaaaggcataaaagaagagtccacagaagaagatttaccaaaagaagaaatagaagagctcctcgccgccgcagaagacgccgctacaaggtaagaagaaaaaaaagaaaaattactattcaacaatggcagccagaaagcattaaaaaatgtaaaattaaagggcaaggtaccattgttttaggagctgaaggaactcaatatagatgttatacaactgtaaaaaatgagtggactaatcctaaagtagctggaggtggaggatttggagttgaactttttacattaaaatatctatatagagaatataaagctaagcataatatttggacagctacaaatgaatataaagacttatgcagatacactggatgcaaatttatattttatagacaccctgaaactgattttatattatcatatgacatacagccaccatttacaattagtaaatatacctatatgttccaccatccaatgcttgcattacaaagaagacacaaaaaacttttattgagcacagccacaaaaccaactggcagactaacaaaaagattcaaaataagaccacctaaacaacttattaccaaatggttctttcaagaagactttgcagactatggcttagtatcaatatcagccacagcttgtaactttagatatccatggcttggggtctctaatgaaaatttaataattaccttatactacttacaaccagaattctacccacactcagactgggcacaagtccactcaactgcctggaacccattaggagcaggatcagcttctaaaacaccagaaaacttatattactattactacaatgacagaaatgtacttacagaatggcaaatgaaagcatttactggcacacacccatattacaattcactaagcatagataaaggatggttttgccctcaagtacttagagctgtacaagttaaatcaaacccagacacgcatgcacaatcaataactccatgtggagtacttagatataacccagcagaagacactggtaaaggcaacaaaatttgggtaacagatatactagccagcagctatgctgaaccaaaagatgaagacttaataatgcaagattatccactatatatgatgttttatggatatacatcatatttacagcaagttaaacatgaatctgtttcatttaaaggaaaaatgtttgttgtgcagagtaatgcactaaaaagagttagaggagaatccacaaaaaactattacccactcatagacaaatctttttgctatggtaaaggtcctaacatgacagaccccatactattcactggcagtatctggtacccctccatatatggccaaagagactctataaatgctatagtaaactgtggaccactaacaccaaaatacaatgaaactaaaaatagtacatggcaatgcaattatttttatgatttttattttaagtggggaggtgcatacccaccagaccaagaagttgaagacccaaccacaaaaggaaaatatcctgtgcccgatcacatctcccaaaatgtacaaattgctgacccacaaaaacaaagatattcaaaaatattcaaaagctgggactacagaaggggagcacttacaaacaaagctattaaaagaatgcaggaaaacctctcatctgatgagtcttgttcaacagattcaacaacatgctcctcagcaaaaagaagaagagtactccccacactccaggacccgaagaaagaaaacaaagaaatccagaaatgtctcctctcactctgcgaagaacctacatggcaagagcaagaaaaaacaccagacctcatccagctcatccaccagcagcacgagcagcagcagctactcaagcacaacctcttaaccttaatagcagatctaaaagccaaacagaggaatctactacaccaaacaggatttctaggttaaccagatttaaacctggttttgaatggcaaacagaatgtgaactagcacaagcattcagaagaccccctagattgtttaaagaggacacccctttttacccctggcttcctttagaaccccgtgttaactttcaccttaattttaaattctaggccgacactgttcacttagtagagtttgtttatataagtttgcaccccaaaaaaattgtaaaataaaaaaaaaaaaaaaaaccccccctacgtcacaggccacgcccccgccgccatcttgggtgcggcagggcgggggctaaaatggcgggacccaatcattttatactttcactttccaattaaaacacaccacgtcacaacaaaggggtggagactttaaaactatataaccaagtgtagtggcgaatggctgagtttatcccgctagacggtgcagggaccggatcgagcgcagcgaggaggtccccggctgcccatggg

SEQ ID NO: 3751 - protein, 672 aa, Gammatorquevirus sp.; identical to SEQ ID NO: 1122

SEQ ID NO: 3752 - protein, 124 aa, Gammatorquevirus sp.; identical to SEQ ID NO: 1123

SEQ ID NO: 3753 - protein, 143 aa, Gammatorquevirus sp.; identical to SEQ ID NO: 1124

SEQ ID NO: 3754 - DNA, 2812 bp, Gammatorquevirus sp.
cgggagcccgaggtgagtgaaaccaccgaggtctaggggcaattcgggctagggcagtctagcggaacgggcaagaaacttaaaacaatactttgttttacagatgcaaaacatttctgcaaaagacttctttattgaaactccatataaccaagatactaaaaatcaaatatggatgtctcaaattgctgattctcatgacaatatctgtgactgcaagcatccttttgctcacctgcttgcttctatttttcctcctggtcataaggacagggtgctgtccattaatcaaatacttgcaagagattatacagagaaatgcctttctggtggagacgcagaaagaagagatggtggggaaaattcaggtggcgccgccgcttcaacaaatataaaggcagaagaagaaaaagacttttcagaagaagaaatagaaaagctcctcgccgccgccgcagaagaaaatacaaggtaagaagaaaaaaaaaaaaaattgttattcaacaatggcaaccacagagtataagaaaatgtaaaattaaaggattttcatgtattgttatgggagcaaatggaactcaataccaatgctatacaaatcaagccaaagaatatgtacagcctaaagctccttcaggtggtggttttggttgtgaagttataaacttaaaatggttatatgatcaatatttgtgccataacaatatatggactgcctccaatgaatacaaagacttatgcagatatactgggggaaaaattacattttacagacatccatttgtagactttgttgtggcatatgacaatcaacctccatttgacttaaataaatacacctatccagaaatacaaccacaaaacatgctactcagaaaacataaaagactagtactcagtaccctgacaaaacctacaggaagatctaaagttacaattaaatttggaccaccaaagcaaatgataactaaatggttttttcaaaaagactttgctgatgccaacttagttaaaatttcagcagctgcagcaagctttagatttccctcaatatctcatggctcacaaggaccaatctttacagtatatgccttaaatacaacattttatcaaaatagtaattggctggattccagtcaagtaacacaaggctatgtaccttacacagcatgcaagtttccactacactttaaatacaaagaaagaggtacctataaagtttttacatatgacccaacaaattttacacataaatacaatgaaagcataacctatgaaaaaggaatatttagtccaaaagtattatttgctgaagctattgtacaacaaagcaccccaccatccccagacgcagattggaagaaactcccaggttacatagcctcactaccactaatacctcttagatataacccacaggaagatacaggacacggtaacagtgtttatttaacaagtttaataaaaggtcactatgacaaaccatctgttactgaagcatttcactttgacaatgtacctttatacacagcattttatggatatgctgactttgtccaacaagacacaaaagacaaaggggtactagacactcacatgtttgtagtaaaatgtgatgctttacatcctatatcacaaaatacaaaacaaatatactaccccattatagacatggactacgctgctggtaaactaccttgggatgaatatttgtcccaaaaaataaaaaacacctggtacccaactgcagaatggcaaaaaataaccatgaatagctttgtcacttcaggtccatacactccaaaatttgatcctggagatagagactccacatggcaattaaactataaatatcaatttttttttaagtggggaggccctgaagtcacagaccctgcagttgaagatcccaaaacaagaaaaaaatatcctgtgcccgatacagtcttccagacagtaccggtatccaacccacaaaaactccaaacagaaagtctcttacatgagtgggactttagaaggggatttgttacagcaacagctcttaaaagaatgtcagaaaacatccaaactgatacatctttctactctgatgactcagagtcaccccgaaaacgaagaaagaccacaaaagaacttacaaccacggagaaaaaacaagagaaaatcaaaaaatgtctcctctcactctgcgaagagcctacatgccaagaagaaacggaggacctacacaagctcatccagcagcagcagcagcagcagtacaagctcaaaagaaacctcctcaagctcctcacacacctgaaaaaaacacagagagtatcacaacttcaaacaggccttttggaataaaattaacaagatttaaaccaggatttgaatgggacacagaatgtgaactagcacaagcatttagaagaccccctagattgtttaaagaagacaccccattttacccctggttacccaaacctgaaccccttgtcaattttcaccttaattttaagttctaggccgacactgttcacttagcggagtctgtttatataagtttgcaccccaccccgcaccccccctacgtcacaaaccacgcccccgccgccatcttgggtgcggcagggcgggggctaaaatggcgggacccaatcattttatactttcactttccaattaaaacccgccacgttacaagaaaggggtggagactttaaaactatataaccaagtggggtggcgaatggctgagtttaccccgctagacggtgcagggaccggatcgagcgcagcgaggaggtccccggctgcccatggg

SEQ ID NO: 3755 - protein, 677 aa, Gammatorquevirus sp.
MPFWWRRRKKRWWGKFRWRRRFNKYKGRRRKRLFRRRNRKAPRRRRRRKYKVRRKKKKIVIQQWQPQSIRKCKIKGFSCIVMGANGTQYQCYTNQAKEYVQPKAPSGGGFGCEVINLKWLYDQYLCHNNIWTASNEYKDLCRYTGGKITFYRHPFVDFVVAYDNQPPFDLNKYTYPEIQPQNMLLRKHKRLVLSTLTKPTGRSKVTIKFGPPKQMITKWFFQKDFADANLVKISAAAASFRFPSISHGSQGPIFTVYALNTTFYQNSNWLDSSQVTQGYVPYTACKFPLHFKYKERGTYKVFTYDPTNFTHKYNESITYEKGIFSPKVLFAEAIVQQSTPPSPDADWKKLPGYIASLPLIPLRYNPQEDTGHGNSVYLTSLIKGHYDKPSVTEAFHFDNVPLYTAFYGYADFVQQDTKDKGVLDTHMFVVKCDALHPISQNTKQIYYPIIDMDYAAGKLPWDEYLSQKIKNTWYPTAEWQKITMNSFVTSGPYTPKFDPGDRDSTWQLNYKYQFFFKWGGPEVTDPAVEDPKTRKKYPVPDTVFQTVPVSNPQKLQTESLLHEWDFRRGFVTATALKRMSENIQTDTSFYSDDSESPRKRRKTTKELTTTEKKQEKIKKCLLSLCEEPTCQEETEDLHKLIQQQQQQQYKLKRNLLKLLTHLKKTQRVSQLQTGLLE

SEQ ID NO: 3756 - protein, 123 aa, Gammatorquevirus sp.
MQNISAKDFFIETPYNQDTKNQIWMSQIADSHDNICDCKHPFAHLLASIFPPGHKDRVLSINQILARDYTEKCLSGGDAERRDGGENSGGAAASTNIKAEEEKDFSEEEIEKLLAAAAEENTR

SEQ ID NO: 3757 - protein, 112 aa, Gammatorquevirus sp.
MSPLTLRRAYMPRRNGGPTQAHPAAAAAAVQAQKKPPQAPHTPEKNTESITTSNRPFGIKLTRFKPGFEWDTECELAQAFRRPPRLFKEDTPFYPWLPKPEPLVNFHLNFKF

SEQ ID NO: 3758 - DNA, 2811 bp, Betatorquevirus sp.
caggtgccggaggtgagtgaaaccaccgtagtcaaggggcaatatgggctatgtcagtctggcggaacgggcaagaaactaaataatattcttttacagatgtccattttctggaaaccaacaccatttggacccagagaaagagaaaaccaatggattaactactgcattcaaggacacgaccaaatttgcggctgtgactcacccggagaccacctactttactgccttgctgaaagaagtggaaaacttaatatttccaaaaacatactagaagaatcaacaaaatgccttactacccacgctggagacgacgccgctactggagaacaagacgccatagaccttctagatggagacctagaaaaattattcgaagaagatatcgccgatcctactactgggtaagaagacgccgctttcttaaaaaactatttaaaataactcttaaacaatttcaacctagaaaaattgttaaatgtaaaatacaaggtgaaatatgcttatttcaagcaggaaaaggacttatatttcaaaactatgctcaatatcaagatagctttgtacctgagggagaaccgggaggagggggatggtcagcactagtttttaacttaggaggactttaccaagaaaatcaaaaactacacaatagatggtctaaatctaacaaaggcctgccactagctagatacaatggctgtaaatttaaattttggagatcttgggacacagactacataatacactggcaaacatgtccaccaatgacagacacagaactcttacacttaaacgcacaacccttcatgacaatgctaacaaaaaatcattttatagttccaaacttaacaagaccaccatacacaaaaaaaccctactttactaaaagatttccaccaccctcacaattaacaaacaaatggtactttcaagaagacatttgcaacacaggattactactcctaaccacaagtgcaatgtcacttgaccaatggtttttacctaacaacgaactaagcaacaacattacactaacagcccttaataccacattctttcaaaactctaactttcaagttagaggcacaaaaggttaccaaccaaaatctaacttatatatatatggacaaggaaacggtagtgaccatccacactggtcagacttaacatacttaggaaatgcagagtggtaccaagaaggaaaaaaaatgacttcagataatttaaacgactttacaacatggggaaacatttttcatgaacaacacgtacacgcagacacacacgtttactacggaaccacatttccaaacatctcacaaatacagacaacagcacaaaatataacaaaactagattacatataccacacatgcagatacaaccctaacagagacacaggcgaaggaaacgaagtattttttgttagcaactctattaaccccaaacttatctttgatccaccaaaagacccagacctacacatctatggttatccactatggcttatagcctggggatgggcagactggcaaaaaaaattatctaaaatcaaccaaatagaacaaaactacatcatggtagccaaaactaaatttataaaccccccactaccagcatatgtatttttagacaactattttactgacccagaaaaatactcacaacattacactgaaacagacaaaaaacacttttaccctaaatatgagttccaaaaagaacaatggaacttcatagcacaatcaggaccagctgcacctaaaatagacaaaagccaatccatacaagccagagctcactactcatttttctttaagtggggaggctgcccagcaccaatggaagaagtcaaagacccatgccaacaaggaaaataccccatccccaattaccagttacaagcatctcaaatccaagatccaaaaacagacaaaagatcatttatctgggactttgacgaaagaagagaaacaattacccctaaagcagctaaaagacttaaacacatctcaacttttgaaactgtattcacagatcgaccacccttcgacctccaattaccggaaaaggagacggaggaagaaacatcgtcagaggaagaaatccaaacatcactctcccacaaaatcgaccacctccaactcaagcacagactcctcagaagaaagctcaacagactaataaaacaaaaactttcaacattataaacaaaaactgtaaagttgaactatttccaacaaaaagacaaaacagacgcttttacaagcatgaactacaaactgagcgtgatttagctaacatttttaaaagacctatgagacattttattgatgatcctcccttttacccctggctccccctagagccaaaagtaaactttctgttaaactttaaagacaaataaacaaggccctattgattcactctcggtgtccgtttatattaatataaaacttaaataaacatccaccacctccctatcacacaggcctaggggctccgcccctagaaccccaagggggggggtatttagtttcttgccccttaaacacgcctctaaccgcaaaattaacatggctcaccacaaacgaacaggaaaaccactaaatttgcattgccaaccacaaactgaactatgctaatttacttcttctttttactacacacacccctaataaattaataatcaccatcatatcctaggcggagcttcaaatacatataactaactacactgacgaatggctgagtttatcacgccagacggcgaacgcatcacatcagtgactgcgagctgacattggg

SEQ ID NO: 3759 - protein, 641 aa, Betatorquevirus sp.
MPYYPRWRRRRYWRTRRHRPSRWRPRKIIRRRYRRSYYWVRRRRFLKKLFKITLKQFQPRKIVKCKIQGEICLFQAGKGLIFQNYAQYQDSFVPEGEPGGGGWSALVFNLGGLYQENQKLHNRWSKSNKGLPLARYNGCKFKFWRSWDTDYIIHWQTCPPMTDTELLHLNAQPFMTMLTKNHFIVPNLTRPPYTKKPYFTKRFPPPSQLTNKWYFQEDICNTGLLLLTTSAMSLDQWFLPNNELSNNITLTALNTTFFQNSNFQVRGTKGYQPKSNLYIYGQGNGSDHPHWSDLTYLGNAEWYQEGKKMTSDNLNDFTTWGNIFHEQHVHADTHVYYGTTFPNISQIQTTAQNITKLDYIYHTCRYNPNRDTGEGNEVFFVSNSINPKLIFDPPKDPDLHIYGYPLWLIAWGWADWQKKLSKINQIEQNYIMVAKTKFINPPLPAYVFLDNYFTDPEKYSQHYTETDKKHFYPKYEFQKEQWNFIAQSGPAAPKIDKSQSIQARAHYSFFFKWGGCPAPMEEVKDPCQQGKYPIPNYQLQASQIQDPKTDKRSFIWDFDERRETITPKAAKRLKHISTFETVFTDRPPFDLQLPEKETEEETSSEEEIQTSLSHKIDHLQLKHRLLRRKLNRLIKQKLSTL

SEQ ID NO: 3760 - protein, 102 aa, Betatorquevirus sp.; identical to SEQ ID NO: 3628

SEQ ID NO: 3761 - DNA, 2809 bp, Gammatorquevirus sp.
cgggagcccgaggtgagtgaaaccagcgaggtctaggggcaattcgggctagggcagtctagcggaacgggcaagaaagttaaaacaataattgttttacagatgtccaagattcaagcgaaggacttttttaatcccacaccctacaatcaagacacgaagaatcaaatttggatgtctcaaattgctgatgctcacgacaatatctgcaattgtaaccatccctttgctcatttgcttgccaatatctttcctgtgggtcacaaagaccgtgattttacaattaaccaaattcttctaagagactacaaagaaaaatgccgttctggtggagaaggcgaaagaagccatggtggggcagatttagatatcgcagacgcttctacaaaaacagaaggagacggagaagaagactacccaggagaagaactcgaagaactactcgccgccgccatagaagaaaacgcaaggtaagaagaaaactacaaaaaatatctataaaacaatggcaacctgatagaattgttaaatgtaaaattaaaggcttttcttgccttgtactgggagctgagggcagacagatgtactgctacacaaatgaagcctcagactacccacaaccaaaagccccaggtggtggaggctttggatgtgaaactataactttaaaatggctattccaagaatatctaaggcataataatatttggactaaatcaaatgactatacagatctttgcagatacactggatgcaaaataactctatacagacatcctacaatagattttgttgtattctatgatatacaacctccttttgacattaacaaatttacataccctgaactacagccccaaaatgtactacttagaagaagaaaaagagttatactaagcagacaaactaatcctgctggcaaaattaaacatactattaaaataagaccaccaaaacaactaataactaaatggttttttcaaagagatttttgtacctatggcttactaaaactatgtgcttctgcagcagactttaactacccaagaatatcacccttatctcagagtactattttaacagttctagctttaaatataaacttttaccaaaacagtgactgggcactaacaaaaacaaccgagccatataaaaatataacaacacagaaactaccattatactttacatacacagacaaacaaggaagagaccagatatttaactacaacccagacagtgtcacttcaacagaaccgacaaaaaaatattactactccattaacagagaaacaggcttattttcaccacaagtcttactagctaaaaaagtatccacaaagaaagctagtactgaccctggactaggatctctaccactaataacacttagatacaacccacaagaagacacaggccatggcaatgaagtatatcttaccagtattctaaatggtcactacaataagccaagcatatccactgactactcatttaatggtgttccactatatgtagccttttatggcttttggaattacttgcaaatctacagccataataaaggcttctacaaatcatatatgtttgtagttaagagtgatgcactaagaccactttcagtagcaactcctgaaaaatactttccaatactagatgctgactttgtctatggtaaactaccatgggacgaatacatgtcagcagacattaaaaaactgtggtatcctacagcagaaagacaacaggttataattaaccaaatagtagaatcaggaccatttatgcctaaactatccaatttaaaaaacagtacatgggaactaaattacaaatatcaatttttttttaagtggggaggcccatacaccacagatcaacccgttgaagatccatgcaccagaaacaaatacaatgtccccgatacactccaacaatcaatacaaattaccgaccctgaaaaaaacaaaacagaaggcatactccatgactgggactttagaaggggcttcattacacaaacagctcttaaaagaatgtcacaaaacctcccaattgattcatctctcgaatctgatgactcagaatcaccacaaaagaaaagaaaaatcaccaaggaactcccattccaacaaaagaaagaagaaaaaatccagaaatgtctcctctcactctgcgaagagccttcctgccaagaaacaccagaaacactccagcagtacatcctccagcagcgacagcagcagcgagagctcaagcacagcatcctccagctcctaactcacctaaagaagggccaaacctgtatggaactccaaacaggccttttagagtagagccattcaaaccaggatttgaatgggaaacagaatgtgaatgtgcaaaagcattttgtagaccacccagacattataaaaatgatcctccattttacccatggttacctctaacaccccttgtaaactttaaccttaactacaaatgctaggccctcaatgtacacttagtggtggatgtttaataaagtttgcccccaaaaaaaattgatatttgtaatttagttcccatgtactgttttttaaattggatcccccgccgccatcttgggcgcggcagggcgggggctaaaatggcgggaaccaatcattttatactttcactttccaattaaaacttgccacgtaacaaaaaatgggtggagactttaaaactatataaccaagtacagtgacgaatggctgagtttaccccgctagacggtgcagggaccgcatcgagcgcagcgagaaggtccccggcagcccatggg

SEQ ID NO: 3762 - protein, 672 aa, Gammatorquevirus sp.
MPFWWRRRKKPWWGRFRYRRRFYKNRRRRRRRLPRRRTRRTTRRRHRRKRKVRRKLQKISIKQWQPDRIVKCKIKGFSCLVLGAEGRQMYCYTNEASDYPQPKAPGGGGFGCETITLKWLFQEYLRHNNIWTKSNDYTDLCRYTGCKITLYRHPTIDFVVFYDIQPPFDINKFTYPELQPQNVLLRRRKRVILSRQTNPAGKIKHTIKIRPPKQLITKWFFQRDFCTYGLLKLCASAADFNYPRISPLSQSTILTVLALNINFYQNSDWALTKTTEPYKNITTQKLPLYFTYTDKQGRDQIFNYNPDSVTSTEPTKKYYYSINRETGLFSPQVLLAKKVSTKKASTDPGLGSLPLITLRYNPQEDTGHGNEVYLTSILNGHYNKPSISTDYSFNGVPLYVAFYGFWNYLQIYSHNKGFYKSYMFVVKSDALRPLSVATPEKYFPILDADFVYGKLPWDEYMSADIKKLWYPTAERQQVIINQIVESGPFMPKLSNLKNSTWELNYKYQFFFKWGGPYTTDQPVEDPCTRNKYNVPDTLQQSIQITDPEKNKTEGILHDWDFRRGFITQTALKRMSQNLPIDSSLESDDSESPQKKRKITKELPFQQKKEEKIQKCLLSLCEEPSCQETPETLQQYILQQRQQQRELKHSILQLLTHLKKGQTCMELQTGLLE

SEQ ID NO: 3763 - protein, 123 aa, Gammatorquevirus sp.; identical to SEQ ID NO: 3732

SEQ ID NO: 3764 - protein, 109 aa, Gammatorquevirus sp.; identical to SEQ ID NO: 3733

SEQ ID NO: 3765 - DNA, 2808 bp, Gammatorquevirus sp.
cgggagcccgaggtgagtgaaaccaccgaggtctaggggcaactcgggctagggcagtctagcggaacgggcaagaaacttaaaatattttgttttacagatgtcaagattctataaacctacaccatataatggctgtactaaaaaccaaatgtggatgtccttaattgctgatggccatgatatgcactgtggatgtactcaaccatttgctcacttgctagactccatttttcctgaaggacacactgacagagacaaaccaattagctttataattaaaagagatctacaactatgcctttctggtggaatagacgaagaaaaccatggtataccacttggaggtaccgcaaacgcattcgctggcctaaaagaagaaaaagataccacagaagaagaaaacctagacgctttactcgccgccgccgcagaagaagaagaactaaaaaggtaagaagaaaaagacaacagattttaattaaacaatggcaaccagactctattgttaaatgtaaaattaaaggcttaggatgccttgttgctggagctgaaggcagacaatccttttgttatacaaatgaacttagcaactacccacaaccaaaagctccaggaggaggaggatttggatgtgaagtttttagcttaaaatacttatatgatgaatgggtagctcacagaaatatatggacaaaatctaatgaatacaaagacctatgtagatacacaggtaccaaaattatactatatgcacatcaaacaacagactttgttttctcatttacaagacaacctccatttaacattgaaaaagacacatactctgactttcaccccattaaaatgctactgtcaagacaccacaaagtaatccttagcagaaagtcaaatcctacaggaaaattaagacacaaaattaaaattaaaccacctaaacaaatgataacaaagtggttttttcaaaaagaatttgcaaaatatggtttatttcaaatgcaagcatcagccattaacctgtcatttgcatattttggaccaaatacccaaagtcaacttttaaccttaagggcattaaatacaaagttttacacaaatgcatcttatggtaaaactacaaatacagcatatttaccctacaatacatatccacaccagggagttgacttttactatgacagaaaaaaccctactttaaaacttaatttacctatgagtacatcagacacttatgtaaaatcagtaggctactcaacaggcttttttcaacaaagagttttgaatgcctggaaagtaacacaaaaagacagtacacaacccacactgaacacacccattacattaattagatacaacccagctatggacacaggagagaatactagaatatggctaacaagcatacattcagacacttgggaagcaccacaagacaaagacttaatcatggtaggaaaaccactatggctagctttttttggcttttggaactggatagaaaaagccaaaatgactaaagactactttatctcacacatatttgtagtacaatctgatgctataagaagaattacaaacacagagcaaaaggtatttccactagttgacttagactttacacaaggcaaactaccatatgatgaatttttaacagagcaaaaaaaacagttgtggtatcccacagcagaaaaccaagttgtttcaataaatgctatagtagaaagtggcccctacattcccaaatacagtaacttaaaagaaagtacctgggaactaaaatattcctatacctccttttttaagtggggcggtccagaagtacaagatacaccagtccaaaacccaggaaaacagggagactatgatgtgcccgataaacagctacaaacaatacaagttagcaacccgctcaaagaatcctgcaaagcaatgcttagagcctgggactacagaagggggattattacaacaacagctcttaaaagaatgcatgagaacatctcacttagtgaaacttaccaatctgattgcacagaaacaccaaagaaaaagaaaaagatcacagcacaactcagaaaccccaaagaagagaaccaggaaatccaaacatgtctccactcgctcttcgaagaaagtacatgccaagacccgcaagcaagcctccagcagctcatccagcaccaacagcagcagcaagaaaaactcaagctcaacatcattcacctcctcacagacctcaagagaaagcaaaaattgatgctactccaaacaggtttagagtagagccattcaaagatggctttgaaaaagaaacagaaaaagaacttgcaattgccttttgtagacccccaagaatgtacaaaaacgacccacctttttacccctggctacctatatgccccaaagtacaatttaaccttaactttaaaggctaggccaacactgtacacttagtaaagcatgtttaataaagttaaacccccaaaaaaacaataaaaaaaaaaaaaaaaaaaaaaataaaaaaaccccacaccccccgcgggggggggcagagccccccccgcaccccccctacgtcactgaccacgcccccgccgccatcttgggtgcggcagggcgggggctaaaatggcgggaaccaatcattttatacttttactttccaatgaaaacaagccacgtaccaaaaaaggggtggagactacaaacctatataactaactacagtgacgaatggctgagtttaccccgctagacggtgcagggaccggatcgagcgcagcgaggaggtccacggctgcccaaggg

SEQ ID NO: 3766 - protein, 661 aa, Gammatorquevirus sp.
MPFWWNRRRKPWYTTWRYRKRIRWPKRRKRYHRRRKPRRFTRRRRRRRRTKKVRRKRQQILIKQWQPDSIVKCKIKGLGCLVAGAEGRQSFCYTNELSNYPQPKAPGGGGFGCEVFSLKYLYDEWVAHRNIWTKSNEYKDLCRYTGTKIILYAHQTTDFVFSFTRQPPFNIEKDTYSDFHPIKMLLSRHHKVILSRKSNPTGKLRHKIKIKPPKQMITKWFFQKEFAKYGLFQMQASAINLSFAYFGPNTQSQLLTLRALNTKFYTNASYGKTTNTAYLPYNTYPHQGVDFYYDRKNPTLKLNLPMSTSDTYVKSVGYSTGFFQQRVLNAWKVTQKDSTQPTLNTPITLIRYNPAMDTGENTRIWLTSIHSDTWEAPQDKDLIMVGKPLWLAFFGFWNWIEKAKMTKDYFISHIFVVQSDAIRRITNTEQKVFPLVDLDFTQGKLPYDEFLTEQKKQLWYPTAENQVVSINAIVESGPYIPKYSNLKESTWELKYSYTSFFKWGGPEVQDTPVQNPGKQGDYDVPDKQLQTIQVSNPLKESCKAMLRAWDYRRGIITTTALKRMHENISLSETYQSDCTETPKKKKKITAQLRNPKEENQEIQTCLHSLFEESTCQDPQASLQQLIQHQQQQQEKLKLNIIHLLTDLKRKQKLMLLQTGLE

SEQ ID NO: 3767 - protein, 118 aa, Gammatorquevirus sp.
MSRFYKPTPYNGCTKNQMWMSLIADGHDMHCGCTQPFAHLLDSIFPEGHTDRDKPISFIIKRDLQLCLSGGIDEENHGIPLGGTANAFAGLKEEKDTTEEENLDALLAAAAEEEELKR

SEQ ID NO: 3768 - protein, 135 aa, Gammatorquevirus sp.
LHRNTKEKEKDHSTTQKPQRREPGNPNMSPLALRRKYMPRPASKPPAAHPAPTAAARKTQAQHHSPPHRPQEKAKIDATPNRFRVEPFKDGFEKETEKELAIAFCRPPRMYKNDPPFYPWLPICPKVQFNLNFKG

SEQ ID NO: 3769 - DNA, 2808 bp, Betatorquevirus sp.
caggtgccggaggtgagtgaaaccaccgtagtcaaggggcaatatgggctatgtcagtctggcggaacgggcaagaaactaaataatattattttacagatgtccattttctggaaaccaacaccatttggacccagagaaagagaaaaccaatggattaactactgcattcaaggacacgaccaaatttgcggctgtgactcacccggagaccacctactttactgccttgctgaaagaagtggaaaacttaatatttccaaaaacatactagaagaatcaacaaaatgccttactacccacgctggagacgacgccgctactggagaacaagacgccatagaccttctagatggagacctagaaaaattattcgaagaagatatcgccgatcctactactgggtaagaagacgccgctttcttaaaaaactatttaaaataactcttaaacaatttcaacctagaaaaattattaaatgtaaaatacaaggtgaaatatgcttatttcaagcaggaaaaggacttatatttcaaaactatgctcaatatcaagatagctttgtacctgagggagaaccgggaggagggggatggtcagcactagtttttaacttaggaggactttaccaagaaaatcaaaaactacacaatagatggtctaaatctaacaaaggcctgccactagctagatacaatggctgtaaatttaaattttggagatcttgggacacagactacataatacactggcaaacatgtccaccaatgacagacacagaactcttacacttaaacgcacaaccctttatgacaatgctaacaaaaaatcattttatagttccaaacttaacaagaccaccatacacaaaaaaaccctactttactaaaagatttccaccaccctcacaattaacaaacaaatggtactttcaagaagacatttgcaacacaggattactactcctaaccacaagtgcaatgtcacttgaccaatggtttttacctaacaacgaactaagcaacaacattacactaacagcccttaataccacattctttcaaaactctaacttccaagttagaggcacaaaaggttaccaaccaaaatctaacttatatatatatggacaaggaaacggtagtgaagacccaccttgggaagaattagtatacttaggaaatgcagagtggtaccaagaaggacaaaaaatgaatgcacaaaatttaaacaactttacacaatggggaaacatttttcatgcacaacacgtacacgcagacacacacgtttactacggaaccaaatttccagacataaaagaactaaaaaccaaagcaacgaatataacaaaactagattacttataccacacatgcagatacaaccctaacagagacacaggcgaaggaaacgaagtattttttgttagcaactctattaaccccaaactaatctttgatccaccaaaagacccagacctacacatctatggttatccactatggcttatagcctggggatgggcagactggcaaaaaaaattagctaaaatcaaccaaatagaacaaaactacatcatggtagccaaaactaaatttataagccccccactaccagcatatgtatttttagacaactattttactaacccagaaagatacgcagaacattacactgaaacagacaaaaaacacttttaccctaaatatgagtaccaaaaagaacaatggaacttaatagcacaatcaggaccagctgcacctaaaatagacaaaagccaatccatacaagccagagctcactactcatttttctttaagtggggaggctgcccagcaccaatggaagaagtcaaagacccatgccaacaaggaaaataccccatccccaattaccagttacaagcatctcaaatccaagatccaaaaacagacaaaagatcatttatctgggactttgacgaaagaagagaaacaattacccctaaagcagctaaaagacttaaacacatctcaacttttgaaactatattcacagatcgaccacccttcgacctccaattaccggaaaaggagacggaggaagaaacatcgtcagaggaagaaatccaaacatcactctcccacaaaatcgaccacctccaactcaagcacagactcctcagaagaaagctcaacagactaataaaacaaaaactttcaacattataaacaaaaactgtaaagttgaactatttccaacaaaaagacaaaacagacgcttttacaaacatgaactacaaactgagcgtgatttagctaacattttcaaaagacctatgagacattttattgatgatcctcccttttacccctggctccccctagagccaaaagtgaactttctgttaaactttaaagacaaataaacaaggccctattgattcactctcggtgtccgtttatattaatataaaacttaaataaacatccaccacctccctatcacacaggcctaggggctccgcccctagaaccccaagggggggggcccttacccccccccttaaacacgcctctaaccgcaaaattaacatggctcaccacaaacgaacaggaaaaccactaaatttgcattgccgaccacaaactgaactatgctaatttacttcttctttttactacacacacccctaataaattaataatcaccatcatatcctaggcggagcttcaaatacatataactaactacactgacgaatggctgagtttatcacgccagacggcgaacgcatcacatcagtgactgcgagctgacattggg

SEQ ID NO: 3770 - protein, 641 aa, Betatorquevirus sp.
MPYYPRWRRRRYWRTRRHRPSRWRPRKIIRRRYRRSYYWVRRRRFLKKLFKITLKQFQPRKIIKCKIQGEICLFQAGKGLIFQNYAQYQDSFVPEGEPGGGGWSALVFNLGGLYQENQKLHNRWSKSNKGLPLARYNGCKFKFWRSWDTDYIIHWQTCPPMTDTELLHLNAQPFMTMLTKNHFIVPNLTRPPYTKKPYFTKRFPPPSQLTNKWYFQEDICNTGLLLLTTSAMSLDQWFLPNNELSNNITLTALNTTFFQNSNFQVRGTKGYQPKSNLYIYGQGNGSEDPPWEELVYLGNAEWYQEGQKMNAQNLNNFTQWGNIFHAQHVHADTHVYYGTKFPDIKELKTKATNITKLDYLYHTCRYNPNRDTGEGNEVFFVSNSINPKLIFDPPKDPDLHIYGYPLWLIAWGWADWQKKLAKINQIEQNYIMVAKTKFISPPLPAYVFLDNYFTNPERYAEHYTETDKKHFYPKYEYQKEQWNLIAQSGPAAPKIDKSQSIQARAHYSFFFKWGGCPAPMEEVKDPCQQGKYPIPNYQLQASQIQDPKTDKRSFIWDFDERRETITPKAAKRLKHISTFETIFTDRPPFDLQLPEKETEEETSSEEEIQTSLSHKIDHLQLKHRLLRRKLNRLIKQKLSTL

SEQ ID NO: 3771 - protein, 102 aa, Betatorquevirus sp.; identical to SEQ ID NO: 3628

SEQ ID NO: 3772 - DNA, 2807 bp, Betatorquevirus sp.
caggtgctggaggtgagtgaaaccaccgaaatcaaggggcttaatgggcgggcgaagtctaggcggaatgggcatcaaattaaaaatatatattacattacagatgacctactatatgaaaaaccacaaccacactccaaaataccttgaattaggatggattaacagcattttccagaatcacgatcaaatttgtggctgcaacaacgtcattactcacctacttggagctattaaccaccaaaatagcaagaaaattttatctcgacaagaaattaagaaaatacaatgccgccttactggagaagaaactatcgataccgaaactggagaagacgacgcccttaccggtggagaactagaggctttgttcgcagacaacgttttcgaagaagaagagcctacagggtaagaagacgacgcattcataaaaaactttctaaaattagaatacatgaatttcagccagagactattaaactgtgcaaaattaaaggaactaaatgtttgtttcaaggaggatatgatagacgtagcaataattatgctcaatatataggatcaatagtgccagaacatgaaccagggggcggagggtggtctctgatggtattctcactagatagcctctgggaagactatgaacacctacaaaacatatggacaactagcaatgcaggccttccactatgcagatttttaggagttactatgagattttaccaacaagaatacacagactatgtagttaactatgatctatgctggcctatgaaagacacaccactaacacatgcaaatagccacccacaaagaatgctactacaaaaaaataaaattgtagttcctagcctattaactaaaagacgaaaaaaaccttatgttaaaaaatttattaaacctcctgcacaattaaaaaatgaatggtactttcaaaaagacttagctggagtagatttgctaatgctaaccacaaccgcatgtgacctaagaaacagttttatttcaccaccagctaagagcaataacataacacttacttccttaaatactaacttctggtacaaccgcaatttccaaagaccttccgcaactactggctacagtcctaaaaataacacatatatgtacacacagggtaacggcacaaccgcaacgcccacacaaaaagaccaactaatttacttaggaaactccattgattatcaaccaggacaaaaactcccaaaaggccaaggtgaggcaggacaaatgacaacctggggaaacccattttatcatttatatacacaaacagatatacctatctatataagccaaaaccctcctacaactttacctccaagtttacaaggaaaaataacagaaacaacacaatacttaggagtaaaagttagatacaacccagaaaaagacacaggtgaaggaaacatggcctactttttaccaaacacaacaggctcaggatgggacccccctgaagaccccaacttaagaatagaaggctttcctctatggcttatgctatggggatgggcagactggattaaaaaattagcacatattgcaaaagttgatgacaactacatgctagttattagaagtagcttttttgattcacaattaccagcatacgtatttttagatgaatccttttggaacggtgaaggcccatataaaactgaaaggtctacatatgaccactttcactggtatccacaatttaaataccaaaaactatcaattgaaacaattagtacaagtggaccttatgtagcgcacactccttcacaaaattccttacaagccaaatgtatatattcatttaaatttaaatggggaggctgtccaagaaccatagaaaaaatttatgctccttcctcacagcccacctggattacaccccataacttcactatcggatctaaagtccagaatccaagaacaaacccactcacatacatctacccatgggacacaaaaagagacattatcacagaaaacgctttacaaagaatacaagaacaacaagaaactgatgaacttttatcaaaacctacaggactaccaactacaagcagaagcgacccaaaaccgatactccaaaaaacccaagaaagcgacccggagacatcgtcagaggaagaagagaaaacaccattacagctccagctcaacaagctccgccgaagacagcaactcctcaagcagctcctcctgaaaacccaaaaaaatatagaataatacatattgaaaaacaaataaacttatttggacccgttgagtctcctaacaggagacttactttatgggagcaacaacaagaaaaagaggacgcagccatatggctaagacctcaaagacattatattaaagataaacctacctatccttttttccctcttactcccttagttcccaaacttaattttgacttgggttataatcaataaaggccaacaattttcacttaatggtgtctgtttctttaagtttaacttaactaaacgaactccgcctcccaacactgttggcgccaaaagggggctccgcccccttaaacccccggggggggcccaacactgttggcgccaaaagggggctccgcccccttaaacccccggggggggcaagcccccccccataaccccccccaataacgtcacaaactccacctataactccaccctaatgaataataaatttgggaggagctacttccctatataactaacagtacttccgaatggctgagtttatgccgccagacggaggcaaggaaggttactgacttgactgagcctggg

SEQ ID NO: 3773 - protein, 651 aa, Betatorquevirus sp.
MPPYWRRNYRYRNWRRRRPYRWRTRGFVRRQRFRRRRAYRVRRRRIHKKLSKIRIHEFQPETIKLCKIKGTKCLFQGGYDRRSNNYAQYIGSIVPEHEPGGGGWSLMVFSLDSLWEDYEHLQNIWTTSNAGLPLCRFLGVTMRFYQQEYTDYVVNYDLCWPMKDTPLTHANSHPQRMLLQKNKIVVPSLLTKRRKKPYVKKFIKPPAQLKNEWYFQKDLAGVDLLMLTTTACDLRNSFISPPAKSNNITLTSLNTNFWYNRNFQRPSATTGYSPKNNTYMYTQGNGTTATPTQKDQLIYLGNSIDYQPGQKLPKGQGEAGQMTTWGNPFYHLYTQTDIPIYISQNPPTTLPPSLQGKITETTQYLGVKVRYNPEKDTGEGNMAYFLPNTTGSGWDPPEDPNLRIEGFPLWLMLWGWADWIKKLAHIAKVDDNYMLVIRSSFFDSQLPAYVFLDESFWNGEGPYKTERSTYDHFHWYPQFKYQKLSIETISTSGPYVAHTPSQNSLQAKCIYSFKFKWGGCPRTIEKIYAPSSQPTWITPHNFTIGSKVQNPRTNPLTYIYPWDTKRDIITENALQRIQEQQETDELLSKPTGLPTTSRSDPKPILQKTQESDPETSSEEEEKTPLQLQLNKLRRRQQLLKQLLLKTQKNIE

SEQ ID NO: 3774 - protein, 122 aa, Betatorquevirus sp.
MGGRSLGGMGIKLKIYITLQMTYYMKNHNHTPKYLELGWINSIFQNHDQICGCNNVITHLLGAINHQNSKKILSRQEIKKIQCRLTGEETIDTETGEDDALTGGELEALFADNVFEEEEPTG

SEQ ID NO: 3775 - DNA, 2806 bp, Betatorquevirus sp.
caggtgctggaggtgagtgaaaccaccgaaatcaaggggcttaatgggcgggcgaagtctaggcggaatgggcatcaaattaaaaatatatattacattacagatgacctactatatgaaaaaccacaaccacactccaaaataccttgaattaggatggattaacagcattttccagaatcacgatcaaatttgtggctgcaacaacgtcattactcacctacttggagctattaaccaccaaaatagcaagaaaattttatctcgacaagaaattaagaaaatacaatgccgccttactggagaagaaactatcgataccgaaactggagaagacgacgcccttaccggtggagaactagaggctttgttcgcagacaacgttttcgaagaagaagagcctacagggtaagaagacgacgcattcataaaaaactttctaaaattagaatacatgaatttcagccagagactattaaactgtgcaaaattaaaggaactaaatgtttgtttcaaggaggatatgatagacgtagcaataattatgctcaatatataggatcaatagtgccagaacatgaaccagggggcggagggtggtctctgatggtattctcactagatagcctctgggaagactatgaacacctacaaaacatatggacaactagcaatgcaggccttccactatgcagatttttaggagttactatgagattttaccaacaagaatacacagactatgtagttaactatgatctatgctggcctatgaaagacacaccactaacacatgcaaatagccacccacaaagaatgctactacaaaaaaataaaattgtagttcctagcctattaactaaaagacgaaaaaaaccttatgttaaaaaatttattaaacctcctgcacaattaaaaaatgaatggtactttcaaaaagacttagctggagtagatttgctaatgctaaccacaaccgcatgtgacctaagaaacagttttatttcaccaccagctaagagcaataacataacacttacttccttaaatactaacttctggtacaaccgcaatttccaaagaccttccgcaactactggctacagtcctaaaaataacacatatatgtacacacagggtaacggcacaaccgcaacgcccacacaaaaagaccaactaatttacttaggaaactccattgattatcaaccaggacaaaaactcccaaaaggccaaggtgaggcaggacaaatgacaacctggggaaacccattttatcatttatatacacaaacagatatacctatctatataagccaaaaccctcctacaactttacctccaagtttacaaggaaaaataacagaaacaacacaatacttaggagtaaaagttagatacaacccagaaaaagacacaggtgaaggaaacatggcctactttttaccaaacacaacaggctcaggatgggacccccctgaagaccccaacttaagaatagaaggctttcctctatggcttatgctatggggatgggcagactggattaaaaaattagcacatattgcaaaagttgatgacaactacatgctagttattagaagtagcttttttgattcacaattaccagcatacgtatttttagatgaatccttttggaacggtgaaggcccatataaaactgaaaggtctacatatgaccactttcactggtatccacaatttaaataccaaaaactatcaattgaaacaattagtacaagtggaccttatgtagcgcacactccttcacaaaattccttacaagccaaatgtatatattcatttaaatttaaatggggaggctgtccaagaaccatagaaaaaatttatgctccttcctcacagcccacctggattacaccccataacttcactatcggatctaaagtccagaatccaagaacaaacccactcacatacatctacccatgggacacaaaaagagacattatcacagaaaacgctttacaaagaatacaagaacaacaagaaactgatgaacttttatcaaaacctacaggactaccaactacaagcagaagcgacccaaaaccgatactccaaaaaacccaagaaagcgacccggagacatcgtcagaggaagaagagaaaacaccattacagctccagctcaacaagctccgccgaagacagcgactcctcaaggagctcctcctgaaaacccaaaaaaatatagaataatacatattgaaaaacaaataaacttatttggacccgttgagtctcctaacaggagacttactttatgggagcaacaacaagaaaaagaggacgcagccatatggctaagacctcaaagacattatattaaagataaacctacctatccttttttccctcttactcccttagttcccaaacttaattttgacttgggttataatcaataaaggccaacaattttcacttaatggtgtctgtttctttaagtttaacttaactaaacgaactccgcctcccaacactgttggcgccaaaagggggctccgcccccttaaacccccggggggggcccaacactgttggcgccaaaagggggctccgcccccttaaacccccggggggggcaagccccccccataaccccccccaataacgtcacaaactccacctataactccaccctaatgaataataaatttgggaggagctacttccctatataactaacagtacttccgaatggctgagtttatgccgccagacggaggcaaggaaggttactgacttgactgagcctggg

SEQ ID NO: 3776 - protein, 651 aa, Betatorquevirus sp.
MPPYWRRNYRYRNWRRRRPYRWRTRGFVRRQRFRRRRAYRVRRRRIHKKLSKIRIHEFQPETIKLCKIKGTKCLFQGGYDRRSNNYAQYIGSIVPEHEPGGGGWSLMVFSLDSLWEDYEHLQNIWTTSNAGLPLCRFLGVTMRFYQQEYTDYVVNYDLCWPMKDTPLTHANSHPQRMLLQKNKIVVPSLLTKRRKKPYVKKFIKPPAQLKNEWYFQKDLAGVDLLMLTTTACDLRNSFISPPAKSNNITLTSLNTNFWYNRNFQRPSATTGYSPKNNTYMYTQGNGTTATPTQKDQLIYLGNSIDYQPGQKLPKGQGEAGQMTTWGNPFYHLYTQTDIPIYISQNPPTTLPPSLQGKITETTQYLGVKVRYNPEKDTGEGNMAYFLPNTTGSGWDPPEDPNLRIEGFPLWLMLWGWADWIKKLAHIAKVDDNYMLVIRSSFFDSQLPAYVFLDESFWNGEGPYKTERSTYDHFHWYPQFKYQKLSIETISTSGPYVAHTPSQNSLQAKCIYSFKFKWGGCPRTIEKIYAPSSQPTWITPHNFTIGSKVQNPRTNPLTYIYPWDTKRDIITENALQRIQEQQETDELLSKPTGLPTTSRSDPKPILQKTQESDPETSSEEEEKTPLQLQLNKLRRRQRLLKELLLKTQKNIE

SEQ ID NO: 3777 - protein, 122 aa, Betatorquevirus sp.; identical to SEQ ID NO: 3774

SEQ ID NO: 3778 - DNA, 2806 bp, Betatorquevirus sp.
tgggcgggagccggaggtgagtgaaaccaccgtagggggcaattcgggctagatcagtctggcggaacgggcaagaaacttaaaatattatattttacagatgagtaaactgcaaactccaccaatttacaacgaaaaagcactccaaactcaatggctaaatttaatctttcaaagtcatgaattaatttgtggatgtgacaaagctcctgaacactttcaagatctaattaattctcaaaaatgccgccatttcaaagacgccgctactggaaccgaaacttttggaactacagaagaccaagaccttactatcgacgccggagatttagaaaaccttttttcggcagaaaacgacgtagacgaagggtaagaagaaaaactttttataaacgctttaaaaaacttaaaaaaattaaaattaatcaatggcaaccacaaagcattaaaagatgtagaattgaaggatacttatgcttatttcaagctggacctactagataccaaaacaactatgctttgtggaaagaatcattctttccagaacattatccagggggaggaggatggagcatacaacaattaactttgggaaacttatttacacaacacaaagaatatatgaactattggactaaaagtaatgaaagaatgaacttatgtagatattatggatgtagaattcaattgtttagagaaacatttactgattatgtattttattattttcaagaatgtccaaaaaatgttaatagatacttttatgcttcacaacatccaataagactgttaacacatggtagaaaaaaagtagtacctagctttgaaacacaaccacacaaacgaaaaccatacaaaacaatttttgtacctccaccaaaactcatgcaaacaaaatggtttttccaacaaggtttatcctcatttccattactatcatttgtagctagcgcagtcagcttaagcggcatgtttggcagcaaaaattctataagtaacaatgctacattattttgccttgatagcaaagtatttacttcaccaaactttcaatacaaaacttctacacatcctacatttggatatacaatagctggcaaatattacttatacggacttactaatggacatgagatttttactgaaaacaaagcaaaagacagcatttatctaggcaacacaatggaacaaaaaagaggagcccctatgaatcattacggcacttataatgcatacaaatttgaaaactggggtaacccctttttttggggctttctaacaggtaatttaagaacatttcaagcaccaacaaatccacaacaaatgtacactaccaaccctccccttgaacaatcctggttaaaagaaagcaactatatatttaaagttagatacaatccatttcatgacaaaggacaaggaaaccaagtttacttcatacccacatacgatgaaacacatacaacatgggaacccacaaaagacccagacttaacatggtcagaccaacctctatggttaatattttggggattagaagatatgataaaaagactaggtaaatgcaaaaacctagacatggactgggtaatggtagttaaatccagatatttagtaccgccagaaccatactacatatttttaagctatgatttcgtacatggtagaggaccatatgacacagaacaagaatttatgactagagacgacataacaaattggtaccccagatttaaataccaaagacaaccaattagcaacatagtacaaacaggcccagcagtacccacaggagacaatagcaaaaacatacaagctaaaataaaataccaatttctttttaagtggggaggcaactcatcgccacaagaaaacatatacgaccccaacagccaacccgttactcctacacccaataacttcgacttcgggaatgaaatcattgatccgacaacagacattacaaaagaaatatacccatgggactttagaagacaatttcttacagaaacaagtgcaaaaagaattacagaaagcgaaactgatgaccaatttatgttcacagatggaagacaaacttcaacagacctccccttccaagaaacaacgacacaaacggaaaagaccccgcaaacacaaacggaggcactattccagcagctccagcagctccagcaatacaaccagcaacttcagctccgactccgaaacctaaaacaattatctatggaccaataaacagagtagaaatttttaaaactaaacgtaaaaacaggagattaactccttatgaaaggcaaactgatatagaaatagctaaatggttaaaaagacctgttagacatttctttgatgatacccctttttatccatggttaccacctgcacccattgtacaatttgaccttgtaaaaggatttaataaaggccagcattaattcacttgaggtgtccatttatttaagtaaaaacttatataaaccaacaccgcctccctaatacgcaggcgcaaagggggctccgcccccttaaacccccgggggggggtaaaccccccctaaacccccccacatcattaatattcaacaggaaaaccacaaaattagaattgccgaccacaaacggtcaccaacttccctttttatatatacttctgcttttaatcataaatattcattacattaattaataatccgcgtaattccggggaggagttaacaaactatataactaagtacactgtcgaatggctgagtttatgccgccagacgaagacgggatcactacagtgactccaggctgatct

SEQ ID NO: 3779 - protein, 664 aa, Betatorquevirus sp.
MPPFQRRRYWNRNFWNYRRPRPYYRRRRFRKPFFGRKRRRRRVRRKTFYKRFKKLKKIKINQWQPQSIKRCRIEGYLCLFQAGPTRYQNNYALWKESFFPEHYPGGGGWSIQQLTLGNLFTQHKEYMNYWTKSNERMNLCRYYGCRIQLFRETFTDYVFYYFQECPKNVNRYFYASQHPIRLLTHGRKKVVPSFETQPHKRKPYKTIFVPPPKLMQTKWFFQQGLSSFPLLSFVASAVSLSGMFGSKNSISNNATLFCLDSKVFTSPNFQYKTSTHPTFGYTIAGKYYLYGLTNGHEIFTENKAKDSIYLGNTMEQKRGAPMNHYGTYNAYKFENWGNPFFWGFLTGNLRTFQAPTNPQQMYTTNPPLEQSWLKESNYIFKVRYNPFHDKGQGNQVYFIPTYDETHTTWEPTKDPDLTWSDQPLWLIFWGLEDMIKRLGKCKNLDMDWVMVVKSRYLVPPEPYYIFLSYDFVHGRGPYDTEQEFMTRDDITNWYPRFKYQRQPISNIVQTGPAVPTGDNSKNIQAKIKYQFLFKWGGNSSPQENIYDPNSQPVTPTPNNFDFGNEIIDPTTDITKEIYPWDFRRQFLTETSAKRITESETDDQFMFTDGRQTSTDLPFQETTTQTEKTPQTQTEALFQQLQQLQQYNQQLQLRLRNLKQLSMDQ

SEQ ID NO: 3780 - protein, 104 aa, Betatorquevirus sp.
LAERARNLKYYILQMSKLQTPPIYNEKALQTQWLNLIFQSHELICGCDKAPEHFQDLINSQKCRHFKDAATGTETFGTTEDQDLTIDAGDLENLFSAENDVDEG

SEQ ID NO: 3781 - DNA, 2806 bp, Betatorquevirus sp.
caggagccgaaggtgagtgaaaccaccggagtctaggggcaatttgggctagatcagtctggcggaacgggcaagaaacttaaaataaaacattttattttacaggaatgtccaaactacaacaaaaaacaatttacggagacagagctcttcaaatacaatggatgaatcttatttttaactctcatggaatgatctgcggctgcgacaacgcaaaaaaacatttagaagatcttcttgaattagacaacaaaaaatgcctccttacaactaccgataccgatggagacgcagaccaccatggagacgtcgatatcgatggtttcaacaccggagacctagaagaactcttcaaagatactacagacgccgatacagggtaagaagaaaaaaactgtttaaaaactataaaaagaaactgaactttattaagataaaacaatttcaaccccaaaaaattgtaaaatgttctgtaaaaggagatatatgtttattttggtgtggaaaaggaagagttccacacaacttttcaatgtggtcagaaagtattgtaccatacagagaaccgggtggaggggcatggtcaatgattgtattttctttaaaagcattgtatgaagaatatataagatatagagcatggttcacaaaatctaatgaaggattacctttagtaagactactaggaggtactatgaaattttatagaacagactttacagactacgtagttacatggcaactgtgtccaccattttcagcaactagagacatgttcttaaactctcatccttctagacaactgatgaacaaaaacaaaattatagttactagcaaatggaaagctagacacaaaaaaccatacaaaaaaaaatactttaaaccaccatcactatactctaacaaatggtattttcaaaaagacatttgccaaaatgcatttttactaataacaacatcagcatgctcattagatcaaatgtatttacctgaagatgaaatatcaaacaacattacactatacagccttaatacagacttctttcaaaatcctaactttgtaacaaatgctacaacaggatacagtccaaaattggacttatacctatacggaacaggtaacggtccaatacaaaccaaaattcctaaatggacagagttaatcttactagctaatactaccacatggactgacggactgcttacaacaagtagagagcaaatgcttaccaaaaaaaactggggaaacccatttacttacctacatgcacacgccgacactagattatactatggcaaactaccacaaccctcaacatcttttcagtctcaagccaatgtcacagaactacatgaattatactttcaatgcagatacaatccatcagcagacaaaggaacaggaaatacagtatactttaaaagtactagcatttctaaaggaactatatcaacattaccaaccaaagaagatatagtaataaaagattttccactatggttaattttttggggatggacagactaccaaaagaaactagcagttataaaccaaattaacctaaattattactttgtagtagttagcccatacatacaaccaaaaagacctacatacttatttttagactggtactttgtatcaccaaaaccctcaggacaaacaccacaagaattatcacactggcaccccagatacgaaatgcaaacagaagtagaaaatgcatttgcagtatcaggccctgccgcacctaaaattaatagaagccaaagcattcaagctcaatctaactataactttcgttttaagtggggaggatgtccagctccaatggaaaccatcacagacccatgcaaacaagacacctttcccatccccaataaagagcttggcacatatgaaatccaaaatccagaaacaccaccagaaagctacctatacttctgggacgaaagacgacaccagcttacttctacagctacaaaaagactcaaaaaagactcaatttttacaccgtttatttcagaaactccagcgctcgacatccagctacagtcacaagaaagcgaagaagagacggagaacctacagcagcagctcctccgactcaaacacaagcgccgaaagctacgccaccagctccagcaattaatgccaaaaaaattaaaattatacaatacaatatagatatgtttggtgaccctgtaagaaaaaataataggagattaactccacaagagcgtgaaacagatatagaacttgctagattgtttaaacgccctgtaagaacctttattgatgataaacctttctatccatggcttgtacctgcacctaaagtaccctttccaaactttcaattaaacttcaaagaataaaggcctgcattaattcactctcggtgtctgttcctttaagtatcaccctaaataagcatccaccgcctccctaatacgccggcgcaaagggggctccgcccccttaaaccccaggggggggcaaagcccccccctaacccccccaaaattaatattcataaaggaaaccacaaaattagaacccccccctaacccccccaaaattaatattcataaaggaaaccacaaaattagaattgccgaccacaaacgaatatgcaaattatacttcctgcaataccctgctacttccttaaaaattaattaataatcaccatcataaggggaggagcccaaacactatataactaagtacactgacgaatggctgagtttacgccgccagacggagacgggatcacttcagtgactccaggctgatcttggg

SEQ ID NO: 3782 - protein, 643 aa, Betatorquevirus sp.
MPPYNYRYRWRRRPPWRRRYRWFQHRRPRRTLQRYYRRRYRVRRKKLFKNYKKKLNFIKIKQFQPQKIVKCSVKGDICLFWCGKGRVPHNFSMWSESIVPYREPGGGAWSMIVFSLKALYEEYIRYRAWFTKSNEGLPLVRLLGGTMKFYRTDFTDYVVTWQLCPPFSATRDMFLNSHPSRQLMNKNKIIVTSKWKARHKKPYKKKYFKPPSLYSNKWYFQKDICQNAFLLITTSACSLDQMYLPEDEISNNITLYSLNTDFFQNPNFVTNATTGYSPKLDLYLYGTGNGPIQTKIPKWTELILLANTTTWTDGLLTTSREQMLTKKNWGNPFTYLHAHADTRLYYGKLPQPSTSFQSQANVTELHELYFQCRYNPSADKGTGNTVYFKSTSISKGTISTLPTKEDIVIKDFPLWLIFWGWTDYQKKLAVINQINLNYYFVVVSPYIQPKRPTYLFLDWYFVSPKPSGQTPQELSHWHPRYEMQTEVENAFAVSGPAAPKINRSQSIQAQSNYNFRFKWGGCPAPMETITDPCKQDTFPIPNKELGTYEIQNPETPPESYLYFWDERRHQLTSTATKRLKKDSIFTPFISETPALDIQLQSQESEEETENLQQQLLRLKHKRRKLRHQLQQLMPKKLKLYNTI

SEQ ID NO: 3783 - protein, 91 aa, Betatorquevirus sp.
MSKLQQKTIYGDRALQIQWMNLIFNSHGMICGCDNAKKHLEDLLELDNKKCLLTTTDTDGDADHHGDVDIDGFNTGDLEELFKDTTDADTG

SEQ ID NO: 3784 - DNA, 2804 bp, Alphatorquevirus sp.
taaaaaagccatgtttctcggtaaactttacagaaagaagaggcgcctgccactgcccccactgcacactgcacagaaaactcgcaggtttctgaatgctatgtggagacccccggcgcacaatgtccgcggccaggagagacagtggtacgagtcctgctttcgctctcacgcttctttttgtggctgtggtgattttattcagcatctttgtcatctggcgaatgatttcggacgtcctcctaccgctccacaacccccggcaccaccacctccagtaaggtctctgccagctctcccggcaccccccaacccctccggtagcagagcggcatggcctactggtggtacagacggagacgaagagccccgaggtggaggagacggcgctggaggcttcgcagacctcgcagacgaagagctcctgtccgtcgccgtagaggccgccgaagagtaagaaagaggagggggaggtggaggaggagttatagaaaatggcggagaggcagaaagagacgcaaacacaaaagacgcttaatactgactcaatggcaacctgcttttataagacgctgctatatagtgggcttcttgcccctcataatctgcggagaaaacacctccgccagaaactttgctacccactctgacgaccttatttctaacggaccgtacgggggaggcatgacgaccactaaatttaccctgagaatactgtatgacgaacacctcaggtggctaaactactggactgttagcaacgaggacctagacctgtgtagatacctggggggcaccttctacgcctacagacaccccacagtagactttattgtacagatacacaccagtccccctttcctagacactcccctgacagggcccagcatacaccctggcatgctcatgcttacaaaaaacaaaatactaatacctagcctgaaaaccagaccaaacaaaaaacacaaagtaaaaattagattcaggcccccaaaactgtttgaagacaaatggtacccccagtcagaactctgtgacaccacactactaactgtctttgcaaccgcatgtgacctgcaatttccgttcggctcaccactaactgaaaacccttgcgtcaacttccaggtgctaggttccccttacaaacagcacctcagtatacttcctgaaaaactaaaaacagctaaagctcactttgatagcaatttatattcagttgctgcttactacaacacattccaaacaatagctcaaataaaaccttccactcaacaaacaggtttcaaccctcaatggtcctcaatagttaacaacacacaactatcacaagacggcaacaaccagggagaagcaaatgacacctggtacctaggcaatgcatataatgtacaaaatgtcaaaatagcagcagaacatataagacaaaaatacttgaatgctactagaaaagcactgcctgtcctactaacactaggagacgaattactagaataccacacaggcatctacagctcaatattcttatcagcaggcagatcttactttgaaacactaggtgcctacacagacataatctacaatccctttgtagacaaaggaataggaaacaaagtatggttagaccccttaaccaaagaagatgcagtactagacacaaaaaaagccaaagtactaatagaagaccaaccaatatgggcagcactatttggatacacagaatttgcagcaaaatacacaggagactctgcaataacagccaactacagactcgtaatcagatgcccctacacagaccctatgttagtagacagaaacaatgaactacagggctttgtaccatactccaaaaactttggcaacggaaaaatgccagggggctcttccaacgtcccactgactatgagaataaagtggtaccccatgctatttcaccaactagaagtactagaagaattagtgcagtccggaccgtttgcatacaagggcgaccaaaagagctgtgtacttgctttaaaatacatcttcagatggaaatggggaggtaaccctgtgtctcaccagattgtgcgcaacccctgcaaaggaggcacccgtccccgtcgagagcctcgctcagtacaagcagctgacccgaaatatgtcacaccgaggctgtccttccactcgtgggacttcagacgagggctttttggcgcggcaagtattaaaagaatgtcagaggaatcaggagctcctgtctatcctacaggcccaccgagaaaaagaccaaaaagagacaccgatccgtacgactcgcagcaagaagaaaactcgagttcaagacacctccagctccagccctgggtccactccagccaagaagtccaaagcgaagaagagacgcaagtcccgcaaaacctacaagaacaactcctccagcagctccgagagcagcagcagctcaggctccacttacagtccctcgccaaccaagtcctcaaaatcaaagcgggatacagcatacaccccctattatcttgccaagcataaacaaggtctttatgtttgagcctaaaggccctaaacccatacagggctatgaggcctggttagatgagtaccagacagcaggtgtgtggaataggccagtcagaacataccacacagacacccccttctacccctgggcacctaaaccccccgaccaattccgcgtcagcttcaaactcggctttaaataaaatttcaaggcctttaactgctcacttgtcggtgtctacctctataagtcactaagcactccgagcgttagcgaggagtgc

SEQ ID NO: 3785 - protein, 732 aa, Alphatorquevirus sp.
MAYWWYRRRRRAPRWRRRRWRLRRPRRRRAPVRRRRGRRRVRKRRGRWRRSYRKWRRGRKRRKHKRRLILTQWQPAFIRRCYIVGFLPLIICGENTSARNFATHSDDLISNGPYGGGMTTTKFTLRILYDEHLRWLNYWTVSNEDLDLCRYLGGTFYAYRHPTVDFIVQIHTSPPFLDTPLTGPSIHPGMLMLTKNKILIPSLKTRPNKKHKVKIRFRPPKLFEDKWYPQSELCDTTLLTVFATACDLQFPFGSPLTENPCVNFQVLGSPYKQHLSILPEKLKTAKAHFDSNLYSVAAYYNTFQTIAQIKPSTQQTGFNPQWSSIVNNTQLSQDGNNQGEANDTWYLGNAYNVQNVKIAAEHIRQKYLNATRKALPVLLTLGDELLEYHTGIYSSIFLSAGRSYFETLGAYTDIIYNPFVDKGIGNKVWLDPLTKEDAVLDTKKAKVLIEDQPIWAALFGYTEFAAKYTGDSAITANYRLVIRCPYTDPMLVDRNNELQGFVPYSKNFGNGKMPGGSSNVPLTMRIKWYPMLFHQLEVLEELVQSGPFAYKGDQKSCVLALKYIFRWKWGGNPVSHQIVRNPCKGGTRPRREPRSVQAADPKYVTPRLSFHSWDFRRGLFGAASIKRMSEESGAPVYPTGPPRKRPKRDTDPYDSQQEENSSSRHLQLQPWVHSSQEVQSEEETQVPQNLQEQLLQQLREQQQLRLHLQSLANQVLKIKAGYSIHPLLSCQA

SEQ ID NO: 3786 - protein, 148 aa, Alphatorquevirus sp.
MFLGKLYRKKRRLPLPPLHTAQKTRRFLNAMWRPPAHNVRGQERQWYESCFRSHASFCGCGDFIQHLCHLANDFGRPPTAPQPPAPPPPVRSLPALPAPPNPSGSRAAWPTGGTDGDEEPRGGGDGAGGFADLADEELLSVAVEAAEE

SEQ ID NO: 3787 - protein, 126 aa, Alphatorquevirus sp.
LGPLQPRSPKRRRDASPAKPTRTTPPAAPRAAAAQAPLTVPRQPSPQNQSGIQHTPPIILPSINKVFMFEPKGPKPIQGYEAWLDEYQTAGVWNRPVRTYHTDTPFYPWAPKPPDQFRVSFKLGFK

SEQ ID NO: 3788 - DNA, 2803 bp, Betatorquevirus sp.
caggtgccggaggtgagtgaaaccaccgtagtcaaggggcaatatgggctatgtcagtctggcggaacgggcaagaaactaaataatattcttttacagatgtccattttctggaaaccaacaccatttggacccagagaaagagaaaaccaatggattaactactgcattcaaggacacgaccaaatttgcggctgtgactcacccggagaccacctactttactgccttgctgaaagaagtggaaaacttaatatttccaaaaacatactagaagaatcaacaaaatgccttactacccacgctggagacgacgccgctactggagaacaagacgccatagaccttctagatggagacctagaaaaattattcgaagaagatatcgccgatcctactactgggtaagaagacgccgctttcttaaaaaactatttaaaataactcttaaacaatttcaacctagaaaaattgttaaatgtaaaatacaaggtgaaatatgcttatttcaagcaggaaaaggacttatatttcaaaactatgctcaatatcaagatagctttgtacctgagggagaaccgggaggagggggatggtcagcactagtttttaacttaggaggactttaccaagaaaatcaaaaactacacaatagatggtctaaatctaacaaaggcctgccactagctagatacaatggctgtaaatttaaattttggagatcttgggacacagactacataatacactggcaaacatgtccaccaatgacagacacagaactcttacacttaaacgcacaacccttcatgacaatgctaacaaaaaatcattttatagttccaaacttaacaagaccaccatacacaaaaaaaccctactttactaaaagatttccaccaccctcacaattaacaaacaaatggtactttcaagaagacatttgcaacacaggattactactcctaaccacaagtgcaatgtcacttgaccaatggtttttacctaacaacgaactaagcaacaacattacactaacagcccttaataccacattctttcaaaactctaactttcaagttagaggcacaaaaggttaccaaccaaaatctaacttatatatatatggacaaggaaacggtagtgaccatccacactggtcagacttaacatacttaggaaatgcagagtggtaccaagaaggaaaaaaaatgacttcagataatttaaacgactttacaacatggggaaacatttttcatgaacaacacgtacacgcagacacacacgtttactacggaaccacatttccaaacatctcacaaatacagacaacagcacaaaatataacaaaactagattacatataccacacatgcagatacaaccctaacagagacacaggcgaaggaaacgaagtattttttgttagcaactctattaaccccaaacttatctttgatccaccaaaagacccagacctacacatctatggttatccactatggcttatagcctggggatgggcagactggcaaaaaaaattatctaaaatcaaccaaatagaacaaaactacatcatggtagccaaaactaaatttataaaccccccactaccagcatatgtatttttagacaactattttactgacccagaaaaatactcacaacattacactgaaacagacaaaaaacacttttaccctaaatatgagttccaaaaagaacaatggaacttcatagcacaatcaggaccagctgcacctaaaatagacaaaagccaatccatacaagccagagctcactactcatttttctttaagtggggaggctgcccagcaccaatggaagaagtcaaagacccatgccaacaaggaaaataccccatccccaattaccagttacaagcatctcaaatccaagatccaaaaacagacaaaagatcatttatctgggactttgacgaaagaagagaaacaattacccctaaagcagctaaaagacttaaacacatctcaacttttgaaactgtattcacagatcgaccacccttcgacctccaattaccggaaaaggagacggaggaagaaacatcgtcagaggaagaaatccaaacatcactctcccacaaaatcgaccacctccaactcaagcacagactcctcagaagaaagctcaacagactaataaaacaaaaactttcaacattataaacaaaaactgtaaagttgaactatttccaacaaaaagacaaaacagacgcttttacaagcatgaactacaaactgagcgtgatttagctaacatttttaaaagacctatgagacattttattgatgatcctcccttttacccctggctccccctagagccaaaagtaaactttctgttaaactttaaagacaaataaacaaggccctattgattcactctcggtgtccgtttatattaatataaaacttaaataaacatccaccacctccctatcacacaggcctaggggctccgcccctagaaccccaaggggcccttacccccccccttaaacacgcctctaaccgcaaaattaacatggctcaccacaaacgaacaggaaaaccactaaatttgcattgccaaccacaaactgaactatgctaatttacttcttctttttactacacacacccctaataaattaataatcaccatcatatcctaggcggagcttcaaatacatataactaactacactgacgaatggctgagtttatcacgccagacggcgaacgcatcacatcagtgactgcgagctgacattggg

SEQ ID NO: 3789 - protein, 641 aa, Betatorquevirus sp.; identical to SEQ ID NO: 3759

SEQ ID NO: 3790 - protein, 102 aa, Betatorquevirus sp.; identical to SEQ ID NO: 3628

SEQ ID NO: 3791 - DNA, 2802 bp, Betatorquevirus sp.
cgggagctgaaggtgagtgaaaccaccgaaatctaggggcaattcgggctagatcagtctggcggaacgggcaagaaacttaaataatattatttttcagatgagcaaatttctacaagaacctatttactccaaaagaggactacaaaatcaatggattaacctaatttacacttcgcatgatatgatctgtggatgcaacaagccaattgatcacctacaagacatcttaaaacaacaaaaatgcctcccttcaaccgccgccgctacggctacagaagatggtggaactacagaaaacctagagcctactatcgacgaaggagatttggaaaagctgttttcagaagaaaacgacgtagacgaagggtaagaagaaaaaacttttttaaacataaaaaaactaaaactgttaaaataagacaatggcaacctactagcattaaaaaatgtaaaatacaaggctacctatgcatgtttcaagcaggcccaggtagatatggaaataactatgctctatggaaagaatcattctttccacaacattatcccggaggcggaggatggagtatacaacaattaagtttgggaactttatttaaacaacacacagaatatatgaactattggactaaaagtaatgatagaatgaacctatgtagatatatgggatgcagtatacaactgtttagagaaccatatactgactggatatttacatactttgataatattcctaaaactgtaaacaaatggttttatgcttcacaccaccctataaaacttttaacaacaaaaagaaaaagaacaatccctagctttcaaacccaaccacataaaagaaagccatataaaaccatgtttaaaccacctccaaaactaatgaaaaaccaatggttttttcaatctaacctagcagactatccccttataacatttgccgcctcagcatgcagtttaacaggaatgtttggcagcacaaaattaattagtaacaacgcaacattttactgcctagacactaaacaatttacaacaccaacatttcaatggagatccacaaaaccagaaacagaatggggatacacatacggcacaaactacctatacggcctacaacatccatttgaaacatggacacaaaataaagacatagatggaacatatttaggaaacacaatgaaacaacaaagtggaataccaatgacacaccaaacagcagccacatatacagtagacaaatggggaaaccccttttactggcaatatgcatcaggagactatccactttttacctcaacaaacacaccaaaaaaaataatagaaagtggaggaacaaaactaacagaaggccaaaagaaggactcacactatatatttaaagctagatacaatccatttcatgacaaaggaaaaggcaatgtagtatactttttaccaacttatgacaaatccaaaacagactgggaaccactatcagaccctgacttaaaatttgaaaactttccactatggttaacatgctggggaattgaagacattttaaaaagaatgggaaaatgtcataatttagatatagactgggtaatggtaataaaatccagctatattttaccacctgaaaaagcatatgttatattaagctatgactttgtacacggaaggggaccatatgatacagaaaaagaatttatgactactgatgacttaacacactggtacccaagatttaaatatcaaagacaagctatagacaacttaataagaactggtccagctgtagctactggagataatgtacaaaatatacaagctaaaattaaatacaactttttctttaagtggggaggcaactcatcaccacaagaaactattcgagatcccaacagccagcccatcacccctagtcccgataacatctacagcaacaatgaaatcattgatccgtcaacagacattacaacagaaatatacccatgggactttagacgagatatgcttacagaaacagctacagaaagaattaaacaaagctcaactaatgaacaaattatgtttacagatggaagacaaactacaacggacgtccccctgcaaacaaaaacacaagagaaagagacccaggaaacacaagaaaagacattactccagcagctcaaccagctccaacaatacaacctgcaactccagcaccgactccgaaagctaaaacaattatctatggacctataaaccgtgtagaattgtttaaaactaaacgtaaaaataggagactaactccttatgaagcagaaacagatctgcaattagcaaaatggttacatagacctctaagacaatattttgatgatccccctttttacccatggttaccgccagcaccaaaagtttgctttgaccttgtaaaaggatttaataaaggccagcattaattcacttttggagtctgtttatttaagtttaaacttatacaaacatccaccgcctccctaatacgcaggcgcacaagggggctccgaaacccccccctaaccccccccaaaaaaccacaaaattagcattgccgaccacaaacggtacaggaaaccacaaaatttgcattgccgaccacaaaccgtcatttacttctcctttttacaaaacttccttttttactaattattattcattaaattaattaataaacaccgtaattccggggaggagcaaacactgtatataactaactacacttccgaatggctgagtttatgccgccagacggagacaggatcactttagtgactccgggctgatcttggg

SEQ ID NO: 3792 - protein, 662 aa, Betatorquevirus sp.
MPPFNRRRYGYRRWWNYRKPRAYYRRRRFGKAVFRRKRRRRRVRRKNFFKHKKTKTVKIRQWQPTSIKKCKIQGYLCMFQAGPGRYGNNYALWKESFFPQHYPGGGGWSIQQLSLGTLFKQHTEYMNYWTKSNDRMNLCRYMGCSIQLFREPYTDWIFTYFDNIPKTVNKWFYASHHPIKLLTTKRKRTIPSFQTQPHKRKPYKTMFKPPPKLMKNQWFFQSNLADYPLITFAASACSLTGMFGSTKLISNNATFYCLDTKQFTTPTFQWRSTKPETEWGYTYGTNYLYGLQHPFETWTQNKDIDGTYLGNTMKQQSGIPMTHQTAATYTVDKWGNPFYWQYASGDYPLFTSTNTPKKIIESGGTKLTEGQKKDSHYIFKARYNPFHDKGKGNVVYFLPTYDKSKTDWEPLSDPDLKFENFPLWLTCWGIEDILKRMGKCHNLDIDWVMVIKSSYILPPEKAYVILSYDFVHGRGPYDTEKEFMTTDDLTHWYPRFKYQRQAIDNLIRTGPAVATGDNVQNIQAKIKYNFFFKWGGNSSPQETIRDPNSQPITPSPDNIYSNNEIIDPSTDITTEIYPWDFRRDMLTETATERIKQSSTNEQIMFTDGRQTTTDVPLQTKTQEKETQETQEKTLLQQLNQLQQYNLQLQHRLRKLKQLSMDL

SEQ ID NO: 3793 - protein, 104 aa, Betatorquevirus sp.; identical to SEQ ID NO: 1308

SEQ ID NO: 3794 - protein, 62 aa, Betatorquevirus sp.; identical to SEQ ID NO: 1309

SEQ ID NO: 3795 - DNA, 2802 bp, Gammatorquevirus sp.
cgggagcccgaggtgagtgaaaccagcgaggtctaggggcaattcgggctagggcagtctagcggaacgggcaagaaagttaaaacaataattgttttacagatgtccaagattcaagcgaaggacttttttaatcccacaccctacaatcaagacacgaagaatcaaatttggatgtctcaaattgctgatgctcacgataatatctgcaattgtaaccatccctttgctcatttgcttgccaatatctttcctgtgggtcacaaagaccgtgatcatacaattaaccaaattcttctaagagactacaaagaaaaatgccgttctggtggagaaggcgaaagaagccatggtggggcagatttaggtatcgcagacgcttctacaaaaacagaaggagacggagaagaagactacccaggagaagaactcgaagaactactcgccgccgccatagaagaaagcgcaaggtaagaagaaaactacaaaaaatatctataaaacaatggcaacctgatagaattgttagatgtaaaattaaaggcttttcttgccttgtactgggagctgagggcagacagatgtactgctacacaaatgaagcctcagactacccacaaccaaaagccccaggtggtggaggctttggatgtgaaactataactttaaaatggctattccaagaatatctaagacataataatatttggactaaatcaaatgactatacagatctttgcagatacactggatgcaaaataactctatacagacatcctacaatagattttgttgtattctatgatacacaacctccttttgacattaacaaatttacataccctgaactacagcctcaaaatgtactacttagaagaagaaaaagagttatactaagcagacaaactaatcctgctggcaaaattaaacatactattaaaataaaaccaccaaaacaactaataactaaatggttttttcaaagagatttttgtacctatggcttactaaaactatgtgcttctgcagcagactttaactacccaagaatatcacccttatctcaaagtactattttaacagttctagctttaaatattaacttttaccaaaacagtgactgggcactaacaaaaacacacgacccatataaaaatataacaacacagaaactaccattatactttacatacacagacaaacaaggaagagaccagacatatgcctacaacccacaaggtgtcacagacccagacccgacagcaaaatattactactccattaacagagaaacaggcttattttcaccacaagtgttactagctaaaaaagtatccacagagaaaggtagtgctgaccctggactaggatctctaccactaataacacttagatacaacccacaagaagacacaggccatggcaatgaagtatatcttaccagtattctaaatggtcactacaataagccaagcataagcactgactactcatttaatggtgttccactatatgtagccttttatggcttttggaattacttgcaaatctacagccataataaaggcttctacaaatcatatatgtttgtagttaagagtgatgcactaagaccactttcagtagcaactcctgaaaaatactttccaatactagatgctgactttgtctatggtaaactaccatgggacgaatacatgtcagcagacattaaaaaactgtggtatcctacagcagaaagacaacaggttataattaaccaaatagtagaatcaggaccatttatgcctaaactatccaatttaaaaaacagtacatgggaactaaattacaaatatcaatttttttttaagtggggaggcccatacaccacagatcaacccgttgaagatccatgcaccagaaacaaatacaatgtccccgatacactccaacaatcaatacaaattaccgaccctgaaaaaaacaaaacagaaggcatactccatgactgggactttagaaggggcttcattacacaaacagctcttaaaagaatgtcacaaaacctcccaattgattcatctctcgaatctgatgactcagaatcaccacaaaagaaaagaaaaatcaccaaggaactcccattccaacaaaagaaagaagaaaaaatccagaaatgtctcctctcactctgcgaagagccttcctgccaagaaacaccagaaacactccagcagtacatcctccagcagcgaaagcagcagcgagagctcaagcacagcatcctccagctcctaactcacctaaagaagggccaaacctgtatggaactccaaacaggccttttagagtagagccattcaaaccaggatttgaatgggaaacagaatgtgaatgtgcaaaagcattttgtagaccacccagacattataaaaatgatcctccattttacccatggttacctctaacaccccttgtaaactttaaccttaactacaaatgctaggccctcaatgtacacttagtggtggatgtttaataaagtttgcccccaaaaaaaaaaaaaaaaaaaaaaaaccccccctacgtcacagaccacgcccccgccgccatcttgggcgcggcagggcgggggctaaaatggcgggaaccaatcattttatactttcactttccaattaaaacttgccacgtaacaaaaaatgggtggagactttaaaactatataaccaagtacagtgacgaatggctgagtttaccccgctagacggtgcagggaccgcatcgagcgcagcgagaaggtccccggctgcccatggg

SEQ ID NO: 3796 - protein, 672 aa, Gammatorquevirus sp.; identical to SEQ ID NO: 3498

SEQ ID NO: 3797 - protein, 123 aa, Gammatorquevirus sp.; identical to SEQ ID NO: 3499

SEQ ID NO: 3798 - protein, 109 aa, Gammatorquevirus sp.; identical to SEQ ID NO: 3500

SEQ ID NO: 3799 - DNA, 2801 bp, Betatorquevirus sp.
caggtgccgaaggtgagtgaaaccaccgaagtcaaggggcaatatgggctagatcagtctggcggaacgggcaagaaacttaatgtatactttctttacagatatgacacattacttaaaaacaccacaatacaatggacgcgcaatggaacttcaattaatgaatacaattattggaaaccatgatctctgctgtggatgcatgacaccagttcttcatattaaagaaataatcaacaccttttcatatacaccatgcccccgtactactggagacaaagaagaccaacatggagacaaagaaactaccgacgctttagaaggcctagaagatggagaattagatcgcttgttcgccgccgatggagaagacgacgaagggtaagaaacaaaagactgtttttccgacgaaaaaaactgactcgactgactttaaaagaatggcaacctaaaaaaattaaaaaatgttccataaaaggaatactacctgcattcatatgcggaaaatcaagaatagcaaacaactatatattattttcagaaagcatagtaccggtgggagaacccggaggaggggcctggtcaatactacaaataaacttaagagtattatatgaccaatttataaaatttaaaaactggtggactgctagcaaccaaggcctaccactaacaagatacttaggaatgaaagtgacattctacaaaactcaatttgtagactacatagttataccacaactatgccctccattttctgtaacaagagacaactacctaaacatacatccagttagaatgttaatgaacagacacaaaattataataccacaaagacaaaaaggaaagaaaaactacattaaaaaatggtttagaccacctgacttaatgcaaaacaaatggtatttccaacaagacatagtaaacataccacttatagtactacacatatcagcagcaagccttgaccaatatagtataccagaaaaccaaatatcaacaaacataacactttggtctctaaacacagacttctttagaaacaaccaattcacaggttatgaagactcaggatacataccaaaaacatttggaacacaaaactactatttatacactgaaggtaatggtgtttctcgcccaactaaattcagtcaaatgataccattaaaaaacacaacaacatatacaaacggaaaaaaagcagcaaccatagaaaactggaaagaaaacacttattggggtaatccatttacacaaaaccacgctagtccagatgtaccaatttactacaacaacacaacacccagcgaaaacaactacagcacaccacaaacattcaccccattacatgaactctacttccaatgcagatacaatccagaaaaggacacaggcataggtaacaaagtattttttaaatcaaacaaactaaaacaaggagaaattgacactattccagacaaagacgaaatagttataacagactttccactatggttaatattttactcttggattagctggatacaaaaaagcaaacctatacaacatataatgaatgactactactttattgttataacaccatttatagaaccaaaaagaaaaagctacctatttttagacacttactttgtacagccaataacaaacagattaacagaaacagaaaaacaacactggtatccacaaactggataccaaacagatgtaatttttagctttgcacaaacaggcccagcaacacctaaaatagatagatcacaatcaatacaagcacaatttaaatacaatgtaaaactaaaatggggcggatgtcctgcaccaatggaactaataactgatccatcattacaggacaaatttcccatccccaatacaatcttcaaaacacttgagatccaaaatccagaaacaaacaaaaggactctactgtacgacttcgacgaaagacatgacggacttacggacagagctgcaaaaagaattaaaacagaacaaatatttgaaacatcttttacaggacaactaccaacagatcccaatatcaggatccaaacacaagaaacgacctcatcgtcggaggaagaaagcgaagtatcactcaaggaggagctcaagctcctcaagcgaaaaaacaagcagctcagaaacaagctcctcagactaacatcttactaaaaccaaaaattatatacgctccatacactatgtttggagacaaagccactaaaaaactaacacctattaagggtaaaagttgggaggcagaacttcagttagctaaaatgttcaaaagaccacttagaacttatgaagaggaccccccatattatccctgggttgttcctgaaccagttgtaaactttcacttaaattttaaagaataaaggccagcattatttcacagtcggtgtccgtttctttaagttaaaacttatataaacatccattacctccctaatacgcaggcgcacaagggggctccgcccccttaaacccccaagggggctccgcccccttacacccccccaagggggctccgcccccttacacccccttattaatattcaacaggaaaaccacctaatttaaattgccgaccacaaaccgtcttttatttcctcattcacacaatacttcctctttacctaattattattcattacattaattaataatcaccatcacaaagggcggagactgctatctatataactaactacacagacgaatggctgagtttatgccgccagacggaggactcatcacttcagtgactgaggactgatcttggg

SEQ ID NO: 3800 - protein, 642 aa, Betatorquevirus sp.
MPPYYWRQRRPTWRQRNYRRFRRPRRWRIRSLVRRRWRRRRRVRNKRLFFRRKKLTRLTLKEWQPKKIKKCSIKGILPAFICGKSRIANNYILFSESIVPVGEPGGGAWSILQINLRVLYDQFIKFKNWWTASNQGLPLTRYLGMKVTFYKTQFVDYIVIPQLCPPFSVTRDNYLNIHPVRMLMNRHKIIIPQRQKGKKNYIKKWFRPPDLMQNKWYFQQDIVNIPLIVLHISAASLDQYSIPENQISTNITLWSLNTDFFRNNQFTGYEDSGYIPKTFGTQNYYLYTEGNGVSRPTKFSQMIPLKNTTTYTNGKKAATIENWKENTYWGNPFTQNHASPDVPIYYNNTTPSENNYSTPQTFTPLHELYFQCRYNPEKDTGIGNKVFFKSNKLKQGEIDTIPDKDEIVITDFPLWLIFYSWISWIQKSKPIQHIMNDYYFIVITPFIEPKRKSYLFLDTYFVQPITNRLTETEKQHWYPQTGYQTDVIFSFAQTGPATPKIDRSQSIQAQFKYNVKLKWGGCPAPMELITDPSLQDKFPIPNTIFKTLEIQNPETNKRTLLYDFDERHDGLTDRAAKRIKTEQIFETSFTGQLPTDPNIRIQTQETTSSSEEESEVSLKEELKLLKRKNKQLRNKLLRLTSY

SEQ ID NO: 3801 - protein, 108 aa, Betatorquevirus sp.; identical to SEQ ID NO: 3448

SEQ ID NO: 3802 - protein, 59 aa, Betatorquevirus sp.; identical to SEQ ID NO: 3449

SEQ ID NO: 3803 - DNA, 2801 bp, Betatorquevirus sp.
caggtgccgaaggtgagtgaaaccaccgaagtcaaggggcaatatgggctagatcagtctggcggaacgggcaagaaacttaatatatactttttttacagatatgacacattacttaaaaacaccacaatacaatggacgcgcaatggaacttcaattaatgaatacaattattggaaaccatgatctgtgctgtggatgcatgacaccagttcttcatattaaagaaataatcaacaccttttcatatacaccatgcccccgtactactggagacaaagaagaccaacatggagacaaagaaactaccgacgctttagaaggcctagaagatggagaattagatcgcttgttcgccgccgatggagaagacgacgaagggtaagaaacaaaagactgtttttccgacgaaaaaaactgactcgactgactttaaaagaatggcaacctaaaaaaattaaaaaatgttccataaaaggaatactacctgcatttatatgcggaaaatcaagaatagcaaacaactatatattattttcagaaagcatagtaccggtgggagaacccggaggaggggcctggtcaatactacaaataaacttaagagtattatatgaccaatttataaaatttaaaaactggtggactgctagcaaccaaggcctaccactaacaagatacttaggaatgaaagtgacattctacaaaactcaatttgtagactacatagttataccacaactatgccctccattttctgtaacaagagacaactacctaaacatacatccagttagaatgttaatgaacagacacaaaattataataccacaaagacaaaaaggaaagaaaaactacattaaaaaatggtttagaccacctgacttaatgcaaaacaaatggtatttccaacaagacatagtaaacataccacttatagtactacacatatcagcagcaagccttgaccaatatagtataccagaaaaccaaatatcaacaaacataacactttggtctctaaacacagacttctttagaaacaaccaatttacaggttatgaagaatcaggatacataccaaaaacatttggaacacaaaactactatttatacactgaaggtaatggtggaacaccgagtaagttcagtgaaatgataccattaaaaaacacaacaacatacacagacggaaaaaaagcaacaagctatgaccaatggaccaataaagcttattggggtaatccatttacacaaaaccacgctaatccagatgtaccaatatactacaacaacacaacacccacccagagcaactacacaaacacacaaacattcaccccattacatgaactctacttccaatgcagatacaatccagaaaaggacacaggcataggtaacaaagtattttttaaatcaaacaaactaaaacaaggagaaattgacactattccagacaaagacgaaatagttataacagactttccactatggttaatattttactcttggattagctggatacaaaaaagcaaacctatacaacatataatgactgactactactttattgttataacaccatttgtagaaccaaaaagaaaaagctacctatttttagacacttactttgtacagccaatagcaaacagattaacagaaacagaaaaacaaaactggtatccacaaactggataccaaacagatgtaatttttagctttgcacaaacaggcccagcaacacctaaaatagatagatcacaatcaatacaagcacaatttaaatacaatgtaaaactaaaatggggcggatgtcctgcaccaatggaactaataactgatccatcattacaggacaaatttcccatccccaatacaatcttcaaaacacttgagatccaaaatccagaaacaaacaaaaggaccctactatacgacttcgacgaaagacatgacggacttacggacagagctgcaaaaagaattaaaacagaacaaatatttgaaacatcttttacaggacaactaccaacagatcccaatatcaggatccaaacacaagaaacgacctcatcgtcggagaaagaaagcgaagtatcactcgaggaggagctcaagctcctcaagcgaaaaaacaagcagctccgaaacaagctcctcagactaacatcttactaaaaccaaaaattatatacgctccatacactatgtttggagacaaagccactaaaaaactaacacctattaagggtaaaagttgggaggcagaacttcagttagctaaaatgttcaaaagaccacttagaacttatgaagaggaccccccatattatccctgggttgttcctgaaccagttgtaaactttcacttaaattttaaagaataaaggccagcattatttcacagtcggtgtccgtttctttaagttaaaacttatataaacatccattacctccctaatacgcaggcgcacaagggggctccgcccccttaaacccccaaggggagggggctccgcccccttacacccccaagggggctccgcccccttacacccccttattaatattcaacaggaaaaccacctaatttaaattgccgaccacaaaccgtcttttatttcctcattcacacaatacttcctctttacctaattattattcattacattaattaataatcaccatcacaaagggcggagactgctatctatataactaagtacacagacgaatggctgagtttatgccgccagacggaggactcatcacttcagtgactgaggactgatcttggg

SEQ ID NO: 3804 - protein, 641 aa, Betatorquevirus sp.
MPPYYWRQRRPTWRQRNYRRFRRPRRWRIRSLVRRRWRRRRRVRNKRLFFRRKKLTRLTLKEWQPKKIKKCSIKGILPAFICGKSRIANNYILFSESIVPVGEPGGGAWSILQINLRVLYDQFIKFKNWWTASNQGLPLTRYLGMKVTFYKTQFVDYIVIPQLCPPFSVTRDNYLNIHPVRMLMNRHKIIIPQRQKGKKNYIKKWFRPPDLMQNKWYFQQDIVNIPLIVLHISAASLDQYSIPENQISTNITLWSLNTDFFRNNQFTGYEESGYIPKTFGTQNYYLYTEGNGGTPSKFSEMIPLKNTTTYTDGKKATSYDQWTNKAYWGNPFTQNHANPDVPIYYNNTTPTQSNYTNTQTFTPLHELYFQCRYNPEKDTGIGNKVFFKSNKLKQGEIDTIPDKDEIVITDFPLWLIFYSWISWIQKSKPIQHIMTDYYFIVITPFVEPKRKSYLFLDTYFVQPIANRLTETEKQNWYPQTGYQTDVIFSFAQTGPATPKIDRSQSIQAQFKYNVKLKWGGCPAPMELITDPSLQDKFPIPNTIFKTLEIQNPETNKRTLLYDFDERHDGLTDRAAKRIKTEQIFETSFTGQLPTDPNIRIQTQETTSSSEKESEVSLEEELKLLKRKNKQLRNKLLRLTSY

SEQ ID NO: 3805 - protein, 108 aa, Betatorquevirus sp.
LAERARNLIYTFFTDMTHYLKTPQYNGRAMELQLMNTIIGNHDLCCGCMTPVLHIKEIINTFSYTPCPRTTGDKEDQHGDKETTDALEGLEDGELDRLFAADGEDDEG

SEQ ID NO: 3806 - protein, 59 aa, Betatorquevirus sp.; identical to SEQ ID NO: 3449

SEQ ID NO: 3807 - DNA, 2801 bp, Gammatorquevirus sp.
cgggagcccgaggtgagtgaaaccaccgaggtctaggggcaattcgggctagggcagtctagcggaacgggcaagaaacttaaaatactttatttttcagatgtcagaaatatgtttcaaagacttctactgtccaacaccttacaataaggaaactaaaaatcaaatttggatgtcccaaattgctgattctcatgacaatatctgcgactgcaagtatcctttttgccatttgcttgcttctatttttcctcctggccatcaagaccgcaatctctcaattaaccagatactgctcagagattacacagaaaaatgcctttctggtggagacgcagacaaaagagatggtatggcaggtttagatggaaaagaagaccttataaaacaagaagaagaagatatcgaagaaagaaaactagatggcctgctcgccgccgccgcagacgccgcagaaggcacaaggtaagaaaaaagaaacaaaaaattactctaaaacaatggcaaccagactctattaaaaaatgtaagattaaagccatatctactctagttatgggagcagatggatcccaatataaatgctacacaaacgaagcagcatcctaccctccacctaaagagccttctggaggaggttttggagtagaaatttttactctacaacacatgtacaatttatataaagctcacaaatgcatatggactacttccaatgaatatatggacttagccagatacactggctccaaatttattttctacagacatagaactacagactttattatttcctatgacctgcagcctccatttactatagacaaatatacatatccacaagcacacccacttaatcaatttttacaaaggaaaaaaagaatactatatagtcttaaaactaaaccctggggcccatctaaagttattctaaaaattaaacctactaaaatgttatcaacaaaatggttttttcaaagagaacttgctaaaataccacttctaaaaattcaagcagctgcttgtgatctaagctatgcaaacatgggaaaaacatggcaaagtaacatgttatcaatctattttttaaacacagcattttatcaggaaagcaattggggtaactcagcccttggccattacctaccatttaaaaaaattgatactgccttatattactggtataaagacagcagaggatctaaaaataaaatacaagtaaatacaactaattactataccacagttaactacgatacagggtattttaataccaaagttttaaatgcttatgctataacaacttcatcccaaaccgacaccccagtagctatggctctaacccctgtttctgtaggcagatacaatccactaacagacacaggagaaggcaatgagctatgggctgtttccagcctcactgaacactatgaccatccagctacagacaaagttttaatttttaaaaactatccactatggttaatgttctatggctttaaaaactacatagaacaagaaaaaggagataaaagatttctagactcctacttttttgtttttagatgtccaagcatgcaaatactacaatctgtagtaaaacaagactattttccatttatagaccaatcttttctaaatggcaatatgccatatggtgaatacttagatgaaaacaaaaaaaaattttggtatccaacaataaaaaaacaactagaaacaattaacacaattgttaccttagggccatttataccaaagtttaaagatgatagagacagtacatgggaattaaactataaatgttcattttattttaagtggggaggacaacagattacagaaaaacttgcaatggatcccagcaaacaagaccaatttgataacccctataacatgcagcagggaatacagatatccaacccacaaacacaaacatgggaaacaacactgcaccactgggactacaggagagacatacttacaaagacagctattaaaagaatgcgagaaaacctcgacactgatacagatgtcacaacaattattacaggcaaaccaccaaaacagagaaagatcacaggagaaatacaagcactccaacaagaaaacaaagagatccaagcatgtctccactcactcttcgaagaagataccttccaagaagaggagagtctccgagagctcatcaagcagcaacacaacaagcaacaccagctcaagcaaaacctcctacacctcatctcagacctaaagaaacaacaacaacaccttcaaatgcaaacaggaatcctacattaaccagatttaaaccaggttttgaacaaacaacagaaagagaacttgcaattgcttttaaaagacctataagaacttttaaagaagaccctccattttacccatggctaccccctgctccccttgttgtaaactttaacctcaactttaaatactaggccaacactgtacacttagtagtgtttgtttaataaagtttgctccccaaaaaaaatgtaaaaaaaaaaaaaaacggggggggggcaaagcccccccccgcaccccccctacgtcacaaaccacgcccctgccgccatcttgggtgcggcagggcgggggctaaaatggcgggacccaatcagtttatagttttaatacccaattaaaacatgccacgtcacaagcaaggggtggagactttcactctatataactaagtgcggtgacgaatggctgagtttaccccgctagacggtgcagggaccggatcgagcgcagcgaggaggtccccggctgcccatggg

SEQ ID NO: 3808 - protein, 661 aa, Gammatorquevirus sp.
MPFWWRRRQKRWYGRFRWKRRPYKTRRRRYRRKKTRWPARRRRRRRRRHKVRKKKQKITLKQWQPDSIKKCKIKAISTLVMGADGSQYKCYTNEAASYPPPKEPSGGGFGVEIFTLQHMYNLYKAHKCIWTTSNEYMDLARYTGSKFIFYRHRTTDFIISYDLQPPFTIDKYTYPQAHPLNQFLQRKKRILYSLKTKPWGPSKVILKIKPTKMLSTKWFFQRELAKIPLLKIQAAACDLSYANMGKTWQSNMLSIYFLNTAFYQESNWGNSALGHYLPFKKIDTALYYWYKDSRGSKNKIQVNTTNYYTTVNYDTGYFNTKVLNAYAITTSSQTDTPVAMALTPVSVGRYNPLTDTGEGNELWAVSSLTEHYDHPATDKVLIFKNYPLWLMFYGFKNYIEQEKGDKRFLDSYFFVFRCPSMQILQSVVKQDYFPFIDQSFLNGNMPYGEYLDENKKKFWYPTIKKQLETINTIVTLGPFIPKFKDDRDSTWELNYKCSFYFKWGGQQITEKLAMDPSKQDQFDNPYNMQQGIQISNPQTQTWETTLHHWDYRRDILTKTAIKRMRENLDTDTDVTTIITGKPPKQRKITGEIQALQQENKEIQACLHSLFEEDTFQEEESLRELIKQQHNKQHQLKQNLLHLISDLKKQQQHLQMQTGILH

SEQ ID NO: 3809 - protein, 122 aa, Gammatorquevirus sp.; identical to SEQ ID NO: 964

SEQ ID NO: 3810 - protein, 109 aa, Gammatorquevirus sp.
MSPLTLRRRYLPRRGESPRAHQAATQQATPAQAKPPTPHLRPKETTTTPSNANRNPTLTRFKPGFEQTTERELAIAFKRPIRTFKEDPPFYPWLPPAPLVVNFNLNFKY

SEQ ID NO: 3811 - DNA, 2799 bp, Betatorquevirus sp.
caggtaccgaaggtgagtgaaaccaccgtagttaaggggcaatatgggctgaagcagtctggggaaccgggcaagaaactaaaataaaattattttacagatatgagcactcttctaactccagcagtatacagcaaaaatggcttagaaaaccaatggattaactgcatttggaacacccacgacttaatttgtggctgcaacaacgctataaaacacctatttcaaatattaaataaaaaaggtgaacaactatgcctcccttcaacttctaccgaagacgctggcgtccaaacagaagatggcgatggagaagacgttttacaacaaggagatttagacgccctcttcgcagacgattttggagacgacactgggtaagaagacgctactttactaaaaaaaaaaagagaaaacttaaaaaaattagacttcaacaatggcaaccagatcaaataagaaaatgccgcattaaaggacaactatgtttattaacttgcggcaaaggaaaaataaataataactttactttaacttctgaaagctatgtacctacaagagaatccgggggaggaggttggagtataatgcaattaacattaagagctttatatgatgaatatatacattttagaaactggtggacaaatagtaactgtggattacctttaactagatatatgggagtaactgttaaattttataaaagtaatgacacagactacattgtaactgcacaacacacaggaccatttgaggttactagagacatatacttaagcacacaaccaagcagacacatgatgaaccacaaaagctttataattccaaaactaaatcctaataaaaaaaagaaaccatacattaaaaagagattctacccaccagccatgtggctaaacaaatggtattttcaacaagacatttacaaccacccacttatactatttatagtaagtgcatgtagtcttgatcaaatgtactgtccaaatgacggagttagcacaaatataacatttttatcactaaacacagacctattccaaaaccctttctgggaaacagacaacaacgaaccatactatccaaaagtaacaggaacattaaacacaggcttatttgaacaaggcaatggtggagaacctaataaacaatccaattggaacaaaattgctttattaggaaacacaacacaatttaaaatactaaatcataatgaaatacaacaaataaacaactatgagacatacaacaagaaattaaactggggaaacccattttctacaacacatagagacagctcagaagacattccaatttattacggaaaccctccaactaatattacatataattctacacctaacatactacccattacaggactatatcaagaatgcagatacaatccatttagagacaaaggaaaagacaataaagtttacattaaatgcacaaaaaaatttgaaggctcatttacatcacttcccacagacgaaagactaattgtaaaagacatgcctttatggctaatattttggggctggcaatcatggctacaaaaatcaacaccagtacaccacttactagaagactatcagtttgtaatacaatctaactatatatatccaccaatgcgatgctacgtaccactagatcaatactttactacaccacaaaaaacaccattaacagaaacagacaaacaacactggcacccaaaagcagaataccaacaagaagtattagctgcatttgccgctacaggcccagcagcaccaaaaattaataaacaaaatcaaatacaaatacactgtttttatgatttttattttaagtggggaggatgcccaacacccatggaaacagtctgcaaccccgcagaccaagaaaagttccccacgcccaataacctcatacaagaacctacaatccagaatccagaaacaccaaaagaatactatttgtacaaattcgacgaacgacagggatttattacagcaccagctgcaaaaagacttaaaaaagacattgaaactccaaaatattttacagaatatggaacaagagaccccatactcgaagtcttcccaccgacggaccaaacacaaaagaaaaagaccacggaagaagaaaaagacccgctacagctccagctccagcaactccagctgtaccagcaacacctcagagaccgaatcaacagattaacaaaacgttcaaaattattccctatactatagacatgtttggacaaagtaaaaataaaaaccgtaggttaactgcaaaagaaagagcagatgatttagaagatgctataatatggggcagatatcctagaacatataaaaatgaatcttactattacaaagacatgaaacctgaacctgttgtaaactttgcattaaactttaaattctaagccagcaaatattcacttgtcggtgtccatttattaaagttaaaacttatataaacatccaccactttcccaaatacgcaggcgcacaagggggctccgcccccttaaacccccagggggctccgcccccctaattaatattcaacaggaaaaccacctaattagaattgccgaccacaaactgtcaaccgttaaacttacttctcctttttacactgcacttctgcttttacagaacacacccacctaataaattattaatcagacgcatatcctgggaggaggaacacttctatataactaagtaccatgacgaatggctgagtttaccccgccagacggagacgagacaggatactgactcggctgcttcaggg

SEQ ID NO: 3812 - protein, 662 aa, Betatorquevirus sp.
MPPFNFYRRRWRPNRRWRWRRRFTTRRFRRPLRRRFWRRHWVRRRYFTKKKKRKLKKIRLQQWQPDQIRKCRIKGQLCLLTCGKGKINNNFTLTSESYVPTRESGGGGWSIMQLTLRALYDEYIHFRNWWTNSNCGLPLTRYMGVTVKFYKSNDTDYIVTAQHTGPFEVTRDIYLSTQPSRHMMNHKSFIIPKLNPNKKKKPYIKKRFYPPAMWLNKWYFQQDIYNHPLILFIVSACSLDQMYCPNDGVSTNITFLSLNTDLFQNPFWETDNNEPYYPKVTGTLNTGLFEQGNGGEPNKQSNWNKIALLGNTTQFKILNHNEIQQINNYETYNKKLNWGNPFSTTHRDSSEDIPIYYGNPPTNITYNSTPNILPITGLYQECRYNPFRDKGKDNKVYIKCTKKFEGSFTSLPTDERLIVKDMPLWLIFWGWQSWLQKSTPVHHLLEDYQFVIQSNYIYPPMRCYVPLDQYFTTPQKTPLTETDKQHWHPKAEYQQEVLAAFAATGPAAPKINKQNQIQIHCFYDFYFKWGGCPTPMETVCNPADQEKFPTPNNLIQEPTIQNPETPKEYYLYKFDERQGFITAPAAKRLKKDIETPKYFTEYGTRDPILEVFPPTDQTQKKKTTEEEKDPLQLQLQQLQLYQQHLRDRINRLTKRSKLFPIL

SEQ ID NO: 3813 - protein, 92 aa, Betatorquevirus sp.; identical to SEQ ID NO: 3586

SEQ ID NO: 3814 - protein, 58 aa, Betatorquevirus sp.; identical to SEQ ID NO: 3587

SEQ ID NO: 3815 - DNA, 2799 bp, Gammatorquevirus sp.
cgccccgccctcgttccgacccgcttgcgcgggtcggaccacttcgggctcggggggggggcgcgcctgcggcgcttatttactaaacagactccaagtcgccatttggcccccctaggggcaattcgggctagggcagtctagcggaacgggcaagaaacttaaaacaatgctttgttttacagatgtcaaaagttcaagctaaagacttttatactcccacaccctacaatcaagaaacgaaaaatcaaatatggatgtctcaaattagtgattctcacgataatttctgcaattgtcacactccctttgctcatttgcttgccagtatctttcctgttggccaccaagataggaatctcacaattaatcaaattcttctcagagattacagagaaaaatgccgttctggtggaatagaagaagaaagccctggtggggccgttggagaaaaagatggacctacaaaagaaaaaacaccagaagacgaagacctagaaaacggagacatagaagaacttttagacgccgtcgccgccgcagaagaacatacaaggtaagaagaaaaagaaaattaataactgtaaagcaatggcaaccagataaaattttaaactgtaaaattaaaggatatgatactttagttttaggagcagaaggaaaacaattggtatgctataccaatgttaaacaagcttggacacctccaaaaactcctgggggagggggatttggtgtacagcaatactcacttggatacttgtatgaacaatatatttttagaaaaaatatatggactaaatcaaatatagcactagacctagtaagatatataagagccaaatttacattttacagacacccagaaacagactttattgtacagtttgatagacaaccaccatttacaatagatgaattaacataccctttaacacacccagctcaacttatgctcgcaaaacataaattctttgtactcagtacagctacaaaaccacttggtagactaacaaaaacaaaaataattaaaccacctaaacaaatgctaactaaatggttttttcaagaagactttagcaaagcaggactactacaactaaaagcagctgcaacaaatttaaggtatgcaaacctaggctgctgcaacacaaaccaaattattacagcattctccataaacacttcatttttccaacaaggaaactgggcaataggcacaggagacagatacagaccctacctagcaatacctgccaaactatactactggccagaaaaaccaccaagcacttcatcagaaagagaagaatacaacaagaaatacatgttcacacaagaaataagttcatataatgactcagttagctatgaaaaaggctactttagcactaaagtactaacagccaaattttactcacaagacaaaatggataacacaggccttgccaatttaccactactttcatttagatataatccagccttagactcaggaaaaggaaatgcaatttggctacacaactcactaactacatcatatgataaaccagcaatagacaaaacccttatactacaaggcctacccctgtggcaaatgctatggggctggcttagctatgtacaatacattaaaaaagccactgacttttttacatcccacattataatactacaaagtcctgctattaaacctgcaccaacagcctcaccacaaacatactacattccactatcaacagactttgtaaatggcaagcctccttacaatgagccacttaccacctggtggagagcacactggtatcccaacatatatgaccaactacctgtactaaatgctattgtagaatctggcccttttgtacctaaatactcacaaactaaaaacagtacatgggaactaaaatacacttacaattttttctttaagtggggaggtccagacattacagaaccagcagtggctgaccccagccaacaacaaacatatcctgtacccgataaaatgtcagaggcagtacaaattagggaccctgccaaacaaaagtttgaatcaatcctgcatccctgggactacagacgtggcctcattaaagaatcagctcttaaaagaattcgagacaacctctcaattgattcaactttccaaccagatgaaacacctaaaaaaaaaagaaaaacagttggtccctgtcttacagtgccaggagaggaagaacaagaaatacagaaatgtctccaagaactcttcgaagaaagtacctaccaagaaatccaagaagaaacaccaatccagcagctcatccaacagcagcacgagcaccagcagcagctcaagtggaacatgctcagactaatatcagacttgaaagaaaaacagagacaattacaactacaaacgggttttataagttaacaccattcaaaccaggttttgaacaacaaacagagagagaacttgctatagcttttaaaagaccacccagattatttaaagaagacaaacccttttatccatggctacccaaaccaacacctattgttaactttcaccttaactacaaattctaggccaacactgttcacttagcggtgtttgtttaataaagtttgcaccccaaaaaaaattgtaaaattaaaaaaaaaaaaaaaaataaaaaattgcaaaaattcggcgctcgcgcgcgctgcgcgcgcgcgagcgccgtcacgcgccggcgctcgcgcgccgcgcgtatgtgctaacacaccacgcacctagattggggtgcgcgcgctagcgcgcgcaccccaatg

SEQ ID NO: 3816 - protein, 672 aa, Gammatorquevirus sp.
MPFWWNRRRKPWWGRWRKRWTYKRKNTRRRRPRKRRHRRTFRRRRRRRRTYKVRRKRKLITVKQWQPDKILNCKIKGYDTLVLGAEGKQLVCYTNVKQAWTPPKTPGGGGFGVQQYSLGYLYEQYIFRKNIWTKSNIALDLVRYIRAKFTFYRHPETDFIVQFDRQPPFTIDELTYPLTHPAQLMLAKHKFFVLSTATKPLGRLTKTKIIKPPKQMLTKWFFQEDFSKAGLLQLKAAATNLRYANLGCCNTNQIITAFSINTSFFQQGNWAIGTGDRYRPYLAIPAKLYYWPEKPPSTSSEREEYNKKYMFTQEISSYNDSVSYEKGYFSTKVLTAKFYSQDKMDNTGLANLPLLSFRYNPALDSGKGNAIWLHNSLTTSYDKPAIDKTLILQGLPLWQMLWGWLSYVQYIKKATDFFTSHIIILQSPAIKPAPTASPQTYYIPLSTDFVNGKPPYNEPLTTWWRAHWYPNIYDQLPVLNAIVESGPFVPKYSQTKNSTWELKYTYNFFFKWGGPDITEPAVADPSQQQTYPVPDKMSEAVQIRDPAKQKFESILHPWDYRRGLIKESALKRIRDNLSIDSTFQPDETPKKKRKTVGPCLTVPGEEEQEIQKCLQELFEESTYQEIQEETPIQQLIQQQHEHQQQLKWNMLRLISDLKEKQRQLQLQTGFIS

SEQ ID NO: 3817 - protein, 124 aa, Gammatorquevirus sp.
MSKVQAKDFYTPTPYNQETKNQIWMSQISDSHDNFCNCHTPFAHLLASIFPVGHQDRNLTINQILLRDYREKCRSGGIEEESPGGAVGEKDGPTKEKTPEDEDLENGDIEELLDAVAAAEEHTR

SEQ ID NO: 3818 - protein, 126 aa, Gammatorquevirus sp.
LSYSARRGRTRNTEMSPRTLRRKYLPRNPRRNTNPAAHPTAARAPAAAQVEHAQTNIRLERKTETITTTNGFYKLTPFKPGFEQQTERELAIAFKRPPRLFKEDKPFYPWLPKPTPIVNFHLNYKF

SEQ ID NO: 3819 - DNA, 2798 bp, Betatorquevirus sp.
caggtgctggaggtgagtgaaaccaccggaatcaaggggcaatatgggctagatcagtctggcggaacgggcaagaaacttaaaataatatatattttttacagatgaacagaaaacaaaaactggacctactaaacttaattaaccatgcccacgatttaatttgcaactgcgaacaaggaatagtacatacccacaaaattattgaagaaattaacccagatttgaaaaaatgccatactactactacagacaaccttggagacgtcgtcgatggtttcggccctggagaactagacgctttattcgcagaagatggagaaaaagacgctactacagaggggtaagaaaaagaaaactaaaacaaataactgtgaaagaatggcaacctcttactataagaaaaactattattagaggatggtatccagcatttttaacaaacaagcacagaataactaacaatttaactaaatatattgattccatcgcaccaactcattttgatggaggcggcggctttgctatatctcaatttaccttaaatggactttatgaactatttattaaagcccaaaactggtggacacaaagtaactgctggctaccattaattagatactttggatgtcaattaactttttatcgcacagaaaattatgattatgtagcacatgtacatagatgcttacctctaaaagcttctgatgaactatatatgagtagtcaaccttatattatgttacttagcaaaaaatgtattagaatacattgcaaaaaaaatactaaaagtaaaaaaccttataaaaaagtgtttgtaaaacctcctactcaatatactaacaaatggatgtttcaagctgatatatgtaaccaacctctattaattgtacaaactgctgcttgtagctttgatagaatgtacttagcttcagacgcacaaagtactacagtaggatttatttcattaaacacacaatcatatatactacataactggaacacaccaccaacaacaggttatcatccacaagaaaaacaatatttatggggcacccaaaatggagctgcagaccctaacaatgaacctgttataaacttaatatatttaggtacaactaaaagtaccgccacaggcatacctatgaaaaataaacaaggcttacaacaagtaccaactacagaatctatgtggggaaacccttttataccacattacttttcacaagagggaggactttttgttagcacaaaatctccatccgaaatacaaaaacactatgaaaaaagctcaacatttgaaacagaaactgttaaacaatccacagaatttacacctaaatcaacacctaactatgttaactgtagatacaatcctttagcagacaaaggcaccggtaacaaaatatacatagtaagcaacactttagatcaaacaccatgggctccacctacctcagcaaaacttataagacaagacctacctttatgggtaataggatttggttacctcgactggcaaaaaacattaaatgaaaccattaaaatagacacagacaaaattttagtaatagaatccccatacataacaccaaagttaaaatactatgtaccactagaccaaacatttattgatggaaatagcccacataaagaccatataacagactatgatgagacacattggtacccaaaagtaggatttcaaatggaagccataaatacaatagcctcatcaggccctgcaacagtaaaactaccaaaagaaagtagtgcagaaggtcattattcttataaatttatttttaagcttggaggatgccccccaccaatggaaaaaatttgtaaccccattaaccagcctgtatacccagtaccaaataaccagcaaccatcaacttcgttgcagagtccagggactgccatacaaacattcttatacaacttcgacgaaaggcggggacaaatcacagataaagctgcaaaacgaattaaaaaagactatgaaactcaaacaactatgctcccacttgcaggacaaagctggatggatgtcagatcatccccgcaaagcacaccgccacaaacaccggaggactcggaagaagaagaagagaacatacacctccagctcagacaactccgaagaaagcaaaaacacctccgaaagcgaatcctccagctgttagacacacaaagcttagaataataaaatgtaatttttacaatcaaatgtttggagatccaactccaaatagacgtctaactagcaaagaatttgaatgggaattacaagatagtaagatatggggccataaacctcgtacatttctaaaagatacacccttttatgaattctttcctccaaccccaataattcctcgtgtaaactttgaacttggatttaaaaaataaaggcctgcatacttcaacttgaggtgtccatttatttaagcttaaacttatataaacatccaccacactccctaatacgcaggcgccaagggggctccgcccccttaaacccccaagggggctccgcccccttaaaccccccccctaataaatattcaacaggaaaaccacctaattagaattgccgaccacaaaccgtcttttacttcccctttttgttttacttcccttttacattatgaatattcattacataaattaataatcaccgtaaatccggggaggagctacaacactatataactaactacactgacgaatggctgagtttactccgccagacgaagacggcatcacttcagtgactgcaggctgatcttggg

SEQ ID NO: 3820 - protein, 658 aa, Betatorquevirus sp.
MPYYYYRQPWRRRRWFRPWRTRRFIRRRWRKRRYYRGVRKRKLKQITVKEWQPLTIRKTIIRGWYPAFLTNKHRITNNLTKYIDSIAPTHFDGGGGFAISQFTLNGLYELFIKAQNWWTQSNCWLPLIRYFGCQLTFYRTENYDYVAHVHRCLPLKASDELYMSSQPYIMLLSKKCIRIHCKKNTKSKKPYKKVFVKPPTQYTNKWMFQADICNQPLLIVQTAACSFDRMYLASDAQSTTVGFISLNTQSYILHNWNTPPTTGYHPQEKQYLWGTQNGAADPNNEPVINLIYLGTTKSTATGIPMKNKQGLQQVPTTESMWGNPFIPHYFSQEGGLFVSTKSPSEIQKHYEKSSTFETETVKQSTEFTPKSTPNYVNCRYNPLADKGTGNKIYIVSNTLDQTPWAPPTSAKLIRQDLPLWVIGFGYLDWQKTLNETIKIDTDKILVIESPYITPKLKYYVPLDQTFIDGNSPHKDHITDYDETHWYPKVGFQMEAINTIASSGPATVKLPKESSAEGHYSYKFIFKLGGCPPPMEKICNPINQPVYPVPNNQQPSTSLQSPGTAIQTFLYNFDERRGQITDKAAKRIKKDYETQTTMLPLAGQSWMDVRSSPQSTPPQTPEDSEEEEENIHLQLRQLRRKQKHLRKRILQLLDTQSLE

SEQ ID NO: 3821 - protein, 80 aa, Betatorquevirus sp.
MNRKQKLDLLNLINHAHDLICNCEQGIVHTHKIIEEINPDLKKCHTTTTDNLGDVVDGFGPGELDALFAEDGEKDATTEG

SEQ ID NO: 3822 - protein, 123 aa, Betatorquevirus sp.
LDGCQIIPAKHTATNTGGLGRRRREHTPPAQTTPKKAKTPPKANPPAVRHTKLRIIKCNFYNQMFGDPTPNRRLTSKEFEWELQDSKIWGHKPRTFLKDTPFYEFFPPTPIIPRVNFELGFKK

SEQ ID NO: 3823 - DNA, 2797 bp, Betatorquevirus sp.
caggtgccggaggtgagtgaaaccaccgtagtcaaggggcaatatgggctatgtcagtctggaggaacgggcaagacactaaaatacctttttttacagatgtcaattttttggaaaccaacaccatttggacccagagaaagagaaaaccaatggattaactactgcattcaaggacacgatcaaatttgcggctgcgactcaccaggagaccaccttctatactgcatcgccgaaagaagtggaaaacttaacatctctaaaaagatactagaagaatcaacaaaatgccttactacccacgatggcgccgacgccgctactggagaaaaagacgccctcgaccttatagatggagaactagaaaacctattcgcagaagatatagacgatcctactactgggtaagaagacgtcgatttcttaaaaaactatttaaaataactcttaaacaatttcaacctaaaaaaattgttaaatgtaaaatacaaggtgaaatatgcttatttcaagcaggaaaaggacttatttttcaaaattatgctcaataccaagacagctttgtaccagaaggtgaaccgggaggagggggctggtcagcacttgtttttaacttaggaggcctataccaagaaaatcaaaaactacacaatagatggtctaaatctaacaaaggccttccactagcaagatacacaggcagtaaatttaaattctggagatcttgggacacagactacataatacactggcaaacatgcccaccaatgacagacacagaacttttacacttaaacgcacaacccttcatgacaatgctaacaaaaaatcattttatagttccaaacttaacaagaccaccatacacaaaaaaaccctactttactaaaaaatttccaccaccttcacaattaacgaacaaatggtactttcaacaagacatttgcaacacaggattactactactaaccacaagtgcaatgtcacttgaccaatggtttttacctaataacgaactcagcaacaatattacactaacagcccttaataccacattttttcaaaattctaacttccaagtcagaggcacaaaaggttatcaaccaaaatctaacttatatatttatggccaaggaaatggcactactagcccaaaatggaacgaattaacatacctcggaaatgcagaatggtaccaagaaggcaaaaaaatgacaaatgaaaatttagacaattttacagactggggaaatattttccatgaagtacacgttcacgcagacacacacgtttactacagtacaacatttccaaccgtaagccaactaaacctacaagcctcacatatcacaaaactagactacttataccacagttgcagatataaccctaacagagacacaggagagggcaacgaagtattcttcgtaagcaactccattaatccaaaactcatatatgatccaccaaaagacccagacctacacatatatggatacccactatggcttatagcctggggctgggctgactggcaaaaaaaattagcaaaaataaaccaaatagaacaaaactacattatggtagccaaaactaagtttattaacccaccattacctgcatatgtattcctagacaattactttactaacccagaaaaatacgctgaacattacactgaaacagacaaaaaacacttttacccaaaatatgaattccaaaaagaacaatggaacttaatagcacaatcaggtccagcagcacctaaaatagacaaaagccaatccatacaagcaagagctcactactcatttttttttaagtggggaggctgcccagcaccaatggaagaagtcaaagacccctgccaacaaggaacataccccatccccaattaccagttacaagcatctcaaatccaagatccaaacacagacaaaagatcatttatatgggactttgacgaaagaagagaaacaattacccctaaagcagctaaaagacttaaacacatcccaacttttgaaactgtattcacagatcgaccacccttcgacctccaactacagaaaacggagacggaggaagaaacatcgtcagaggaagaaatccaaacatcactctcccacaaagtcgaccacctccgactcaagcacaaactcctccgacgaaagctcaacagactaatccaagaaaaactatcaacattataaataaacactgtaaagttgaactatttcccaaaaaaagacaaaacagacgtttttaccaccatgaaatacaaactgaacgagagttagctcaaatatttaaaagacctataagaacttttatacatgatcctcccttttacccctggctcccactagagcctaaagtaaactttatgttaaactttaaagataaataaacaaggccctattgattcactctcggtgtccgtttatattattataaaacttaaataaacatccaccgcctccctatcacaaaggcctaggggctccgcccctagaaccccaagggggggggccccccaaacacgcctataaccgcaaaattaacatagctaaccacaaacagacagaaaaaccactaaatttgcattgccgaccacaaacagaaatatgctaatttacttccctttttttgctaacacgcccctaatacattaataatcaccgtcacatcctaggcggagctacacctcaatataactaactacactgacgaatggctgagtttaccccgccagacggcgaacgcatcacaacagtgactgcgagctgacattggg

SEQ ID NO: 3824 - protein, 641 aa, Betatorquevirus sp.; identical to SEQ ID NO: 3708

SEQ ID NO: 3825 - protein, 102 aa, Betatorquevirus sp.; identical to SEQ ID NO: 3709

SEQ ID NO: 3826 - DNA, 2795 bp, Betatorquevirus sp.
caggtaccgaaggtgagtgaaaccaccgtagttaaggggcttattgggctgaagcagtattgacggaacgggctagaaacttaaaaatatatatatgttttacagatatgagcagctttcttacaccagcagtatacagcaacaatggattagaaaaccaatggataaactcaatttggaatatacacgaccttttttgcggctgtaacaacgccattaaacacctttttaacatcttaaagaaaaaacaaagcctaccatgcctcccttcaatcgatggcgtcgatactggaacccaaactggagaagatatcgaaaacgacgttttagaaccaggagatttagaaaagctattcgaggaagatttcgacgaagaagatgggtaagaagacgctttaaaaactatagaaaaaaagctaaaaaaataactgtaaaagaatggcaacctaaaaaaattagaaaatgtactatcaaaggacctttatgcttatttgcttgtggtagattttgcatagctaataactttactttatttgctgaatcctatataccagaaaaaaactgtggaggtggtgcctggtctattatgcagctaacattacaagctttatgggacgaatatgtaaaatttagaaattggtggactgtatccaatgagggcttacctcttgttaaatatatgtactgtaaatttaaattttatagaagcccattcacagactacatagtaataccttctctatgtcctccattttcagtaactagagatgactacttaaacacacaacctttaagagcactaatgaacaaaaacaaaataatagtacctaaattaagagaaaatagtaaaagaaaatacattaaaagaaagttttacccaccatctttatttcaatccaaatggtactttcaacaagatatatgtaaatttccattcatagtactaaaaacatcagcatgttcatttgatcaattttatcaaccagatgacatgctatcttataacataacattatactcactaagcacattttttgaaaaccctagatttgaagaaaaaatagcaaatggctactctcctaaaacagcatccggaggcacattagatggtaaaaaatactacctatatggaacagaaaacggcacagacaatccaacttgggcacaattaacaatactaacaaatacacaaacatttactaaaggcacaccttatggacaaaacaaaaatggatcaccaggaaaccctttccatcctgcatggattactaatgaagattcaaatatatactactcaacacaagaaccacaaaacataccaaatgcaaaccaaccagccacaaacataactaaactaacacacttaatagaaaaatgcagatataacccacttagagatgcaggaaagggcaacaaagtatactttaaaagctcatctttacaacaaggaacaatgcatgacctaccaacaaacttaaatgtacttatagaagaccttcctttatggataatattttggggatggattagctggcttagaaaactacatcccataaaccacatagaaacagaatacatgtttatagtacaatcaccatatataacaccaaccagaccatggtacctatttttagactactactttttacaaaaaaaacatgacgatccactaacagaaacagaaaaagctcactggtttcctagatacgaattccaaaaagaagtagaattctactttgctcaaagtggtccaggtgctccaaaaattaactatacaaaatgtatacaagtaaactcaatgtattcattttttttaaagtggggaggatgtccagcaccaatggaaacatttacaaacccatgtgaacaagaaagatttcccgtccccggtgcaatcccacagtcagctacaatccaaaatccaaaattatcaaagtaccaatacctatatgagtgggacgaaaaagaaggtgtcattacaaaatcaactgcaaaaagaattaaaaaagacttctctcctacaaaatatgttacagacagtggagccaaagacgtcccattccaaacacaaacgacagaaagcgacgaaacatcgacagaagaagaaacgaaaacatcgctccagaaccagatcaccctcctcaagctccgccagcgaaagctcaagcgaaagctccgaaagcaccgattaatataaaaactattaaactaacacaaaatatttttggagaatcaacattaaaaaataggagaatgactagtaaagagttacaagaagaaaaaatagaggcaaaactgtggggtagaccagaaagaacatttatttttgatattccaggtccctactatggcactgtaccagaaccacttgtaaattttaacctaaactttaaataaacaaggcccatttattcactaaccggtgtctgttcctttaagtaaaaaccttaataaacatccataacacgcccaaataatgggcgccaaaatttaaagggggctccgcccccttacacccccaagggggctccgcccccttacacccccacccctaattaatattcaacaggaaaaccacctaattagaattgccgaccacaaactgtcatccgttacaacaacttccctattttacactacacttcctgttttttagagccacgcctgctacttcattattaatcagacgcatatcctgggaggaggaacacctctatataactaagtgtactgacgaatggctgagtttaccccgtcaaacggagacgagaaaagacttctcggctgcttcaggg

SEQ ID NO: 3827 - protein, 645 aa, Betatorquevirus sp.
MPPFNRWRRYWNPNWRRYRKRRFRTRRFRKAIRGRFRRRRWVRRRFKNYRKKAKKITVKEWQPKKIRKCTIKGPLCLFACGRFCIANNFTLFAESYIPEKNCGGGAWSIMQLTLQALWDEYVKFRNWWTVSNEGLPLVKYMYCKFKFYRSPFTDYIVIPSLCPPFSVTRDDYLNTQPLRALMNKNKIIVPKLRENSKRKYIKRKFYPPSLFQSKWYFQQDICKFPFIVLKTSACSFDQFYQPDDMLSYNITLYSLSTFFENPRFEEKIANGYSPKTASGGTLDGKKYYLYGTENGTDNPTWAQLTILTNTQTFTKGTPYGQNKNGSPGNPFHPAWITNEDSNIYYSTQEPQNIPNANQPATNITKLTHLIEKCRYNPLRDAGKGNKVYFKSSSLQQGTMHDLPTNLNVLIEDLPLWIIFWGWISWLRKLHPINHIETEYMFIVQSPYITPTRPWYLFLDYYFLQKKHDDPLTETEKAHWFPRYEFQKEVEFYFAQSGPGAPKINYTKCIQVNSMYSFFLKWGGCPAPMETFTNPCEQERFPVPGAIPQSATIQNPKLSKYQYLYEWDEKEGVITKSTAKRIKKDFSPTKYVTDSGAKDVPFQTQTTESDETSTEEETKTSLQNQITLLKLRQRKLKRKLRKHRLI

SEQ ID NO: 3828 - protein, 108 aa, Betatorquevirus sp.
LTERARNLKIYICFTDMSSFLTPAVYSNNGLENQWINSIWNIHDLFCGCNNAIKHLFNILKKKQSLPCLPSIDGVDTGTQTGEDIENDVLEPGDLEKLFEEDFDEEDG

SEQ ID NO: 3829 - DNA, 2795 bp, Betatorquevirus sp.
ggcgggtgcggaggtgagtgaaaccaccgattcaaggggcaattcgggctagttcagtatagcggaacgggcaagaaacttaaatatattaattttttctctagatgagcttatctaaaccagcgaaatactccaaaaaacaactaaatctacaaattgttaacacttatgttaacattcatgaccttaactgcggctgtgatgaaccactaaaacatataattcaacaaattgaagaacaagaacccaccttaaaacaatgccttacttctaccgcaactggagacgaccctggacccgtagatggcgtcgacggacttggagaaggagaattagaggcacttttcgcagaaacaaacgaagaagattctaccgggtaagaaaaaaacttaaaactataagactaaaagaatggcaaccttctcatataaaaaaaatttgtgtaaaaggactttactgcatatggcaagccaaccacacacaaattaacaaaaactgggcacaatatgaagcctcagtgccaagagaaggaataccacttggaggaggatattctttattaagatttaatttacaaactttatttgaacaacatgaacttgttaaaaatgtatggactaaatcaaacaagtactttcctttgtatagatatttaggatgtaccataaaagtttatagacctgaagaggtagactgtttagtaaaatttcaaacatgttatcctatgtcagctagctcatttttgtatatgggatgtcaaccaagtataatgtcaatgtctaaaggttgtaaacgcataagaagcttaaaaaatgcacctaacgctaggccctacaaaaaatttagactaccgccaccacaacaaatgacaaacaaatggctatttcaaagccaaaacagtaaaacaggcctattactaatccagtcagcagcatcaagctttactcaattttttctaagtagagaatcagagagtcaagtaattaacttaaaaactttaaatacaaaaatatttgaaaacctaaattttaaaaacttacctacatatggatacataccaaaacaaaactttgcattatatgcatccaatggtaatgacaaagtaggtgatttacactggctaggaaataccatagaataccaagaaggaaaatcatttaaacaaatagaacaaaaagcaacatttaaagaaacaatacaaacctacatgcaaaacagacaaaattggggaaaccccttccaccacacaatattgtctaaatcttggaaaatatggtttggaccaaacaacccactactactatttacaagtacacccactactccaacaaaaataactatggatacgcccatttcccaaacacaacttaaagaagtaacacaagaacttatttttgactgtagatacaatcctaacacagacaaaggttatgacagcatgctttacttaaaatccaactggaaagacccagaaacattagaacccccacaagacaaagacctgataacagcaggtttcccagcatggttatcagcatggggattcttagattaccatagaaaactaggcaaagttacagaaatatcaacaaaatacattgcagtacacaaatcaaactacatccaaccaaaattagaatactacatatttgtagataaagactttgtagaaggcaactcagaatactacacaggccgaacaggctgggacaacttaaactggtatccaatgacactgcatcaagatagagcctttgaaacactagctcaatgcggtccaggaacaccaaaactaggtaaaaacaaaagtgcagaatgtcatatagaatatcaattttattttaaggttggaggctgcgcagcacctctggaaaaagttacagacccaacaacacaaccatattatcctacaccaaataacatccttgacacaaattcgttacagaatccagaggaaccatgtgaatcattcctctatcaatttgactggagacgaaatcaaattacggaaacagctgcaaaacgaatccttaaagactactcaattgaaaaatatttatttacagatggaacaacaacttcaacagcagcagatgtcccaacacacaaaacacaagaaaaagaactgctctcgtcggaggaggaggaaacccaaacggagacactattcgagcagctccagctccagcgaaacaagcaaaaacaactccgacaccgaatcaagcagctcctaacacaactacaaaatatacaataaaaaactgtaaagtaaaagtaaacctatttggcgaacaactaaataggagacttaacagtagagaaagggcagaagataaaattgaggcagctatttggggcagatctgaaaaatatttcctaaaagatattccttactattatggctgtgtacctgaaccccgtgtaaactttgatttaaactatcattaaacaaggcccattgattcacatctcggtgtccgtttctttaagtttaaacctttataaacatccaccacttctccctatcaataggcgccaaaagggggctccgccccccccctaattaatattcaacaggaaaaccacctaattagaattgccgaccacaaacggtcccatacttccctatttttacatacttccctttttacttataaatattcataaaataaattagtaatcaccgtaattccggggaggagacaaatacctatataactaactacacagacgaatggctgagtttatgccgctagacggaggacgcatcagtcactgactgcggactgaacttg

SEQ ID NO: 3830 - protein, 665 aa, Betatorquevirus sp.
MPYFYRNWRRPWTRRWRRRTWRRRIRGTFRRNKRRRFYRVRKKLKTIRLKEWQPSHIKKICVKGLYCIWQANHTQINKNWAQYEASVPREGIPLGGGYSLLRFNLQTLFEQHELVKNVWTKSNKYFPLYRYLGCTIKVYRPEEVDCLVKFQTCYPMSASSFLYMGCQPSIMSMSKGCKRIRSLKNAPNARPYKKFRLPPPQQMTNKWLFQSQNSKTGLLLIQSAASSFTQFFLSRESESQVINLKTLNTKIFENLNFKNLPTYGYIPKQNFALYASNGNDKVGDLHWLGNTIEYQEGKSFKQIEQKATFKETIQTYMQNRQNWGNPFHHTILSKSWKIWFGPNNPLLLFTSTPTTPTKITMDTPISQTQLKEVTQELIFDCRYNPNTDKGYDSMLYLKSNWKDPETLEPPQDKDLITAGFPAWLSAWGFLDYHRKLGKVTEISTKYIAVHKSNYIQPKLEYYIFVDKDFVEGNSEYYTGRTGWDNLNWYPMTLHQDRAFETLAQCGPGTPKLGKNKSAECHIEYQFYFKVGGCAAPLEKVTDPTTQPYYPTPNNILDTNSLQNPEEPCESFLYQFDWRRNQITETAAKRILKDYSIEKYLFTDGTTTSTAADVPTHKTQEKELLSSEEEETQTETLFEQLQLQRNKQKQLRHRIKQLLTQLQNIQ

SEQ ID NO: 3831 - protein, 91 aa, Betatorquevirus sp.
MSLSKPAKYSKKQLNLQIVNTYVNIHDLNCGCDEPLKHIIQQIEEQEPTLKQCLTSTATGDDPGPVDGVDGLGEGELEALFAETNEEDSTG

SEQ ID NO: 3832 - DNA, 2794 bp, Gammatorquevirus sp.
cgggagcccgaggtgagtgaaaccaccgaggtctaggggcaattcgggctagggcagtctagcggaacgggcaagaaacttaaaacaatactttattttacagatgcaaaacctgtcagcagcagacttttttaaacctacaccatacaacaaagataccaaaaaccaaatatggatgtccatgattgctgatggtcatgacattatctgcaactgctttaatccttttgctcatttgcttgcttctatttttcctcctggtcatcaagaccgtgaccttaccattaatcaaattattgaaagagactacaaagcacaatgccattctggtggaacagaagacagaagtggtggagaggccgccgcaggcccttctacaaaagaagattccaatataaaagaagaaaaccaagaagacgagtttacagaaagaaacatagaagaacttatcgccgcggcagaaaacgcttcaaaaaggtaagaagaaagaaaaaacaactaacacttaaacaatggcagccagaaagtatcaaaaaatgtaaaattaaaggaactgctataaacgtactaggagtacaaggaactcaatacagatgttatactaacaacaaatatgaatatacaattagtaaagcaccaggaggaggtggttttggagtagaaaaatattcactaggttacttatataaagaacacaaagctggtaataacatctggacaactagcaatgttaacttagaccttgtcagatacttaggtgttatatttaaattttacagacacccacacatagattttataggtacttacagcagaaactacccaatggacttacaaaaatatacttatgcagattcacacccctaccaaatactacagagcaaacacaagtttttaataccaagcatgttaactaaaccaaaaggtaaaaggtatgtaaaagtcaaaattagaccaccaagacaaatggttaacaagtggttttttcaagagtcattttcagacacaggtcttgtacaattacacactgcagcagcagactttagatatccacacttaggctgctgtaatacaaaccaactagcaggattcctacacttaaacacagatatttatcacaatggagcttggggaaatccaaacagtccagtacctactaaacaagataaatggtatgtacccacacctaactttgcacccgttactaaagtaaaaaatgcaaagggtgaggaagtttccataaatacatgcttaacaccttatagcaaaacaataaattacactgaaggctggtttcaaccaaaattcttacaggccatagcaattattcaaccacagcaactgaatggtcctataaaaggagccagatataacccatctttagacacaggtcagggtaccgctgtttggcttacatctgtactaaccaatgaatatggaccaccaaaaactgacctagacttataccttgaaggcttaccattatggcaactactgctaggttttttagactgggtaaaacaaaaaaagaaagatccaacattcttacaaagttactacttatgttttcactgcaatgctgtagaaccaaaaccaggtataaaacaagtttatataccagtagactactcttttataaatggcaaaggtccatatgactctatactaagtgtttgggaccaagaacattggtaccccctacttaaacatcaaattcaaacaataaatgcactagtaagcacaggaccattcatacccaaactagacacacttaaaaactctacatgggaactgtactcagaatacatattttattttaagtttggaggtgcagcattaccagatccagaaaccaaagatccagccacacaaggttcacatgatgtccccgatagactcacaaaaaaaatacaaatccttaacccgcaaaaaaatgttgcagcagcagccttacatagctgggacttcagaagaggggtcattacaagcgcagcttataagagaatgtgcgaaaacgcagaaactgattcagatttcacagcagatgttccaaaaaagaaaaagaaaacatcactcccaggaaacagcctcccaatcatcagcaaggaagcacaagaagtccagagctgtctccactcactctacgaagaaagtacctaccaagaaaccccacaagaaaaaacaatcgagcagctcctcagagaccagcagcagcagcagcagaacatcaagaacaacctccttctcctcatcaacaacctaaagaaaaaacaaaaactactacaactgcaaacgggtgtcctagactaactagatttaaacctggttttgaatgggaaacagaaatgcaactagcaaatgcttttaatagaccacctagactgtttaaagaagacactcctttttacccatggttaccacaaccaacaccccgtgttaactttcaccttaattttaaattctaggcctacaatgtacacttagtagagtatgtttatataagtcacacccccaaaaaaactgtataataaaaaaaaaaaaaaaaaaataaaaaattgcaaaaattcggcgctcgccccgccgccatcttgggtgcggcagggcgggggctaaaatggcgggacccaatcactttatactttcactttccaattaacaccagccacgtcacaacaaaggggtggagactacaaaactatataaccaagtacactgacgaatggctgagtttaccccgctagacggtgcagggaccggatcgagcgcagcgaggaggtccccggctgcccatggg

SEQ ID NO: 3833 - protein, 663 aa, Gammatorquevirus sp.
MPFWWNRRQKWWRGRRRPFYKRRFQYKRRKPRRRVYRKKHRRTYRRGRKRFKKVRRKKKQLTLKQWQPESIKKCKIKGTAINVLGVQGTQYRCYTNNKYEYTISKAPGGGGFGVEKYSLGYLYKEHKAGNNIWTTSNVNLDLVRYLGVIFKFYRHPHIDFIGTYSRNYPMDLQKYTYADSHPYQILQSKHKFLIPSMLTKPKGKRYVKVKIRPPRQMVNKWFFQESFSDTGLVQLHTAAADFRYPHLGCCNTNQLAGFLHLNTDIYHNGAWGNPNSPVPTKQDKWYVPTPNFAPVTKVKNAKGEEVSINTCLTPYSKTINYTEGWFQPKFLQAIAIIQPQQLNGPIKGARYNPSLDTGQGTAVWLTSVLTNEYGPPKTDLDLYLEGLPLWQLLLGFLDWVKQKKKDPTFLQSYYLCFHCNAVEPKPGIKQVYIPVDYSFINGKGPYDSILSVWDQEHWYPLLKHQIQTINALVSTGPFIPKLDTLKNSTWELYSEYIFYFKFGGAALPDPETKDPATQGSHDVPDRLTKKIQILNPQKNVAAAALHSWDFRRGVITSAAYKRMCENAETDSDFTADVPKKKKKTSLPGNSLPIISKEAQEVQSCLHSLYEESTYQETPQEKTIEQLLRDQQQQQQNIKNNLLLLINNLKKKQKLLQLQTGVLD

SEQ ID NO: 3834 - protein, 125 aa, Gammatorquevirus sp.
MQNLSAADFFKPTPYNKDTKNQIWMSMIADGHDIICNCFNPFAHLLASIFPPGHQDRDLTINQIIERDYKAQCHSGGTEDRSGGEAAAGPSTKEDSNIKEENQEDEFTERNIEELIAAAENASKR

SEQ ID NO: 3835 - protein, 112 aa, Gammatorquevirus sp.
LSPLTLRRKYLPRNPTRKNNRAAPQRPAAAAAEHQEQPPSPHQQPKEKTKTTTTANGCPRLTRFKPGFEWETEMQLANAFNRPPRLFKEDTPFYPWLPQPTPRVNFHLNFKF

SEQ ID NO: 3836 - DNA, 2794 bp, Betatorquevirus sp.
cgggagccgaaggtgagtgaaaccaccgtagtctaggggcaattcgggctagatcagtctggcggaacgggcaagaaacttaaaataatatttattttacagatgagcaagttcttaaaaccaccatactaccaaggaagaggtttagaaaactcttggataaatatagtttttcaatcccacgatcaaatttgctcctgcaacactgttattgaccaccttaactacattataaaccaacaaaaatgcctccgtactaccgaaaaagatactacaaaagaaactactggaactggagacaaagaagaaatgcctttcgacgcagaagatttagaaaaacttttttcagaaagccaagacaccgaagggtaagaaaatttcgtttttacaaaagaaaacaaaaaaaacttaaaaaacttagactgcaacaatttcaaccttcttacattagaaaatgctctataaaaggattcctcttactatttgaagcaggacatggtttttttggcaacaatttctgttgttacaaagaaagttatactccacataaccagccctccggaggaggttggagtatacaacaacttggacttggaaatttatttacacaaaaccaatactttatgaactattggagccatactaacaatgggttaaatcttgtacgatataatggtgtaaaaattactctgtatcgtcaacctcatatagattatgtatttacctattttaatgaacaaccacaaaattctggaaaatactggtaccctacatttcatcctatgaaaatgctaacctataaaaacagaattattgtacccagcttagacactcaaccaaacaaaagaaaaatatttaaaaaaatatttttaagaccacctaaactacttaaaaaccaatggtacttcgcacaacacctcagctcttatccactaatttcctttgcagccacagctgttagtttatcacacatgtttttaagctctaaatcaaataataacaactgctctgtaataactttaaacacagacttctttaaaagaagcgcttttcaatacgcttcacaaaccacaggctatcaaccacaagaaacaatatacatatatggccttaacaatggtgcaatagatcttaaaaatgaaaaactaattaacataacatacctaggaggtatacaaagagaaaaaggagtaccaataggaacacaaccactaagtgactacaaagcttcacaatggggaaatgtattctactatgaatactttaaccacataagaacaagctttatttcaacttcaccaccacaagaattattaaaacaaactagaagcgcaacacaaactataggagacactgaattcgccaaaataaaattccatccataccattacacagaaagatacaatccctacaaagacaaaggagacggtaacatagcatactggctatcagtttctgatgccactaaaaacaattgggacccaccaaaagatgaagacttaataataagaggatacccattctggctaatgttatggggttgggaagactacacaaaaaaatgtggaaaaattagagatttcgataacaatgctattttagtactacaatctagatacatatcgggaacacacaaatattacgtaccactaagtgactcatttgtacaaggtagagccccctatgacaatgaccccgaagacataacaccaaatgacaacgcacactggtttccaaaatggaaatttcaaaaagaggccatagacaacattttaatgacaggaccaggggtagtaaaagcagaaaatcaacaatcaatacaagcctttattaaatacaattttttctttaagtggggcggcaactcttcaaccctggaaaccatctccgatccaaactctcaacccatcacacctagtccccctggactctacctacaaaatgaaattactgacccaaaaacacccattgaaaacatgctctacaaatgggacattagaagacacctccttacacaagcagctacagcacgaattaaagaaatccaaactcatgatgaatgtttgttcacagatggagcagaaacttcaacagacttcccgatcaaaacaacatcacaagaggaaacgaccccgcaaacagaaaaagagacattactcctccagctccagcagctcgagcaattcaacaaccaactacaacagcgactcctcaaactccagcaactaacggaactataagctttactttaatcaaaaaagcatacttgtttgaaccccctaaaacaaaactaacacctattagagggagggattgggaagatgaattatttttgagtaaatggatgaaacgccccatgcgccactacttagaagaccgacctatatacccatggttaccccctgaaccaattgtaaatcaaccacttgtaaattttgaccttatctctgcttttaataaaggccagcattaattcacactcggtgtctacctctttaagttaaactttaataaaccaacaccgcctccctaatacgcaggcgcaaaagggggctccgcccccttttcataaaggaaaccacaaaattagaattgccgaccacaaaccgtcacttacttcttctttttacaaaacttccccttttaatcattattattcattaaattaattaataaacaccgtaattccggggaggagctacattactatataactaactacacttccgaatggctgagtttatgccgccagacggagacaggatcacttcagtgactccaggctgatcttggg

SEQ ID NO: 3837 - protein, 664 aa, Betatorquevirus sp.; identical to SEQ ID NO: 1248

SEQ ID NO: 3838 - protein, 89 aa, Betatorquevirus sp.; identical to SEQ ID NO: 1249

SEQ ID NO: 3839 - protein, 137 aa, Betatorquevirus sp.; identical to SEQ ID NO: 1250

SEQ ID NO: 3840 - DNA, 2793 bp, Betatorquevirus sp.
gatcacttcagtgactccagaaccaccgaagtctaggggcaattcgggctagatcagtctggcggaacgggcaaggctctaaaaacatattcttttacagaatgtcttcaattattgaaccaaaatatactccacaacaacaacaactaaattggataaacttactccacggaacccacgatcaattttgcggctgcgacgacccaattgaacatctactactggcactttcaaaagataatccaaagaagctcaccaaaaaagaaattaaagatataaaatggcgccttactggagaaactactaccgaaacagatggagacgccgtagacgtgctcgatatcggagacctagaacaacttttcgctggagaagaagatactttcgaaaaccctactgggtaagaaaaccttttaaacttaaatatataaaattaaaacaatggcaaccaaagacaataagaaactgtcgagttaaaggaattaaaccactgtttcaaggcagtgccgatagactatcaaataattactggcaatatccaataagctttgtacctcccggaactccgggaggaggcgggtggggaataatggcattaagcttatcaagcatatatgaagactaccagcatttacaaaacatatttacatccagtaatgcaggacttccactagtaagatataagggagtcagattaacattttatcaacaccaatatacagattatgtagtagaagtagataactgctggccaatgcttgacaccccattaaaacacccaaacagccaaccagcaagaatgctaatgtctaaaaagaaaataataatgccaagcatagaaacaaaacctttaaaaaaaagaaaaaaatcaatatttgtaacaccgccatcacaaatgttaaacaaatggtattttcaaaaggatatatgtaacacaaaactagtaatgataactgcttcagcctgcagtctaacatcctactttctgcctaacagagcaacttcaaacaattgcactatttgggcattaaacacacatatttttaaaaatgcagactttcaacacccttcacaaacaacaggatacagccctagaaacaacacatacatgtattcctcaacagcaacatgggcacagctacacaaagataacttaatctacttaggcgactgtaaaaactatacagcaggcataccaggagatataacaaaaaaagacaactggggaaacccttttcataaagactacattaacaacaacagaacagtttatctaggatcaaaaccaccaacagacaccacttggacacaaagcaaagagagtattcaacaagctttacaagaaatgcacagcccaatagcatataaaatgagatacaatccagacagagacacaggtgaaggcaacacagcatactttgtagataattatagaacagcaggggataatggctttgctaaaccaggagatccaaacagaataatagacggatttcccctttggataatgctatggggatggccagactggataaaaaaattagcagaaatacacagagttgatgacgattacatattagtaatgcaaacctcattttttacagaaaatctgccgtattatgttttattagacgactcatttataaatggaaaatcatactatgacacacctcaatcaccaaaagatttactaaactggtacccaaaattttactaccaacaacaatcagtagaaaatatttgtaaaacaggaccaggtgtaagcagaattagctctctattgtcagtacaagcaaaaatgaaatatcagttctattttaaatggggaggatgcccatcagtcttagaaaaagtttatgatccttgttctcagggaaaatggcccatacccagtgacctcaatgaaggatttcaaatccagaatccagactcagacccatcaaaagaaatttactcctgggactttagaaaacactttattacagaaccagctattaaaagacttaaaaaagactcgttacctatacaactcccttgcctaccaacaggaagccgctcagatgttcaagccctcaaaacacaacaaacacaagaccaccaagaaacgtcatcggaagaagaagaaacgaccctcaacctcaagctcctcagactcagacaacgacaacaacgcctgcacaagcagctcctccgactaataactacatcataaaacacaaagacatatacattaacctgtttaataaaaaagaaccctttaaaaaccgccgctttacacccaaagaaatggaagacgaaaaagaattagcagcaatatttaaacgaccacctagacattatttttatgattctccctactatccatgggtacccccaactccaatagctaactttgctttacgctttaaagatactgaataaaggccaacataattcacttaatggtgtctgtttctttaagtaaaaccttaataaaccaactccgcctccctaaattgttggcgccaaagggggctccgcccccttaaacccccagggggctccgcccccttaaacccccagggggctccgcccccttacaccccctaattaatattcaacaggaaaaccacctaattagaattgccgaccacaaactgtcactcagttcctctttttacaaaaacttcccttttttctcatacatattcattacataaattaataaacaccgtaattccggggaggagcctcacttctatataacaaactgcactttcgaatggctgagtttatgccgccagacggagacgg

SEQ ID NO: 3841 - protein, 643 aa, Betatorquevirus sp.
MAPYWRNYYRNRWRRRRRARYRRPRTTFRWRRRYFRKPYWVRKPFKLKYIKLKQWQPKTIRNCRVKGIKPLFQGSADRLSNNYWQYPISFVPPGTPGGGGWGIMALSLSSIYEDYQHLQNIFTSSNAGLPLVRYKGVRLTFYQHQYTDYVVEVDNCWPMLDTPLKHPNSQPARMLMSKKKIIMPSIETKPLKKRKKSIFVTPPSQMLNKWYFQKDICNTKLVMITASACSLTSYFLPNRATSNNCTIWALNTHIFKNADFQHPSQTTGYSPRNNTYMYSSTATWAQLHKDNLIYLGDCKNYTAGIPGDITKKDNWGNPFHKDYINNNRTVYLGSKPPTDTTWTQSKESIQQALQEMHSPIAYKMRYNPDRDTGEGNTAYFVDNYRTAGDNGFAKPGDPNRIIDGFPLWIMLWGWPDWIKKLAEIHRVDDDYILVMQTSFFTENLPYYVLLDDSFINGKSYYDTPQSPKDLLNWYPKFYYQQQSVENICKTGPGVSRISSLLSVQAKMKYQFYFKWGGCPSVLEKVYDPCSQGKWPIPSDLNEGFQIQNPDSDPSKEIYSWDFRKHFITEPAIKRLKKDSLPIQLPCLPTGSRSDVQALKTQQTQDHQETSSEEEETTLNLKLLRLRQRQQRLHKQLLRLITTS

SEQ ID NO: 3842 - protein, 100 aa, Betatorquevirus sp.
MSSIIEPKYTPQQQQLNWINLLHGTHDQFCGCDDPIEHLLLALSKDNPKKLTKKEIKDIKWRLTGETTTETDGDAVDVLDIGDLEQLFAGEEDTFENPTG

SEQ ID NO: 3843 - protein, 128 aa, Betatorquevirus sp.
LPTNRKPLRCSSPQNTTNTRPPRNVIGRRRNDPQPQAPQTQTTTTTPAQAAPPTNNYIIKHKDIYINLFNKKEPFKNRRFTPKEMEDEKELAAIFKRPPRHYFYDSPYYPWVPPTPIANFALRFKDTE

SEQ ID NO: 3844 - DNA, 2790 bp, Betatorquevirus sp.
caggtaccgaaggtgagtgaaaccaccgtagttaaggggcttattgggctgaagcagtattgacggaacgggctagaaacttaaaaatatatatatgttttacagatatgagcagctttcttacaccagcagtatacagcaacaatggattagaaaaccaatggataaactcaatttggaatatacacgaccttttttgcggctgtaacaacgccattaaacacctttttaacatcttaaagaaaaaacaaagcctaccatgcctcccttcaatcgatggcgtcgatactggaacccaaactggagaagatatcgaaaacgacgttttagaaccaggagatttagaaaagctattcgaggaagatttcgacgaagaagatgggtaagaagacgctttaaaaactatagaaaaaaagctaaaaaaataactgtaaaagaatggcaacctaaaaaaattagaaaatgtactatcaaaggacctttatgcttatttgcttgtggtagattttgcatagctaataactttactttatttgctgaatcctatataccagaaaaaaactgtggaggtggtgcctggtctattatgcagctaacattacaagctttatgggacgaatatgtaaaatttagaaattggtggactgtatccaatgagggcttacctcttgttaaatatatgtactgtaaatttaaattttatagaagcccattcacagactacatagtaataccttctctatgtcctccattttcagtaactagagatgactacttaaacacacaacctttaagagcactaatgaacaaaaacaaaataatagtacctaaattaagagaaaatagtaaaagaaaatacattaaaagaaagttttacccaccatctttatttcaatccaaatggtactttcaacaagatatatgtaaatttccattcatagtactaaaaacatcagcatgttcatttgatcaattttatcaaccagatgacatgctatcttataacataacattatactcactaagcacattttttgaaaaccctagatttgaagaaaaaatagcaaatggctactctcctaaaacagcatccggaggcacattagatggtaaaaaatactacctatatggaacagaaaacggcacagacaatccaacttgggcacaattaacaatactaacaaatacacaaacatttactaaaggcacaccttatggacaaaacaaaaatggatcaccaggaaaccctttccatcctgcatggattactaatgaagattcaaatatatactactcaacacaagaaccacaaaacataccaaatgcaaaccaaccagccacaaacataactaaactaacacacttaatagaaaaatgcagatataacccacttagagatgcaggaaagggcaacaaagtatactttaaaagctcatctttacaacaaggaacaatgcatgacctaccaacaaacttaaatgtacttatagaagaccttcctttatggataatattttggggatggattagctggcttagaaaactacatcccataaaccacatagaaacagaatacatgtttatagtacaatcaccatatataacaccaaccagaccatggtacctatttttagactactactttttacaaaaaaaacatgacgatccactaacagaaacagaaaaagctcactggtttcctagatacgaattccaaaaagaagtagaattctactttgctcaaagtggtccaggtgctccaaaaattaactatacaaaatgtatacaagtaaactcaatgtattcattttttttaaagtggggaggatgtccagcaccaatggaaacatttacaaacccatgtgaacaagaaagatttcccgtccccggtgcaatcccacagtcagctacaatccaaaatccaaaattatcaaagtaccaatacctatatgagtgggacgaaaaagaaggtgtcattacaaaatcaactgcaaaaagaattaaaaaagacttctctcctacaaaatatgttacagacagtggagccaaagacgtcccattccaaacacaaacgacagaaagcgacgaaacatcgacagaagaagaaacgaaaacatcgctccagaaccagatcaccctcctcaagctccgccagcgaaagctcaagcgaaagctccgaaagcaccgattaatataaaaactattaaactaacacaaaatatttttggagaatcaacattaaaaaataggagaatgactagtaaagagttacaagaagaaaaaatagaggcaaaactgtggggtagaccagaaagaacatttatttttgatattccaggtccctactatggcactgtaccagaaccacttgtaaattttaacctaaactttaaataaacaaggcccatttattcactaaccggtgtctgttcctttaagtaaaaaccttaataaacatccataacacgcccaaataatgggcgccaaaatttaaagggggctccgcccccttacacccccaagggggctccgcccccttacaccccctaattaatattcaacaggaaaaccacctaattagaattgccgaccacaaactgtcatccgttacaacaacttccctattttacactacacttcctgttttttagagccacgcctgctacttcattattaatcagacgcatatcctgggaggaggaacacctctatataactaagtgtactgacgaatggctgagtttaccccgtcaaacggagacgagaaaagacttctcggctgcttcaggg

SEQ ID NO: 3845 - protein, 645 aa, Betatorquevirus sp.; identical to SEQ ID NO: 3827

SEQ ID NO: 3846 - protein, 108 aa, Betatorquevirus sp.; identical to SEQ ID NO: 3828

SEQ ID NO: 3847 - DNA, 2790 bp, Betatorquevirus sp.
cgggtgctgaaggtgagtgaaaccaccgaaatcaaggggcaattcgggctaattcagtctagtggaacgggcaagaaactaaaatatattatttttcagatgagcaaattccaaaaaccaactttatataacggaagaggactagacaatcaatggattaacattatttataactctcatgatttaatgtgcggctgcaacaacgtaaaagatcaccttcttgacattttcaaacaacaagaatgccgccattctacagaagaaatttctacaaaagaaactactggaattaccaacgaaaacgccgacattttagacgaaggagaccttacaagacttttcgaagaaagcgacgacatcgatgggtaagaaaaacaaaatttcctaaatactttaaaaaaaaattaaaaactttaagagtaactcaatggcaacctaaatacataagaagatgttgtataaaaggtatattactattatttgaagcgggacatggacgtttcggaaataactttactccatttaaagaaagcttttatcctcacaatgaaccaggaggcggaggatggagtatacaagaactatctttatcaaacttatttacacaaaaccaatactttatgaatgtatggacacattcaaatggtggacttaacttagttagatttacaggatgtattataacactgtatagacaaccagaaatagattatatctttcattattttacagaacaaaatgtaaatgctggcaaatactggtttcctagctttcaccccataaaaatgcttacatataaccaaagagttattgtacccagcttacaaactgcaccaaacaaaaaaaaactatacaaaaaaattaaaatatcaccaccaaaattaattaaaaataactggtattttcaacaacatttaagcacatttcctctaatacgctttgcagcagtagccacatcattaaaccatatgtttttaagctcaaaatcaactaacagcaacataacattacacatgctaaacacaaaatttttccaacactcagcttttcaatacgcagaccctacatatggatacataccaaaacaaggaacttatatatatggcttaagaaacggagtattagatataacaaaagaaaaaagacaaaatgttatatacataggcagtcaatactatgatgaaggacaacctataacaaaaggttggagtaaagagtatacaaaagaaaaatggggaaatattttctattacaaatattttgatcacattcaaacaacatttttacataaagacccaccagacaccttcttaagcaatgcaaatataaatcaaacaataggaccagtcacagaaaaacaagaaccatattaccaagatgtaagatacaatccatacagagataaaggagacggtaacttagcatactggaaaagtatttcagatgccacaaaaaacgattgggaacccccagatgaccctgaccaaaaaataggaggatacccattttggttaatgttatggggttttgcagactatacagaaaaattaggtaaattaaaaaatttagctgaaaactatgtattagtacttagatctaaatacttttcagaaccatttccagcatatgtacccttagacggtagttttataagaggacaagcaccatatgacaatgacccagaagatatatacccatatgatttatcacattggtttccaaaatggaaatttcaaagaaaagcaatagatgacttattaatgacaggtccaggtgtatgtaaagcagaaaatgtacaaagcatacaagcatttatgaaatatcgtttttattttaagtggggcggaaactcatctcaactcgaaaccatcgcagaccctaactcacaaccactcggacctaatcccaataatgagcaactatcaaatgaaattattgacccacaaaattccattgaaaacctcctctaccagtgggatgttagacggtaccaacttacacaagcagctacagaaagaattaaaaaatgcgaaactgatgacacatgtttgttcacagatggagcagaaactacaacggaaaaaacaacatcacaaaagaaaaaggcccagaaagaagaaatccaaacattacagctccaactccagcaactccaacagttcaacagagagctacaacagcgattcctcaaactccaacaattaacaatggaaacataaaatttacattaattaaaaaagcttacttatttactcccccaaaaacaaaactaacaccaataaagggaagggattgggaagatgaattatatttatgtaaacactttaaaagacctatgagaaagtatttagaagacagaccaatatatccatggtgtgtacctgaaccccttgtaaactttgaccttgtaaaagcatttaataaaggccagcattaattcacttaacaagtctgtttattaaatttaacttaaataaaccaacaccgcctcccaaatacgcaggcgcagaagggggctccgcccccttcccccccaaataaccacaaaatttacatagctcaccacaaacggtacaggaaaccacaaaatttgcattgcccaccacaaaccgtcacacacttctgcttttatacattacttccccttttgctcattattaaacataacattaattattaaacaccgtatttcctgggaggagcatataatctatataaccaagtaccctgacgaatggctgagtttatcacgctagacggagacgcgacaacttcgcggctgaatttggg

SEQ ID NO: 3848 - protein, 658 aa, Betatorquevirus sp.
MPPFYRRNFYKRNYWNYQRKRRHFRRRRPYKTFRRKRRHRWVRKTKFPKYFKKKLKTLRVTQWQPKYIRRCCIKGILLLFEAGHGRFGNNFTPFKESFYPHNEPGGGGWSIQELSLSNLFTQNQYFMNVWTHSNGGLNLVRFTGCIITLYRQPEIDYIFHYFTEQNVNAGKYWFPSFHPIKMLTYNQRVIVPSLQTAPNKKKLYKKIKISPPKLIKNNWYFQQHLSTFPLIRFAAVATSLNHMFLSSKSTNSNITLHMLNTKFFQHSAFQYADPTYGYIPKQGTYIYGLRNGVLDITKEKRQNVIYIGSQYYDEGQPITKGWSKEYTKEKWGNIFYYKYFDHIQTTFLHKDPPDTFLSNANINQTIGPVTEKQEPYYQDVRYNPYRDKGDGNLAYWKSISDATKNDWEPPDDPDQKIGGYPFWLMLWGFADYTEKLGKLKNLAENYVLVLRSKYFSEPFPAYVPLDGSFIRGQAPYDNDPEDIYPYDLSHWFPKWKFQRKAIDDLLMTGPGVCKAENVQSIQAFMKYRFYFKWGGNSSQLETIADPNSQPLGPNPNNEQLSNEIIDPQNSIENLLYQWDVRRYQLTQAATERIKKCETDDTCLFTDGAETTTEKTTSQKKKAQKEEIQTLQLQLQQLQQFNRELQQRFLKLQQLTMET

SEQ ID NO: 3849 - protein, 120 aa, Betatorquevirus sp.
LKVSETTEIKGQFGLIQSSGTGKKLKYIIFQMSKFQKPTLYNGRGLDNQWINIIYNSHDLMCGCNNVKDHLLDIFKQQECRHSTEEISTKETTGITNENADILDEGDLTRLFEESDDIDG

SEQ ID NO: 3850 - protein, 130 aa, Betatorquevirus sp.
MFVHRWSRNYNGKNNITKEKGPERRNPNITAPTPATPTVQQRATTAIPQTPTINNGNIKFTLIKKAYLFTPPKTKLTPIKGRDWEDELYLCKHFKRPMRKYLEDRPIYPWCVPEPLVNFDLVKAFNKGQH

SEQ ID NO: 3851 - DNA, 2789 bp, Betatorquevirus sp.
tcaccgtaattccggggaggagctacttaaatcaaggggcaattcgggctaggtcagtctggcggaacgggcaagaaacttaaaataatttatttttcagatgagcaaattctttgtggaaaaaccaactaacataaaaagagacaaccttgagatgataaatggctacgttcacatacatgatttaaaatgcaactgcaacacacctctacaacatattattaatcaactaattgaaaaagaacctgaattaacaaaatgccttactacaactactaccgaagatggccatggagacgccgtggatactatagaagacggagacctagaccgccttttcgcagaagattttaccgaagacgacgcagatacacggtaagaagaaaacttaaaaaaattattgttaaagaattccaacctagaacaattagaaaatgcataatcaaaggactacatccgttatttatggcaaaccatgcaagactaactaacaacttaacacaatggctatactcaatagctccaacacacttcccatctggaggtggattttcaataactcaatatactttaaatggactttatgaactgcatcaaaaactagaaaactggtggactaatacaaactgtaacttaccattagtaagatacttagggggttcatttaaactgtacagacaatgggaaacagactatgtattttcgtacttaacctgctttcctatgaaatcaactcatgctatgtatatgcaatgtcaacctagtatgttaatgatgacaaaaaactctgttcttgtaaaatgtatgaaagaatatagaggaaaaaaaaattataagttaattaaattcagaccaccagaacaaatgaccacaaaatggtattttcaacacgatctttgtcaagtacctttaatagtaactatgtgctctgcagcttcctttacaagatataacttaagtgcaacaggaatatctacaacaattggcttttactgtttaaatacaaaattatttatatatcataatttccaaaattatgccactacaggataccaacctaaaaacaatttttacttatacggcctaaaaaacggcaccactccaacagcacaagcaaaagcaaaagaattagtatacttaggagcaccaggaacatatcaagaaggcaatacaataatagcacctcacagtgaaacaaaaacctggcctgaagatatgaacaagtacttttcagattacaaacaatggggaaatccatttcaccctatgtggctcacacaaaatggaccccgagtactcacatcacaactctcacctaatcaatttaaaaccacattcaccaccccagaaacacaaatcgaggcacacatgcaagaatttacagatccactaatatatcaatgcagatactgccctaatgcagacacaggagaaggaaacaaaatttacttagttccaaacataagagaccaaagggactgggaaccattaaacaataaaaacctaatagcaacaggttttcctctatggactttagcttttggatggatagactggcaaaaacaacaaagagaagcacaacaaatagacattaactatataacagttatagtaacaaattttataaatccaaaattaccatactacgtagtattagacaaaaactttgtagatgacacaaatggaggacaatctccatacataggacaattaaatgatgcagacaaagcacattattatcctaaaggtacttttcaaatacaaactttaaatgaaataggaagctcaggaccaggtataataaaactacctggaacaaactcttgtgaagctcacttacaatataaatttcgttttaagtttggaggctgccttgcacctatggacaaagtatgcaacccctgtgatcaacccaaatatcccatacccaataactacaatgaaacaacttcgttacagaatccagcaacaccaccagaaacctttctctggcaatttgatgaaaggaggggtgaaattacacaaaaagctgcaaaacgcctcaaaacatgcacagacattaaagaacttattctcccaactgcaggaacaagcctccaactacctgcaacatcccaccaagaaacatcgacatcagaaagcgaaacgacatcggaagaagaggaccagacattactccagcagctccaacaccagcgaagaagacaaagaaagtacaaccagcgaatcctccacctactcaaattaatcaaaaattcaaaataataaatagccccataaacattgacttatttggggacaaacaaccaaaaaacagaagaatgactccacaagaaaaagaaacagacttgtttttagctaaaatgtttcgtagacctcctttagattatatactagataggcctacctatccttacatacctactcctcctcaaaaatacatggtaaactttgacctaaatccccctcaataaacaaggcctgcattaattcacttctggtgtccatttattaaagtaaaaacttaaataaacatccaccactctcccaatcaacgccggcgtagggggctccgcccccttacaaccccagggggctccgcccccttgcacccccagggggctccgcccccttacacccccagggggctacgccccctaacaccccctcattaatatttaacaggaaaaccacctaatttaaattgccgaccacaaacggtcacttacttccccattttatgcacacttcccctttatctacttattattcattacattaattaataa

SEQ ID NO: 3852 - protein, 668 aa, Betatorquevirus sp.
MPYYNYYRRWPWRRRGYYRRRRPRPPFRRRFYRRRRRYTVRRKLKKIIVKEFQPRTIRKCIIKGLHPLFMANHARLTNNLTQWLYSIAPTHFPSGGGFSITQYTLNGLYELHQKLENWWTNTNCNLPLVRYLGGSFKLYRQWETDYVFSYLTCFPMKSTHAMYMQCQPSMLMMTKNSVLVKCMKEYRGKKNYKLIKFRPPEQMTTKWYFQHDLCQVPLIVTMCSAASFTRYNLSATGISTTIGFYCLNTKLFIYHNFQNYATTGYQPKNNFYLYGLKNGTTPTAQAKAKELVYLGAPGTYQEGNTIIAPHSETKTWPEDMNKYFSDYKQWGNPFHPMWLTQNGPRVLTSQLSPNQFKTTFTTPETQIEAHMQEFTDPLIYQCRYCPNADTGEGNKIYLVPNIRDQRDWEPLNNKNLIATGFPLWTLAFGWIDWQKQQREAQQIDINYITVIVTNFINPKLPYYVVLDKNFVDDTNGGQSPYIGQLNDADKAHYYPKGTFQIQTLNEIGSSGPGIIKLPGTNSCEAHLQYKFRFKFGGCLAPMDKVCNPCDQPKYPIPNNYNETTSLQNPATPPETFLWQFDERRGEITQKAAKRLKTCTDIKELILPTAGTSLQLPATSHQETSTSESETTSEEEDQTLLQQLQHQRRRQRKYNQRILHLLKLIKNSK

SEQ ID NO: 3853 - protein, 92 aa, Betatorquevirus sp.
MSKFFVEKPTNIKRDNLEMINGYVHIHDLKCNCNTPLQHIINQLIEKEPELTKCLTTTTTEDGHGDAVDTIEDGDLDRLFAEDFTEDDADTR

SEQ ID NO: 3854 - protein, 50 aa, Betatorquevirus sp.
MTPQEKETDLFLAKMFRRPPLDYILDRPTYPYIPTPPQKYMVNFDLNPPQ

SEQ ID NO: 3855 - DNA, 2787 bp, Gammatorquevirus sp.
cgggagcccgaggtgagtgaaaccaccgaggtctaggggcaattcgggctagggcagtctagcggaacgggcaagaaacttaaaactatgctttgttttacagatgcaaaatatttgcagctcagacttttttcaacacacccacttcaacacagacacaaaaaatcaactatggatgtccataattgctgattcccatgacagtatctgcaactgctggcatccttttgctcatctgcttgctaatatttttcctcctggtcataaagacagggaccttaccattaatcaaattctgcaaagagatcttacagaaaaatggcattctggtggaggcgccgcagaagaaactggtatgggaccttccggtacaggaggagatataaagccagacccagaagaaagaggagaagattttccagaagaagaaatagaaggtctactcgccgccgccgctacagaagaaaaagaaaggtaaaaagaaaacttaaaaaaattactataaaacaatggcaaccagactccataaaaaaatgtactataaaaggcttctctacaatagtactaggtgcaaatggtagacaaatgttttgttatacaaatgtagctgaacaatatacagttagcaaagcagcagggggggggggatttggctgtgaaaatattaacttgaaatggctatacaaagaatacacaagacacaataacatatggacaaggtctaatgaatatacagaactagtaaggtacacaggttgtgaattaaccttttttaggcacccatatgtgtcttttgcagtagtatatcacctacaaggcccctttatgctaaacaaatacacatatgctgaaatgcaacctcaaaatgcactattagcaagacacaaaagactcatacttagccaagcagaaaaaccacacggaaaactaagagtaaaaatcaaaattaaatgtcctaaactaatgtcaacaaaatggttttttcaaaaagaattttgtgaccacacgttagtacaagtttgtgctacagcaataagcttctcttttcctagaatacaacccaatgcacaaaacattatcataacaatttatgcactgaacacatccttttaccacaacagtgactgggctcaaactaaatcagatgcatacagaaacataaccacacaaacttacccactattttttacacacaacataaaaggcatacaaaatccatatgaatacaatccagacaactccactctcacacacggatatgcaaacaaatatgagtacagcatttcttatgaaaaaggattattttcaccacaaattttaacctcaactgcagtaagaccaggtagttcaagtgcacagccactagccctactgcctgtcatagtacttagatacaatccaacaacagatgatggatatggcaatgaaatataccttgccagcactatgagaggctcctttaacaagccaacagtaacaccagactatatgtttccaggtgttcctttatggatgggcctttttggctactatgattttcttatacaaaaatctaatgacaaaggtcttatgcaataccacatgttagtattaaaatctacagcattacatccaattagtcaaagtacagaacaagtatactatccagttattgacatagactttgcctttggaaaattaccatatgatgaatacataacaaaactgcaaaagaaaaaatggtatccctcaggagaaatgcaagaacaaacacttaacaacatagtaatgacagggccatatgtacctaaatttaacaacatcacaaacagtacatgggaacttgactacttttataaatttttttttaagtggggaggtccacaaaccacagatccagttgcagaagacccatgcaaaaagggcacttatcccactctcagtgccctcgaaaaaacaatacaaattaagaacccagaaaaacttgatccaaaatccatactacatgagtgggacttcagaaggggcattgttacaacaacagctcttaaaagaatgtcagaaaacatccaaactgatacatctctcgaatctgatgactcagaatcgccacccaaaagaaggaaagtcaccaaagaaatcccatgcgaaatccaagagcaaaagaaaatccaaaaatgtctcctctctctctgcgaagaaaatatctgccaagaagagccggagacactgcaccagctcatcgagcagcagcagcagcagcagcaccacctcaaaagaaacatcctccagctcctcacacacctgagaaagacccaagcaaaaatgcaacttcaaacaggttatttagagtaataccttttaaacctggctttgaacaagaaacagaagaagagctagctaaaatttttaaaagacctgttagaaaatacaaaaatgatcccccattttacccatggttaccccctgctccccttgtacaatttaacctaaacttcaaaggctaggccgacaatgtacacttagtggtggatgtttaataaagtttgccccccaaaaacattgtaaaaaaaaaaaaaaaaaaaaaaaacccgccgccatcttgggtgcggcagggcgggggctaaaatggcgggacccaatcagtttatactttcactttccaattaaaacctgccaagtcacaacaaaggggtggatactttaacactatataaccaagtggggtgacgaatggctgagtttaccccgctagacggtgcagggaccggatcgagcgcagcgaggaggtccccggctgcccgtggg

SEQ ID NO: 3856 - protein, 671 aa, Gammatorquevirus sp.
MAFWWRRRRRNWYGTFRYRRRYKARPRRKRRRFSRRRNRRSTRRRRYRRKRKVKRKLKKITIKQWQPDSIKKCTIKGFSTIVLGANGRQMFCYTNVAEQYTVSKAAGGGGFGCENINLKWLYKEYTRHNNIWTRSNEYTELVRYTGCELTFFRHPYVSFAVVYHLQGPFMLNKYTYAEMQPQNALLARHKRLILSQAEKPHGKLRVKIKIKCPKLMSTKWFFQKEFCDHTLVQVCATAISFSFPRIQPNAQNIIITIYALNTSFYHNSDWAQTKSDAYRNITTQTYPLFFTHNIKGIQNPYEYNPDNSTLTHGYANKYEYSISYEKGLFSPQILTSTAVRPGSSSAQPLALLPVIVLRYNPTTDDGYGNEIYLASTMRGSFNKPTVTPDYMFPGVPLWMGLFGYYDFLIQKSNDKGLMQYHMLVLKSTALHPISQSTEQVYYPVIDIDFAFGKLPYDEYITKLQKKKWYPSGEMQEQTLNNIVMTGPYVPKFNNITNSTWELDYFYKFFFKWGGPQTTDPVAEDPCKKGTYPTLSALEKTIQIKNPEKLDPKSILHEWDFRRGIVTTTALKRMSENIQTDTSLESDDSESPPKRRKVTKEIPCEIQEQKKIQKCLLSLCEENICQEEPETLHQLIEQQQQQQHHLKRNILQLLTHLRKTQAKMQLQTGYLE

SEQ ID NO: 3857 - protein, 124 aa, Gammatorquevirus sp.
MQNICSSDFFQHTHFNTDTKNQLWMSIIADSHDSICNCWHPFAHLLANIFPPGHKDRDLTINQILQRDLTEKWHSGGGAAEETGMGPSGTGGDIKPDPEERGEDFPEEEIEGLLAAAATEEKER

SEQ ID NO: 3858 - protein, 120 aa, Gammatorquevirus sp.
MRNPRAKENPKMSPLSLRRKYLPRRAGDTAPAHRAAAAAAAPPQKKHPPAPHTPEKDPSKNATSNRLFRVIPFKPGFEQETEEELAKIFKRPVRKYKNDPPFYPWLPPAPLVQFNLNFKG

SEQ ID NO: 3859 - DNA, 2787 bp, Gammatorquevirus sp.
cgggagcccgaggtgagtgaaaccagcgaggtctaggggcaattcgggctagggcagtctagcggaacgggcaagaaacttaaaatatattttattttttagatgtcaagattttactgcaaaactaaatacaatgcagccaccttaaaccaaatgtggatgtctatgatagctgactcccatgacatacattgtgattgtaaagctccatttgcccacctactagacaacatttttccagaaggacacactgacagaaacaagaccattggagctataattgcaagagattttaaagaatgccattctggtggagaagaagacgaaagccatggtatacaacttggagaaagcgccgctaccgcaggcgtttctacaataaaagaagaaagccatacaaaagaagaagacgaagaattagaaaaactactcgccgccgtagaaagagaacatacaaggtaagaaagaaaaaacaatttcttaccttaaaacaatggcaaccagatagaattagaaaatgtaccattaaaggaagagggactcttgtaatgggagcacatggaagacaaatgatttgttttaccaatgtaaaagacagactaacaccctccagagctcctggagggggaggctttggagttgaaagatttacattacaatacttatatcaacaatggagagctagaaacaacatatggacagctacaaaccaaaatacagacctaggtagatacctaggctgtaaaattacattatacagacatccagacacagattttatagtaagatttgacagacaaggccctttcaacttagaaaaagacacttatatgctaatgcagccacaagaaatgttactaggtagacacaaaagaattatattatcaaagctaacaaatcccacaggtagactgaaacacacacttaaaataaaaccacctaaactacttactaacaaatgggtattccaatcagaactagctaaggttgaccttttacaacttagtggcacagcctgcaactttagatacccaaccttaggttgctgcaatgaaaacagggtattaaatttatattctctaaacacagaattttaccaagatccaaactggatgcaagcacatatgacagaaaaatataagccatatccaacaataaacctagatgcaaaataccattataaaacatccacaggagaagacactgtaactatacctgcagaccaaaccctgtggctaacactagacaaaggctggtttcaacctaaaattttggcagcctataaagttacacttaatgcaaaaccatatggtcagttacctatggtactacttagatataatccagctgcagatgaaggaccaggcaatattataacagcaatagatgtagtagcaggtaattggaaaggaccctacaatgacatgttaacaattagaaatgtaccactttggttaggactaaatggttttgctagctatgttacagccaaaacaggtgataaaggaatattaaaacacaaaattatatgtgttggaagtgatgcactatctagactaccaacagtaagcacacaaaaaatatttcctatattaggttcaaaatttgtaaatggcaaaccaccatatgaccaaccactaacacctgattattctaaaaattggtatcccacttatgaacaccaacaagaacccctaaatgatatagtttgctgtggtccacttacacctaagttttataaccaaagtaatagtacttgggaattacaatatttctaccgtttttactttaagtggggaggcccagaacttggagatccacaagtggacgatcccaaaggaaaatcacaagcagatactcagtattcaatcacaaggccaatacaagttaccaacccactcaaaaataaaacagaatcccttttacacccctgggacatcagaaggggtattattacaaaaagagcttatgaaagaatgtgcgaaaacctcgaaactgatacagatttctgcccagatgcagagacgccaaaaaagaaaaagagagttacctgcgaactccgaaacccagagaaagaagcacaagaaattcaagagtgcctcctatcactctgccaaacacaagactcggaggaagaggaccccaacaacctcaagcaactcatcctcaagcagaagcagcagcagctccaactcaagcacaacatcttaatattactatcagatctgaaggcaaagcagaactctttaagactacaaacaggcaatttagagtagaaccatttaaacctggctttgaacaagaaacagaaaaagaactagcagcagcctttctaagaccacctagaacatacaaaaatgaccctcctttctatccttggctacctattacaccccttgtaaactttaaccttaactacaactgctaggccaacaatgtacacttagtaaagcatgtttaataaagtctgctcccaaaaaggggatgtggggggggcatagcccccccacaccccccgcgggggggggcaaagccccccccgcaccccccctgcgtcacaagccacgcccccgccgccatcttgggtgcggcagggcggacactaaaatggcgggatccaatcagtttatactttcactttccaattaaaacacgccacgtaacaacaaaggggtggagtgtttaatactatataagtaactgcagtgacgaatggctgagtttaccccgctagacggtgcagggaccggatcgagcgcagcgaggaggtccacagctgcccgtggg

SEQ ID NO: 3860 - protein, 658 aa, Gammatorquevirus sp.
MPFWWRRRRKPWYTTWRKRRYRRRFYNKRRKPYKRRRRRIRKTTRRRRKRTYKVRKKKQFLTLKQWQPDRIRKCTIKGRGTLVMGAHGRQMICFTNVKDRLTPSRAPGGGGFGVERFTLQYLYQQWRARNNIWTATNQNTDLGRYLGCKITLYRHPDTDFIVRFDRQGPFNLEKDTYMLMQPQEMLLGRHKRIILSKLTNPTGRLKHTLKIKPPKLLTNKWVFQSELAKVDLLQLSGTACNFRYPTLGCCNENRVLNLYSLNTEFYQDPNWMQAHMTEKYKPYPTINLDAKYHYKTSTGEDTVTIPADQTLWLTLDKGWFQPKILAAYKVTLNAKPYGQLPMVLLRYNPAADEGPGNIITAIDVVAGNWKGPYNDMLTIRNVPLWLGLNGFASYVTAKTGDKGILKHKIICVGSDALSRLPTVSTQKIFPILGSKFVNGKPPYDQPLTPDYSKNWYPTYEHQQEPLNDIVCCGPLTPKFYNQSNSTWELQYFYRFYFKWGGPELGDPQVDDPKGKSQADTQYSITRPIQVTNPLKNKTESLLHPWDIRRGIITKRAYERMCENLETDTDFCPDAETPKKKKRVTCELRNPEKEAQEIQECLLSLCQTQDSEEEDPNNLKQLILKQKQQQLQLKHNILILLSDLKAKQNSLRLQTGNLE

SEQ ID NO: 3861 - protein, 119 aa, Gammatorquevirus sp.
MSRFYCKTKYNAATLNQMWMSMIADSHDIHCDCKAPFAHLLDNIFPEGHTDRNKTIGAIIARDFKECHSGGEEDESHGIQLGESAATAGVSTIKEESHTKEEDEELEKLLAAVEREHTR

SEQ ID NO: 3862 - protein, 139 aa, Gammatorquevirus sp.
LPRCRDAKKEKESYLRTPKPRERSTRNSRVPPITLPNTRLGGRGPQQPQATHPQAEAAAAPTQAQHLNITIRSEGKAELFKTTNRQFRVEPFKPGFEQETEKELAAAFLRPPRTYKNDPPFYPWLPITPLVNFNLNYNC

SEQ ID NO: 3863 - DNA, 2787 bp, Betatorquevirus sp.
gacgggatcacttcagtgacaaccaccgaagtctaggggcaattcgggctagatcagtctggcggaacgggcaaggctctaaaaacatattcttttacagaatgtcttcaattattgaaccaaaatatactccacaacaacaacaactaaattggataaacttactccacggaacccacgatcaattttgcggctgcgacgacccaattgaacatctactactggcactttcaaaagataatccaaagaagctcaccaaaaaagaaattaaagatataaaatggcgccttactggagaaactactaccgaaacagatggagacgccgtagacgtgctcgatatcggagacctagaacaacttttcgctggagaagaagatactttcgaaaaccctactgggtaagaaaaccttttaaacttaaatatataaaattaaaacaatggcaaccaaagacaataagaaactgtcgagttaaaggaattaaaccactgtttcaaggcagtgccgatagactatcaaataattactggcaatatccaataagctttgtacctcccggaactccgggaggaggcgggtggggaataatggcattaagcttatcaagcatatatgaagactaccagcatttacaaaacatatttacatccagtaatgcaggacttccactagtaagatataagggagtcagattaacattttatcaacaccaatatacagattatgtagtagaagtagataactgctggccaatgcttgacaccccattaaaacacccaaacagccaaccagcaagaatgctaatgtctaaaaagaaaataataatgccaagcatagaaacaaaacctttaaaaaaaagaaaaaaatcaatatttgtaacaccgccatcacaaatgttaaacaaatggtattttcaaaaggatatatgtaacacaaaactagtaatgataactgcttcagcctgcagtctaacatcctactttctgcctaacagagcaacttcaaacaattgcactatttgggcattaaacacacatatttttaaaaatgcagactttcaacacccttcacaaacaacaggatacagccctagaaacaacacatacatgtattcctcaacagcaacatgggcacagctacacaaagataacttaatctacttaggcgactgtaaaaactatacagcaggcataccaggagatataacaaaaaaagacaactggggaaacccttttcataaagactacattaacaacaacagaacagtttatctaggatcaaaaccaccaacagacaccacttggacacaaagcaaagagagtattcaacaagctttacaagaaatgcacagcccaatagcatataaaatgagatacaatccagacagagacacaggtgaaggcaacacagcatactttgtagataattatagaacagcaggggataatggctttgctaaaccaggagatccaaacagaataatagacggatttcccctttggataatgctatggggatggccagactggataaaaaaattagcagaaatacacagagttgatgacgattacatattagtaatgcaaacctcattttttacagaaaatctgccgtattatgttttattagacgactcatttataaatggaaaatcatactatgacacacctcaatcaccaaaagatttactaaactggtacccaaaattttactaccaacaacaatcagtagaaaatatttgtaaaacaggaccaggtgtaagcagaattagctctctattgtcagtacaagcaaaaatgaaatatcagttctattttaaatggggaggatgcccatcagtcttagaaaaagtttatgatccttgttctcagggaaaatggcccatacccagtgacctcaatgaaggatttcaaatccagaatccagactcagacccatcaaaagaaatttactcctgggactttagaaaacactttattacagaaccagctattaaaagacttaaaaaagactcgttacctatacaactcccttgcctaccaacaggaagccgctcagatgttcaagccctcaaaacacaacaaacacaagaccaccaagaaacgtcatcggaagaagaagaaacgaccctcaacctcaagctcctcagactcagacaacgacaacaacgcctgcacaagcagctcctccgactaataactacatcataaaacacaaagacatatacattaacctgtttaataaaaaagaaccctttaaaaaccgccgctttacacccaaagaaatggaagacgaaaaagaattagcagcaatatttaaacgaccacctagacattatttttatgattctccctactatccatgggtacccccaactccaatagctaactttgctttacgctttaaagatactgaataaaggccaacataattcacttaatggtgtctgtttctttaagtaaaaccttaataaaccaactccgcctccctaaattgttggcgccaaagggggctccgcccccttaaacccccagggggctccgcccccttaaacccccagggggctccgcccccttacaccccctaattaatattcaacaggaaaaccacctaatttaaattgccgaccacaaaccgtctttaacttccctttttacacttacttccttttttaccacttattattcattacattaattaataatcaccgtaattccggggaggagcttactacctatataactaactacacttccgaatggctgagtttatgccgccagacgga

SEQ ID NO: 3864 - protein, 643 aa, Betatorquevirus sp.; identical to SEQ ID NO: 3841

SEQ ID NO: 3865 - protein, 100 aa, Betatorquevirus sp.; identical to SEQ ID NO: 3842

SEQ ID NO: 3866 - protein, 128 aa, Betatorquevirus sp.; identical to SEQ ID NO: 3843

SEQ ID NO: 3867 - DNA, 2786 bp, Alphatorquevirus sp.
ctttttgtggctgtcgtgatcctgtttttcatctttctcgtctggctgcacgttttaacaatcagggacctccgccgcccccccaggacgaccgcccgacgtcggctaccccagtgagacgcctcctcccgctgccctcctacccgggagagggtcccccagatagatggcctggtggggatggaggcgccgctggtggcggccgcggagacggtggcgatgggggcgtacgcgccgcagacgaagagtaccggcccgaagacctcgacgaacttttcggcgctatcgaacaagaacagtaaggaggcgccggagggggaggcggaggggctaccggcgacggtacagactgagacgcttgcgcagacgcagatacaaacgcaaaaagatagtactgactcagtggaacccccagaccgtcaggaggtgcaccataaagggtctcatgccagtactctgggcgggcatgggccaagggggccacaactacgcggtgcgctccgatgactacgtggccaaagggggtttcgggggctccttcgccacagagaccttttctctgaaggtgctctatgaccagtaccagaggggctataacaggtggacttatagcaacgaggacttagacctagccctgtactatggctgcaagtgggtcttctacagaagcccagacacagactttatagtatacttcactaacaatccccccatgaagaccaaccagttcaccgctcccctgaccactccaggcatgctcatgaggagcaaatacaagatactaatccccagctttaaaaccaggcccaaggggcgcaagactgtgagtgtaagaataaaaccccccaaactgttcctgcacaagtggtacacccagcaggacctgtgcccagttccgttagtccaactgaacgtgaccgcagcggatatgcaacatccgttcggctcaccactaactgaaaacccttgcatcactttccaagttttagggaacttgtacaataactgcctcaacattgacctcccccaatttacacaagacggggagtttgagaccaatacaccttacactagagagaatgcaaatgacttaaaaactttatataaagaactattctgtaaaaaagacagcgctcactactggcagacgttcatcactaacaccatgatgaaggcccatatagatgctgataaggcccaatcagcaaccactaactatccctcttctggcaccacaccttcatacaacacagctgacttcccaacagtaccaacaaaagcagaatttaccacctggaaaaacaaatttactgacggaagagacagtaactttctctttgccacctatcacccagaccaagtaagagaaacaattaaaaaaatgagagacaataactttaagctagaaacaggtcccaacgacaagtacgggtccttccaaagccaatacactagaaacactcacctactagactactacctgggcttctacagcccaatattcctatcaccaggaaggtcaaatatagaattcttcacagccttcagagacatagtttacaaccccctcctagacaaggcagaaggaaacatgatctggttccaatatcatactaaatatgacaataaattcaaaaaaccagaatgccactgggaaataaaggacatgcccctgtgggccctctgcaacgggtacgtagagtacctagagagccagataaaatatggagatattctagtagagggcaaagtcctcatcaggtgtccttacacaaagccgcccctaacacacaagaacgaccccacagccgggttcgttgtctacaacactaactttggaatgggcaagtggatagacggcgggggctacatccccctacacgagagaagcaagtggtatgtcatgctcagataccaaacggacgtcctccatgacatagtgacctgtggaccgtggcagtacagagacgataacaaaaacgctcagctagtggccaagtactactttcggttcaagtggggaggaaacaccatccattcccaggttatcagaaacccgtgcccagacacccaagtttccggaccccgtcgacagcctagagaagtacaagtcgttgacccgcagctcatcacaccgccgtgggtcctccacacgttcgaccaaagacgcggactgtttactgaaggagctatcagacgtctgctcaaacaaccaatacctggcgagtatgatcctcaacccccccgggtcccactcctctttctaccctcagcattccagagagaagacggcgctgccgaaagcgactccgattcaccggccaaaagaccccggtactcgttcgaagagagccagacggagaccctctcctcggaggaggacccggcggagacgacgagggagctcctcctccgaaagctccgagagcagcgagcactccagttccagctgcagcacttcgcagtccaactcgccaagacccaggcgaacctccacgtaaaccccctgtcatactgcccgccataaacaaggtgtttctgtttccccctgagggtcccaaacccatctcaggcagagaggcctgggcagacgaatacgccaccgcggcgacctgggacaggcccgtccgcacctaccactcagacacccccacatatccctggatgccccaacaattccgtgtaagcttcaaactaggcttccaataaaaatgtactaggccgtaaactgttcacttgtcggtgtctacctcttaaggtcactaagcactccgagcgtcagcgag

SEQ ID NO: 3868 - protein, 786 aa, Alphatorquevirus sp.
MAWWGWRRRWWRPRRRWRWGRTRRRRRVPARRPRRTFRRYRTRTVRRRRRGRRRGYRRRYRLRRLRRRRYKRKKIVLTQWNPQTVRRCTIKGLMPVLWAGMGQGGHNYAVRSDDYVAKGGFGGSFATETFSLKVLYDQYQRGYNRWTYSNEDLDLALYYGCKWVFYRSPDTDFIVYFTNNPPMKTNQFTAPLTTPGMLMRSKYKILIPSFKTRPKGRKTVSVRIKPPKLFLHKWYTQQDLCPVPLVQLNVTAADMQHPFGSPLTENPCITFQVLGNLYNNCLNIDLPQFTQDGEFETNTPYTRENANDLKTLYKELFCKKDSAHYWQTFITNTMMKAHIDADKAQSATTNYPSSGTTPSYNTADFPTVPTKAEFTTWKNKFTDGRDSNFLFATYHPDQVRETIKKMRDNNFKLETGPNDKYGSFQSQYTRNTHLLDYYLGFYSPIFLSPGRSNIEFFTAFRDIVYNPLLDKAEGNMIWFQYHTKYDNKFKKPECHWEIKDMPLWALCNGYVEYLESQIKYGDILVEGKVLIRCPYTKPPLTHKNDPTAGFVVYNTNFGMGKWIDGGGYIPLHERSKWYVMLRYQTDVLHDIVTCGPWQYRDDNKNAQLVAKYYFRFKWGGNTIHSQVIRNPCPDTQVSGPRRQPREVQVVDPQLITPPWVLHTFDQRRGLFTEGAIRRLLKQPIPGEYDPQPPRVPLLFLPSAFQREDGAAESDSDSPAKRPRYSFEESQTETLSSEEDPAETTRELLLRKLREQRALQFQLQHFAVQLAKTQANLHVNPLSYCPP

SEQ ID NO: 3869 - DNA, 2785 bp, Betatorquevirus sp.
cgggtaccgaaggtgagtgcaaccaccgaagttaaggggcttaatgggcaaaagcagtcttggcagaacgggcaactaacttaaaatattatttattatagatgtttaaaccaccagtatatactacagaaagacaaaaggaattacaatggcttaatgcaaatactcacttccacgactttatttgcggctgcgacgaaccaggaaaccaccttttacttactctactaaaacacaacaactggatgaatttatctgaatctactaaaaaagaaatacaaaaatgcctttctacaactactttcgtcgacggaaattcaaccgttacctaccataccgaaggagatggaggagaattagaagaaggcctactagaaaagctcttctcagacgaaaacgactttaccgggtaagaagacgtcgtaaaatacttaaaaaacttaaaaaacttaaaataactgaatggcaaccaactactatcaaaaaatgtactgttaaaggaattttatgtttattccaatgtggtattaatagaattcaccacaattggggacaataccaagaatcctatgtacctgtaaaagaaccagggggaggaggatggtcagcacttgttattaacttgggtgccttatatcaagaataccaacactgtagaaactggtggacacaaagcaacaaaggactacctttagctagatataatggatgtaaattaaaattttacagaagctatgacacagactatgtagttacaatacaaaaatgtccaccatttgtagacacagaacttctacacttagaagcacaaccaagcagacaactaatgaacaaacacaaaataattgtacctaacatgactagaaaatggtataaaaaaccatatatcacaaaaagattgtcaccaccagcattaatgcaaaacaaatggtatttccaacaagacctttgtaatactaatttactattaatactaacatctgcttgtagcctagaccagtatttcttacctaacacaagtatttcaaacaacataacgttaattgcactagataccacactgtttacacaacctaactttgcaactataccagaaaccacaggttacacaccaaaaaacggtctctaccttttcgcaagtgaacaagaaaccgcaccaaacaaatggcaggacttaatatatttaggtaatacaattagatatcaaccaggaacaaaactaacaggaaattcattaggagacaaatcaacttggggaaatccattttacccagactacttagaaaatgacattaaagtatggtacactaacaaaaaaccaccagatacatttccaacaggaggaatatcaacagtacatgccttatacagacaatgcagatacaatccacacagagacactggtataggaaacatggcctttttcaaaagtaactccatatctacaggaaatatctgggaccctccaaaagaccccgaactcacaatatcaggttttccactttggcttctactatggggatgggacgattggcaaagaaaactcaaaaaaattaatcaaataaatataaactactacttagttatactatcagactttattaaccctaaattaccaggatatatattcctagacttattttttttacaacatgacaaacacgcagatatatcagaaacagacaaagcaaattggcacccaagactagaatatcaagaagaagcaatagatgaaatttgtgcatctggtcccggggccccaaaaattaaccacagtagaagtatacaagctaaaatgctatatcaattttattttaagtggggaggatgtccagctccaatgcaagaaattaaagacccatgtcagcaaggaaaatttcccatccccaataaagagcaatatggacttgaaattgaagatccaaaagtatcaaaatactcccacttgtactactttgacgaaaaaagagaacaactcactgaaagaactgcaaaaagacttaaatcaacaacaatttttgatgaatcttttacagatggaaacaaactcaacccaccaccaaaaacactctcggaagaaagcgaaaaatcggagacggaggaagaagcccaccaaacaccagagcagctccagcagctcaagctcctccgaagcctccgcaagcacatcagacaccgactaacaaaattaaaacaaagactataacaataaacaatgtattactgtttccaaaagaaacacctaatagaccacttactgtaaacgagttagaaacagatatagaaatagctaaatggctaaaaagacctgtaagacgcttttttaaagaccctcctttttacccatggcttccccctgaacctcgtgtaaactttgacttgggatggaataaacattaaataaaaattacaaggcctgcgaatttcacttgtcggagtccatttataaaaataataacttaaataaacatccaccactctccctaatacgcaggcgcacaagggggctccgcccccttaaacccccaagggggcaagggggctccgcccccttaaacccccaagggggctccgcccccttaaacccccttattaatattcataaaggaaaccgctaatttgaattgccgaccacaaacgaatatgctaattaacttccccaaaaattaattagtaatcactgtcatacggggcgtgttcaccaccctataaaacaaaccacacttccgaatggctgagtttatgctgccagacgtagacgagaaacttctcggctgcttttggg

SEQ ID NO: 3870 - protein, 640 aa, Betatorquevirus sp.
MPFYNYFRRRKFNRYLPYRRRWRRIRRRPTRKALLRRKRLYRVRRRRKILKKLKKLKITEWQPTTIKKCTVKGILCLFQCGINRIHHNWGQYQESYVPVKEPGGGGWSALVINLGALYQEYQHCRNWWTQSNKGLPLARYNGCKLKFYRSYDTDYVVTIQKCPPFVDTELLHLEAQPSRQLMNKHKIIVPNMTRKWYKKPYITKRLSPPALMQNKWYFQQDLCNTNLLLILTSACSLDQYFLPNTSISNNITLIALDTTLFTQPNFATIPETTGYTPKNGLYLFASEQETAPNKWQDLIYLGNTIRYQPGTKLTGNSLGDKSTWGNPFYPDYLENDIKVWYTNKKPPDTFPTGGISTVHALYRQCRYNPHRDTGIGNMAFFKSNSISTGNIWDPPKDPELTISGFPLWLLLWGWDDWQRKLKKINQININYYLVILSDFINPKLPGYIFLDLFFLQHDKHADISETDKANWHPRLEYQEEAIDEICASGPGAPKINHSRSIQAKMLYQFYFKWGGCPAPMQEIKDPCQQGKFPIPNKEQYGLEIEDPKVSKYSHLYYFDEKREQLTERTAKRLKSTTIFDESFTDGNKLNPPPKTLSEESEKSETEEEAHQTPEQLQQLKLLRSLRKHIRHRLTKLKQRL

SEQ ID NO: 3871 - protein, 103 aa, Betatorquevirus sp.
MFKPPVYTTERQKELQWLNANTHFHDFICGCDEPGNHLLLTLLKHNNWMNLSESTKKEIQKCLSTTTFVDGNSTVTYHTEGDGGELEEGLLEKLFSDENDFTG

SEQ ID NO: 3872 - protein, 58 aa, Betatorquevirus sp.
LFPKETPNRPLTVNELETDIEIAKWLKRPVRRFFKDPPFYPWLPPEPRVNFDLGWNKH

SEQ ID NO: 3873 - DNA, 2784 bp, Betatorquevirus sp.
cgggtgccgaaggtgagtgcaaccaccgtagtcaaggggcaattcgggcttgatcagtctagcggaacgggcaagaaacttaaaaatatatttgttttacagatgagcaaacaattatgtccaccagcatacagtggaaaacatctagaatcccaatggcttaaccacttttactcctcacacgacctttgctgtggctgtaaagatcctgttcttcactttttaattgctgtaaataaacgaggcaacgcacccaaacctgaagacgacattaaaaacataaaatgccttattactggagaagaagaagatggcgacgacccttttggtcctggagaactagaagagcttttcaaggaaaaagacggagatggagacgcagacgacccatctactacggggtaagaaagtacatttttaaaaagaaacttaaaagaattagacttacacaatggcaaccaaaaactatcagaaaatgtactattattggaaacattgtactgtttcaaggatctccagaaagagcaaacaataactatattcaaactatttatagctatgtacctcctgacgaaccaggaggaggaggatggactctaataactgaaagcttaagcagcttgtgggaagactgggaacacttaaaaaatatctggacaagcagtaatgcagcattacctttagtaagatatatgggtgtagacttaattttttggcaatctccttacacagactatattgttgaagttactaactgtttaccaatgaaagataccaaactaaaacatgcagacagtgcgccaaatagaatgttattaaaaagaaatgttgtaaaagtacccagtttagaaactagaaaaaaaaagaaaccttttaaaagaattcatgtacctccgccgcctcaaatggaaaacaaatggtattttcaaaaagatatttgtgaaattcctcttgtaatgataacagctgtagcagttgatttcagatatcctttttgtgctagtaactgtagatcaaacaacctcactcttagatgcttaaatatctccttttttcaataccacaactttgacaaatatgcagacacaacaggatatgtacctaaatcaggtacttacatgtattcacactcaggtagacttgaccaaaaaccaacaaaaaatacacttatatacttaggtaacacaaaaacaaatacaccaggtaaagctccaaccaatatgaaagactatacaaaaccagaaaactggggaaacccattttggcaccagtacattaatggagaactaccagtatatacatcacaatatcatcccactgctttaaaatcagacattagtcaagaagagtccaaaatatcagctatgacacttatggcagatgtatactttgaaacctttagatacaatccagaaagagacaaaggcacatcaaacagaatatatttagtcgaaaattaccaaaacacaggatggggacccccaacaaatgtaaacctaattttagaaggctttcctttatatgacatatgctggggttacacagactggatagaaaaactacatgaaatacaagatataggacaacattacatatttgtgatacaaacagacacttttaatgaacatagacaagcttatgtacctttagatatgttttttttaacaggacacggtccatatgataccaacataaataactatgactataatcactggcaaccaaaacttagatttcaaacaaagagcataaatgatatttgcttaactggaccaggttgtgctagatctccttttggaaattatatgcaagctaaaatgacatataaatttagagtaaaatttggtggctgtccaaaaacattagaacaaccttatgatccttgttcacagccaaactggactatacccagtaacttcactgaaggacttcaaatccagaatccaaacaccaacccccaaaccgaactgcaagaatgggactggagaagggactacattacaccaaaagctttgcgtcgaatcaaaaaatttccaaaaactgacgaaactttacaactctctacaggatccaagcacaaccctgcaatactacaccaaacactccaggaaacaacggactcgagctcggaaacggaagaagaccaaacatcgatccaagaacaaatactcaagctcaagcgacagcagcgactactcaagcagcggatcagacaccgactaatgcaacaaccattaccttaaataactgtaaaaacaaagtgtacttattcccagaacgcaaaccctttaaaaatcgtagattttctgtatatgaaagagaactagaaaaatatgtagctactgcttttaaaagaccacaaagaacatttttttatgaccccccaatatacccgtggcttccaccagaacctcttgtaaattttgacttaaaatttgaataaacaaggccaacaaatttcacttagtggtgtccatttatataagttaaactttaataaacagactccgcctcccaacattgttggcgccaaaaagggggctccgcccccttaaacaacaggaaaaccacctaatttaaattgccgaccacaaaccgtcacttacttccctatttaccattacttcctcttcacttaataaatattcattacattaattagtaattagcatcacttcctaggaggagctaaattactataaaactaactacacagacgaatggctgagtttatgccgctagacggaggacgcatcactacagtgactgcggactgatcacggg

SEQ ID NO: 3874 - protein, 652 aa, Betatorquevirus sp.
MPYYWRRRRWRRPFWSWRTRRAFQGKRRRWRRRRPIYYGVRKYIFKKKLKRIRLTQWQPKTIRKCTIIGNIVLFQGSPERANNNYIQTIYSYVPPDEPGGGGWTLITESLSSLWEDWEHLKNIWTSSNAALPLVRYMGVDLIFWQSPYTDYIVEVTNCLPMKDTKLKHADSAPNRMLLKRNVVKVPSLETRKKKKPFKRIHVPPPPQMENKWYFQKDICEIPLVMITAVAVDFRYPFCASNCRSNNLTLRCLNISFFQYHNFDKYADTTGYVPKSGTYMYSHSGRLDQKPTKNTLIYLGNTKTNTPGKAPTNMKDYTKPENWGNPFWHQYINGELPVYTSQYHPTALKSDISQEESKISAMTLMADVYFETFRYNPERDKGTSNRIYLVENYQNTGWGPPTNVNLILEGFPLYDICWGYTDWIEKLHEIQDIGQHYIFVIQTDTFNEHRQAYVPLDMFFLTGHGPYDTNINNYDYNHWQPKLRFQTKSINDICLTGPGCARSPFGNYMQAKMTYKFRVKFGGCPKTLEQPYDPCSQPNWTIPSNFTEGLQIQNPNTNPQTELQEWDWRRDYITPKALRRIKKFPKTDETLQLSTGSKHNPAILHQTLQETTDSSSETEEDQTSIQEQILKLKRQQRLLKQRIRHRLMQQPLP

SEQ ID NO: 3875 - protein, 100 aa, Betatorquevirus sp.
MSKQLCPPAYSGKHLESQWLNHFYSSHDLCCGCKDPVLHFLIAVNKRGNAPKPEDDIKNIKCLITGEEEDGDDPFGPGELEELFKEKDGDGDADDPSTTG

SEQ ID NO: 3876 - DNA, 2784 bp, Alphatorquevirus sp.
ctttttgtggctgtcgtgatcctgtttttcatctttctcgtctggctgcacgttctaaccatcagggacctccgacgccccccacggacgagcgcccgccggcgtctaccccagtgaggcgcctgctgccgctgccctcttaccccggcgagggtccccaggctagatggcctggtggggatggagaaggcgctggtggcgcccgcggaggcagtggagacggcggcgcccgcgcaggcgaagaagagtaccggcccgaagacctagacgagctgttcggcgctatcgaacaagaacagtaaggagacggaggcgagggtggcggaggggctacaggcgccggtacagactgagacgctaccgtagacggggcaggcgacgcaaaaagatagtactgactcagtggaacccccagaccaccagaaggtgcattatccgcggacttatgccagttatctgggcgggcatgggcacggggggccaaaactatgccgtccgctcagatgactttgtagtagacaaaggcttcgggggctctttcgctacagagactttctctttaagagtactgtatgaccagtaccagaagggctttaacaggtggtcccacaccaacgaggacctagaccttgcccgttacagggggtgcaaatggaccttttacagacacccagacactgactttatagtgtacttcactaacaatccccccatgaaaactaaccagtacactgcccctctcaccactcctggcatgctcatgagaagcaaatataagatactaatacctagttttaaaacaaaacccaaaggaaaaaagacaataagcttcagagccagacccccaaaactattccaagacaagtggtacactcagcaagacctctgccctgtgcccctcatccaactgaacttaaccgcagctgatttcacacatccgttcggctcaccactaactgactctccttgcgtaaggttccaagtcctcggggacttgtacaataagtgtctcaatatagaccttccgcaatttgaagccgatggtaaagtttcaaccaaatcctcttacagtagagataataaggatcagttagaagaattatataaaactctatttgttaaaaaaggctgcggacactactggcaaacattcatgaccaataccatggtcaaagcacacatagatgctacacaggcacaaaactatgaacagggcacttcaggccctcaaactggaaaagatccatttccaacacagcctgaaagatccaattttgaagaatggaaaaagaaattcacagaccccagagacagcaactttctctttgccacttatcacccagaaaacattacagagattatcaaaaaaatgagagacaataactttaatctagaaactggaaagaatgacctttatggtgattatcaggcccaatatactagaaacactcaccttctagactactacctgggcttctacagccccatattcttgtccagtggcagatccaatactgaattctttactgcctacagagacatagtatataatccactactagacaaaggcacaggtaatatgatttggttccaataccacacaaaaactgacaacatatttagaaaaccagagtgccactgggaaatactagacatgcccctgtgggccctctgcaacgggtacaaagagtacctagagagccaaataaaatatggtgatatcttagtagaaggcaaagtcctcataagatgcccatacaccaaacctcccctagcagaccccaacaacagtctagcaggatatgtagtctacaacacaaactttggacaaggcaagtggatcgacggcaagggctacatccccctaagacacaggagcaagtggtatgtaatgctcatgtaccagacggacgtactccatgacctagtgacttgtggaccctggcaatacagagacgataataagaactctcaactaatagccaagtacagatttactttctactggggaggtaacatggtacattctcaggtcatcaggaacccgtgcaaagacacccaagtatccggaccccgtcgacagcctagagagatacaagtcgttgacccgcaactcatcaccccgccgtgggtcctccactcgttcgaccagagacgaggaatgtttactgaggcagctatcagacgtctgctcagacaaccactacctggcgagtatgctcctccagcactcaggatcccgctcctctttccctcctcagagttccaacgagagggagaaggtgcagaaagcgactcatcttccccggccaaaagaccgcgactctggcaagaagaggccagccagacggagacgaactcctcggaggggccggcggagacgacgagggagctcctcgagcgaaagctcagagagcagcgagtcctcaacctgcagctccagcacttcgctgtgcaactcgccaagacgcaagcgaacctccacataaaccccctattatactcccagccttaaacaaagtgtatctattcccccctaacaaacccactcccatacaggggtaccacgggtggaacacagagttcgaggcctgccaggccttcgacagaccacccagaaagtatctctcagacacaccaacatatccttggctccccgtccccaatcctgaaataaaggtgagctttaagctcggtttcaaatcttacaaggccgtgggagtttcactggtcggtgtctacctcttaaggtcactaagcactccgagcgtcagcgaggagtgc

SEQ ID NO: 3877 - protein, 782 aa, Alphatorquevirus sp.
MAWWGWRRRWWRPRRQWRRRRPRRRRRVPARRPRRAVRRYRTRTVRRRRRGWRRGYRRRYRLRRYRRRGRRRKKIVLTQWNPQTTRRCIIRGLMPVIWAGMGTGGQNYAVRSDDFVVDKGFGGSFATETFSLRVLYDQYQKGFNRWSHTNEDLDLARYRGCKWTFYRHPDTDFIVYFTNNPPMKTNQYTAPLTTPGMLMRSKYKILIPSFKTKPKGKKTISFRARPPKLFQDKWYTQQDLCPVPLIQLNLTAADFTHPFGSPLTDSPCVRFQVLGDLYNKCLNIDLPQFEADGKVSTKSSYSRDNKDQLEELYKTLFVKKGCGHYWQTFMTNTMVKAHIDATQAQNYEQGTSGPQTGKDPFPTQPERSNFEEWKKKFTDPRDSNFLFATYHPENITEIIKKMRDNNFNLETGKNDLYGDYQAQYTRNTHLLDYYLGFYSPIFLSSGRSNTEFFTAYRDIVYNPLLDKGTGNMIWFQYHTKTDNIFRKPECHWEILDMPLWALCNGYKEYLESQIKYGDILVEGKVLIRCPYTKPPLADPNNSLAGYVVYNTNFGQGKWIDGKGYIPLRHRSKWYVMLMYQTDVLHDLVTCGPWQYRDDNKNSQLIAKYRFTFYWGGNMVHSQVIRNPCKDTQVSGPRRQPREIQVVDPQLITPPWVLHSFDQRRGMFTEAAIRRLLRQPLPGEYAPPALRIPLLFPSSEFQREGEGAESDSSSPAKRPRLWQEEASQTETNSSEGPAETTRELLERKLREQRVLNLQLQHFAVQLAKTQANLHINPLLYSQP

SEQ ID NO: 3878 - DNA, 2783 bp, Betatorquevirus sp.
caggtaccgaaggtgagtgaaaccaccgtagttaaggggcaatatgggcagaatcagtctggaggaccgggcaagaaacttaaaatttaatttattttacagaaatgagcaaactattaacaccaaccatctacagcaacaaaggcctggaaaacaactgggttaacctaacatggaacgcccatgatatgttctgtggatgtaacaacgcctggaaacacctagcagacatcttaagaagacaaggaacccaactatgcctcccttcaacttctaccgacgacgctggtacccaaaccgacgctggagaagaaaaagatattttagaagacggagatttggaccgcttattcgcagaagatttcgacgacgtagatgggtaagaagacgccgctttactagaaaatttaaaagaaaactatcaaatataaaactaaaacagtggcaaccacaaactataaaaaaatgccacataaaaggaaacttatgcctttttgcttgcgggaggggaagaattaatcataactttatactaacacaagaatcttatgtacctacatcagaaccagggggtggcagctggtctatattacaatttacaacaagagtactgtatgatgaatttaaagcaggcagaaactggtggacaacaagtaatactggtttaccactaactagatatattaggtgtaaactaaaattttatagaaacccagaaacagactatattgtaacaataagtagaacaggaccatttgaagttactttagactcatacttaagtacacaaccaacaagacacttaatgaaccacagagcaataattattcctaaactaggaagaggaccaagcaaaagaacatatataaaaagatacatttatccacctagcttactacaaaacaaatggtacttttcacaagacttatacaacataccattaatgatgctaacagttagtgcatgtgaactagaccaaatgtttgcaccagaagaccaaatcagcacaaacataacgttagtatcacttaacacaaatgcaatacaaatggctaattgggaaaaacaaccatatatgacaaaaagttcaggaacattagacatatacttatggagctatcaaaatggacacaatcaaaacaacttaatatgggaaaacatatactttttaggacaatgcaaaacatacacagaaggaactcaactaaaatcctatgaagacataaaaaatataaaacaaaaccctcaaaagtggggtaatccatttacacactggtacaatcacccagacacaataatctactacggagcaataccaacacaagctacaaaacctacaaatgcaaatatactaccattatcaagtttatttgttgaatgcagatataacccatttaaagacaaaggaactggaaacaaagtatacttagcaccaacagactcaggaaacgggtcactactatcactaccacaagaccttagactaataatagaaaacttaccactatggattatattttggggatggggagactggctactaaaatctagacctgtagctcacatacaagaagaataccaaataatagtacaaagcccatacatttttccaaaactaccatgttacgtatttacagacaaatactttacaaacccaccaaacggagaccactataatacagaactaacagaaacagacaaagcacactggcacataaaatatgaaatgcaaatggaacagctagaattaatagctaaaacaggaccagcagcaccaaaactaaaccacacaaaacaaatagaggcacaccttaactatgacttttattttaagtggggcggaaatccagcacctatggaaacaatcacagacccagcagaacaagacaaatttcccactccctataacaagctccaaggacttgaaattgagagtccaggaaaaccaaagcaacatttcctctacacatttgacgaaaagcgcaaccaaatctcactcaaaactgcaaaaagacttaaatcagactttacaactccgcaattttttacagactttagagcaaaagacatcccattccacgaaaaaacaaaggaggaaaactcatcggaggaggaagaagtccaaacatcactccagagacaggagcaactcatcctccacctcaagcgaaagagacacgagtaccgacagcgaatccaccagctcctaaaaacaaaaaaattattcccccaataagagacatgtttggacaaccatacaaaaaaaatcgcaaatttactgctaaagaatttcaagaagaattagacgatgcttcacactggaaaaaacgagttagatactatatacataatatgcctgattataagcttgataccattgaacctcttgtaaactttaatgtaaactttgcattaaactttaaatactaggccagcaaatattcacttgtcggtgtcagtttatataacttataacctaaataagcatccaccgcctccctaatacgcaggcgcacaagggggctccgcccccttaaaccccctaattaatattcaacaggaaaaccacctaattagaattgccgaccacaaacggtcaaccgttactaacagttcctctttttacacctgcacttctgctttttagaactccaccccctaattcattaataatcagacgctattcctgggaggagcaccaccagtatataaccaagtacactgacgaatggctgagtttaccccgccagacggagacgagaaacttctcggctgattctggg

SEQ ID NO: 3879 - protein, 674 aa, Betatorquevirus sp.
LETPSRHLKKTRNPTMPPFNFYRRRWYPNRRWRRKRYFRRRRFGPLIRRRFRRRRWVRRRRFTRKFKRKLSNIKLKQWQPQTIKKCHIKGNLCLFACGRGRINHNFILTQESYVPTSEPGGGSWSILQFTTRVLYDEFKAGRNWWTTSNTGLPLTRYIRCKLKFYRNPETDYIVTISRTGPFEVTLDSYLSTQPTRHLMNHRAIIIPKLGRGPSKRTYIKRYIYPPSLLQNKWYFSQDLYNIPLMMLTVSACELDQMFAPEDQISTNITLVSLNTNAIQMANWEKQPYMTKSSGTLDIYLWSYQNGHNQNNLIWENIYFLGQCKTYTEGTQLKSYEDIKNIKQNPQKWGNPFTHWYNHPDTIIYYGAIPTQATKPTNANILPLSSLFVECRYNPFKDKGTGNKVYLAPTDSGNGSLLSLPQDLRLIIENLPLWIIFWGWGDWLLKSRPVAHIQEEYQIIVQSPYIFPKLPCYVFTDKYFTNPPNGDHYNTELTETDKAHWHIKYEMQMEQLELIAKTGPAAPKLNHTKQIEAHLNYDFYFKWGGNPAPMETITDPAEQDKFPTPYNKLQGLEIESPGKPKQHFLYTFDEKRNQISLKTAKRLKSDFTTPQFFTDFRAKDIPFHEKTKEENSSEEEEVQTSLQRQEQLILHLKRKRHEYRQRIHQLLKTKKLFPQ

SEQ ID NO: 3880 - protein, 92 aa, Betatorquevirus sp.
MSKLLTPTIYSNKGLENNWVNLTWNAHDMFCGCNNAWKHLADILRRQGTQLCLPSTSTDDAGTQTDAGEEKDILEDGDLDRLFAEDFDDVDG

SEQ ID NO: 3881 - protein, 62 aa, Betatorquevirus sp.
MFGQPYKKNRKFTAKEFQEELDDASHWKKRVRYYIHNMPDYKLDTIEPLVNFNVNFALNFKY

SEQ ID NO: 3882 - DNA, 2782 bp, Gammatorquevirus sp.
cgggagcccgaggtgagtgaaaccaccgaggtctaggggcaattcgggctagggcagtctagcggaacgggcaagaaacttaatatatattattttttacagatgtccattttctacagaccagctaaatacaatggacacacaaaacaacaaatgtggatgtcagtaatagctgactttcatgattccatgtgtaattgttggcatccttttggccacctacttgatattatctttcctgaaggtcacaaagatagagataaaacaatagcacaaataattgccagagattcaaaatgccattctggtggagaagaagaaaacgcttctggacaaatacaagatttagatataaaagaagaaagaaatacccccgcagataccacaggcgatatggcagaagaagaaactaccgacgccctactcgccgccgccgtcgaaaacttcgaaaggtaagaagaaaaaagaagcagattgttgttaaacaatggcagccagaaagtataagtaaatgtaaaatactaggacattctgccttagtagttggagctgaaggtaaacaaatgttttgctatacaactaacaaaaacatagctgttccaccaaaaagcccctatggaggaggctttggagtagaacaatacagtttaacctacttatatgaagaatataccttccacaacaactactggactaaatcaaacattctaaaagacttgtgcagatatttatgggtaaaaatcattttttttagagacaacaaaacagactttatagtttcatatgatagaaatccaccatttaatctaactaaatttacatatcctggagctcacccacaacaaatgctacttcaaaaacatcacaaactagtactatcacaaatgacaaagaacccaaacaaattaacaaaaaaatttaaaattaaaccaccaagacaaatgatatcaaaatggttttttactaaatcttttaccaaatatccattactatcactaaaagcctcagcactagatctcagacactcatacttaggatgctgtaatgaaaactcacaggtatattttttttacttaaaccatggcttttacaaactaacaaattggggacaatactcctcatcaccatacagaccatccagtaacattaatactgtattttttaaagataaacaaggtgctacaaaacaagtaggcccctttaatactgctgccacagcatatgatgattcagtatcctatactaaaggatactttcagccctcctttttacaaacacaatatctatgcacatctagcacctgcgaaactaaagctggctacttaccaataaatgtagccatatacaacccaatgcaggacagtggccaaggaaatgctatatacctagtgagtactcttacaaacacttgggatcaaccaccaaaagactctgctatactaattcaaggcatgcctatttggctaggcctttatggctatttagactatgttagacaagtaaaaaaagacaaaacatggctagaaagccatgtgttagtatttaaaagtccagcaatttttacatttccacaaccaggagcagatacatggtactgtcccctatctaaaacatttatagatggtgtaggaccatacagaacagatttaacaattaaacaaaaagagagatggtttccacaaatacaacaccagtatgaaatactaaactcatttgtagaggcagggccttttataccaaaatacacaaatcaatcagaaagtaactgggaactaaaatttaaatatattttccattttaagtggggaggaccatcacttaatgaaccagacattacaaaccctgcaaaccaagaccaatatgatgttcccgatactctccaacaaacaatacaaattgaaaatccagaaagacaagaccccagatctatcctacaccaatgggattacaggagaggcttcattaaagaaagagctcttaaaagaatgtcaacttacctctcaactccttcagatgtcccagaatctccagaacacacaccaaaaaagaaaaagagaatgggagcacaactcacactcccacaagaaaaagaccaagagacactcagctgtctcctctcgctctgcaaagaagatatcttccaaaagccacaaacagaagaggagatcaaccagctcatcgagcagcagcagcagcagcagcaccagctcaaaagagacatcctacacctcatgatgcagatgagagaacaacaacagatgctacaacttcacacaggcataataccttaacaagatttaaaccaggttttgaacaacaaacagaagaagaattagctaaactctttaaaagaccaataagaacgtttaaagaagaccctccattttatccctggcttcctattacacccaaggtttcatttaagcttaactttaaaggctaggccgacactgttcacttagcggtgtttgtttaataaagtttgcaccccaaaaaaaattgcacaccccccgcgggggggggcagagccccccccgcaccccccctacgtcacaggccacgcccccgccgccatcttgggtgcggcagggcgggggctaaaatagcgggaaccaatgagtttatacttttgctatccaattaaaccatgccacgtcacaaacaaggggtggagccactaaaactatataactaagtacactgacgaatggctgagtttaccccgctagacggtgcagagaccggatcgagcgcagcgaggaggtctccggctgcccatggg

SEQ ID NO: 3883 - protein, 664 aa, Gammatorquevirus sp.
MPFWWRRRKRFWTNTRFRYKRRKKYPRRYHRRYGRRRNYRRPTRRRRRKLRKVRRKKKQIVVKQWQPESISKCKILGHSALVVGAEGKQMFCYTTNKNIAVPPKSPYGGGFGVEQYSLTYLYEEYTFHNNYWTKSNILKDLCRYLWVKIIFFRDNKTDFIVSYDRNPPFNLTKFTYPGAHPQQMLLQKHHKLVLSQMTKNPNKLTKKFKIKPPRQMISKWFFTKSFTKYPLLSLKASALDLRHSYLGCCNENSQVYFFYLNHGFYKLTNWGQYSSSPYRPSSNINTVFFKDKQGATKQVGPFNTAATAYDDSVSYTKGYFQPSFLQTQYLCTSSTCETKAGYLPINVAIYNPMQDSGQGNAIYLVSTLTNTWDQPPKDSAILIQGMPIWLGLYGYLDYVRQVKKDKTWLESHVLVFKSPAIFTFPQPGADTWYCPLSKTFIDGVGPYRTDLTIKQKERWFPQIQHQYEILNSFVEAGPFIPKYTNQSESNWELKFKYIFHFKWGGPSLNEPDITNPANQDQYDVPDTLQQTIQIENPERQDPRSILHQWDYRRGFIKERALKRMSTYLSTPSDVPESPEHTPKKKKRMGAQLTLPQEKDQETLSCLLSLCKEDIFQKPQTEEEINQLIEQQQQQQHQLKRDILHLMMQMREQQQMLQLHTGIIP

SEQ ID NO: 3884 - protein, 117 aa, Gammatorquevirus sp.
MSIFYRPAKYNGHTKQQMWMSVIADFHDSMCNCWHPFGHLLDIIFPEGHKDRDKTIAQIIARDSKCHSGGEEENASGQIQDLDIKEERNTPADTTGDMAEEETTDALLAAAVENFER

SEQ ID NO: 3885 - protein, 111 aa, Gammatorquevirus sp.
LSPLALQRRYLPKATNRRGDQPAHRAAAAAAAPAQKRHPTPHDADERTTTDATTSHRHNTLTRFKPGFEQQTEEELAKLFKRPIRTFKEDPPFYPWLPITPKVSFKLNFKG

SEQ ID NO: 3886 - DNA, 2778 bp, Gammatorquevirus sp.
cgggagcccgaggtgagtgaaaccaccgaggtctaggggcaattcgggctagggcagtctagcggaacgggcaagaaacttaaaacaaatattattttacagatgcaaaacttatgctcagctgacttctataaatctacaccatacaatccagacacaaaaactcaaatatggatgtcaataattgctaatggacatgacaatatctgcaactgctggcatccttttgctcatttgcttgctactatttttcctcctggccatcaagacagggatcttaccattaatcaaatacttgcaagagattacttggaagcatgccgttctggtggaaaaaacgaagaaagaactggtggggcaaagtatacagaagaccaacatacaaaagatataaaagaagaagaacaaacagaagaaactatagaagacgcccttatgttcgccgccgccgccgccgcagaaggaccagacgcaaggtaaaaaagaagctacaaaaaataactgttaaacaatggcaaccagactcaatagtaaaatgtaaaattaaaggctttgatacacttgtagctggatctgaaggtagacaaatgttttgctacacaaataaaaaatctgtttttacacagccaaaagcccctggtggtgggggatttggaattaaagtttatagccttcaatacttataccaagaatggcttaaaaaaaacaacatatggacaaaatctaatgattacaaagacttagtaagatttactggtgctactttcacattttttagaagcccaactacagactttgttgttcaatatagcagacagcctccatttatagtacaaaaagaaacatacatgaactgccacccacaagctttactacttacaaagaaccacagagttattttaagtactaaatcaaaacctaatggtaaaattaaaacaagagtaaaaattaaaccaacaaaacaaatggtaactaaatggttttttcaagatgaatttagtaaatatgacttatttcaaattcaagcagcagcagttgactttaactacccacaatggggtcctaatacatcaagcacaaacctaacattttatgcacttaacacaggcttttaccataacacaaactgggctcaacaacaaccagaaaaaaaaggttataaaccatacacaggatacagtgataatattgttagctatgaataccctaccaaacaaggaactacaacctccttcaaaacacacacagacacttatgacgaatcaataaactattcaactggtatgtttgctaaagaagtattaaatgcaataagaataaaaggaactacatcttatacacatgaaagaccaattactattgccagatacaatccagatgaagacacaggcacaggcaactctgttttttttacctcagtagtagcagacacaggctgggcagaaccaaaagacacagatctagttatacacaatgtacccttatatatagccctatttggcttttggaacacaatcataaaattaaaaggagacaaggcatacatgaaatatggaatgtttgtagttaaatcagatgcaataaaactagtaacaaacacagcacaaacttatttcccactactagactggtcctttatacaaggtaaaatgccatatgaagaatatcttttagattcagacaaaaacttttggtaccctacagcatacaaacaacaagagattttaaatgctattgtagaatgtggacagtttataccaaagtttggtaacttaccatctagttcatggcaactaaatgttaaatacacattttattttaagtggggtggcccacacatcacagatcaacttgcaaccaatcctaaagacaaagaaaaatatcccgtgcccgatacaatctttcaaacaatacaaattgctgacccacacaagcaagcatgcaaagaaatgcttagagcctgggactacagaaggggcctcattacaagctcagctcttaaaagaatgtcagaaaacatccaaactgattcatctctcgaatctgatgacacagaaacaccaaaaaagaaaaggagagtcacaggagaagtcccatcagcacaagaaaagaaccaaaagatccagaaacatctcctctcactcttcgaagaaagtacctgccaagaggaggaggacctccacaagctcatccagcaccagcagcaacagcagcacaagctcaaacaaaacatcatccacctcctcatagacctaaagaaacaacagagatacctacaacttcaatcgggaggaaactaaccagatttgcacctggccacgaatggcaaactgaacaagatgtagcagcagcatttaaaagaccccctagactctttaaagaagataaacccttttatccttggttacccaaatatgaaccccttgtaaactttcaccttaattttaagttctaggccgacactgttcacttagcggtgtatgtttatataagtttgcaccccaaaaaaattgtaaaataaaaaaaaaaaaaaaaccccccctacgtcacaaaccacgcccccgccgccatcttgggtgcggcagggcggaggctaaaatggcgggacccaatcattttatactttcactttccaatgaacacccgccacgtctcaccaaaagggtggagactttaaaactatataaccaagtggggtgacgaatggctgagtttaccccgctagacggtgcagggaccggatcgagcgcagcgaggaggtccccggctgcccgtggg

SEQ ID NO: 3887 - protein, 660 aa, Gammatorquevirus sp.; identical to SEQ ID NO: 1682

SEQ ID NO: 3888 - protein, 125 aa, Gammatorquevirus sp.; identical to SEQ ID NO: 1683

SEQ ID NO: 3889 - protein, 98 aa, Gammatorquevirus sp.; identical to SEQ ID NO: 1684

SEQ ID NO: 3890 - DNA, 2778 bp, Betatorquevirus sp.
gcgggtgccggaggtgagtttaccaccgtagtcaaggggcaattcgggctaattcagtctagcggaacgggcaagaaacttaataactttattttacagatgagcaaattccaaaaaaaatcttgctatgatggacgcgccctggataatcaatgggtaaacaacatatacagctcccacgacttattttgcggctgtcttcaaccaattaaacatttgttggatataataaaagacacaccatggctccgttcctatacagaagaagatacaaaaattactacaacagaaaaccctggtggagacgacttcaatatagacgccgaagacttagaaaaacttttcgaacaaaaagacaacgaaaatactgggtaagaagatttttttctaaaaaatattacagaaaaaaacttaaaaaaataactcttaaacagtggcagcctataaaaataagaaaatgtagaattaaaggatacttacaactatttgaagcgggaatgggacgctttgaaaataactttgcaatgtataaagaaagttttacacctccttatgaaccagggggagggggatggagtttacaacaacttagccttggtatattgtatgcacaaaatcaaatgtttttaaactggtggactgtatctaacaagggactacctttaacaagatataatggtgtaaaaataacattatttagacaaccagaaacagattacatattttggtatgataatgagggaccaataccaataacaaaatacacatatcctagtttacaccctattaaactactactagaaaaacacaaagtaatagtaccatcaatgcaaacacaacctcataaaagaaaaccttttaaaactaaatggatatcccctccaaaagaaatgataaacaaatggcacttccaatcacacatagcttcctttccattattaacctttggtgccgcggcagttagcttacaatctatgtttcaacctcgaactgccataaacaactccataactttacactcagtaaatactagattcttccaaaacccacgctttcaatatccaggcacatcaacaacaggctaccaaccaaaatcaaacacaagtatatacggtatacacaacggaataatacctcttaaagacaatccaattaaaaacttagtatacttaggaaatacaatgattaatgacgctggagatgaaagaggaacaaaaaacataaaaaactatggagcagcacactggggtaatcccttttatgtaaaatacctagacggcagtatgagaacatttatagccacagaaagttacacagagttaatgaaagatgataatgtaaataaaaaactaagtgaaattattcccaatcccacagaaaaacacgaaccatacatatacacatttagatacaacccagacaaagacaaaggcacaggaaacataatatactggaaaagcaatttagactcaaacaactgggatcccccagatgacccagacttaaaaatagaaaactttccattatggctttccctatggggtttcgaagactacactagaaaactaggaaaattaagaaacttagaccaagactggatgctttgtattagaactagatacttctcagagtcattaccaacatatgtattagtatcacaacaatttgtagacggagaaggaccatataatgtaggccaagaacaattatcattacaagacatacaacactggtacccaagatttagataccaaaaagaaagtgtatctgcaatatgtcaaacagggccagcagtatgtaaatcagaataccaaaaaagtatacaagctcatataaaatatgattttcgttttaagtggggaggcaatccaccgacaatggaaaacatctttgatccgaactcccaaccaacctacgatactcccgataacatcagactccttaatgaaattacaagtccaacaacaaacattaccaactacctctacaactgggatgttagacgggactttcttacacaagcagctacaaaacgaattacagaaagcccacaaaatgacttctctgtgttcacagatggaatcccaactacaacagacgtcccgatccaaaaagaaaaaacacaagagaaaacaacccaggaagaaacacaagagaagatactccagcagctcagcaacatcctccagtacaaccaacaactcagactcagactccaactcttaaaatctcaaatagaacatacataataaaaaaatgcacaacacctgctctgctatttccacaaaaaaacaaaaatagacgctttaataaatgggaatgggagacagaactagcagcagcacgagcttttaaaagacccttacgcacatttaaagatgacatgcctttttatccttactgtgtacctgaacctaaagtaaactttgatttgtatcataaattttaataaaaatttcaaggcctgcattaattcacttgtggtgtccatttatataagtatcaacttaaataaacatccaccgcctccctaatacgcaggcgcacaagggggctccgcccccttaaaaccacaaaattagaattgccgaccacaaacgaatatgctaattaacttccctaaaataatgttttacttccctaaaaattaattagtaaacaccgtcaaattactttttcctgggaggagcataaacactatataactaagtacactgacgaatggctgagtttataccgctagacgaagacgagacaacagctctcgactgaatttgg

SEQ ID NO: 3891 - protein, 668 aa, Betatorquevirus sp.
MAPFLYRRRYKNYYNRKPWWRRLQYRRRRLRKTFRTKRQRKYWVRRFFSKKYYRKKLKKITLKQWQPIKIRKCRIKGYLQLFEAGMGRFENNFAMYKESFTPPYEPGGGGWSLQQLSLGILYAQNQMFLNWWTVSNKGLPLTRYNGVKITLFRQPETDYIFWYDNEGPIPITKYTYPSLHPIKLLLEKHKVIVPSMQTQPHKRKPFKTKWISPPKEMINKWHFQSHIASFPLLTFGAAAVSLQSMFQPRTAINNSITLHSVNTRFFQNPRFQYPGTSTTGYQPKSNTSIYGIHNGIIPLKDNPIKNLVYLGNTMINDAGDERGTKNIKNYGAAHWGNPFYVKYLDGSMRTFIATESYTELMKDDNVNKKLSEIIPNPTEKHEPYIYTFRYNPDKDKGTGNIIYWKSNLDSNNWDPPDDPDLKIENFPLWLSLWGFEDYTRKLGKLRNLDQDWMLCIRTRYFSESLPTYVLVSQQFVDGEGPYNVGQEQLSLQDIQHWYPRFRYQKESVSAICQTGPAVCKSEYQKSIQAHIKYDFRFKWGGNPPTMENIFDPNSQPTYDTPDNIRLLNEITSPTTNITNYLYNWDVRRDFLTQAATKRITESPQNDFSVFTDGIPTTTDVPIQKEKTQEKTTQEETQEKILQQLSNILQYNQQLRLRLQLLKSQIEHT

SEQ ID NO: 3892 - protein, 91 aa, Betatorquevirus sp.; identical to SEQ ID NO: 3624

SEQ ID NO: 3893 - protein, 58 aa, Betatorquevirus sp.; identical to SEQ ID NO: 3625

SEQ ID NO: 3894 - DNA, 2777 bp, Betatorquevirus sp.
cgggagccgaaggtgagtgcaaccaccgtagtctaggggcaattcgggctagatcagtctggcgaaccgggcaagaaacttaaaatatttattattttacagatatgagcaaacttttaacaccaactatctacagcaacaaaggattagaaaacaactgggtaaacttaatatggaacagccatgaccttatttgtggctgcaacaacccctggaaacatctagcagacatcttaaaaagacaaggaacacaactatgcctcccttcaactactaccgacgcttctaccgctacagacccagatattacagaagaactcggtttagaacctggagatctagacaagctattcgaagaagacatcgtagaagacgatgggtaagaaaaagacgctttttaaaactaaaaaaaagaaaactaaaaaagataagactttcacagtggcaaccagatagcataagaaaatgtcacataaaaggacagctatgcttattaacttgtggaattaacagaattaataataactttactttaacctctgaaagctatgtacctatcggtgaaccgggagggggaggatggagtataatgcaaataacattaagagctttatttgacgaatacaaacattatagaaactggtggacttcaagtaactgtggactgccattagttaaatatatgggatgtagaattaaattttataatagtaatgactgtgactacatagtgactgtacaaagaacaggaccttttgaagtagacagagacacttacctaaacacacaaccaagtagacacatgatgaacagaaaaagttttataataccaaagctaaatccaaacaaaaaaagaaaaccatacattaaaaaatactacagaccaccagcactactacaaaacaaatggtacttttcacaagacatactaaacacaccattaatactattcacagtatcttcctgctcactagaccaaatgtacggacctaacgaccaaataagcacaaatattacatttctatcactaaacacaacactgtttcaaaacccatactgggaattagacgaccaacaaccatactatccaaaagttacaggaacaattaataatataggactatacaccttcggaaacggaggcaaccctaatgaacaggacgcgtggcaaaaactaataccactatacgaaacacaaaaatggaaaaaagaacataacacaaataatacaaaatggacaacaaaatatactgatatcaaaaatccacagaagtgggcaaatccattttcatacacagcacacgaagaaacaaacgatgtaataatatactatggcacacctccaacagaccaaacatacaaccaaacccctgcattacaaaaaataacaggattataccaagaatgcagatacaacccatttagagacaaaggtacaggaaacatattctacttaaaaagcacaaaaacacaacagggaagctttttatcactgccaacagatagcagaataatactaaaagactttccaatatggctagctacatggggatggataagctggctacaaaaatctaaaccagtacaccatttagaagaagactatcaattagttatacaatcaccatatatatatccaccactaccatgctacgtaccactagacaaatactttacacacaacgatggaaaaaacctaacagaaacagacaaggcacactggcacccaaaactagaaatgcaattagaaacactatcaaaatttgcagaaacaggcccagcagcaactaaaattaacaaacaaaagcaaatacaaatacatgccttttatgacttttactttaagtggggaggctgcccagcaccaatggaaaacatctgcgacccagcagaccaagaaaaattccccaatcccaataacatcctcaaagagcttacgcttgagaatccagaaacacccaaagaatattacatttacaaatttgacgaacgagacggactccttacaaacgcagctacaaaaagacttaaaaaagacattgaacctacaaaatattttacagaatttggagcaaaggacccactcttacaaatcgaagcaccacaacaaacacaaacggagacaacccaggaagaaagcgaagaagagatcaaggagcagctccagctcctcaagcaccaacgagaccagtacagacacagaatcaacagactaacaaaaaaccgaaaattattccctatactatagacatgtttggtcaatccactgttaaaaatcgtagatttaaaccacatgaatttgaagatgagttattagtgtctagaatatttcgtagacgtcctagaacatatatttttgacccccctgattacaaccttgacattattgaacctgttgtaaactttgcattaaactttaaatactaggccagcagtaattcacttgtcggtgtccatttatttaagttttaacttatacaaacatccaccgcctccctaatacgcaggcgcacaagggggctccgccctaataaatattcaacaggaaaaccacataattagaattgccgaccacaaaccgtcaaccgttacaactacttctgcttttacacacacacttctgcttttttagaaccacgcctactacttcattattaatcagacgctattccggggaggagacacacatctatataactaagagtactgacgaatggctgagtttatcacgccagacggagacggcatcacatcagtgcaggccggctgatcttggg

SEQ ID NO: 3895 - protein, 684 aa, Betatorquevirus sp.
LWLQQPLETSSRHLKKTRNTTMPPFNYYRRFYRYRPRYYRRTRFRTWRSRQAIRRRHRRRRWVRKRRFLKLKKRKLKKIRLSQWQPDSIRKCHIKGQLCLLTCGINRINNNFTLTSESYVPIGEPGGGGWSIMQITLRALFDEYKHYRNWWTSSNCGLPLVKYMGCRIKFYNSNDCDYIVTVQRTGPFEVDRDTYLNTQPSRHMMNRKSFIIPKLNPNKKRKPYIKKYYRPPALLQNKWYFSQDILNTPLILFTVSSCSLDQMYGPNDQISTNITFLSLNTTLFQNPYWELDDQQPYYPKVTGTINNIGLYTFGNGGNPNEQDAWQKLIPLYETQKWKKEHNTNNTKWTTKYTDIKNPQKWANPFSYTAHEETNDVIIYYGTPPTDQTYNQTPALQKITGLYQECRYNPFRDKGTGNIFYLKSTKTQQGSFLSLPTDSRIILKDFPIWLATWGWISWLQKSKPVHHLEEDYQLVIQSPYIYPPLPCYVPLDKYFTHNDGKNLTETDKAHWHPKLEMQLETLSKFAETGPAATKINKQKQIQIHAFYDFYFKWGGCPAPMENICDPADQEKFPNPNNILKELTLENPETPKEYYIYKFDERDGLLTNAATKRLKKDIEPTKYFTEFGAKDPLLQIEAPQQTQTETTQEESEEEIKEQLQLLKHQRDQYRHRINRLTKNRKLFPIL

SEQ ID NO: 3896 - protein, 92 aa, Betatorquevirus sp.
MSKLLTPTIYSNKGLENNWVNLIWNSHDLICGCNNPWKHLADILKRQGTQLCLPSTTTDASTATDPDITEELGLEPGDLDKLFEEDIVEDDG

SEQ ID NO: 3897 - protein, 58 aa, Betatorquevirus sp.
MFGQSTVKNRRFKPHEFEDELLVSRIFRRRPRTYIFDPPDYNLDIIEPVVNFALNFKY

SEQ ID NO: 3898 - DNA, 2774 bp, Betatorquevirus sp.
cgggagccgaaggtgagtgaaaccaccgtagtctaggggcaattcgggctagatcagtctggcggaacgggcaagaaacttaaaatattttttattcacagatatgttctcatcatgaaagacacccacatcatcaaagagacaacaagaactacaatggattggaataattaactcaactcacgaccaaatttgccactgcgacgacccaactcttcatttgctttactgcctcaacaaattctccggatttcaaaaaccagaaattgatattaacaacataaaatgcctccttatcggcaatcctactacttcaaaagaaacttctacaacaatagaagacgccagtttagaagaaggggagttagaaaaccttttcgcagaagatactggagaatacaaagaaaacgaaaacccagatacaaggtaaacaaatttaaattttataaaagaaaagcaaaaaaaataacacttaaacaatttcaaccaagaactattaacaaatgtaaatgtattggatataaatgcttatttcaaggtagtcccttaagagctatgaacaactttgtacaatatatttattcaattatacctgaaaaacaaccaggaggagggggatggagcattcaagtactcagcttagactcaatatttgaggactatgaacatttacaatgcatatggactaaaggaaacgcaggactgcctcttgttaaatacatgggttgcaaatttacattataccaatctgcagaaacagactatgtattttcctatgataactgctggccaatggttgatactatacacacccacgcagactccgcaccatttagaatgctacaaaaaaaaaacaaaattgttgttccctcaatgaatacaaaaaaaagacgcaaaccatacaaaaaagtttttgtaaaaccaccaccacaaatgacaaacaaatggtactttcagaaagacatatgtaaaacacctctagtaatgtttactgccactgcagtatctctcggaaacccatttgcagaccctagagctaaaagcaacaatgtaactatacactgtataaacccatacctttttcaaaacccagactttcaacattggggaacacaaggatactcacctaaaatggcagataatacaacaccattatacctatatgcatcacaaatagacaacttaacctaccagaccttaatgcagaataaaaataccattatagcactaacaaacacaaaagaccatacacctggaataccacttacaaataatcaaacaacagacatatcaaaactagcaggaaacccctttcacaaagactacacatcagaagatatgtttgtttacatttcaaaaataacaccacaagaaatgcaaaattacttaaaaaacaactcagaaataccaagtgaaaagcgaagtataactcttgctggtgatattatttatacatttagatacaacccagacaacgacgatggttccactaataaacaatatatagtaagcacagcatcaggaaacaaaataaaaccaccagaaaacgaaaactttatattatcaggctttccattcccatacatgttatggggatggacagactggataaaaaaactaggagaaacaccacaatttgacacaaacaaactacttatactggaaacaaaagcatttgatgataaaactataccactgtttatacctattgacttaacatttattcatggatatgacccatatgaacccatagaagacaaaacacacaacataagtgcatacaatgcaaaaaactggtttccaagatatgaatatcaaaaaaaaaccataaatgacatatgcttagcaggacctgcgtgtccaagaccaccatgggatcactatttacaagctatatgtaaatataccatgtattttaaatgggggggttgtcctaaatctttacaaaaagcttataatccctgtttacagtctaaatggcccactcccgataacctctatggaagacctgcggtgcagaatcctaacatcttcccacaaacagaactgtactcctgggactgggaaaatgattatgttacaaaagcagctattgacagaatccaaagatttacagaaattgatccaaaaatgttctcaattacagaaatcaaaaacaacccaccggcgatccaaaaaaagaaaacaacagaagacgaagaagaggagaagaagctcaagctccagctccacaagctccgattcaacaaagtcctcctgcagctccaactccaacagcaattaaaatcactaaaagcaaaataaaagttaatatgtttgaagacccaaaacccaaaaatcgtagaatgactccctgggaaaaagaacaagaaaagcaagacgctgccatttggaaaagaccacaaagagactttattttagatatacctttttaccctggcattcccccaactccgcttgtaaactttaacttaaaatacaaatatgaataaacaaggccaacaataattcacttagtggtgtccatttatttaagtttaacttatataaacatccaccgcctccctataatttaagcgccaaaattcaaaagggggctccgcccccttacacccccaagggggctccgcccccttacacccacattaattaacagtccgtgtaattccggggaggagtttattaactatataactaactaaacttccgaatggctgagtttatgccgccagacggagacgggatcacttcagtgactccaggctgatcttggg

SEQ ID NO: 3899 - protein, 672 aa, Betatorquevirus sp.
MPPYRQSYYFKRNFYNNRRRQFRRRGVRKPFRRRYWRIQRKRKPRYKVNKFKFYKRKAKKITLKQFQPRTINKCKCIGYKCLFQGSPLRAMNNFVQYIYSIIPEKQPGGGGWSIQVLSLDSIFEDYEHLQCIWTKGNAGLPLVKYMGCKFTLYQSAETDYVFSYDNCWPMVDTIHTHADSAPFRMLQKKNKIVVPSMNTKKRRKPYKKVFVKPPPQMTNKWYFQKDICKTPLVMFTATAVSLGNPFADPRAKSNNVTIHCINPYLFQNPDFQHWGTQGYSPKMADNTTPLYLYASQIDNLTYQTLMQNKNTIIALTNTKDHTPGIPLTNNQTTDISKLAGNPFHKDYTSEDMFVYISKITPQEMQNYLKNNSEIPSEKRSITLAGDIIYTFRYNPDNDDGSTNKQYIVSTASGNKIKPPENENFILSGFPFPYMLWGWTDWIKKLGETPQFDTNKLLILETKAFDDKTIPLFIPIDLTFIHGYDPYEPIEDKTHNISAYNAKNWFPRYEYQKKTINDICLAGPACPRPPWDHYLQAICKYTMYFKWGGCPKSLQKAYNPCLQSKWPTPDNLYGRPAVQNPNIFPQTELYSWDWENDYVTKAAIDRIQRFTEIDPKMFSITEIKNNPPAIQKKKTTEDEEEEKKLKLQLHKLRFNKVLLQLQLQQQLKSLKAK

SEQ ID NO: 3900 - DNA, 2772 bp, Alphatorquevirus sp.
cctccccgcactcacctcacagacccccctgtcaaggggcaattcgggctcgggactggccgggccccgggcaaggctcttaaatagctatgttttttggtaggcctcacagaaagaagaggctactgtcactgcttagcttgccagctgcaaagaaaaaaccacctatgagtctgtggaggcctcctctgcacaatgtcccggggatcgagcacctctggtacgagtccgtgcatcgtggccatgctgctatttgtggctgtggggatcctgtacgccattttactgctgttgctgaaagatatggcgtcccggggggcccacgatcttctggggcaccgggagtagggggcaaccacaaccctcccccaatccgtcgagcccgccacccggcggccgctccggaccccccagcaggtaaccagcctccggccctgccatggcatggggatggtggaagcgaaagcggcgctggtggtggagaaagcggtggacccgtggccgacttcgcagacgatggcctagacgacctcgtcgccgccctcgacgaagaagagtaaggaggaggaggaggtggaggagagggcgacccagacgcagactgtacagacgctacagacggtacagacgaaaacgaaagagggctaaaataactataagacagtggcaaccagccaaaactagaaaatgctacataaggggctacatgcccgcccttatgtgcggctggggagcctacagcagaaactacagcagtcacttagaggacaaaataactgcgggaccctatggtgggggacacagcactatgagattctctctacaggtgctctacgaagagcacctgaaacaccacaactactggacgcgcagcaaccaggacctagaactggccctgtactatggctgcacaattaagttttacagggaccccgaaacagactttatagttacataccagagaaaatctcctctgggaggtaacataatgacagcaccatcactacacccagcagaagccatgcttacaagaaacaaaatactaatacccagtctacaaactaaaccaaagggcagaaaaactgtaaaagttaacatagcaccccccactctatttgtgcacaagtggtactttcaaaaggacatatgtgacttaacactgttcaacttgaacgttgttgcggctgacttgcggtttccgttcggctcaccacaaactgacaacatttgcataaccttccaagttctctcttccgtttacaacaactttctctccataacccatacttcctcaaccagtgacactataatagacgaatttttaaaactagcaattccagacacacctaaaaaaagacactggaatgttttaaatacatacaaaacagaaggttgcttttcacacccacaactgcaaaaatacaaaatacctcaagcaggcataggtgctgagaattactttagcacaccagacggactatggggagaccctatatacagcaaaaacaatacaggcgcagagcaatcagcagagaacattcgaactacaattaaaaacaacatgaaatcttactttaaaaaaatacaagaggagagtacaataataacaaagggagacaaattattctgtcacctcacaggcatattttcaccaccctggctaaatataggcagagttagtagagagtttccaggcctatataatgacgttatatacaacccatggacagacaaaggctcaggcaacaaagtatggctagacagcctaacaaaacaagacaacatttacaaaaaaggacaaagtgtccttcttatggaagacatgcccttatacataatgctaaacggatacatagactgggccaaaaaagaactaaacaactggcagatgcaaaccatgtacagagtaatgatagtatgtccctatacttttcccagactatatttagaaaccaatccctacaacgggtatgtcatgtactcacaagcctttggagcaggccttatgccagacaaagtatcaattccacccatagcatggagaggcaagtggtacccacacgtactacaccaagaagcagtaataaatgacatagtgcagtgtggaccctttgcaccaaagatacaaaaaccaaacatgcagctcaacatgaaatactcatttagattcacatggggcggtaatcctatttccgcacagattgttaaagacccctgcacccagcccacctttgaaattcccggtggcggtaacatccctcgcagagtacaagtcatcaatccgaaattcctcgggcccaactacagtttcagatcatttgacatacgacgtgacctctttagcgacaagagtcttaaaagaatctcagaacaaccagagacttttgagtctttattctcaggtggcaaacgccccagaatcgatctacccaagtacgtcccaccagaagaaaactccgatacccagcagaggcaacaaagagaacagaggccgtggacgagcgaaagcgaaagcgaagcagaagcccaagaagagacgccgcagggctcggtccgagagcagctccagcagcagctccaagagcagcttcaactccgaagagggctccagtgcctcttcgagcagctagtgagaacacagcagggagtccacgtagacccctgccttgcgtaggccccaagcagtggctgtttccagagagaaagcccaaaccccctcctacttccggggactgggccatggagtacctaatgtgtaaaataatgaacagg

SEQ ID NO: 3901 - protein, 744 aa, Alphatorquevirus sp.; identical to SEQ ID NO: 2358

SEQ ID NO: 3902 - protein, 156 aa, Alphatorquevirus sp.; identical to SEQ ID NO: 2359

SEQ ID NO: 3903 - DNA, 2771 bp, Gammatorquevirus sp.
cgggagcccgaggtgagtgaaaccaccgaggtctaggggcaactcgggctagggcagtctagcggaacgggcaagaaacttaaaacaaacttttgttttacagatgagcaactactctgctacacacttttttaaaccaacaccctacaacaatgacaccaaaaaccaaatgtggatgtccatgatagctgatgggcacgactgtatctgcaactgcaatagtccttttggccatctgcttgcttctatttttcctcctggtcatcaagacaggtttcttacagttgaagaaattattaacagagatattaaagaatgccattctggtggagacgcagacggaggccatggttcggccgctggagaagatataagaaaagatatcccagaagaagaaggcgcccactttataaaagacgaagagctagacgcactaatcgccgcaggagaagacgccggtggaaggtaagaagaaaaaagaagagaattaatattactcagtggcagccagaatctattagaaagtgtaaaataataggaatagaacctctttgtgtaggagctgaaggatctcaaatagactgttatactgttacaaaaacagactatgtgccacctaaagtaccatggggaggtggatttggcctagagaactttaccttaaaatatttatactcagaatatcaataccacaacaacatatggacaagtagcaactcacaaaaagacttatgtagatacacaggtggaaaatttatagtatttagacatccaacccaagactttgttctaagctatgatatacaaccaccacatgcacttaacaaatttacatttccaagctgtcacccacatcaacaactgctttctaaacatcacaaaattattcttagtcaagccagcaaacctaatggtaaatactataaaaaaataaaatttaaaccaccaaaacaaatgataacaaaatggttttttacaaagacattttcaccatcaagtcttatagtagtaaaagcagcagctgccaacttccaacatgttaacttaagtggtaaaaatacaaacatgttagttaccttatattccttaaaccttgccttttataaaaaccctgcttggggtcttaaaccaacttccgcaggctactggccacaagctggtgcacaatccaactatccctatgtagtaaaaaataaacaaggtcaagaagaagataaaagaatgactatcacaacaacatctgagtacttacaaacaattaattatagtactggctggtttaaacctgaatttctacaggcaattaaactaggttcaaaagcacaccctactgcattacaccaagttgtagcaggcagatacaaccctaacatagatgatggatctggaaatgaaatatactgtgccactatagtaggtacatcatggttaccacctacacaagacaaacaacttttaattacagacatgccactatggctaggattatatggatactactcatacattagagaaacaaaatctaaagacttttggaagttacatgtaattgttttaaaatccaaatccatacactgctacccagaagtaggtagctgtgacagatatgttttcatagactgggattatatacagggcaaaaaaccttatgatcaaacaataacagagaaagaaaaaacttactggtaccctgatatgtcttggcaaagaaaatctatgaatgccatagttgaatcaggtccatttatacctaaactatctgaagaaacttacagtacatgggaactaaacatgagatattatttttattttaagtggggaggtgcaaacacaggagaagcacaagttgaaaatccagaaatgctgcccacctatgatgtacccgattcaatgccaaaaacaatacaaattgttaacccagaaaaacaagcaccagaaacaatcttacacccctgggactaccgcaggggatttattaaagaaacagctcttaaaagaatgtgctcaaacatcgaaactgatacagaatttcaataccctacagaacaaacaccaaagaaaaaaagaagagtacaagcaactcttccaaatccccaggaagaaaatcaagaaatcaaggaatgtctcctctcgctctgcgaacaaagtacatcgcaagaggaggaagagcaagacctccacaagctcatcctcaagcagcagcacaagcaggaaaagctcaagtacaacatgttcaagctcctcctagacctaaaaaagaaacagagaataatacaacatcacacaggactactagaatgactccatttaaaaaaggctttgaaatggacactgaaaaagaactagcatatgcatttagtagaccccctagaatgtttaaagaagacactcctttttacccctggttacctaaactaacacccattgttaactttcaccttaattacaaattctaggcctacaaatttcacttagtggtgtatctttctataagttacaaccccaaaaaaaactgtaaaataaaaaaaaaaaaaaaaaataaaaaattgcaaaaattcggcgctcgcgcgcgcggcgcgcgagcgagcgccgtcacgcgccggcgctcgcgcgccgcgcgtatgtgctaacacaccacgcacctagattggggtgcgcgcgctagcgcgcgcaccccaatgcgccccgccctcgttccgacccgcttgcgcgggtcggaccacttcgggctcgggggggcgcgcctgcggcgcttattggctgcccatggg

SEQ ID NO: 3904 - protein, 661 aa, Gammatorquevirus sp.
MPFWWRRRRRPWFGRWRRYKKRYPRRRRRPLYKRRRARRTNRRRRRRRWKVRRKKKRINITQWQPESIRKCKIIGIEPLCVGAEGSQIDCYTVTKTDYVPPKVPWGGGFGLENFTLKYLYSEYQYHNNIWTSSNSQKDLCRYTGGKFIVFRHPTQDFVLSYDIQPPHALNKFTFPSCHPHQQLLSKHHKIILSQASKPNGKYYKKIKFKPPKQMITKWFFTKTFSPSSLIVVKAAAANFQHVNLSGKNTNMLVTLYSLNLAFYKNPAWGLKPTSAGYWPQAGAQSNYPYVVKNKQGQEEDKRMTITTTSEYLQTINYSTGWFKPEFLQAIKLGSKAHPTALHQVVAGRYNPNIDDGSGNEIYCATIVGTSWLPPTQDKQLLITDMPLWLGLYGYYSYIRETKSKDFWKLHVIVLKSKSIHCYPEVGSCDRYVFIDWDYIQGKKPYDQTITEKEKTYWYPDMSWQRKSMNAIVESGPFIPKLSEETYSTWELNMRYYFYFKWGGANTGEAQVENPEMLPTYDVPDSMPKTIQIVNPEKQAPETILHPWDYRRGFIKETALKRMCSNIETDTEFQYPTEQTPKKKRRVQATLPNPQEENQEIKECLLSLCEQSTSQEEEEQDLHKLILKQQHKQEKLKYNMFKLLLDLKKKQRIIQHHTGLLE

SEQ ID NO: 3905 - protein, 121 aa, Gammatorquevirus sp.
MSNYSATHFFKPTPYNNDTKNQMWMSMIADGHDCICNCNSPFGHLLASIFPPGHQDRFLTVEEIINRDIKECHSGGDADGGHGSAAGEDIRKDIPEEEGAHFIKDEELDALIAAGEDAGGR

SEQ ID NO: 3906 - protein, 111 aa, Gammatorquevirus sp.
MSPLALRTKYIARGGRARPPQAHPQAAAQAGKAQVQHVQAPPRPKKETENNTTSHRTTRMTPFKKGFEMDTEKELAYAFSRPPRMFKEDTPFYPWLPKLTPIVNFHLNYKF

SEQ ID NO: 3907 - DNA, 2770 bp, Gammatorquevirus sp.
cgggagcccgaggtgagtgaaaccagcgaggtctaggggcaattcgggctagggcagtctagcggaacgggcaagaaactaaaaactatttttattttacagatgtcaatattttacaaaccaactccatacaatggatgtactaaaaaccaaatgtggatgtcctccataagtgatactcatgatatgcactgtggctgcactcaaccatttgctcacctactagatagcatttttcctgaaggacaccaagatagaaacaaaactatacaagaaattattgacagagacaaacaatgcctttctggtggccaagaagaagaagatggaggtctgcctataggttcaagcgccgcaaacctgcctacaggcgcagaaggcgaagaagaccaagataccaaagaaaatatagaagagcttttggccgtcgccgccgccgcagaagaaaggtaagaagaaaaagaaaaactttagttgttagacaatggcaaccagactctattagaaactgtaaaattaagctttttgggactcttgtattaggagctgaaggcactcaatacctatgctatagtaatgaaaaaaactcatggacaccaccacaaagacctggtggaggtggatttggtattgaaacttacaatttagcatggctatatgatcaatacagattaaaaagatgtatatggacagcatctaatgaatacaaagacttagttaggtttataaaagttaaatttttgttttttagacaccctaaaattgactttgttattaactatgacagacagttaccttttatactacaaaaacctacatacatgaattgtcacccactagcattactattatctcaacacaaaaaaattataccaagcaagacaaccaaaccaaaaggtaaaaatacagtgagcattactataaaaccaccaaaacaaatgatatctaaatggttttttgcaaaacaatttgctttgtatgatttactacaactacaaggtgcagcatgctcactaaactacccaaaactaggttgctgtaatgaaaacctaataattagtattttttatattaatccacaattttaccaagactctgattggggtgcctatcaaaaatcaccttaccttcctataaaaacaatagctactaatcttaaatatcactggaaaataggtaacaaaacaggaatattctcaccagattatttacatagacgtgatgacactgtatactatgaaagtgtagacttagaaaaaggcatgttttcaccctacatcctaaatacacaaaaaataacagttggtgaatcagaaacacatctctatgctcttcctctaggtgcagctagatacaatccagaaatagatgatggagtaggcaatgaaatatacttagtaccaattaaccttggaaactataaaaagccatcacaagataatttaatttttagaggcttaccactatggcttatgttttatggcctttatagttttataaagaagacacaagcagaatcctttttaggtttacacatgtttatagtaaaatcagaatatattttacctaaaccaaaagatccagcaagacaattttttccaatagtagacaacacatttgtaaatggaaagaatccatacaactcatacatatcaagcactgaaagaaagctatggtttccatctgctttacaccaagtacaagtaattaataactttgttaaatgtggaccctatgtgccaaagttagacaatgatagagaaagtacatgggaactaccatacaaatctattttctattttaaatggggtggtccacagatgccagaccagcaagtcactgacccaaaagaaaaaaccagctatattgtacccgatacaatccaacaaagactacaaattaccaaccctctcaaacaagcaactgaatcccttatacaccagtgggattacagacgaggactcattaaaacaaaagcttttaaacgaatgctcgaaaacctcggctctgaatcagatgtttactctgatacaggcacaccaaagaaaaggcaaaggatcgaaaatgcactccactaccaagaagaagagaacaaggaaatcaagacatgtctcctctcactctacgaaagttcttcctcagaaaaagaggaggaagaaccaaacctcctccagctcatcaacaaccagcgacagcagcaaaagcagctcaagctccagctcttaaccttaataaaacatttaaaagagaaacagaaccaactacaactacaaacaggagtaatctagttatattaacccgctttaaaaaaggctttgaagaagacactgaaaaagaagtagctaaagcattttgcagacccccaagaacctttaaagaagatcccccattttacccatggttacctccaacacccaaagtctgctttaagctcaattttaaaggctaggcccacaatgtacacttagtaaagcatgtttaataaagtttaacccaaaaaaaaaacaaaaatttaacttttataaacctaactaagtctttgtattcattagcccgccgccatcttgggtgcggcagggcgggggctaaaatggcgggacccaatcattttatacttttactttccaattaaaaccagccacgtcacaacaaagaggtggagactgtaacactatataactaactgcactgacgaatggctgagtttaccccgctagacggtgcagggaccggatcgagcgcagcgaggaggtccacagctgcccgtggg

SEQ ID NO: 3908 - protein, 663 aa, Gammatorquevirus sp.; identical to SEQ ID NO: 3581

SEQ ID NO: 3909 - protein, 116 aa, Gammatorquevirus sp.; identical to SEQ ID NO: 3582

SEQ ID NO: 3910 - protein, 113 aa, Gammatorquevirus sp.; identical to SEQ ID NO: 3583

SEQ ID NO: 3911 - DNA, 2767 bp, Betatorquevirus sp.
cagataccgaaggtgagtgaaaccaccggagttaaggggcttattgggctaaagcagtcttggcggaacgggctagaaacttaaaaaatatattattttttaggaatgagctcctacttaactccatcactatacagcaaaaatggcttggaaaaccaaatgatgaactccatttggaacattcacgacctttgctgcggatgcaacaactgctttaaacatatttttgatattcttcaaagaaaaaacaacctgccatgcctcccttcaacttctaccgaagacgctggtacccaaaccggtggagaagaacaagaagatggattcgacgaaggagatttagaccgccttttcgaagaagatttcacagaagaaactgggtaagaagacgccgtttatttactaaaagacataaaaaactaaaaaaactaaaactatcagtatggcaaccaagaactattcataaatgtagaattaaaggactactatgtttaactacttgtggtaaaggaagagtaaatcataattctattttaactatggaaagctatgtacctgaaagcgaacctgggggaggtgcatggtctattttacaagtatcattaagagtattatgggatgaatatactgcttttagaaactggtggacaagtagtaaccaaggcttacctcttacaagatatttaggaggacaactaaaattttatagaagcaaacaaacagactatatagcaattgtaaatacttgccccccatttgatgtaacaagagacatatacctaaacacacaacctagcagagcaattatgcataaacacaaaattattgtacctagattagacagaaaaatataccgaaaaccatatgttaaaaaaaatataaaaccaccagcactatttacaaacaaatggttttttcaaagagaaatatacaaccaaccattttttactgtacaaacttcatgctgttcactagaccaagtatttggcccagacacagaaattaacaccaacctatcctttatatcactaaattgtgacttttttcaaaacccacaatggggagatttaccagacacaggatacagaccaaaatacacaggcacaagtaacacatacctatttagagctgaaaatggaagctataacggtacaggatacaaacaacttacaccactatttaacacaaaaaacataacaaaaggaaaaccattaacaaaagataaatggaaagactttgaacaacagcttaaaaacaaagaatattggggaaacccatttgacccagattacttacactcacacacttactggtacggaccatatccaacagaacaaaattttgaaaatgcaacactagtacaactacatgaagtattcttaacatgcagatacaaccctttcagagacaaatctaaaggaaacaaagtatatttaaaatctacatccttacaacagggcagcatgctatcattaccacaaaacgaacaaattttaatacaagatatgccactatggttaattttttgggcatgggaagactggatagtaaaaagcaaacctgtacaacacttactacaagactaccaaataattatacaaagtaaatatatttacccacctagatcagcatacgtaccactagataaatactttgcagaaaccacacacgaaacaaacctaacagaaacagacaaatcaaactggcatccaaaagtagaaatgcaacaatattccactcaaaacatagcacttacaggaccactatcaccaaaaattacaaacactaaatcagtagaaactcatatgtactataaccttcttttcaagtggggaggctgtccagctccaatggaaaacattacagatccagcagaacaagaaacattccccactcccggtaacatcatacaaggacttgaaatccaggatccaaaaaccccagaacaatacacaatttgggactgggatgaaagacgaggaattattacagcaaaaggttcgaaaagaattaaatcagactttgaaacttcaacatattttacagaacatggagcaaaagacccagaaacgcaagcaccgcaacaaaaaatctacgcggcaccaccgcaaacagaagagacggaggactacatcaaccagctcaagcagctgcagcgagacctcaagcaccgaatccacgagctcctaaaaacaaaaaaattattccctattctgtagacatgtttggagaaaccaaaaataaaaaccgtagactaactgcaaaagaaagggcagatgacttacaagatgcaataatatggggcagatatcctagaacctataaaaatgaatcttacttttacaaagatatgaaccctgaacctcttgtaaacttttcattaaactttaatttctaagccagcaaatattcacttgtcggtgtccatttattaaagttaaacttatataaacatccaccactctccctaatacgcaggcgcacaagggggctccgcccccttaaacccccagggggctccgcattaatattcaacaggaaaaccacctaattagaattgccgaccacaaaccgtcaaccgttacaataacttccccattttaacacatacttcctgttttacagaccaacgcctactaattcattaataatcagagtcatatcctgggaggagaaacatgagtatataactaagtacactgacgaatggctgagtttaccccgccagacggagacgagacaggacactgactcggctgcttttggg

SEQ ID NO: 3912 - protein, 653 aa, Betatorquevirus sp.
MPPFNFYRRRWYPNRWRRTRRWIRRRRFRPPFRRRFHRRNWVRRRRLFTKRHKKLKKLKLSVWQPRTIHKCRIKGLLCLTTCGKGRVNHNSILTMESYVPESEPGGGAWSILQVSLRVLWDEYTAFRNWWTSSNQGLPLTRYLGGQLKFYRSKQTDYIAIVNTCPPFDVTRDIYLNTQPSRAIMHKHKIIVPRLDRKIYRKPYVKKNIKPPALFTNKWFFQREIYNQPFFTVQTSCCSLDQVFGPDTEINTNLSFISLNCDFFQNPQWGDLPDTGYRPKYTGTSNTYLFRAENGSYNGTGYKQLTPLFNTKNITKGKPLTKDKWKDFEQQLKNKEYWGNPFDPDYLHSHTYWYGPYPTEQNFENATLVQLHEVFLTCRYNPFRDKSKGNKVYLKSTSLQQGSMLSLPQNEQILIQDMPLWLIFWAWEDWIVKSKPVQHLLQDYQIIIQSKYIYPPRSAYVPLDKYFAETTHETNLTETDKSNWHPKVEMQQYSTQNIALTGPLSPKITNTKSVETHMYYNLLFKWGGCPAPMENITDPAEQETFPTPGNIIQGLEIQDPKTPEQYTIWDWDERRGIITAKGSKRIKSDFETSTYFTEHGAKDPETQAPQQKIYAAPPQTEETEDYINQLKQLQRDLKHRIHELLKTKKLFPIL

SEQ ID NO: 3913 - protein, 92 aa, Betatorquevirus sp.
MSSYLTPSLYSKNGLENQMMNSIWNIHDLCCGCNNCFKHIFDILQRKNNLPCLPSTSTEDAGTQTGGEEQEDGFDEGDLDRLFEEDFTEETG

SEQ ID NO: 3914 - protein, 58 aa, Betatorquevirus sp.
MFGETKNKNRRLTAKERADDLQDAIIWGRYPRTYKNESYFYKDMNPEPLVNFSLNFNF

SEQ ID NO: 3915 - DNA, 2766 bp, Gammatorquevirus sp.
cgggagcccgaggtgagtgaaaccaccgaggtctaggggcaattcgggctagggcagtctagcggaacgggcaagaaacttaaaataattatttattttacagatgcaaaacctgtctgccactgatttttttaaaccaacacactttaacaaagatactaaaaaccagatatggatgtccataattgctgattctcatgactgtatctgcaactgcaacagtccttttgggcacctgctcgcttctatttttcctcctggtcataaagaccgtgactttaccattaatcaaattattaaaagagattatttgcaacaatgccattctggtggagacgcagacgaaagccatggttcaccagccgctggagaccatacagaaagagaagaccattcaaaaataaaagaagaagaacaagatataataaaagacgaagaactacaagaactaatcgccgcaggagaagacgcaggcacaaggtaagaagaaaaaaaagaactataccagtaagacaatggcagccagactctattagaaactgtaaaataagaggctttggcatactagtactaggagctgaaggaactcagatgttttgctatacaacagataaaaaaaaatatgtacctccaaaagtaccatacggaggaggactaggagttgaactgtatactttaagatacctatatgaagaacataaactgttaaataacttttggacagcatctaacattttaaaagacctatgcagatacttatggtgtaaaataactgtttttagacatgtagaaacagactttattgttagctttgatactcaaccaccatttcacattaataaattcacatacccagctactcatccacatcagcaactactaaacaaaagaaaaaaaataatactcagtttagctagtaaaccaaatggcaaatactataaaaaattttatataaaaccaactaaacaaatgatatctaaatggtttttcactaaagaattttccaagcaaccattatttttactaagaggagctgcatgtgattttagacattcctaccttacagctacaaacacaaacttactagtcaatttagtatccctaaacacctccttttacagacactcaaactgggctcaacacacaggtgacaacccatatgtgccttacacccatgtagcagaccgcctacagtacaaagtaaaaactaaatcaggtacagaagagacaagaaccatggaagttaattctaagtctccatatgcacaatcagtagactataccaaaggctggtttaacaatgaatttttaagagccacacaaatattagcatcaggttcactaacagctactacacccactatagctggaagatacaacccaacaacagatgatggcataggtaacaaaatatacttagtatccacattaacagatggctgggacacacccagagtagacaaacaacttattatagaagaaatgccactatggctaggattatatggctttattagctatataaaaacagttaaaccaccagaatacctaaaaacttcagttgtagccttagtatcaaaatctatatatgcatttccacaaataggagctggcttatatgttcctatagatatagactacttacaaggtaaaagaccttatgaacaagttatttctacagcagacaaatcaaaatggtttccagaagtaacatggcaactaaaaaccttaaatgcattagtagaaagtgggccatttatgcctaaactaagtgaagaaagaaacagtacatgggaactaaaatatgaatatctttttaaatttaagtggggaggaccccatgtcacagatcaagaaattaaggatccccaagaccttgacacctatgatgtacccgatactatgccaaaaaagatacaaattagagacccagaaaaacaaacaacagaaagcattatccatgcctgggacattagaaggggaattattaaagaagcagctctcaaaagaatgtgcgacaacatctcaactgatacagaatttcaaccttttacagaggaacctcctcaaaagaaaaagaaataccttggagcagccctcagagacccccaagaagaagtcaaaaagatccaggaatgtctccaggatctctgcaaagaaaatatctgccaagagcaagaaacacaaacactccaagacctcatccagcagcagcagcagcagcaagagcagctcaagtacaacatcctcatgctcctcacagacctaaaatgcaaacagagagaaattcaactacaaacagggatgttagaataactttaacaaggtttcaacctgggtttgaatggcaaacagagtgtgaattagcacaagcatttagaagaccccctagactttttaaggaagacacccccttttacccctggctgcctaagccagaaccccttgtaaactttcaccttaattacaagttctaggccgacactgttcacttagcggagtctgtttatataagtttgcaccccccccctacgtcacaggccacgcccccgccgccatcttgggtgcggcagggcggagactaaaatggcgggacccaatcattttatactttcactttacaatcacaacctgccacgtcacagtaaaggggtggacactttaaaactatataactaagtggggtggcgaatggctgagtttaccccgctagacggtgcagggaccggatcgagcgcagcgaggaggtccccggctgcccatggg

SEQ ID NO: 3916 - protein, 665 aa, Gammatorquevirus sp.
MPFWWRRRRKPWFTSRWRPYRKRRPFKNKRRRTRYNKRRRTTRTNRRRRRRRHKVRRKKRTIPVRQWQPDSIRNCKIRGFGILVLGAEGTQMFCYTTDKKKYVPPKVPYGGGLGVELYTLRYLYEEHKLLNNFWTASNILKDLCRYLWCKITVFRHVETDFIVSFDTQPPFHINKFTYPATHPHQQLLNKRKKIILSLASKPNGKYYKKFYIKPTKQMISKWFFTKEFSKQPLFLLRGAACDFRHSYLTATNTNLLVNLVSLNTSFYRHSNWAQHTGDNPYVPYTHVADRLQYKVKTKSGTEETRTMEVNSKSPYAQSVDYTKGWFNNEFLRATQILASGSLTATTPTIAGRYNPTTDDGIGNKIYLVSTLTDGWDTPRVDKQLIIEEMPLWLGLYGFISYIKTVKPPEYLKTSVVALVSKSIYAFPQIGAGLYVPIDIDYLQGKRPYEQVISTADKSKWFPEVTWQLKTLNALVESGPFMPKLSEERNSTWELKYEYLFKFKWGGPHVTDQEIKDPQDLDTYDVPDTMPKKIQIRDPEKQTTESIIHAWDIRRGIIKEAALKRMCDNISTDTEFQPFTEEPPQKKKKYLGAALRDPQEEVKKIQECLQDLCKENICQEQETQTLQDLIQQQQQQQEQLKYNILMLLTDLKCKQREIQLQTGMLE

SEQ ID NO: 3917 - protein, 126 aa, Gammatorquevirus sp.
MQNLSATDFFKPTHFNKDTKNQIWMSIIADSHDCICNCNSPFGHLLASIFPPGHKDRDFTINQIIKRDYLQQCHSGGDADESHGSPAAGDHTEREDHSKIKEEEQDIIKDEELQELIAAGEDAGTR

SEQ ID NO: 3918 - protein, 113 aa, Gammatorquevirus sp.
MSPGSLQRKYLPRARNTNTPRPHPAAAAAARAAQVQHPHAPHRPKMQTERNSTTNRDVRITLTRFQPGFEWQTECELAQAFRRPPRLFKEDTPFYPWLPKPEPLVNFHLNYKF

SEQ ID NO: 3919 - DNA, 2764 bp, Gammatorquevirus sp.
cgccccgccctcgttccgacccgcttgcgcgggtcggaccacttcgggctcgggggggcgcgcctgcggcgcttacttactaaacagactccgagtcgccatttggggggcaattcgggctagggcagtctagcggaacgggcaagaaacttaaaacaaattctttttttttagatgtcaaagattcaagctaaagacttttatactcccacacccttcaatcaagagacaaaaaatcaaatatggatgtctcaaattgctgatgctcacgataatatctgccattgtaaccatccctttgctcatctgcttgccaatatctttcctgtgggtcacaaagatcgcgatctcacaattaatcaaattcttttgagagactacaaagaaaaatgccattctggtggaacagaagaagaaagccatggtacggacgctggaggcacaggcggaggtttcaaaggtataaaagaagaaagccacgaagaagatttgccagaagacgaactagaaggcttactcgccgccgcagaagaaagcgcaaggtaagaagaaaaagaaaaaaaattaatatacaacaatggcaaccagaaagcattgttaaatgtaaaattaagggcttctctactttagtactgggggcagaaggcagacagtatatttgttggactaatgaagcccttgactacactcagccaaaagcaccagggggaggaggatttggctgtgaaaatataactttagaatggttatatcatgaacatagagcacacaactgtatatggaccaaaagcaatcaatacaaagatctatgcagatatacaggttgtaaaataactttatttagacacccaaatatagactttatttttcaatacaacctacaaggtccatttaacataacaaaattcacatatacagacatacaaccacagaacatgctactacaaccccataacagactaattcttagccaaaaaacaaaaccccatggcaaacttgctgttaaagttaaaataaaaccaccaaaacaaatgactaccagatggttttttgctaaagaattttcagaagctgtactagtacaactaaaagctgtagcctgttcatttacatttcctagaatagcacctaaggcacaaagtcaaatggtaacagtttactacttaaatgaaagcttttatccatctccaatttggggacaagtacacccaggtggctacatacctattagtacaagaacaggtatatataaattctcaaatacaaaaaccaaacctgcatactcagactttacaattgacacaagcacctttggaagaggagaagcaggatattatgcctccattaactattccacaggcttttttaatgccaaagtactaaatgcatccaaagttacaataaataatgtagaatttggctcactacctttactaactgcaagatacaatcccaacgatgacacaggagatggaaatgtagtttatgcactttctattctacaaaattcatataacccaccaacagtacaatcagactatgttattagaggtcaaccactatggatggcatttcatggcttttggagctggattaaatatttatcaaaagacaaagcattttacacacactatatgtttgttgttcagagccgtgccataaaacccatctcacaaaacacagcacaaaaaagatttgcatttcttgacttatcttttatatctggcaaactaccttttgatgaatatttatctgacaatgaaaagaagctgtggtatccaaaagcacaataccagactgaaactataaattcttttgttcaatctggaccatttatacctaaactttcaaacataccagaaagcacttgggaattagactacaaatataacttttactttaaatggggtggtccacagattacagacagaccagttgacgaccctcaataccaaccagactaccctgttcccggttaccgcacagaagcagtacagatatccaatcccaaaacccttgcgacagaaactctgctccatgaatgggacttcagaaggggcattgttacacacacagctcttaaaagaatgtcagaaaactttgaatctgaaacagatatctactctgatgactcaggaacaccaaaaaagaaaagaaagatcaccaaagaactcccataccaaagaccacagcaagaagccctcaaaacatgtctccaggagctctgcgaagaaaatacctgccaagaaacaccacaaacattacaagagctcatccagcagcagcagcagcagcagcagctcaaacacaacatcctccagctcctcacaaagctaaagaaggaccaacgctttttgggacttcaaacaggccttctagaatgacaccctttaaaaaaggctttgaaatggacacagaaagacagttagcacaagcattcaaaagaccccctagactgtttaaagaagacactcccttttacccctggttacccagaccagtgccccttgttaactttcaccttaattttaagttctaggcctccaaatttcacttagtggtggatgtttatataagtttgcaccccaaaaaaattgtaaaataaaaaaaaaaaaaaaaaaataaaaaattgcaaaaattcggcgctcgcgcgcgctgcgcgcgcgcgagcgccgtcacgcgccggcgctcgcgcgccgcgcgtatgtgctaacacaccacgcacctagattggggtgcgcgcgctagcgcgcgcaccccaatg

SEQ ID NO: 3920 - protein, 664 aa, Gammatorquevirus sp.
MPFWWNRRRKPWYGRWRHRRRFQRYKRRKPRRRFARRRTRRLTRRRRRKRKVRRKRKKINIQQWQPESIVKCKIKGFSTLVLGAEGRQYICWTNEALDYTQPKAPGGGGFGCENITLEWLYHEHRAHNCIWTKSNQYKDLCRYTGCKITLFRHPNIDFIFQYNLQGPFNITKFTYTDIQPQNMLLQPHNRLILSQKTKPHGKLAVKVKIKPPKQMTTRWFFAKEFSEAVLVQLKAVACSFTFPRIAPKAQSQMVTVYYLNESFYPSPIWGQVHPGGYIPISTRTGIYKFSNTKTKPAYSDFTIDTSTFGRGEAGYYASINYSTGFFNAKVLNASKVTINNVEFGSLPLLTARYNPNDDTGDGNVVYALSILQNSYNPPTVQSDYVIRGQPLWMAFHGFWSWIKYLSKDKAFYTHYMFVVQSRAIKPISQNTAQKRFAFLDLSFISGKLPFDEYLSDNEKKLWYPKAQYQTETINSFVQSGPFIPKLSNIPESTWELDYKYNFYFKWGGPQITDRPVDDPQYQPDYPVPGYRTEAVQISNPKTLATETLLHEWDFRRGIVTHTALKRMSENFESETDIYSDDSGTPKKKRKITKELPYQRPQQEALKTCLQELCEENTCQETPQTLQELIQQQQQQQQLKHNILQLLTKLKKDQRFLGLQTGLLE

SEQ ID NO: 3921 - protein, 123 aa, Gammatorquevirus sp.; identical to SEQ ID NO: 1016

SEQ ID NO: 3922 - protein, 109 aa, Gammatorquevirus sp.; identical to SEQ ID NO: 1017

SEQ ID NO: 3923 - DNA, 2763 bp, Betatorquevirus sp.
cagataccgaaggtgagtgaaaccaccggagttaaggggcttattgggctaaagcagtcttggcggaacgggctagaaacttaaaaaatatattattttttaggaatgagctcctacttaactccatcactatacagcaaaaatggcttggaaaaccaaatgatgaactccatttggaacattcacgacctttgctgcggatgcaacaactgctttaaacatatttttgatattcttcaaagaaaaaacaacctgccatgcctcccttcaacttctaccgaagacgctggtacccaaaccggtggagaagaacaagaagatggattcgacgaaggagatttagaccgccttttcgaagaagatttcacagaagaaactgggtaagaagacgccgtttatttactaaaagacataaaaaactaaaaaaactaaaactatcagtatggcaaccaagaactattcataaatgtagaattaaaggactactatgtttaactacttgtggtaaaggaagagtaaatcataattctattttaactatggaaagctatgtacctgaaagcgaacctgggggaggtgcatggtctattttacaagtatcattaagagtattatgggatgaatatactgcttttagaaactggtggacaagtagtaaccaaggcttacctcttacaagatatttaggaggacaactaaaattttatagaagcaaacaaacagactatatagcaattgtaaatacttgccccccatttgatgtaacaagagacatatacctaaacacacaacctagcagagcaattatgcataaacacaaaattattgtacctagattagacagaaaaatataccgaaaaccatatgttaaaaaaaatataaaaccaccagcactatttacaaacaaatggttttttcaaagagaaatatacaaccaaccattttttactgtacaaacttcatgctgttcactagaccaagtatttggcccagacacagaaattaacaccaacctatcctttatatcactaaattgtgacttttttcaaaacccacaatgggcagatttaccagacacaggatacagaccaaaatacacaggcacaagtaacacatacctatttagagctgaaaatggaagctataacggtacaggatacatacaacttacaccactatttaacacaaaaaacataacaaaaggaaaaccattaacaaaaactacatggaaagactttgaacaagaccttaaaaacaaagaatattggggaaacccatttgacccagattacttacactcacacacttactggtacggaccatatccaacagaacaaaattttgaaaatgcaacactagtacaactacatgaagtattcttaacatgcagatacaaccctttcagagacaaatctaaaggaaacaaagtatatttaaaatctacatccttacaacagggcagcatgctatcattaccacaaaacgaacaaattttaatacaagatatgccactatggttaattttttgggcatgggaagactggatagtaaaaagcaaacctgtacaacacttactacaagactaccaaataactatacaaagtaaatatatttacccacctagatcagcatacgtaccactagataaatactttgcagaaaccacacacgaaacaaacctaacagaaacagacaaatcaaactggcatccaaaagtagaaatgcaacaatattccactcaaaacatagcacttacaggaccactatcaccaaaaattactaacactaaatcagtagaaactcatatgtactataaccttcttttcaagtggggaggctgtccagctccaatggaaaacattacagatccagcagaacaagaaacattccccactcccggtaacatcatacaaggacttgaaatccaggatccaaaaaccccagaacaatatacaatttgggactgggatgaaagacgaggaattattacagcaaaaggttcaaaaagaattaaatcagactttgaaacttcaacatattttacagaacatggagcaaaagacccagaaacgcaagcaccgcaacaaaaaatctacgcggcaccaccgcaaacagaaaagacggaggactacatcaaccagctcaagcagctgcagcgagacctcaagcaccgaatccacgagctcctaaaaacaaaaaaattattccctattctgtagacatgtttggagaaaccaaaaataaaaaccgtagactaactgcaaaagaaagggcagatgacttacaagatgcaataatatggggcagatatcctagaacctataaaaatgaatcttacttttacaaagatatgaaccctgaacctcttgtaaacttttcattaaactttaatttctaagccagcaaatattcacttgtcggtgtccatttattaaagttaaacttatataaacatccaccactctccctaatacgcaggcgcacaagggggctccgcccccttaaacccccagggggcaattaatattcaacaggaaaaccacctaattagaattgccgaccacaaaccgtcaaccgttacaataacttccccattttaacacatacttcctgttttacagaccaacgcctactaattcattaataatcagagtcatatcctgggaggagaaacatgagtatataactaagtacactgacgaatggctgagtttaccccgccagacggagacgagacaggacactgactcggctgcttttggg

SEQ ID NO: 3924 - protein, 653 aa, Betatorquevirus sp.
MPPFNFYRRRWYPNRWRRTRRWIRRRRFRPPFRRRFHRRNWVRRRRLFTKRHKKLKKLKLSVWQPRTIHKCRIKGLLCLTTCGKGRVNHNSILTMESYVPESEPGGGAWSILQVSLRVLWDEYTAFRNWWTSSNQGLPLTRYLGGQLKFYRSKQTDYIAIVNTCPPFDVTRDIYLNTQPSRAIMHKHKIIVPRLDRKIYRKPYVKKNIKPPALFTNKWFFQREIYNQPFFTVQTSCCSLDQVFGPDTEINTNLSFISLNCDFFQNPQWADLPDTGYRPKYTGTSNTYLFRAENGSYNGTGYIQLTPLFNTKNITKGKPLTKTTWKDFEQDLKNKEYWGNPFDPDYLHSHTYWYGPYPTEQNFENATLVQLHEVFLTCRYNPFRDKSKGNKVYLKSTSLQQGSMLSLPQNEQILIQDMPLWLIFWAWEDWIVKSKPVQHLLQDYQITIQSKYIYPPRSAYVPLDKYFAETTHETNLTETDKSNWHPKVEMQQYSTQNIALTGPLSPKITNTKSVETHMYYNLLFKWGGCPAPMENITDPAEQETFPTPGNIIQGLEIQDPKTPEQYTIWDWDERRGIITAKGSKRIKSDFETSTYFTEHGAKDPETQAPQQKIYAAPPQTEKTEDYINQLKQLQRDLKHRIHELLKTKKLFPIL

SEQ ID NO: 3925 - protein, 92 aa, Betatorquevirus sp.; identical to SEQ ID NO: 3913

SEQ ID NO: 3926 - protein, 58 aa, Betatorquevirus sp.; identical to SEQ ID NO: 3914

SEQ ID NO: 3927 - DNA, 2763 bp, Betatorquevirus sp.
cagataccgaaggtgagtgaaaccaccggagttaaggggcttattgggctaaagcagtcttggcggaacgggctagaaacttaaaaaatatattattttttaggaatgagctcctacttaactccatcactatacagcaaaaatggcttggaaaaccaaatgatgaactccatttggaacattcacgacctttgctgcggatgcaacaactgctttaaacatatttttgatattcttcaaagaaaaaacaacctgccatgcctcccttcaacttctaccgaagacgctggtacccaaaccggtggagaagaacaagaagatggattcgacgaaggagatttagaccgccttttcgaagaagatttcacagaagaaactgggtaagaagacgccgtttatttactaaaagacataaaaaactaaaaaaactaaaactatcagtatggcaaccaagaactattcataaatgtagaattaaaggactactatgtttaactacttgtggtaaaggaagagtaaatcataattctattttaactatggaaagctatgtacctgaaagcgaacctgggggaggtgcatggtctattttacaagtatcattaagagtattatgggatgaatatactgcttttagaaactggtggacaagtagtaaccaaggcttacctcttacaagatatttaggaggacaactaaaattttatagaagcaaacaaacagactatatagcaattgtaaatacttgccccccatttgatgtaacaagagacatatacctaaacacacaacctagcagagcaattatgcataaacacaaaattattgtacctagattagacagaaaaatataccgaaaaccatatgttaaaaaaaatataaaaccaccagcactatttacaaacaaatggttttttcaaagagaaatatacaaccaaccattttttactgtacaaacttcatgctgttcactagaccaagtatttggcccagacacagaaattaacaccaacctatcctttatatcactaaattgtgacttttttcaaaacccacaatgggcagatttaccagacacaggatacagaccaaaatacacaggcacaagtaacacatacctatttagagctgaaaatggaagctataacggtacaggatacatacaacttacaccactatttaacacaaaaaacataacaaaaggaaaaccattaacaaaaactacatggaaagactttgaacaagaccttaaaaacaaagaatattggggaaacccatttgacccagattacttacactcacacacttactggtacggaccatatccaacagaacaaaattataaaagtgcaacactagtacaactacatgaagtattcttaacatgcagatacaaccctttcagagacaaatctaaaggaaacaaagtatatttaaaatctacatccttacaacagggcagcatgctatcattaccacaaaacgaacaaattttaatacaagatatgccactatggttaattttttgggcatgggaagactggatagtaaaaagcaaacctgtacaacacttactacaagactaccaaataactatacaaagtaaatatatttacccacctagatcagcatacgtaccactagataaatactttgcagaaaccacacacgaaacaaacctaacagaaacagacaaatcaaactggcatccaaaagtagaaatgcaacaatattccactcaaaacatagcacttacaggaccactatcaccaaaaattactaacactaaatcagtagaaactcatatgtactataaccttcttttcaagtggggaggctgtccagctccaatggaaaacattacagatccagcagaacaagaaacattccccactcccggtaacatcatacaaggacttgaaatccaggatccaaaaaccccagaacaatatacaatttgggactgggatgaaagacgaggaattattacagcaaaaggttcgaaaagaattaaatcagactttgaaacttcaacatattttacagaacatggagcaaaagacccagaaacgcaagcaccgcaacaaaaaatctacgcggcaccaccgcaaacagaaaagacggaggactacatcaaccagctcaagcagctgcagcgagacctcaagcaccgaatccacgagctcctaaaaacaaaaaaattattccctattctgtagacatgtttggagaaaccaaaaataaaaaccgtagactaactgcaaaagaaagggcagatgacttacaagatgcaataatatggggcagatatcctagaacctataaaaatgaatcttacttttacaaagatatgaaccctgaacctcttgtaaacttttcattaaactttaatttctaagccagcaaatattcacttgtcggtgtccatttattaaagttaaacttatataaacatccaccactctccctaatacgcaggcgcacaagggggctccgcccccttaaacccccagggggcaattaatattcaacaggaaaaccacctaattagaattgccgaccacaaaccgtcaaccgttacaataacttccccattttaacacatacttcctgttttacagaccaacgcctactaattcattaataatcagagtcatatcctgggaggagaaacatgagtatataactaagtacactgacgaatggctgagtttaccccgccagacggagacgagacaggacactgactcggctgcttttggg

SEQ ID NO: 3928 - protein, 653 aa, Betatorquevirus sp.
MPPFNFYRRRWYPNRWRRTRRWIRRRRFRPPFRRRFHRRNWVRRRRLFTKRHKKLKKLKLSVWQPRTIHKCRIKGLLCLTTCGKGRVNHNSILTMESYVPESEPGGGAWSILQVSLRVLWDEYTAFRNWWTSSNQGLPLTRYLGGQLKFYRSKQTDYIAIVNTCPPFDVTRDIYLNTQPSRAIMHKHKIIVPRLDRKIYRKPYVKKNIKPPALFTNKWFFQREIYNQPFFTVQTSCCSLDQVFGPDTEINTNLSFISLNCDFFQNPQWADLPDTGYRPKYTGTSNTYLFRAENGSYNGTGYIQLTPLFNTKNITKGKPLTKTTWKDFEQDLKNKEYWGNPFDPDYLHSHTYWYGPYPTEQNYKSATLVQLHEVFLTCRYNPFRDKSKGNKVYLKSTSLQQGSMLSLPQNEQILIQDMPLWLIFWAWEDWIVKSKPVQHLLQDYQITIQSKYIYPPRSAYVPLDKYFAETTHETNLTETDKSNWHPKVEMQQYSTQNIALTGPLSPKITNTKSVETHMYYNLLFKWGGCPAPMENITDPAEQETFPTPGNIIQGLEIQDPKTPEQYTIWDWDERRGIITAKGSKRIKSDFETSTYFTEHGAKDPETQAPQQKIYAAPPQTEKTEDYINQLKQLQRDLKHRIHELLKTKKLFPIL

SEQ ID NO: 3929 - protein, 92 aa, Betatorquevirus sp.; identical to SEQ ID NO: 3913

SEQ ID NO: 3930 - protein, 58 aa, Betatorquevirus sp.; identical to SEQ ID NO: 3914

SEQ ID NO: 3931 - DNA, 2762 bp, Betatorquevirus sp.
cgggagccgaaggtgagtgaaaccaccgtagtctaggggcaattcgggctagatcagtctagcggaacgggcaagaaactaaatataattttattttttaggtatgagttctatctggaaacaaccaacatcatcactgagacagaaagaattagcatggagaaacattatgtttcaaacccatgatacctggtgccactgcgataatgtcgaccttcacatgctaatttgtatgaataaattcagcggattccaaaaaccagaaattgacataaggaatatacaatgcctccttaccggtcctactggcaaagaagatactggcaaagacgaagaaacagacgcggctggttttctaaatggagagctagaagatttattcaaagaagaagataccaaagaagaagaagacgtagaccctacaaggtaaaaaaacgaaaacttaaactaaaaaagactaaactaattttgaaacaattccaaccacagactattaacagatgtaaaattgttggttataaatgtttgtttcaaggtagcccagacagatctagcaaaaattatattcaatatatatacagtattgtacctcctttttggccgggagggggaggttggagcttgcttgtatttagccttgaaagcctttttgaagactataaccatttacaaaatatatggactagaagtaatgctggactaccacttgttagatttttaggatctcgttttaaattttatcaatcagcagacacagactatattgtatcttatgacagatgctggcccatggtagacacacaacacacacacgcagactcctgtccttctcgaatgatacaaaaaagacataaaatagtaattccatcactaaaaactaaacgcagacgtagaccatacaaatcaaaatttataaaaccacctactcaaatgcaaaacaaatggtactttcaaagagacatttgtaaaataccattattaatgttaacaagtactgcagtagacttaagatatcctttttgtgcacctgaagcaaaaagcaactgtataaccattagatgcttaagcacctttctttttcaaaatcctgactttgcccactatccacaaactacaggatactggccaaaaaaaggaaacaaaaatgaaaaactatatctatatgcatccccagaaagaaaaccaaccttttcacaaagtgacataaaaaatttaatacctttatttaatactaaaaattaccaaccaggtacacctataggacacacaagttatgcagacaatgaacagcattggggaaaccctttttactatgcctacattaatgatactaaaacagattcaacatatttcttatatttatcaaaagaccatagttccacaataaaaacacagaattatgacccaagaaacttaactttcactgaagtaacaggcccaacaatatatgacgttagatacaatccagaaaaagacactggagaaaaaaataaaatatacttagtaagcaatggctctactgaaactatagcaccaccagaaaacccaaattattactttgacggctttccattatatatactactatggagctggacagactggataaaaaaactaaaagacacaccagacatagacaaataccaaatattagttatagatactgatcaatttgacactactctaccacattacataccaatagacatagactttactgaaggttttgatccatacacaccaaataaagacaacccacaagtaccacatcatccaaacatttataactcactcaattggcacccaaaactactattccaacagcaaatgatagaaaaaatatgtagaagtggacctgcatgtactagaccagactataatcactatttacaagcatactgtaaatatgagttctactttaaatggggtggctgcccaaaacaattacaaaaagcatatgatccttgcttacagtccaaatggaccacagccgataacttgtctacaagacttgaaattacgaatcctcaaagaccaccagaactcgaactatactcctttgactgggaaaaagactatgttgaacaaaaagctattgaacgaatacaatactacacagaaattgatgaaacaaatatctcatctacaggaaacaagagcaacccaccacccctcaaaaaaatccaagaaaaagacacatcagcggaaaaagaagagaaaacactgtacaagcagctctgccagctcagacagcgaagactcctcctcgagctccagctccagcaactaacaaatacacaataaaaaactgtacaataaaagttaaactcttcgaagacaaaaaaccaaaaaatagactattcacaccatgggaagctcaagaagaaaaagaaatatcacaaatatttcttagaccccaaagaaaatatttctatgactttcctacctatcctatctttccaccaacccctaaaataccaaaagttaactttgacttaatgtttaaagaataaaaaataaaggccgacaaatttcacttagtggtgtcagtttatttaaattaaaactttaataaacatccgtcacctccctatcaatagggcgccaaaattcaaagggggctccgccccctttaacccccaagggggctccgccccctacaacccccaagggggctccgccccctacaacccccaagggggctccgcccccttacacccccttattgatattcaacaggaaaaccacctaattaaaatggg

SEQ ID NO: 3932 - protein, 672 aa, Betatorquevirus sp.
MPPYRSYWQRRYWQRRRNRRGWFSKWRARRFIQRRRYQRRRRRRPYKVKKRKLKLKKTKLILKQFQPQTINRCKIVGYKCLFQGSPDRSSKNYIQYIYSIVPPFWPGGGGWSLLVFSLESLFEDYNHLQNIWTRSNAGLPLVRFLGSRFKFYQSADTDYIVSYDRCWPMVDTQHTHADSCPSRMIQKRHKIVIPSLKTKRRRRPYKSKFIKPPTQMQNKWYFQRDICKIPLLMLTSTAVDLRYPFCAPEAKSNCITIRCLSTFLFQNPDFAHYPQTTGYWPKKGNKNEKLYLYASPERKPTFSQSDIKNLIPLFNTKNYQPGTPIGHTSYADNEQHWGNPFYYAYINDTKTDSTYFLYLSKDHSSTIKTQNYDPRNLTFTEVTGPTIYDVRYNPEKDTGEKNKIYLVSNGSTETIAPPENPNYYFDGFPLYILLWSWTDWIKKLKDTPDIDKYQILVIDTDQFDTTLPHYIPIDIDFTEGFDPYTPNKDNPQVPHHPNIYNSLNWHPKLLFQQQMIEKICRSGPACTRPDYNHYLQAYCKYEFYFKWGGCPKQLQKAYDPCLQSKWTTADNLSTRLEITNPQRPPELELYSFDWEKDYVEQKAIERIQYYTEIDETNISSTGNKSNPPPLKKIQEKDTSAEKEEKTLYKQLCQLRQRRLLLELQLQQLTNTQ

SEQ ID NO: 3933 - DNA, 2762 bp, Betatorquevirus sp.
cgggtaccgtaggtgagtgaaaccaccgaagttaaggggcaattcgggctgggttagtctagcggaacgggcaagaaactaaaatattttattttacagaatggaactctggaaacctactccatacggacccaacagaagagaattaaattggctaaactcctgtatatctatacacgataccttctgcggctgtgacgaaccaggagaccacctcttactactattagctaaaaaatcaggatacttctccatcacaccaaaagcccttaaagaggcaacaaaatgccttacttttggagaagaccatactactcccgctggaaaagatggagacgaccaggatattggaatagacgcaggagacttagaactacttttcgcagaccacgaagaagaagaacaagataccgggtaagacgcataattcctaaaaaatataagactattaaacttaaagaatggcaaccaaagactataagacgctgtagtatcataggacatataccacttgtactatgtggacgcggacgacaagtaaataactttatgcagtactttgactcttacgtaccggtagacaaaccgggagggggaggatggtcaagcatagtatttaacttgggaggactatatcaacaatttcaaaaactactaaactggtggacacatgacaatgacggactgccacttgttagatacttaggatccgactggaaattttacagatcatgggacacagactacatagtcacagcacagacatgcccaccaatgacagacacagaattcaaacacttaaactcacacccatacagacaactcatgaacaaacaccccatagtagtgccaaacctagtacgacatcaatacaaaaaacaatacgtaagaaaacattttccaccaccttcactactacaaaacaaatggtactttcaacaagacctatgtaacacaaacctcttaatgctcacaacatcagcatgtagcctagatcaattttggatacctaacaatgaactctccaacaacataaccttttattgtcttaacacaaacatatttgcaaacccaaatttcttacaaaatggaacaagaggttacaaccccaaatccacaatgatattatggggacaaggaaacggctcagaacccgaaaaattttcacaactaatatacctaggaaacctaaaaacctttaaaaaaggtgaaccagaaacatcaggaaacccaccaggctcagcaaacaaatggggaaacccatttcacggtgaccatggttcacaagacacaaaaatttactatagcacacaaatgccagaatcatttaacacactaacaaaaggaaaaataacagaagcagaacacatatttcaacaatgtagatacaacccactaaaagacacaggcctcggaaacgtagtattttttaaatctgtttccataagcacaggaaacatttgggacacacccaaagacccttcaataacaatatcaggctttcccttatggttaatcttttggggatggacagactggatacaaaaacttaaaccaatacaacaaatagacttaaactactacatagtaataatatcagactttattcaccctaaaatgcacggatatgtaccattagatcaccactttgtttttccagacataataaacttagatgacaatgacaaacaacactggcatcccagattcaaataccaacaagaaacactaaaccaaataggcatatcaggcccagcaacacctaaagtaaacaaatcacaatccatccaagttaatgcactgtataaatttcgttttaagtggggaggatgcccagctccaatgcagaacatcaaagacccatgtcaacaacccaaattccccgtgcccggtaacctcctacaaacaatacaaatccatgatccagcagaagacaaacaaacaacactctcagactttgacgaacgacgacaacaacttacaactacagctgcaaaaagaattaaaaaagctaaagacagtaaaacacctttattcccagatctcttcaacccacaaatccaattcgaggaaacatcagagacatcatccgaggaagaagaggaaacacaacaaacattctcccagcagctcatcagaatcaagcgacagagactctacctcctcagaaagctcaacaaactaagctcccatgcataaaccaagcttttctgtttaaacctaaaataaaaacccttacacgcatacatccctatgttagcaaatgggcttgggaaaatgaaaaagaccttgctaaaatatttaggagaccaatgagaacctttgaagaagaccccccaacttatccctggttacccccaacgcctcttgtacaatttaaccttaatttcaaagaataaaggccaacaaatttccaccctcggtgtctgtttctttaagttaaaccttaataagcaaactccgcctccccacactgttggccaagggggctccgcccccttgaacccctgggggggggcaaagcctttgaagaagacccccccaacttcctgttttcacaggaaaccacataatttgcattgccgaccacaaacgaatatgctaattaacttccccaaaaacaataacacctcccataaattaattattaaacaccgtcacagaaggaggagcctacaacctatataactaactacacttccgaatggctgagtttatgccgctagacggaggactgaatacaattcaggactaacacaggg

SEQ ID NO: 3934 - protein, 637 aa, Betatorquevirus sp.
MPYFWRRPYYSRWKRWRRPGYWNRRRRLRTTFRRPRRRRTRYRVRRIIPKKYKTIKLKEWQPKTIRRCSIIGHIPLVLCGRGRQVNNFMQYFDSYVPVDKPGGGGWSSIVFNLGGLYQQFQKLLNWWTHDNDGLPLVRYLGSDWKFYRSWDTDYIVTAQTCPPMTDTEFKHLNSHPYRQLMNKHPIVVPNLVRHQYKKQYVRKHFPPPSLLQNKWYFQQDLCNTNLLMLTTSACSLDQFWIPNNELSNNITFYCLNTNIFANPNFLQNGTRGYNPKSTMILWGQGNGSEPEKFSQLIYLGNLKTFKKGEPETSGNPPGSANKWGNPFHGDHGSQDTKIYYSTQMPESFNTLTKGKITEAEHIFQQCRYNPLKDTGLGNVVFFKSVSISTGNIWDTPKDPSITISGFPLWLIFWGWTDWIQKLKPIQQIDLNYYIVIISDFIHPKMHGYVPLDHHFVFPDIINLDDNDKQHWHPRFKYQQETLNQIGISGPATPKVNKSQSIQVNALYKFRFKWGGCPAPMQNIKDPCQQPKFPVPGNLLQTIQIHDPAEDKQTTLSDFDERRQQLTTTAAKRIKKAKDSKTPLFPDLFNPQIQFEETSETSSEEEEETQQTFSQQLIRIKRQRLYLLRKLNKLSSHA

SEQ ID NO: 3935 - protein, 105 aa, Betatorquevirus sp.
MELWKPTPYGPNRRELNWLNSCISIHDTFCGCDEPGDHLLLLLAKKSGYFSITPKALKEATKCLTFGEDHTTPAGKDGDDQDIGIDAGDLELLFADHEEEEQDTG

SEQ ID NO: 3936 - protein, 62 aa, Betatorquevirus sp.
LFKPKIKTLTRIHPYVSKWAWENEKDLAKIFRRPMRTFEEDPPTYPWLPPTPLVQFNLNFKE

SEQ ID NO: 3937 - DNA, 2760 bp, Betatorquevirus sp.
cgggtgctgaaggtgagtgaaaccaccgaaatcaaggggcaatatgggctgaattagtctagcggaatgggcaactgtcttaatattttgcagatgtcaaaattatggacacctccacaatacggacctaaaggattagaactacaattctacaacggattatttcacctccacgaccttcactgcggctgtaaacaacccattacacatatcctttcacaaatagcaattcaatctggaaatacaaaactttccttacatcaaattaaaaaaataaaatgccgccttactggagaagatggcgacgaagaagaagaaactattacacctggagacctagaagagcttttcaaagaacctttcaacgcagaagacgacgatggagaaaaagatactgggtaagcaaaaaaagaaaattaagaactattaaagtaaaagaatatcaaccaaaaactataagatactgtaaaattaaaggactaaaatgtttatttcaaggaagctgtatgagaaaaagtaataattactggcaatatcctagaactatttttccagaaaaatttccgggaggagggggatggggactgcaagtaatgagtttagacagcctatatgaagactggaaatatttacagaatgtttggactaacagcaatgcaggcctaccactagttagactgctaggcatatcattaacattttatcaagaaccagatgtagactatgtagtacaaatctataactgctggccaatggtagatagcagcctacaacatgcaaacacacatccacaaagaatgttattaggaaaacacaaattaataatgccaagcattaacacaaaaccactaaagcgcagaaaaaagaaaaaatttatatatccacctccacaaatgcaaaacaaatggtactttcaaaaagacatttgcaccacaaaattcatgatgatagccgctacagcctgtgacttatcatattattatttaggaccaacatcagaaagcaacaatataacactttggacattaaacacaaatctatttagaaacgcagacttccaacatccttcacaaacaacaggctatcaacctagaaacaactactacctatatgcttcaaaaaatggaggaggaacaccaacaagcaaacaacaattagtatacttaggagacacaagaaactacaaacaaggaaccggtatgacaaaagaagaatggggaaacccattttggacacattattttggttctatcccacaatacacaagttctgagccaccaacaagtaacaaatggaacgaacccaacatatctaaatacttaacagaggtacataaccctccatttgtaacaataagatataatccagacaaagatgacggttccacaaacaaagcttactttataagcaataacagaacatcaggagacaaatcctttgatccaccaacagacgcctcacttattattgaaggcctaccactcccaataatgctttggggatgggcagactggatgaaaaaactagcccttatacacagaatagacaaagaatacatacttgtaattcaaacagacaaattttcagaaaaatttccatactacatattaatagacgatagctttacacaaggcctaggcccatatgacacagaaaaaacaacagaagacgaacttaactggtacccaaaattttggtaccaacaaaaatcaatagaaacactttgcacttgtgcagcaggcgtaaacagactacctgactctagatctatacaagccaaatacaaatacacagttcatttaaaatggggaggatgccctgcagtactagaaaaagcttatgatccttgttcacagccaaagtgggccatacccgatacaatcgcatcaggatttcaaatccagaatccaagcaatgaccccagcaacttgttctacaactgggacgttaggagagacattatcacgcaaaaagctattgaaagagtatcaaaagacagagaaactgatacaatgtgctctcaaacaggatgcgcaagcgaccctccagtactactccaaacactccaagaaagctccaacgaaacatcgtcagaggaagaaacggaaacaccactccaaaaaaagctcctcagactcagaaagcgacacaagcaactactccagcagctcctccgactaaaaaccacacaaacttaatatgtgtacataaagtacaattatttcctccaaaaaaaccaaaaaacagacgctttacacaggcagaaatggaagatgaaaaatatatagcttcttggttaaaaagaccccaaagacactttttttacgaccccccaacatatccctggctgccaccagagccatatgtaaactttgacctaaactggaaaaaataaaggccaactaatttcacttaatagagtctgtttctttaattttaaactataacaaacatccaccacccaataaaactcgttggcgccaaaagggggctccgccccccttatacccccagggggctccgccccctaaaacccccaagggggctccgccggaaaccacaaaattagaattgccgaccacaaacgaatatgctaattaacttcccaaaactgcccttttacttccctaaaaattaattaataaacagcatcacacggggaggagtcacaccactatataactaacagtaccgacgaatggctgagtttatgccgctagacggagagacgatcacaccgcgatcggcgctaattcaggg

SEQ ID NO: 3938 - protein, 639 aa, Betatorquevirus sp.; identical to SEQ ID NO: 3264

SEQ ID NO: 3939 - protein, 111 aa, Betatorquevirus sp.; identical to SEQ ID NO: 3265

SEQ ID NO: 3940 - protein, 121 aa, Betatorquevirus sp.; identical to SEQ ID NO: 3266

SEQ ID NO: 3941 - DNA, 2758 bp, Betatorquevirus sp.
caggtaccggaggtgagtgaaaccaccgtagttaaggggcaatatgggctgaagcagtcttggcggaccgggcaagaaacttaaaataatatattattttacagatatgagcagctttcttactccttgtgtatactctggaaaaagcctagaaaatcaatgggtaaacagcatttataactgccacgacttattctgcggctgcaacgacgccattaaacatctggcatccattttacaaacaaaacaactatgcctcccttcaacttctaccgccgaagatggtactcaaactggccctacaaaagaagaagatattttagaagaaggagacctagacaaactattcgaagaaaatttcgacgacgattccgggtaaggagacgacgccgccgctttaaaagacataaaaaactgttaaaactaagacttaatcaatggcaaccaaaaaaaattagaaaatgtactattgaaggactattatgtactgtacaatgtggcaggggtaaaattaaccataattttactttagaccaagaactatatgttaatgaaggagaaccgggagggggatcatggtctataatgcaagtaactttaagagttttatatgaagaatacttagcatgtagaaactggtggacagcaggaaaccaaggcctacctttagtgagatatttaggaggctacataaaactatacagaagccaacaaacagattacatagctaccataaacacttgtccaccattcgaagttaccagagactcatactttggcacacaaccaagcagactaataatgaataaatacaaaattatagtaccaaaactatctagaacacactttaaaaaaccatatattaaaaaaagaatctggccaccatcacttttccaaaacaaatggtacttccaaaaagatctatataaccaaccattattcatgataacaacttcatgttgctcactaggacaagtattttcaagagaagacgaaataaacagtaatataacacttactagcctcaatacagactttttccaaaatccacaatggggtgacttacctatactaggatacagaccaaaatactcaggagaaacaaacacatatttatatgtggcacacaatggcaacgacacagtaaaaggttaccacaaattaattccactattacaaactaaaaaattagcaaatggaaaagaactaccagacaatacaacagatatatttgaaatggtaggaacacaaaaaaaaataaaagaagaatactggggaaacccatttaatccaaaatatttacattcacacagatatgtatatggaccatacccaacatcagaaaattataccactgcaatattaacacaactacatgaagttttttttaaaataagatacaatccattcagagataaaggaaagggcaacaaaatttacataaaatcaacatcactaccacaaagttcatttatggtactacccacaaatgaaaacctactagtagaaaaccttcccatatggctagtactatatgcatgggaagattggcttataaaaagcaagccagtacaacacttatatcaagactatcaattagtaatacaaacagactatttttatccaaagagacaatgctatgttatattagacaaatacttttacgatgcaataaacgattcagaacaccctctaactgaaacagacaaagctaactggcatccaaaactagaaatgcaagaatatagcacagaaaaactagcatcaacaggaccactagcacctaaaataaatttcactaaaaacatagaaactcacatactatataaacttttttttaagtggggaggatgcccagcaccaatggaacaaattacagacccagcagaccaagaaaaattccctacgcccagtaacttcataccaacaattgaaatccaggatccagaaacaccagaacaatacacactatgggaatgggatgaaaggagagatatgctcacaggaaaggctgcaaaaagaattaaactataccaagaacctacaaactattttacagaatatggagcaaaggatccagaaacgcaaacaccgcaaacaatcagcttccaagcaccggaaaagggcgaaaaagacgagaaggagtacatctccgagctccagcagctgcagcgagaactcaagcagcgaattcacagactcctaaaaaacccaaaattattccccttttaactgatatgtttggtgataaagtaaagaaaaaccgtagatttaatagtaaagaatttgctgatgagctcgaggaagctcgcatatggaaaagacgccccagattgtatatatttgataagcctgattatgatacttctattattgaaccaattgtaaacttttcattaaactaccatttctaggccagcagtaattcacttgtcggtgtccatttatttaagttataacctatataaacatccaccacactccctaatacgcaggcgcacaagggggctccgccccctaattaatattcaacaggaaaaccacctaattagaattgccgaccacaaactgtcaaccgttaccagtacttctgctttttacacttaacttcccctttttaaggccacacctacctacttcattaataatcagacgctattcctgggaggagactactatctatataacaaagtgcacagacgaatggctgagtttaccacgccagacggagacgacaaacttgtcggctgcttcaggg

SEQ ID NO: 3942 - protein, 659 aa, Betatorquevirus sp.
MPPFNFYRRRWYSNWPYKRRRYFRRRRPRQTIRRKFRRRFRVRRRRRRFKRHKKLLKLRLNQWQPKKIRKCTIEGLLCTVQCGRGKINHNFTLDQELYVNEGEPGGGSWSIMQVTLRVLYEEYLACRNWWTAGNQGLPLVRYLGGYIKLYRSQQTDYIATINTCPPFEVTRDSYFGTQPSRLIMNKYKIIVPKLSRTHFKKPYIKKRIWPPSLFQNKWYFQKDLYNQPLFMITTSCCSLGQVFSREDEINSNITLTSLNTDFFQNPQWGDLPILGYRPKYSGETNTYLYVAHNGNDTVKGYHKLIPLLQTKKLANGKELPDNTTDIFEMVGTQKKIKEEYWGNPFNPKYLHSHRYVYGPYPTSENYTTAILTQLHEVFFKIRYNPFRDKGKGNKIYIKSTSLPQSSFMVLPTNENLLVENLPIWLVLYAWEDWLIKSKPVQHLYQDYQLVIQTDYFYPKRQCYVILDKYFYDAINDSEHPLTETDKANWHPKLEMQEYSTEKLASTGPLAPKINFTKNIETHILYKLFFKWGGCPAPMEQITDPADQEKFPTPSNFIPTIEIQDPETPEQYTLWEWDERRDMLTGKAAKRIKLYQEPTNYFTEYGAKDPETQTPQTISFQAPEKGEKDEKEYISELQQLQRELKQRIHRLLKNPKLFPF

SEQ ID NO: 3943 - protein, 90 aa, Betatorquevirus sp.
MSSFLTPCVYSGKSLENQWVNSIYNCHDLFCGCNDAIKHLASILQTKQLCLPSTSTAEDGTQTGPTKEEDILEEGDLDKLFEENFDDDSG

SEQ ID NO: 3944 - protein, 58 aa, Betatorquevirus sp.
MFGDKVKKNRRFNSKEFADELEEARIWKRRPRLYIFDKPDYDTSIIEPIVNFSLNYHF

SEQ ID NO: 3945 - DNA, 2756 bp, Betatorquevirus sp.
cgggtgccgaaggtgagtgaaaccaccgaagtcaaggggcaattcgggctagatcagtctggcgaaacgggcaagaaacttaatttaactttattttacagatgtcaagctgttataaaccaactttttataacacacaaagaaaacaaaaccaatggattaatgacattcactgcacccacgacctctggtgtagctgcgaccacacaattaaacacctacttctagcaattgcagaaaaagaagaaataattcctgtaacaacagaacaaaaaagaaatatactaaaatgcctttctactacagaagaccttattacagataccgtcgacaaaggagatatagacgagctcgccttagacgctattttcgcagaagaccttacagaagatactgggtaagcaacccttataacaaactaactttaaaacaatggtcaccaccatttaaaaagacttgctatataaaaggacaatgttgtattatatactataacaatgaaagacttggatggaactccactatgtatgaaaaaagtactgtaccatttcattggccgggagggggttcttttagtgtaagtcaatatacattagatgtattatttgatatgcataaaacttgtagaaactggtggacaggaagtaatgaagacttaccactgtgtagatataaaggttgtgaacttaagttttatcaatgtaattatgtagactatattgtaaaagttataaatgaactaccagcaaacagtaacaaacttacatacccatccacacaaccaaatataatgctaatgtctcaaaacaaacacataatagcaagcaaacaaaacagaaaaaagagaaaaccatacacaaaactaaaagtaccaccaccaccacaatttcaaaacaaatggtactttacaacagacttatacaaaataccacttatgcacatacatgcaacaacagcaaacctaactaatccatatgtaaaaccccaaaacctttcaaacaacataacattttggggaataaacacacaatcaatacaaaacaaagcatttaacacacaagacacattttggccattcaaaaaattaggcactttacaacactacttttactttcatgctcatggcacagaagacaaatcagaagattttaaaatagcagacttaataccacttacaaaccccacaaaaaacacacatggatttgcatttaatgacctcccaccaggaagcagaggagacataaaaaattatatagacaaatgggaaaactacgcaggaaacccattttataaagacataaacgaacacatagaagacatatactactcactaagatcaccccaatacataaaatctaaaaaagattccataacagaaactacaaaatggaaagacataaacgaatcagcatcaccaaatgttttaacaccatttaatgaaccaatattcataccttttcaatacaacccagaaaaagacacaggagaagacacagaagtatacttagtaaataacagagacggacatggatgggaaaacccaggaataccagaaataacattatctggctttcccctttggataattctctggggatacatagactttcaaaaaaacttaaaaaaagcaattaacatagacacagaatacataatggtctttaaatctaaatacacacaaagaccaaaagcatacccaattgtaataataaatgaatcattcatacaaggtaacagcccatatgaaaataaaccactaccagaagatgaaacaaaatggtttccaatggtacaataccaaacacaagaacaaaataaaatactatcagtagggccctttgcacctaatagtatacaatgtaaaagtgataatgtttgtatgttttacaaatttaaattcgaatggggaggaaccccacctaaacatattactattgaaaatccaacccaccagatacaatatcccgtgcccagtaacgagcatgaaacaaattcgttacagaatccagggcaagccccagaatcaatcttatactcattcgacttcagacacggggactacacaacagcagctttatcaagaattactaaagactggccaattaaagaaactgtttctacacttgcagaaccaacaaaaagacaacttctacagcaagcattccagtacctacaagacagcgaggaaacccaggagaaaaaagaaaaagagatgcagaacatcatcaaccagctcagaaaccagcagcagctctacagacagcaaataatagaattgacaactcaaatgtaaactttgtatgtattaaaaaagtaaaattgtttgaaactaatgatacaaaaaaccgtagatttacaaaagaggaatttgtaacagaactagaattaagctcatggatgaaaagaccccctagacactttgtaaaggaccctccattttacccctggttgccaccagaaccacttgtaaatcaaccaattgtaaactttgaccttaattatcaataaacaaggccagcaaatattcacttagtggagtctgtttattaaattttaacttatataaacggtcaccgcctccctaatacgcaggcgcacaagggggctccgcccccttaaacccccaagggggctccgcccccttaaacccccaagggggctccgcccccttacaccccctaataaatattcaacaggaaaaccactgccgccagacgaagacgggatcacttcagtgactccaggctgatcttggg

SEQ ID NO: 3946 - protein, 667 aa, Betatorquevirus sp.
MPFYYRRPYYRYRRQRRYRRARLRRYFRRRPYRRYWVSNPYNKLTLKQWSPPFKKTCYIKGQCCIIYYNNERLGWNSTMYEKSTVPFHWPGGGSFSVSQYTLDVLFDMHKTCRNWWTGSNEDLPLCRYKGCELKFYQCNYVDYIVKVINELPANSNKLTYPSTQPNIMLMSQNKHIIASKQNRKKRKPYTKLKVPPPPQFQNKWYFTTDLYKIPLMHIHATTANLTNPYVKPQNLSNNITFWGINTQSIQNKAFNTQDTFWPFKKLGTLQHYFYFHAHGTEDKSEDFKIADLIPLTNPTKNTHGFAFNDLPPGSRGDIKNYIDKWENYAGNPFYKDINEHIEDIYYSLRSPQYIKSKKDSITETTKWKDINESASPNVLTPFNEPIFIPFQYNPEKDTGEDTEVYLVNNRDGHGWENPGIPEITLSGFPLWIILWGYIDFQKNLKKAINIDTEYIMVFKSKYTQRPKAYPIVIINESFIQGNSPYENKPLPEDETKWFPMVQYQTQEQNKILSVGPFAPNSIQCKSDNVCMFYKFKFEWGGTPPKHITIENPTHQIQYPVPSNEHETNSLQNPGQAPESILYSFDFRHGDYTTAALSRITKDWPIKETVSTLAEPTKRQLLQQAFQYLQDSEETQEKKEKEMQNIINQLRNQQQLYRQQIIELTTQM

SEQ ID NO: 3947 - protein, 99 aa, Betatorquevirus sp.
MSSCYKPTFYNTQRKQNQWINDIHCTHDLWCSCDHTIKHLLLAIAEKEEIIPVTTEQKRNILKCLSTTEDLITDTVDKGDIDELALDAIFAEDLTEDTG

SEQ ID NO: 3948 - protein, 62 aa, Betatorquevirus sp.
LFETNDTKNRRFTKEEFVTELELSSWMKRPPRHFVKDPPFYPWLPPEPLVNQPIVNFDLNYQ

SEQ ID NO: 3949 - DNA, 2748 bp, Gammatorquevirus sp.
cgggagcccgaggtgagtgaaaccaccgaggtctaggggcaattcgggctagggcagtctagcggaacgggcaagaaacttaatatatacttttttttatagatgcaaaatatttctgctgaagacttttttaaaccaacaaactttaacaatacaactaaaaatcaactatggatgtccataattgctgattcccatgacagtctctgcaactgctggcatccttttgctcatatgcttgctagtctttttcctcctggccatcaagataggaataaaaccattgaacaaatactgcaaagagactttgctgaaacatgccattctggtggagaagaaggagaaagttctggggcggcaggtggaggaaacccagatacaacaaatataaaagaagaagaaaaccaagaagaagatatagacgcacttatggccgccgccgccgccgccacagaaaaagaagatacaaggtaagaagaaaaagaaaagctattgttttaaaacaatggcaacctgacagcattagaaaatgtaaaattaaagtaattgactcttttataataggagcacacggcacacaatttaaatgctatacaaatgaagctaaaaaatatccacagcctaaacaaccagcagggggtggttttgggatggaagtcttttctttagaagacttatatcttagatataaagctcataaaagtatatggacagcaacaaatgactataaagacctagtaagatacacaggctgtacatttactttttatagacatgcaacaacagactttatattaagctttaacacacagcccccatttacattagataaattctcatatacatcaatacatccactaaacatgctacttcagaaacataaaaaaattttatatagcttaaaaacaaaaccatggggtccctccaaagttaaatttaaaattaaacctccaaagcaaatgtctactaaatggtttttccaaaaattttttgctactgcaggcctagttgaaataaaagccactgctgctgactttaacttttcatacatacaaaacacaagtgtaaacaccaacttatccatagtgtatttaaacactgcattttaccaactaagcaactggggtaaattccttggtgcaagtcattacaaaccttatgccacaataaatgaaaaattatactactggttcaaatcaggaaaccaaacaaaacacatacaagttaaacatgaaaactactatgagtcagttaactacgcaacaggctactttcaaacaggagttttaaatgcaataaaaattacagtaacacctgaaattactgctcaatctgcacaagcacacttaccagtagcagttgcaagatacaatccacaacttgacacaggagaaaaaaatgaactatgggtagtctcaattttaactgatcactatgacaaacccagagaaccccaactagtatactctggttatcctttatggatgatgttctttggctattataactttattttacaatataaaaatgatcaaacattcttagattcacatatgtttgtaataagatctccagccatattaaaactttcaacaaccactgatcaagactattttccctttatagacttttcctttttaaatggaaaaatgccatttcaagaatacttagacgaaaacagtaaaaaattttggtacccttctgttaaaaaacaagtagaaacaataaataatattgttacttgtggcccatacataccaaaatattctgacaatagggacagttcatgggatttaaaatataaatctactttttactttaagtttggaggtccacagatttcagaaacaccagttgttgacccacaaaaacaagaagactatgatgtgcccgataagttcaaaagcacaatacaaatatctgatccaatcacacaagcctgtgaaacaatgttccacaactgggactacagaagggggcttattacaccagcagctattaaaagagtgtcaaaacacctcgaaactgattcagatgtctcgtcaacttctacagaaccaccccacaaaaagatcaaaatcacaggagaagtcccctatctcccacaagaaacagaagaagtccaagcgtgtctcctctcactctgcgaagaagataccttccaagaagaagaagaggatctccacaagctcatcaagcagcagcacaaaaagcagcagcagctcaagcagcagctcctcaagctcctagcagaaatgaacaaaaaacaaactatgctacaacttcaaacaggaatcttaggctaactagatttaagcctggctttgaagaagacacagaaaaacaactagcaaaaatattcaaaagacctccaagaacttataaagaagaccctcccttttatccatggctacctataacacccaaagtaatttttgcgcttaattttaaaggctaggccaacaatgtacacttagtaaagcatgtttaataaagttttaccccccaaaaaaaaaaaaaaaaaaaaaaacccgccgccatcttgggtgcggctgggcgggggctaaaatggcgggacccaatcactttatactttcacttcccaattaaaacctgccacgtcacagtaaaggggtggagactttcaaactatataactaagtggggtgacgaatggctgagtttaccccgctagacggtgcagggaccggatcgagcgcagcgaggaggtccccagctgcccgtggg

SEQ ID NO: 3950 - protein, 662 aa, Gammatorquevirus sp.
MPFWWRRRRKFWGGRWRKPRYNKYKRRRKPRRRYRRTYGRRRRRHRKRRYKVRRKRKAIVLKQWQPDSIRKCKIKVIDSFIIGAHGTQFKCYTNEAKKYPQPKQPAGGGFGMEVFSLEDLYLRYKAHKSIWTATNDYKDLVRYTGCTFTFYRHATTDFILSFNTQPPFTLDKFSYTSIHPLNMLLQKHKKILYSLKTKPWGPSKVKFKIKPPKQMSTKWFFQKFFATAGLVEIKATAADFNFSYIQNTSVNTNLSIVYLNTAFYQLSNWGKFLGASHYKPYATINEKLYYWFKSGNQTKHIQVKHENYYESVNYATGYFQTGVLNAIKITVTPEITAQSAQAHLPVAVARYNPQLDTGEKNELWVVSILTDHYDKPREPQLVYSGYPLWMMFFGYYNFILQYKNDQTFLDSHMFVIRSPAILKLSTTTDQDYFPFIDFSFLNGKMPFQEYLDENSKKFWYPSVKKQVETINNIVTCGPYIPKYSDNRDSSWDLKYKSTFYFKFGGPQISETPVVDPQKQEDYDVPDKFKSTIQISDPITQACETMFHNWDYRRGLITPAAIKRVSKHLETDSDVSSTSTEPPHKKIKITGEVPYLPQETEEVQACLLSLCEEDTFQEEEEDLHKLIKQQHKKQQQLKQQLLKLLAEMNKKQTMLQLQTGILG

SEQ ID NO: 3951 - protein, 123 aa, Gammatorquevirus sp.; identical to SEQ ID NO: 3736

SEQ ID NO: 3952 - protein, 104 aa, Gammatorquevirus sp.; identical to SEQ ID NO: 3737

SEQ ID NO: 3953 - DNA, 2745 bp, Betatorquevirus sp.
caggtgctgaaggtgagtgaaaccaccgaaatcaaggggcaatatgggcacgggcagtctgggggactgggcaacatacttaaaatatttattttacagatgagcaaactgctaaaaccaacatcacattcagaaagaaatataattctacaaaatgtaaacgcttgggttgccatccacgatattacctgcaagtgtgaatctcctctacgctgcattattcttcaaatataccgtcaagaaccaacattaaattttaaaccaaaggaattacaaaaatggcttactactaccgaccttaccgtcaaagatggtggagacgaagaagatatagatggaaaagagctagacgaccttttcgcttctttagaaaaagaagacgccaaagggtaagaaaaagaaaattaaaatctcttaaaataagacaatggcaaccaggatgtataagaaaacttgttgttaaaggactatattgtttatttgaagctaatcatagacttctaactaataactatactcaatacatggaaagtgtaccaccagaaggaattccttccggaggaggatttagtattaacagatttaacataaactgtttatggagcgaaagacaaaaagctagaaatgtatggacaacaggaaacaaaaacttacctatgataagatatacaggatgtgaatttaaaatatacagacctatacactgtgatgcagtaataaactttcaaaactgctttcctatggaagctacagcattaacatatcactctgcacaaccatacatagcaatgatgacaaaacacagcaaaaaaatcacacgactatctaacacaaaaaacaaaaaaccatataaaaaatataaattcaaaccaccacaacaaatgactaacaaatggttttttgccagtgacatatacaacacaggtctaattatgctaacatcctcagcggcagactttgaaaatatatacataagtccatactcagaatctaatactatttcattaaaactacttaatgtaaaattatttataaacagacacttcaatcaattacccacagcaggataccacccaaaagacggtttttggctatgggcaagcataaacggcagtatatccccaaaatttaaagaaatgatatttttaggaaacactatacaataccaaaaaggcacagaaatagcaaaactacaaaaagtaacagacaccacaacaattcaggaagctatgaaattatacacaaactctaaagactggggaaacccatttcacgaagactacattaataaaacacatagaatttggtacacacacaacagtccacaaataacattaggaactaaaacagatcgggtaactacagaaatcaataaattaggctttcaaccactagaccaagaattatattttgaaggcagatacaatcccaatagagacagaggtaaaaactccttaatatattttttaaaaacaacagaagaagcatcaggttgggacccaccagaaaaagacagcctaattacagcaggttttccactatgggtttctgtctggggactaaaagactaccatgaaaaactaaaagatatgcaacacatggacacagattatatagcagtaatacaaacaaaagcaatagaaccacaagatatacaattaaactactttgtggtactagacaaacaatttacacacggagacagtgaatggcatgacggagaaaacagaacaccatgggataacatacactggcaccctatgcttcactaccaacacagatcattagaaattataggacaatcagggccagcagtaccaaaactaggacaatacaaaaacgcagaattacattgtgaatacaaattttattttaaggttgggggctgcgtaccaccaatggcagaaattacagacccagcagaacaaacttctttcccgataccaactaacatcactgaatcaaattcgtttcagaatccaaacgaaccaatccaatcctacttgtactccttcgaccaaaggagacacgaaattactagtacagctgcaaaacgaatcacaaaagacattacatctccaacgcctttattcacagatacaacaacaactggaacagacgtcccaattctccaaacactccaagaaatccaagactcggaggaggaggaggaaacccaagaaacgacactgctccagcagctcatcaaccagcgagcaaagcagcaacgaatcagcaagcgaatcaagcagctcctaaaattactacacaatacaacataacctgcattaaaaaggtacaattattcccagagaaaaaaaatagacgactaacaccatgggaagaagaacaagacatacaagaatcaaaaatatggaaaagggcaagaaaacattttatatatgacattccctggtattatgattgtaaaccagaacctctagtaaattttaaacttaactttcaagataaataaagaaataaagggctaggccccattaattcataactcggtgtctgtttctttaagtgtaaccttattaaactgactccgcctccctaaattagggcgccaaaagggggctccgcccccttaaaccccattattattcattacattaattattaaacaccgtaattccggggaggagactaaactgtatataactaactacactgacgaatggctgagtttaccccgccagacggagacaagttaacaacattaacttggctgcccgtggg

SEQ ID NO: 3954 - protein, 667 aa, Betatorquevirus sp.
MAYYYRPYRQRWWRRRRYRWKRARRPFRFFRKRRRQRVRKRKLKSLKIRQWQPGCIRKLVVKGLYCLFEANHRLLTNNYTQYMESVPPEGIPSGGGFSINRFNINCLWSERQKARNVWTTGNKNLPMIRYTGCEFKIYRPIHCDAVINFQNCFPMEATALTYHSAQPYIAMMTKHSKKITRLSNTKNKKPYKKYKFKPPQQMTNKWFFASDIYNTGLIMLTSSAADFENIYISPYSESNTISLKLLNVKLFINRHFNQLPTAGYHPKDGFWLWASINGSISPKFKEMIFLGNTIQYQKGTEIAKLQKVTDTTTIQEAMKLYTNSKDWGNPFHEDYINKTHRIWYTHNSPQITLGTKTDRVTTEINKLGFQPLDQELYFEGRYNPNRDRGKNSLIYFLKTTEEASGWDPPEKDSLITAGFPLWVSVWGLKDYHEKLKDMQHMDTDYIAVIQTKAIEPQDIQLNYFVVLDKQFTHGDSEWHDGENRTPWDNIHWHPMLHYQHRSLEIIGQSGPAVPKLGQYKNAELHCEYKFYFKVGGCVPPMAEITDPAEQTSFPIPTNITESNSFQNPNEPIQSYLYSFDQRRHEITSTAAKRITKDITSPTPLFTDTTTTGTDVPILQTLQEIQDSEEEEETQETTLLQQLINQRAKQQRISKRIKQLLKLLHNTT

SEQ ID NO: 3955 - protein, 128 aa, Betatorquevirus sp.; identical to SEQ ID NO: 2681

SEQ ID NO: 3956 - DNA, 2744 bp, Gammatorquevirus sp.
cgggagcccgaggtgagtgaaaccaccgaggtctaggggcaattcgggctagggcagtctagcggaacgggcaagaaacttaaaacaaattcttctttttttttagatgtcaaagattcaagctaaagacttttatactcccacacccttcaatcaagagacaaaaaatcaaatatggatgtctcaaattgctgatgctcacgataatatctgccattgtaaccatccctttgctcatctgcttgccaatatctttcctgtgggtcacaaagatcgcgatctcacaattaatcaaattcttttgagagactacaaagaaaaatgccattctggtggaacagaagaagaaagccatggtacggacgctggaggcacaggcggaggtttcaaaggtataaaagaagaaagccacgaagaagatttgccagaagacgaactagaaggcttactcgccgccgcagaagaaagcgcaaggtaagaagaaaaagaaaaaaaattaatatacaacaatggcaaccagaaagcattgttaaatgtaaaattaagggcttctctactttagtactgggggcagaaggcagacagtatatttgttggactaatgaagcccttgactacactcagccaaaagcaccagggggaggaggatttggctgtgaaaatataactttagaatggttatatcatgaacatagagcacacaactgtatatggaccaaaagcaatcaatacaaagatctatgcagatatacaggttgtaaaataactttatttagacacccaaatatagactttatttttcaatacaacctacaaggtccatttaacataacaaaattcacatatacagacatacaaccacagaacatgctactacaaccccataacagactaattcttagccaaaaaacaaaaccccatggcaaacttgctgttaaagttaaaataaaaccaccaaaacaaatgactaccagatggttttttgctaaagaattttcagaagctgtactagtacaactaaaagctgtagcctgttcatttacatttcctagaatagcacctaaggcacaaagtcaaatggtaacagtttactacttaaatgaaagcttttatccatctccaatttggggacaagtacacccaggtggctacatacctattagtacaagaacaggtatatataaattctcaaatacaaaaaccaaacctgcatactcagactttacaattgacacaagcacctttggaagaggagaagcaggatattatgcctccattaactattccacaggcttttttaatgccaaagtactaaatgcatccaaagttacaataaataatgtagaatttggctcactacctttactaactgcaagatacaatcccaacgatgacacaggagatggaaatgtagtttatgcactttctattctacaaaattcatataacccaccaacagtacaatcagactatgttattagaggtcaaccactatggatggcatttcatggcttttggagctggattaaatatttatcaaaagacaaagcattttacacacactatatgtttgttgttcagagccgtgccataaaacccatctcacaaaacacagcacaaaaaagatttgcatttcttgacttatcttttatatctggcaaactaccttttgatgaatatttatctgacaatgaaaagaagctgtggtatccaaaagcacaataccagactgaaactataaattcttttgttcaatctggaccatttatacctaaactttcaaacataccagaaagcacttgggaattagactacaaatataacttttactttaaatggggtggtccacagattacagacagaccagttgacgaccctcaataccaaccagactaccctgttcccggttaccgcacagaagcagtacagatatccaatcccaaaacccttgcgacagaaactctgctccatgaatgggacttcagaaggggcattgttacacacacagctcttaaaagaatgtcagaaaactttgaatctgaaacagatatctactctgatgactcaggaacaccaaaaaagaaaagaaagatcaccaaagaactcccataccaaagaccacagcaagaagccctcaaaacatgtctccaggagctctgcgaagaaaatacctgccaagaaacaccacaaacattacaagagctcatccagcagcagcagcagcagcagcagctcaaacacaacatcctccagctcctcacaaagctaaagaaggaccaacgctttttgggacttcaaacaggccttctagaatgacaccctttaaaaaaggctttgaaatggacacagaaagacagttagcacaagcattcaaaagaccccctagactgtttaaagaagacactcccttttacccctggttacccagaccagtgccccttgttaactttcaccttaattttaagttctaggcctccaaatttcacttagtggtggatgtttatataagtttgcaccccaaaaaaattgtaaaataaaaaaaaaaaaaaaaggcgggggctaaaatggcgggacccaatcattttatactttcactttccaattaacacccgccacgtcaaaacaaaggggtggagactctaaaactatataaccaagtaacctgacgaatggctgagtttaccccgctagacggtgcagggaccggatcgagcgcagcgaggaggtccccggctgcccgtggg

SEQ ID NO: 3957 - protein, 664 aa, Gammatorquevirus sp.; identical to SEQ ID NO: 3920

SEQ ID NO: 3958 - protein, 123 aa, Gammatorquevirus sp.; identical to SEQ ID NO: 1016

SEQ ID NO: 3959 - protein, 109 aa, Gammatorquevirus sp.; identical to SEQ ID NO: 1017

SEQ ID NO: 3960 - DNA, 2742 bp, Betatorquevirus sp.
cgggtgccgaaggtgagtaacaccaccgaagtcaaggggcaattcgggctaggtcagtctggcggaacgggcaagaaacttaaaatattttattttacagatatgagccaccgctttattcaaccaaaaccatctctcagacaaacaaaactaaaatggatgaacaccatcgcacaatgccatgacaacttctgcgactgcttcgatcctataacccacacagcagcattaatttttgaacaagaaaaggatttaaaatttacaacaccagaattggatataattaaacaatgtatttctggagaaactaccgccgccgctactacaggccaagaactcgacgttattggagaaggagaactagaagatttgtttcgagaagatactggagaagaaaaaagtacagggtaagaaaaagaaaacttaaaactctaagactaaaacaatggcaaccgcattatatcaaaaaacttaaaattaaaggagaatatcctatttttataacaacttctcaaagactatcaaacaacttaatttgctacttagaaagcattgcgccttgggactggccgggaggagggggcttcagcattgctaactttacctttgaaatgctttataaagaaaacttaactgctagcaattactggactataacaaatgataatatgccattatttagatatttaggatgctacataacattatttacacaaccagaagtagactacttattttactggaataacacacctcctatgaaagcaacaaaactaacatacatgtcaacacaaccagcaattatgctacaattaaaacatgtaaaagtaatgaaatgtagaaaaacaaacagaaaaaaaccatataaaagaatatatgtaccaccaccaactcaaatgcagaacaaatggtacttacaacatgacctagctaacgtaccactattacaaacaattgcaacagtatgttcgttagaccgcaaatacctacacgcaaatgcaaaatccactactataagcttctattcaattaacacagaagaaattcaaaatcattatttttcaacaacacaaggaacacaaggctataacccaaaaaacaatgtaaaactatttctctgccaagaaccaccaaacaaatacagccttacagagatacaaatcggaacattatcatttttaggacaagtagacactcaaacaccaggagtaaaaataaaagacataaacgatataaacttttccacaaaactacaaaaagcactaactaatccaggcctacaaggaaacccattctacaaagaatgcctagattcagactcctacatagttaaaacaacagcagacttacaaacattacaaacacaatacaacaatccagacacaaaattaaaaacacaacatttttcctgggcaggacacttattaaaagaaataagatataacccatttaaagataaaggaattggaaacaaagtatacttagtaaacatactacaacaagaccactcgcacacatgggacgcacccctagacgatgatatagtatggaaagaccttccactatacaatttaacatggggatacctagattttcaaagaaaatgcggcctaaacacagcaatagacacaaacaaatgccttgtaatatacacaccatatgtagaacctcaactaacaacaaaaatatacgtaccagtagataaaaaatttacagaaggcctaagcccatatgcaaatatgacatatccatcagaccacaataactggcacccaaaagtaagataccaagtagacacagcaaacttaattgcatctacaggacccaacacagtaaaactaccagacaatgtaagctgtgaaggtcatataaaatataattttcgctttaaacttggtggagaaccagctcctatgtcaattcttgtggatccacaggaacaaccaactcataccttccccaataacatcctacaaaaaacttcgttacagaatccagcacaacccattgaacacctactctggaaatttgatgaaaggagaggaatgcttacaaaaaaagctgcacagagaatcaaaacacacacagaaactgaaaaagatattctttcaattacagaaccaacaacaacctgcccaatatggaccacgaaagaaacaccgacaacggactcatcgacagaggaagaagaggaaacaccgctcgagacacaactcctccacgagcgaagaaagcaaagactcctccgacagcgaatcaacaagctactcaacagattaacaccattagaatagaaaaatgtaaaataaatgtaaagcttttcaatgataatgaaccaaaaaaccgtagaatgacagcatgggaaagggaacaagaaatagctgacgccgctatgtggggcagaacacctagatggtttatatttgataaacatttttaccctgatgtaccccccgtacctaaatacactgtaaactttgatttaaatgcgccgcaataaaacaaggccagcaaatattcactctcggtgtccatttatataagaattaacttaaataaacatccaccactctccctaatacgcaggcctagaagggggctccgcccccttacaccccccagggggctccgcccccttacacccccactaaaacctatataactaactacacttccgaatggctgagtttatgccgccagccgtagaccggatcactttagtgactacgggctgaccttggg

SEQ ID NO: 3961 - protein, 667 aa, Betatorquevirus sp.
MYFWRNYRRRYYRPRTRRYWRRRTRRFVSRRYWRRKKYRVRKRKLKTLRLKQWQPHYIKKLKIKGEYPIFITTSQRLSNNLICYLESIAPWDWPGGGGFSIANFTFEMLYKENLTASNYWTITNDNMPLFRYLGCYITLFTQPEVDYLFYWNNTPPMKATKLTYMSTQPAIMLQLKHVKVMKCRKTNRKKPYKRIYVPPPTQMQNKWYLQHDLANVPLLQTIATVCSLDRKYLHANAKSTTISFYSINTEEIQNHYFSTTQGTQGYNPKNNVKLFLCQEPPNKYSLTEIQIGTLSFLGQVDTQTPGVKIKDINDINFSTKLQKALTNPGLQGNPFYKECLDSDSYIVKTTADLQTLQTQYNNPDTKLKTQHFSWAGHLLKEIRYNPFKDKGIGNKVYLVNILQQDHSHTWDAPLDDDIVWKDLPLYNLTWGYLDFQRKCGLNTAIDTNKCLVIYTPYVEPQLTTKIYVPVDKKFTEGLSPYANMTYPSDHNNWHPKVRYQVDTANLIASTGPNTVKLPDNVSCEGHIKYNFRFKLGGEPAPMSILVDPQEQPTHTFPNNILQKTSLQNPAQPIEHLLWKFDERRGMLTKKAAQRIKTHTETEKDILSITEPTTTCPIWTTKETPTTDSSTEEEEETPLETQLLHERRKQRLLRQRINKLLNRLTPLE

SEQ ID NO: 3962 - protein, 102 aa, Betatorquevirus sp.; identical to SEQ ID NO: 2293

SEQ ID NO: 3963 - protein, 122 aa, Betatorquevirus sp.
LPNMDHERNTDNGLIDRGRRGNTARDTTPPRAKKAKTPPTANQQATQQINTIRIEKCKINVKLFNDNEPKNRRMTAWEREQEIADAAMWGRTPRWFIFDKHFYPDVPPVPKYTVNFDLNAPQ

SEQ ID NO: 3964 - DNA, 2739 bp, Betatorquevirus sp.
caggtgccggaggtgagtgcaaccaccgcagtctaggggcttaatgggcaggcgaagtctaggcggaacgggcatcaaattaaaaatatatattttattacagatgacctactatatgaaagagcacaaacattctcctaaatacctagaattgggatggattaactctatttttcaaagccacgatcaaatttgtgcttgcaacaacgttataacccacttactgggagctataaatcaccaaaacagcaagaaaatccttagcagacaagaaataaagaaaatacaatgccaccttactggagaagaaactatcgataccgaaactggagaagacgacgcccttaccggtggagaactagaggctttgttcgcagacaacgttttcgaagaagaagagcctaccgggtaagaagacgacgaattcataaaaaactttataaaattagaatacatgaatttcaaccagagactataaaactttgtaaaataaaagggacaaaatgcctctttcaaggaggttcacaaagaaaaagcaataattatgctcaatacataggatctatagtaccagaacatgaaccagggggaggagggtggtctctaatggtattctctttagatagtctatgggaagactatgaacacttacaaaacatatggacacaaagcaatgcaggactaccactatgcaggtttttaggagtaacaatgaaattttatcaacaagaatatacagactatgtagttacatatgacttatgctggccaatgaaagacactccactaacacacgcaaacagccacccacaaagaatgctactacaaaaaaacaaaattgtagtacctagcctactaacaaaaagaagaaaaaagccatatgtaaaaaaatatattaaacctcctgcacaattaaaaaatgaatggtactttcaaaaagaccttgcaggagtagatttgctaatgctaaccacaaccgcttgtgacctaagaaacagttttatttcaccaccagccaagagcaataacataaccctaacttccttaaatactaacttctggtacaaccgcaatttccaaagaccttccccaactactggctacacacctaaaaataacacctacctttacacacagggtaacggtacaactgctactcccacactgaaaactcaattaatttatctaggaaactccatagattatcaaccaggaaaaaaaatggactcacatggaggatcaatgaccagctggggaaacccgttttatcacttatacacacaaacagacatacccatttatgtctcacaaaattcaccaaataccatgccagaagccataacagcaggaacaataacacaaacaacacaatatttagcagtaaaagttagatacaatcccgaaagagacacaggacaaggcaacatggcatactttgtatcaaacataacagggcaaggttgggaccccccagaagaccctaacctaagaatagaaggctttccactatggcttatgctatggggatgggcagactggattaaaaaactagcacatatcgctaaagtagatgaaaactacttattagtaattagaagtagattttttgactcagaactacctgcatatgtatttttagatgactctttttggcatggacaaggtccatacaacacagacttagacaactatgactattttcactggtacccacaatttaaataccaaaaaatggccatagaaacacttagtacttcaggtccttacgtagcacacccaccttctgacaattctttacaagcaaaatgcatatatacttttaaatttaaatggggaggctgtccaagaacaatagaaaaagtatatgctccttcctcacagcccacctggattacaccccataacttcagtatcggatctaaaatccagaatccaagaacaaacccacttacatacatctacccatgggacacaaaaagagacattatcacagagaaagctttacaaagaatacaagaacaacaagaaactgatgaacttttatcaaaacctacaggaataccaacaacaagccgaagcgacccaaaaccgatactccaaaaagcccaagaaagcgacgaggaaacatcgtcagaggaagaagagaaaacaccattacagctccagctcaacaagctccgcagacgacagcgactcctcaagcagctcctcctgaaaagccagccaaatatagaataatacacatacaaaaacaaataaatttatttgggcctgtacctactcctaataggagattaaatttatgggagcaacaacaagaaaaagaagacgcagccatatggttaagaccccaaagaacctttctaaaagaccgtcctacttatcctttctttcctattacaccccttgctaactttgatctaaacttcaaagaataaaggccagcatactttacttaatggtgtctgtttctttaagtaaaaccttactaaacgaactccgcctccctacactgttggcgccaaaagggggctccgcccccttaaaccccaggggggggcaaagcccccccccataccccccccccccctacgtcacaaactccacccaaaactccaccctaatgaataataaaaaggggagggactaagtaactatataactaacagtacttccgaatggctgagtttatgccgccagacggaggcaaggcaggacactgacttgactgagcctggg

SEQ ID NO: 3965 - protein, 649 aa, Betatorquevirus sp.
MPPYWRRNYRYRNWRRRRPYRWRTRGFVRRQRFRRRRAYRVRRRRIHKKLYKIRIHEFQPETIKLCKIKGTKCLFQGGSQRKSNNYAQYIGSIVPEHEPGGGGWSLMVFSLDSLWEDYEHLQNIWTQSNAGLPLCRFLGVTMKFYQQEYTDYVVTYDLCWPMKDTPLTHANSHPQRMLLQKNKIVVPSLLTKRRKKPYVKKYIKPPAQLKNEWYFQKDLAGVDLLMLTTTACDLRNSFISPPAKSNNITLTSLNTNFWYNRNFQRPSPTTGYTPKNNTYLYTQGNGTTATPTLKTQLIYLGNSIDYQPGKKMDSHGGSMTSWGNPFYHLYTQTDIPIYVSQNSPNTMPEAITAGTITQTTQYLAVKVRYNPERDTGQGNMAYFVSNITGQGWDPPEDPNLRIEGFPLWLMLWGWADWIKKLAHIAKVDENYLLVIRSRFFDSELPAYVFLDDSFWHGQGPYNTDLDNYDYFHWYPQFKYQKMAIETLSTSGPYVAHPPSDNSLQAKCIYTFKFKWGGCPRTIEKVYAPSSQPTWITPHNFSIGSKIQNPRTNPLTYIYPWDTKRDIITEKALQRIQEQQETDELLSKPTGIPTTSRSDPKPILQKAQESDEETSSEEEEKTPLQLQLNKLRRRQRLLKQLLLKSQPNIE

SEQ ID NO: 3966 - protein, 122 aa, Betatorquevirus sp.
MGRRSLGGTGIKLKIYILLQMTYYMKEHKHSPKYLELGWINSIFQSHDQICACNNVITHLLGAINHQNSKKILSRQEIKKIQCHLTGEETIDTETGEDDALTGGELEALFADNVFEEEEPTG

SEQ ID NO: 3967 - DNA, 2738 bp, Gammatorquevirus sp.
cgggagcccgaggtgagtgaaaccaccgaggtctaggggcaactcgggctagggcagtctagcggaacgggcaagaaacttaaaacaaattttgttttacagatgtcctacttgtttcaaccaacaaaatacaacaatgaaaccaaagaacaactgtggatgagtgtttttgcagatgcccatgattccatttgtgaatgtcctacaccatttgcacacgccctttggtgcatgtttccagaaggtcacaaagatagaaaattaaccattgaacaagtaataaccagagatacagcactatggcattctggtggtacagaagaagaaaaccatggtttggcagatggagacgcaaaccaacaagaaaatacaaaacaacaaccagaagaagaaaaagaagactcccttggagacgtagaaatagaagaacttatcgccgccgccgacgacgccattacaaggtaagaagaaaaaaaagaaaaattactatacaacaatggcaacctgaaagtataaaaaaatgtaaaattaaaggcacaggacagctagtactaggagctgaagggacacaatacagatgctttactgttcataaaaatgaatggacaaatcctaaagttgccactggtgggggatttggagttgaactgtttactctaaattacttatacaaagaatacttagccaaaaataatatatggacagcatcaaatgtttacaaagacttttgcagatacactggatgctccataaccttatttagacaccccactactgactttattttttgctatgacatacagccaccattcacaattaacaagcacacctacatgatggctcatccacactttttacttcaaagaaaaagaaaaaaaatactactaagcactctaacaaaacctaatggaaaattaacaaaaaaaataaaaataaaacctccaaaaatgctacaaaccaaatggcattttcaagaagaatttgcagactttggcttagttactttaatagcatcagcatgcaattttagatatccatggcttgcctgctgcaatgaaaatttattaataacactttactacctacaaccaactttctggtcacactctgaatgggcacaattttctacaacctgctataaccccaaaggtcacacaaacccaatgaaagaaactttaacatataaaggtgaaattaataacaagccctatgagtatattatgaaacagtttaccccacacaattatcaacaatctctaaacaaagatgtaggttggtttaatccaaaagttcttaatgcacacacagtcttagatggacagcaaagacaatcattagcaccctgtggagtactcagatataatccatacatagacacaggggaaaaaaacaaactctatgtctgtagtgtactagttggatcatggactgaaccaaaagaccaagaccttgtactagaaaactttcctctttgggctatgttttttggattcacatcctacctaaaacaagtaaaatctaaaacagtaccactaaatggatccatgctagtagttaaatctccagctctatacagagtatttggagaagaccccaaagacttctacccactaattgataaatcttttatgctaggcaaaggtacaaacaacacagaccccatactaccaagaaccaacctatggtatccagcagtatttgctcaaagagacagtatttcacaaatagttaattgtggaccttatttaccaaaatacaatgaagtaaaagaaagcacatggcaattaaatttcttttacaacttttattttaagtggggaggctcctacccaccacaacaagaagcagaaaatccaaaggacaaaggtacctatcctatacccaatacagagcaagaaacaatacagattgaaaaccctcttaaacaaaaatacaacaccatatttaaaccctgggactacagaagaggtacccttacaaaaacagctcttaaaagaatgtatgaaaacctctcggatgatgaatctttatcaacagattcaacatgctcaacctctccaaaaagaaagaagctactcccaacactccaagacccgaaaaaagaaagacaagaaatccagacatgtctcctctcgctctgcgaagaaagttccttccaagaaacacaggagaacgccaacctcttccagctcatcaaaaaccagcacaagcaacagcagcaactcaagtacaacttactaacattgatttcagatttgaaagcgaaacagagaaaccttttacatcaatcaggatttctagcttaaacatattcaaacctggctttgaatatgacacagaaaaagaaatggccatagcctttaaaagaccaatgagaaagtttaagcatgatccccccttttacccctggctaccccctgctcccaaagtctgctttaacctcaactacaaagactaggccaacaatgtacacttagacaagcttgtttaataacaccccccctacgtcacaaaccacgcccccgccgccatcttgggtgtggcagggcgggggctaaaaaagcgggaaccaataaaattaaactgccaacatccactaaaaatgaaacacatcacaaaaagaggcaggactaactaactctatatattcaagtacactttcgaatggctgagtttatcccgctagacggtgcagagatcgaccgagcgcagcgaggagatctacagctgcccaaggg

SEQ ID NO: 3968 - protein, 668 aa, Gammatorquevirus sp.
MAFWWYRRRKPWFGRWRRKPTRKYKTTTRRRKRRLPWRRRNRRTYRRRRRRHYKVRRKKRKITIQQWQPESIKKCKIKGTGQLVLGAEGTQYRCFTVHKNEWTNPKVATGGGFGVELFTLNYLYKEYLAKNNIWTASNVYKDFCRYTGCSITLFRHPTTDFIFCYDIQPPFTINKHTYMMAHPHFLLQRKRKKILLSTLTKPNGKLTKKIKIKPPKMLQTKWHFQEEFADFGLVTLIASACNFRYPWLACCNENLLITLYYLQPTFWSHSEWAQFSTTCYNPKGHTNPMKETLTYKGEINNKPYEYIMKQFTPHNYQQSLNKDVGWFNPKVLNAHTVLDGQQRQSLAPCGVLRYNPYIDTGEKNKLYVCSVLVGSWTEPKDQDLVLENFPLWAMFFGFTSYLKQVKSKTVPLNGSMLVVKSPALYRVFGEDPKDFYPLIDKSFMLGKGTNNTDPILPRTNLWYPAVFAQRDSISQIVNCGPYLPKYNEVKESTWQLNFFYNFYFKWGGSYPPQQEAENPKDKGTYPIPNTEQETIQIENPLKQKYNTIFKPWDYRRGTLTKTALKRMYENLSDDESLSTDSTCSTSPKRKKLLPTLQDPKKERQEIQTCLLSLCEESSFQETQENANLFQLIKNQHKQQQQLKYNLLTLISDLKAKQRNLLHQSGFLA

SEQ ID NO: 3969 - protein, 120 aa, Gammatorquevirus sp.
MSYLFQPTKYNNETKEQLWMSVFADAHDSICECPTPFAHALWCMFPEGHKDRKLTIEQVITRDTALWHSGGTEEENHGLADGDANQQENTKQQPEEEKEDSLGDVEIEELIAAADDAITR

SEQ ID NO: 3970 - protein, 137 aa, Gammatorquevirus sp.
MLNLSKKKEATPNTPRPEKRKTRNPDMSPLALRRKFLPRNTGERQPLPAHQKPAQATAATQVQLTNIDFRFESETEKPFTSIRISSLNIFKPGFEYDTEKEMAIAFKRPMRKFKHDPPFYPWLPPAPKVCFNLNYKD

SEQ ID NO: 3971 - DNA, 2738 bp, Gammatorquevirus sp.
cgggagcccgaggtgagtgaaaccaccgaggtctaggggcaattcgggctagggcagtctagcggaacgggcaagaaacttaaaacaatatttgttttacagatgtccagattctacaaagaagtaccatacaacaaagacaccaaatgtcaaatgtggatgtctatgattagtgatggtcatgatattcactgtggatgttgtcaaccatttgcacacctactagacagcatttttccagagggacacgcagacagaaacaagaccattgaacaaataatacaaagagatttacagctatgccattctggtggaacagaagaagaagaccatggtatcccacttggaggaagcgccgctacagaaacacccgctacagaaaatataaaagaagaagaagacctagacgccctgcttatcgccgccgccgccgccgtagaagatacaaggtaaggagaaaaaaaaaaagaataactatacaacagtggcagccagacaaaatagttaaatgtaaaattataggatatggataccttgtagcaggaactgaaggaaaccaatttagatgttatacaaatgataaacataactatggacaaccaaaagctccaggcggtggcggttttggctgtgaacaatatacacttgaatatttatataaagaatgggaagctcatagatgcatatggactagatctaatgactacctagacctagtaagatacacaggctgcatattttatttttatagacatcctaaaacagactttatcatatggtatgacagacaaccaccatttaaatttacaactactacttacttagaaacacatccactatccatgttactaaaaagacaccataaagtaataagatccctagaacataacccaaaaagcaaaccatatgttaaaataaaaataccaccaccaaaacaaatgataaccaaatggtttttccaaccagactttgcagatgtaccattatttaaactctgtggatctgccagcaactttggatactcactctacggacccaatacacaaagccccaacttaaccatatatgccttaaacacagatttctatgttatacacaattgggcagattcaagcttaactactagagggtatgaaccatacgcaggtgtacctagcactattaaatttaaatataaaataggcaataaaacaggtgaagtaggacctccacaaaaacaatatacagacagcatttcatatgcagacggctggtttagaccagaaatattaaatgcatatgaagttactgaccatggcgtagccacatacaacagaccagtgtcaataggcagatacaatcctgaagaagacaatggtaaaggcaatagaatatggctcacaagcattatagcaaacaaaggctgggccccacctactgacaaagatttaattataggtgaaattcctctatatatggcattttggggtttgtgggactatattgctcagtctagaaaaacagaagaatacttagcaatatcaatgtttgtagttaaatctgactacataaaaatagttttaggaggcccacaccaaaaagtgtggccaataatagactggtcctttatacaaggtaaaatgccatgggatgaatcccttactatacaagaaaaggccagatggtaccctacatgctacaaacaaacccaaactataaacaattttgtagaatgtggaccatactgtccaaaatatgcaaacttacctgtatctacttggcaactaccttacaaatataaattttactttaaatggggtggaccccagacaggagagaacattgttcaagatcccaaagaccaagaaaaatatcccgttcccgatactttcacagaagcaatacaaatcagagacccgctcaggcaacacccaaaaacactccttagatcctgggacttcagaagggacattgttacaaaatcagctcttaaaagaatgcaagaaaacttatcaactgatgaatctgaacaatctgatttctcagaaacaccaaaaaagaaaaagaaagtcacaacagagatcccatgcagcgaccaagaagagaaggacctccaaacatgtctcctctcactctgcgaaaaagataccttcccagaagagacagaagacctcaagcagctcatctaccagcagtatcacaagcagcaacagctcaagaacaacctctacaagctcctcaaaaacctaaagaaaacccaagcacacctgcaaatgcaaacaggcatgcattaacccgctttaaaaaaggctttgagtgggacactgaactagaactagcttcagcatttaacagaccacccagactttttaaagaagactcccctttttacccctggttacccaaaccaacacctattgtaaactttcaccttaattacaaattctaggcctacactattcacttagtggtgtatgtttatataagtcacacccccaaaaaaattgtaaaataaaaaaaaaaaaaaaaaataaaaaattgcaaaaattcggcgctcgcgcgcgctggcgggggctaaaatggcgggacccaatcattttatactttcactttccaattaaacactgccacgtcaaaacaaaggggtggagactttaaaactatataaccaagcacggtgacgaatggctgagtttaccacgctagacggtgcagggaccggatcgagcgcagcgaggaggtccccggctgcccgtggg

SEQ ID NO: 3972 - protein, 657 aa, Gammatorquevirus sp.
MPFWWNRRRRPWYPTWRKRRYRNTRYRKYKRRRRPRRPAYRRRRRRRRYKVRRKKKRITIQQWQPDKIVKCKIIGYGYLVAGTEGNQFRCYTNDKHNYGQPKAPGGGGFGCEQYTLEYLYKEWEAHRCIWTRSNDYLDLVRYTGCIFYFYRHPKTDFIIWYDRQPPFKFTTTTYLETHPLSMLLKRHHKVIRSLEHNPKSKPYVKIKIPPPKQMITKWFFQPDFADVPLFKLCGSASNFGYSLYGPNTQSPNLTIYALNTDFYVIHNWADSSLTTRGYEPYAGVPSTIKFKYKIGNKTGEVGPPQKQYTDSISYADGWFRPEILNAYEVTDHGVATYNRPVSIGRYNPEEDNGKGNRIWLTSIIANKGWAPPTDKDLIIGEIPLYMAFWGLWDYIAQSRKTEEYLAISMFVVKSDYIKIVLGGPHQKVWPIIDWSFIQGKMPWDESLTIQEKARWYPTCYKQTQTINNFVECGPYCPKYANLPVSTWQLPYKYKFYFKWGGPQTGENIVQDPKDQEKYPVPDTFTEAIQIRDPLRQHPKTLLRSWDFRRDIVTKSALKRMQENLSTDESEQSDFSETPKKKKKVTTEIPCSDQEEKDLQTCLLSLCEKDTFPEETEDLKQLIYQQYHKQQQLKNNLYKLLKNLKKTQAHLQMQTGMH

SEQ ID NO: 3973 - protein, 116 aa, Gammatorquevirus sp.
MSRFYKEVPYNKDTKCQMWMSMISDGHDIHCGCCQPFAHLLDSIFPEGHADRNKTIEQIIQRDLQLCHSGGTEEEDHGIPLGGSAATETPATENIKEEEDLDALLIAAAAAVEDTR

SEQ ID NO: 3974 - protein, 120 aa, Gammatorquevirus sp.
MQRPRREGPPNMSPLTLRKRYLPRRDRRPQAAHLPAVSQAATAQEQPLQAPQKPKENPSTPANANRHALTRFKKGFEWDTELELASAFNRPPRLFKEDSPFYPWLPKPTPIVNFHLNYKF

SEQ ID NO: 3975 - DNA, 2737 bp, Gammatorquevirus sp.
cgggagcccgaggtgagtgaaaccaccgaggtctaggggcaactcgggctagggcagtctagcggaatgggcaagaaacttaaaatgttatatgttttcagatgcaaaatttgggacctgaagactactacaaaaactgcacatataatgcccagacgaaaaaccaactctggatgtctcaaattgctgattctcatgatatatggtgcagttgtcctactccatttgctcaccttatttcttccatttttcctcctggtcatcaagataggaaccttactgtgcaacaaattctaacaagagattttacagaatgccattctggtggagaaggagaagaaaaccctggtataccaataactacagggcatacagaaaacgccgttggcctaaaagaagaagaagaagagtatataaaagacgaagacctacaaaaacttatagacgtcggagaagacgccgcaggcacaaggtaagaagaaaaaaacctaatattattgtaagacaatggcagccagactctattagaaaatgtaaaattagaggcatgggaagacttgttataggagcagaaggaacccaaatagacaattttactatagtacaacatgactttgtacctccaaaagttccatggggaggtggctcaggccttgaaaatattacccttgactacctatatgaagaacatacttttaaaaacaacatatggaccacaagcaatatattcatgaacctttgcagatacctatactgtaaaataaccttttttagacacgtagacacagactttgttatagcctataacagacaaccaccatatgactttaacaaatattcaataccaggctgtcacccacaacaactactactagaaaaaaaaaagattattctattaagccaagctagcaaacaaaatggcaaatacaaaaaaacaattaaaattaagccaccaaaacaaatgatcagcaaatggttttttacaaaagacttttcaggccaaactttgctaatactaaaagcctcagcagctaactttagatactcctatttaagtagaacaaatgaaaacatgctatgcactatatactcattaaatccttcattttatgaagacactagctggcaacaagctagagataaagactattacaaaccataccctacagttccaaacccttttgcttacacagacaaagaaggcagatcacaacaaattaacataataactagcacaacatataaagacttatacacatgttctgtatcttatacagatggctggttcaatccaagttttttacaagctagatcactacaaggaaaagcaggtacacagccaaaagcagtacatcaagtaattgcctctagatataaccctaacagagacaaaggacctggaaacaaaatatactgcatatctacattacaaactagctggacaaacccatcagacaaagacttagtaatagaagacatgccactatggttaggcttatatggctactacagctttattacctttaagaaaccaacagactgggaaaaatcacatgttatagtaatacaatctccagcaatttattgctacccagaaataggatcctgtaaatattactgtcccatagatatagaatacattaaaggaaataaaccctatgggcaacctattactcctaccatgaaaaacagatggatgccagacatgacctggcaaaaaaaaacacttaactgtatagtagaaagtggtccttttgtacctcaatactcagaagaaacatctagcagctgggaactaaaatacaattactcatttttttttaagtggggcggaccccttacacctgaccaacaaattaaagatccacaaaagcttgacacctatgatgtacccgatacaatccaacaaacaatacaaattgtcaacccagccaaacaaacagcagaaaatttactttacccctgggactacagacggggtattattaaagaaaaagctcttaaaagaatgtcagaatactgcctcactgattcagaatttcaaccagttacagaagagcctcaaatcaaaaaacagagacttggagccctaccaaaagacccggagaaagaagtccaagaaatgcagacctgtctccaaacactctgcaaaaaaaatatcttgccagagcaagaagaccaaacactccagcagctcatccaccagcagcagcagcaccaggagcagatcaagtacagcatcgtcaagctcctgatggacttgaaggaaaaacaaacagctcttcaatatcacacaggactgttaaactaaccttattcaaacctgggtttgaacaagaaacagaatatcagttagcacaagcatttaaaagacctgttagaaaatataaagaagactcacccttttatccctggttaccacgtaaaacggggaagtgggggggcatagcccccccacacccccccgcggggggggggcagagccccccccgcaccccccctacgtcacagaacacgcccccgccgccatcttgggtgcggcagggcgggggctaaaatggcgggaaccaatcaaatcatagttttaatacccaattaaaaactgccacgtcacaataagtgggtggagttatttaaactatataactaactcaggtgacgaatggctgagtttaccccgctagacggtgcagagaccggatcgagcgcagcgaggaggtcttcagctgcccaaggg

SEQ ID NO: 3976 - protein, 665 aa, Gammatorquevirus sp.
MPFWWRRRRKPWYTNNYRAYRKRRWPKRRRRRVYKRRRPTKTYRRRRRRRRHKVRRKKPNIIVRQWQPDSIRKCKIRGMGRLVIGAEGTQIDNFTIVQHDFVPPKVPWGGGSGLENITLDYLYEEHTFKNNIWTTSNIFMNLCRYLYCKITFFRHVDTDFVIAYNRQPPYDFNKYSIPGCHPQQLLLEKKKIILLSQASKQNGKYKKTIKIKPPKQMISKWFFTKDFSGQTLLILKASAANFRYSYLSRTNENMLCTIYSLNPSFYEDTSWQQARDKDYYKPYPTVPNPFAYTDKEGRSQQINIITSTTYKDLYTCSVSYTDGWFNPSFLQARSLQGKAGTQPKAVHQVIASRYNPNRDKGPGNKIYCISTLQTSWTNPSDKDLVIEDMPLWLGLYGYYSFITFKKPTDWEKSHVIVIQSPAIYCYPEIGSCKYYCPIDIEYIKGNKPYGQPITPTMKNRWMPDMTWQKKTLNCIVESGPFVPQYSEETSSSWELKYNYSFFFKWGGPLTPDQQIKDPQKLDTYDVPDTIQQTIQIVNPAKQTAENLLYPWDYRRGIIKEKALKRMSEYCLTDSEFQPVTEEPQIKKQRLGALPKDPEKEVQEMQTCLQTLCKKNILPEQEDQTLQQLIHQQQQHQEQIKYSIVKLLMDLKEKQTALQYHTGLLN

SEQ ID NO: 3977 - protein, 124 aa, Gammatorquevirus sp.
MQNLGPEDYYKNCTYNAQTKNQLWMSQIADSHDIWCSCPTPFAHLISSIFPPGHQDRNLTVQQILTRDFTECHSGGEGEENPGIPITTGHTENAVGLKEEEEEYIKDEDLQKLIDVGEDAAGTR

SEQ ID NO: 3978 - protein, 141 aa, Gammatorquevirus sp.
LSPNTLQKKYLARARRPNTPAAHPPAAAAPGADQVQHRQAPDGLEGKTNSSSISHRTVKLTLFKPGFEQETEYQLAQAFKRPVRKYKEDSPFYPWLPRKTGKWGGIAPPHPPAGGGQSPPRTPPTSQNTPPPPSWVRQGGG

SEQ ID NO: 3979 - DNA, 2736 bp, Betatorquevirus sp.
cgggtgccgaaggtgagtgaaaccaccgtagtcaaggggcaattcgggctagctcagtctggcggaacgggcaagattcttaaatatattttattttacagaatgtctacaagatataagccagcaaaatgctctttaagacaacaaaaattaaaatggatgaatagtcttgttcacacacacgatattatgtgtgactgccctcatccactggaacataccgcgactttaattttcgaacaagaaccaaaattaaaatttacaccaccagaacaagatctaattaaaaaatgccttactacaaatactggggatatcgtcgcagacgaccacgacaacgacgcttttggagaaggagatttagaggaccttttcaaagaagattttggagaagacgacaaagacaccgctgggtaagaaaaagaaaattaaaaactttaaaacttaaagaatggcaaccacaatatataaaaaagacagttgtaaaaggttactaccctttgtttatgagtacttcggaaagactctcaaataatttaaactgttacttagagagcattgcacctgaattttggcctggaggggggggattttctatttgtaacttttctctaaatactctgtatcaagaacaccttgtactacataactggtggactaaatctaatgaaaacatgcctttaataagatttacaggatgtaaaattactttatatagacaagaaacacaagattacttattttgctataatagaacctatccaatgcaagcaaatgccttaacttatactagcactcatcctcaagctatgctattaaacaaacaaactgttgtagtaacttgtaagcaaagatctagaaatagaaaaaactacaaaattgtaagaattaaacctcctgttcaaatgcaaaacaaatggtattttcaaaaagatttagcatttttaccactattacaaactatgacaacagcctgctcgttagaccgcatgtttctaaatagctcagccgttagttccacaattggctttacatcactagatacagttggctttagaaaccacaattttacaaaattttcaaccacaggttactacccaatacatgaagaaaaactatttggatgctataatggacatgacataaacaaattaaaattatcacaattatgctacctaggaaacccacaagacaatacagaaggaacaccaataggagaaataccactaagtgcagtaggtacagcaccaaaattatcacagcaaatagacaaagccagaacagaatggggataccaaggaaacccatttaatgctcactatttttatggagaaaagagagtactagtaaccacactcacttgggaccaaattaaaacgaaatatggaaaaatcgatgaaccatacttacaaacaactgattttaaattaaaaactcaaaaatgggtgcactgcagatacaatccatttaaagacaaaggcaaaggtaacaaaatatatttactaaaaacagacagcacacaacacccagacgaatggacaccaccaccagaagaagacatagttatatcagacataccactttggctagcaacctggggttatctagactatcaaagaaagtgtggattacaatcccaaatagacacaaccacagtttttgttatatactcaacatatatagatcctccttcacttaaattttatgttccactagacaaaccatttttaaacggtcacagtccatacacagaagaactataccctagtgaccaatttaattggcatccaaaagttagataccaagtacaatcaataaacaacatagcaatatgcggtccaacagtagctaaattaccagaacaaatatcatgcgaaggtcatatgaaatatcaattttactttaaggttggaggacagccaccacctatgtcaactcttatcgacccagacaaacaaccaaaatataatatacccagtaacctcctcaaaacaacttcgttgcagagtccaacaactccctttgaatatctcctctacaactttgacgaaagaaggggacaacttactaaaaaagctgcaaaaagaatcaaaacagaccaggaaactgaaacaaattttctctcaattacagaaacaaacaacagctgtccagtactgccctactcaaaaatacagacaccggaatcatcggaggaggaagaaacacaggagacatcgatcgaggagcaactcctcctccagcgaagagagcaaaaactcctcagacggagaatcaaccagctcctcaacaaattaacaattttagaataaaaactggacctataaaagtacaattatttcccacagaaacaaaaaacagacgtatgacactgtgggaatatgaacaagagatagaagactctattatatggcacagagtgccaagatcttttattaaagataaaccaacctacccatgggtcccccaagactccccatttactgtcaactttgatttaaatgcgccgaaataaaattcaacgccagcaacaattcactctcggtgtccatttattaaagttaaacttatataaacatccaccacactcccaaatacgcaggcgcacaagggggctccgcccccttaaacccccagggggggcttatctatataactaactacacttccgaatggctgagtttatgccgccagacggtggacggaacacaacagtgactccggactgagcttggg

SEQ ID NO: 3980 - protein, 673 aa, Betatorquevirus sp.
MPYYKYWGYRRRRPRQRRFWRRRFRGPFQRRFWRRRQRHRWVRKRKLKTLKLKEWQPQYIKKTVVKGYYPLFMSTSERLSNNLNCYLESIAPEFWPGGGGFSICNFSLNTLYQEHLVLHNWWTKSNENMPLIRFTGCKITLYRQETQDYLFCYNRTYPMQANALTYTSTHPQAMLLNKQTVVVTCKQRSRNRKNYKIVRIKPPVQMQNKWYFQKDLAFLPLLQTMTTACSLDRMFLNSSAVSSTIGFTSLDTVGFRNHNFTKFSTTGYYPIHEEKLFGCYNGHDINKLKLSQLCYLGNPQDNTEGTPIGEIPLSAVGTAPKLSQQIDKARTEWGYQGNPFNAHYFYGEKRVLVTTLTWDQIKTKYGKIDEPYLQTTDFKLKTQKWVHCRYNPFKDKGKGNKIYLLKTDSTQHPDEWTPPPEEDIVISDIPLWLATWGYLDYQRKCGLQSQIDTTTVFVIYSTYIDPPSLKFYVPLDKPFLNGHSPYTEELYPSDQFNWHPKVRYQVQSINNIAICGPTVAKLPEQISCEGHMKYQFYFKVGGQPPPMSTLIDPDKQPKYNIPSNLLKTTSLQSPTTPFEYLLYNFDERRGQLTKKAAKRIKTDQETETNFLSITETNNSCPVLPYSKIQTPESSEEEETQETSIEEQLLLQRREQKLLRRRINQLLNKLTILE

SEQ ID NO: 3981 - protein, 104 aa, Betatorquevirus sp.; identical to SEQ ID NO: 2155

SEQ ID NO: 3982 - protein, 122 aa, Betatorquevirus sp.; identical to SEQ ID NO: 2156

SEQ ID NO: 3983 - DNA, 2734 bp, Betatorquevirus sp.
caggtgctggaggtgagtgaaaccaccgaaatcaaggggcttaatgggcgggcgaagtctaggcggaatgggcatcaaattaaaaatatatattacattacagatgacctactatatgaaaaaccacaaccacactccaaaataccttgaattaggatggattaacagcattttccagaatcacgatcaaatttgtggctgcaacaacgtcattactcacctacttggagctattaaccaccaaaatagcaagaaaattttatctcgacaagaaattaagaaaatacaatgccgccttactggagaagaaactatcgataccgaaactggagaagacgacgcccttaccggtggagaactagaggctttgttcgcagacaacgttttcgaagaagaagagcctacagggtaagaagacgacgcattcataaaaaactttctaaaattagaatacatgaatttcagccagagactattaaactgtgcaaaattaaaggaactaaatgtttgtttcaaggaggatatgatagacgtagcaataattatgctcaatatataggatcaatagtgccagaacatgaaccagggggcggagggtggtctctgatggtattctcactagatagcctctgggaagactatgaacacctacaaaacatatggacaactagcaatgcaggccttccactatgcagatttttaggagttactatgagattttaccaacaagaatacacagactatgtagttaactatgatctatgctggcctatgaaagacacaccactaacacatgcaaatagccacccacaaagaatgctactacaaaaaaataaaattgtagttcctagcctattaactaaaagacgaaaaaaaccttatgttaaaaaatttattaaacctcctgcacaattaaaaaatgaatggtactttcaaaaagacttagctggagtagatttgctaatgctaaccacaaccgcatgtgacctaagaaacagttttatttcaccaccagctaagagcaataacataacacttacttccttaaatactaacttctggtacaaccgcaatttccaaagaccttccgcaactactggctacagtcctaaaaataacacatatatgtacacacagggtaacggcacaaccgcaacgcccacacaaaaagaccaactaatttacttaggaaactccattgattatcaaccaggacaaaaactcccaaaaggccaaggtgaggcaggacaaatgacaacctggggaaacccattttatcatttatatacacaaacagatatacctatctatataagccaaaaccctcctacaactttacctccaagtttacaaggaaaaataacagaaacaacacaatacttaggagtaaaagttagatacaacccagaaaaagacacaggtgaaggaaacatggcctactttttaccaaacacaacaggctcaggatgggacccccctgaagaccccaacttaagaatagaaggctttcctctatggcttatgctatggggatgggcagactggattaaaaaattagcacatattgcaaaagttgatgacaactacatgctagttattagaagtagcttttttgattcacaattaccagcatacgtatttttagatgaatccttttggaacggtgaaggcccatataaaactgaaaggtctacatatgaccactttcactggtatccacaatttaaataccaaaaactatcaattgaaacaattagtacaagtggaccttatgtagcgcacactccttcacaaaattccttacaagccaaatgtatatattcatttaaatttaaatggggaggctgtccaagaaccatagaaaaaatttatgctccttcctcacagcccacctggattacaccccataacttcactatcggatctaaagtccagaatccaagaacaaacccactcacatacatctacccatgggacacaaaaagagacattatcacagaaaacgctttacaaagaatacaagaacaacaagaaactgatgaacttttatcaaaacctacaggactaccaactacaagcagaagcgacccaaaaccgatactccaaaaaacccaagaaagcgacccggagacatcgtcagaggaagaagagaaaacaccattacagctccagctcaacaagctccgccgaagacagcaactcctcaagcagctcctcctgaaaacccaaaaaaatatagaataatacatattgaaaaacaaataaacttatttggacccgttgagtctcctaacaggagacttactttatgggagcaacaacaagaaaaagaggacgcagccatatggctaagacctcaaagacattatattaaagataaacctacctatccttttttccctcttactcccttagttcccaaacttaattttgacttgggttataatcaataaaggccaacaattttcacttaatggtgtctgtttctttaagtttaacttaactaaacgaactccgcctcccaacactgttggcgccaaaagggggctccgcccccttaaacccccgggggggccccccccaataacgtcacaaactccacctataactccaccctaatgaataataaatttgggaggagctacttccctatataactaacagtacttccgaatggctgagtttatgccgccagacggaggcaaggaaggttactgacttgactgagcctggg

SEQ ID NO: 3984 - protein, 651 aa, Betatorquevirus sp.; identical to SEQ ID NO: 3773

SEQ ID NO: 3985 - protein, 122 aa, Betatorquevirus sp.; identical to SEQ ID NO: 3774

SEQ ID NO: 3986 - DNA, 2731 bp, Gammatorquevirus sp.
gacgaatggctgagtttaccccgctagacggtctaggggcaattcgggctagggcagtctagcggaacgggcaacaaacttaaatatatttattttacagatgacattctttactccaacaatttacaatggagatacaaaatgtcaaatgtggatgactattattcaagattcacatgacatacactgtggctgtaacaaaccatatgctcacctgctatccagcatttttcctgaaggccacaaagacagagaattgacaatacaacaaataattgacagagatattcaagaatgcctttctggtggcgcagaagaagaaggccttggtatggccgcaggtacaagcgccgcaactatagaaagacatataaaagaagacaatacagaagaagaaaatatacaagacctactagacgccgcagaagacgcagaaaaaaggtaagaagaaaaagaaaaactctaactgttaaacaatggcaaccagatacaataagaaaatgtaaaataaaaggaatgtctactcatgttctaggtgctcatggcaaacaatttgcatgctttacagacaccagaactgactggacacctccactacaaccagggggaggtggatttggtgtagaaaaatatacattgtcttacttatatgaagaaaatgtggctggtaacaatgtatggacacaaagcaatagatatctagatctctgcagatatactggctgtaaaatagaatttttcagacacccaaacatagactttgtcatgaagtatactagaatgttaccaatgaacttagaaaaatttacatacccagatgcacacccccaatcaatactactaggcagacataaaagaataatacctagcctactaacaaaaccaaatggtaaaagaactgttaaagttaaaattaaaccaccaaaacagattactaacaaatggttctttcaagaaacatttgctcctacaggcttagttcaaataacaactgctgcagcagacctaagatacccacacttaggctgctgtaacacaaatgaactactaacatttgcctgcattaatttacaattctaccaaagagctggctggggaaacccaactgatcctataactgttacatccagtcactggtacatgcccagaaacggtcaaccacttatatctatagtaacagtagcaggtaaagataaaaatatacaaacaaaacaattaccttaccaagacactataaactatgaaacaggctggtttcaaccaacactgctacaagcagactccataaaaacaccacctcaacaagtactaccaattagctatggtagatacaaccccaccagagacacgggagaagacaatgaagtgtggtttcaaagtacattatctggtactttacaaccacctaaaacagacttagacttatacatacatggcttacctatatggcatgctctatatggatttgcaaactttgtacaaaaaaaaaaaggagacaaaacatttctagaaacatatgtactttgcattagaagtaaattcatagagcctgcacataccataagtaacatatacgttcctatagacaattcctttatacaaggtaaaggaccatatgattcatacaccacaactaaaatgaaacaaacatggttccctaaactactacatcaacaaaaaacaataaatcaatttgtaacagcaggaccatttataccaaagttagacaaccaaagaaattcaacatgggaactttactcaaaatatacattttattttaagttcggtggctcagaattaccagaaccagatgtctttgatccagcaacacaaggtcagttccctgtacccactaacatcagccagacagtacaagtctgtgatccggagaggacaactgcccttgccacactccactcctgggattttagaaggggaatcattacaagcaaagcttataaacgaatgtatgaaaaccaaccaattgattcagatttccaaacagatacagagcaaccaaaagcaaagaaaaagaaagagatgcgaggaaatgctctcagcagtctcccacaggagacagaagaaatccaagcatgtctccactcactctgcgaagagcctacatgccaagagccgaaaacacaagaagaaatactcttcctcatccaccagcagcagcagcagcaaaagcagctcaagcaaaacctcctcaccctcatcaaagacctgaaaaccaaacaaaagataatacagctacaaactggaatattagaatgagactgttcaaaccaggctttgaacaagacactgaaaaacagttagcacaagcatttaaaagacctgtaagaaaatttaaagatgacccacctttctacccctggctacctatagaacccaaagttaactttgcccttaattttaaattctaggccgacactgttcacttagtggtgtttgtttaataaagtttgcacctcaaaaaaattgtaaaataaaaaaaaaaaaaaaaaaataaaaaattgcaaaaattcacaccccccgcggggggggggcagagccccccccgcaccccccctacgtcacaggccacgcccccgccgccatcttgggtgcggcaaggcggggtctaaaatggcgggacccaatcattttatactttcactttccaattaaacactgccacatcacagcaaaggggtgggaacttagaaactatataaccaagtggggt

SEQ ID NO: 3987 - protein, 660 aa, Gammatorquevirus sp.
MPFWWRRRRRPWYGRRYKRRNYRKTYKRRQYRRRKYTRPTRRRRRRRKKVRRKRKTLTVKQWQPDTIRKCKIKGMSTHVLGAHGKQFACFTDTRTDWTPPLQPGGGGFGVEKYTLSYLYEENVAGNNVWTQSNRYLDLCRYTGCKIEFFRHPNIDFVMKYTRMLPMNLEKFTYPDAHPQSILLGRHKRIIPSLLTKPNGKRTVKVKIKPPKQITNKWFFQETFAPTGLVQITTAAADLRYPHLGCCNTNELLTFACINLQFYQRAGWGNPTDPITVTSSHWYMPRNGQPLISIVTVAGKDKNIQTKQLPYQDTINYETGWFQPTLLQADSIKTPPQQVLPISYGRYNPTRDTGEDNEVWFQSTLSGTLQPPKTDLDLYIHGLPIWHALYGFANFVQKKKGDKTFLETYVLCIRSKFIEPAHTISNIYVPIDNSFIQGKGPYDSYTTTKMKQTWFPKLLHQQKTINQFVTAGPFIPKLDNQRNSTWELYSKYTFYFKFGGSELPEPDVFDPATQGQFPVPTNISQTVQVCDPERTTALATLHSWDFRRGIITSKAYKRMYENQPIDSDFQTDTEQPKAKKKKEMRGNALSSLPQETEEIQACLHSLCEEPTCQEPKTQEEILFLIHQQQQQQKQLKQNLLTLIKDLKTKQKIIQLQTGILE

SEQ ID NO: 3988 - protein, 114 aa, Gammatorquevirus sp.
MTFFTPTIYNGDTKCQMWMTIIQDSHDIHCGCNKPYAHLLSSIFPEGHKDRELTIQQIIDRDIQECLSGGAEEEGLGMAAGTSAATIERHIKEDNTEEENIQDLLDAAEDAEKR

SEQ ID NO: 3989 - protein, 111 aa, Gammatorquevirus sp.
MSPLTLRRAYMPRAENTRRNTLPHPPAAAAAKAAQAKPPHPHQRPENQTKDNTATNWNIRMRLFKPGFEQDTEKQLAQAFKRPVRKFKDDPPFYPWLPIEPKVNFALNFKF

SEQ ID NO: 3990 - DNA, 2731 bp, Alphatorquevirus sp.
ggccgggctatgggcaaggctcttagggttatcgctcttaaaatatgttttttggcaggccttggcgaaagaaagggaaagtgccactgctggctgtgtcagctacaccgccgccacaacctatgagccactggagaccaccggtacacaatgtaccgggacaagaaaggcaatactacgagggctgcttccgtatgcatgctgctttttgcggttgtggcgattttattaatcatcttaacagtctggcgtctcgtattggatctcctggaaatggccagccgccgcgcccagaccccccgcctagactaagggccctgccggccccgtctagctccagcactcccaccgactcccgccagctgccatggcgtggagatggtggtggagacgacgccccaggtggaggcgccgccgctggaggcccagacgacggagagcttggcccagaagacgtcgacgagctgctcgaactcatcgacgacgcagagtaaggaggcgaaagtggggcaggcgcgggtggagacggagaacttatataagacgcaggaggcgccgccagaaaaaaattaagataactcagtggaaccccgccactgtaaagaaatgcgtggttaccggatacatccccctcctcatttgtggatcggggaccaccggaaccacctacagaaactatgggagccacatgaatgactttgttaaatatgacccgtttggagggggctttagcactcttatgtttaacctgtctgtgttgtatgacgaatataagaaacaaagatgcaggtggagccacacaaatgacaacctagaacttgtaagatacctaggatgcacctttaccctgtacagagagccaaatgttgactttatatttagctacaacagaaagcctccctttgtagagagccagataactggccccagcctgcacccaggcatactaatgaacaagaggagaagaatactagtaaagagctataaaacaaagcctaaaggcaaaccctatagaaaaattaaaattaagccccccacactgttcactgacaagtggtactttcaaaaggacttatgcaaattacccctgctaacggtttccgcctctgcggctaacctgcggtttccgtttagctcaccacaaactgaaaacatttgcatatacttccagattttgcacccagaatattacaagagcataggcatcctaactgaaaaacttgaaagcaactataatgcactatttgataaattacaaagagactataacagtaaaaggttataccctgaaggtcaaagcaagcccacctcaggacccataggcacagtatttaacacctttcgcacacaagaacacataattgacccttcctacacaggcgcacaacaaaaaccaggaggaactgctaaacccagcaaatgggacactaactttgtagacagcctatggggagaccatgtatacaccagcaaaatacttgaggacatgaaagaaaatgccacaaaaatgtatagcaaaagaaaaagggaaacatacctaggtagtaaatacattaactttaaaacaggcatgtttagtcccatatttctttctaacgaaagactggccccagactttccaggcctgtatctagaagtagtatacaaccccctactagacgcaggcgaaggcaacaaagtatgggtagactggtgctctatggacgacactatgtggaacgacaggcccagcagactaactatatcagacattccgctgtgggctgcctttatgggcctaaaagactatgccacaaaatactttcacagccctggccttcaaaaagagatgagagtaacaataatgtgcccctatactgagccaaaactgtttaacaataataacacagaccagggattcgtcccgtacgactacaactttggcaagggtcgcatgccggacggaaacggatacatacccctagactacagatttcagtggtatccctgcatgtttcaccaacaaaactttatgaatgacatggtacagtgcggaccgtttgcctacaaaccacaagaagagaaaagctgcacccttacttgcagatactcatttaagtttttatttgggggcaatcctatctctcaacagacaatcaaagacccctgcaaacaacccgattttcccatgcccggctcccgtgacttctttggtgcagtacaaatcacgaatccgaggctcatcgacgagggatatttcttcaaggcctgggacttcagaagaggcctctttggccaaagagctattaaaagaatgcaacaacaacaaacgcctcttacgctttttacaggcccaccaaaaagaccaagaatggaagttcccgcccttgccgacggagactcagatatactccctacaaaatggcacccctgggcagaaaccacccaggaagaagcgagccaagaagaagagtccagttcgcagacgcagacgacgccactacagctcgtcctcaggaaacagctccgagagcaaagagagctcaagtgcagagtccagtacttagtaaaacagttagtaaagacccaatatcacctacacgcccccattatccactaattggcaacaaagctttgctatttccagagttggctcctaaaatacctagcagccaagactggaaatttgaatacgaggcctgtgccgcttgggacaggcctgctagaacccgccttacagatacacctttct

SEQ ID NO: 3991 - protein, 743 aa, Alphatorquevirus sp.
MAWRWWWRRRPRWRRRRWRPRRRRAWPRRRRRAARTHRRRRVRRRKWGRRGWRRRTYIRRRRRRQKKIKITQWNPATVKKCVVTGYIPLLICGSGTTGTTYRNYGSHMNDFVKYDPFGGGFSTLMFNLSVLYDEYKKQRCRWSHTNDNLELVRYLGCTFTLYREPNVDFIFSYNRKPPFVESQITGPSLHPGILMNKRRRILVKSYKTKPKGKPYRKIKIKPPTLFTDKWYFQKDLCKLPLLTVSASAANLRFPFSSPQTENICIYFQILHPEYYKSIGILTEKLESNYNALFDKLQRDYNSKRLYPEGQSKPTSGPIGTVFNTFRTQEHIIDPSYTGAQQKPGGTAKPSKWDTNFVDSLWGDHVYTSKILEDMKENATKMYSKRKRETYLGSKYINFKTGMFSPIFLSNERLAPDFPGLYLEVVYNPLLDAGEGNKVWVDWCSMDDTMWNDRPSRLTISDIPLWAAFMGLKDYATKYFHSPGLQKEMRVTIMCPYTEPKLFNNNNTDQGFVPYDYNFGKGRMPDGNGYIPLDYRFQWYPCMFHQQNFMNDMVQCGPFAYKPQEEKSCTLTCRYSFKFLFGGNPISQQTIKDPCKQPDFPMPGSRDFFGAVQITNPRLIDEGYFFKAWDFRRGLFGQRAIKRMQQQQTPLTLFTGPPKRPRMEVPALADGDSDILPTKWHPWAETTQEEASQEEESSSQTQTTPLQLVLRKQLREQRELKCRVQYLVKQLVKTQYHLHAPIIH

SEQ ID NO: 3992 - protein, 149 aa, Alphatorquevirus sp.
MFFGRPWRKKGKVPLLAVSATPPPQPMSHWRPPVHNVPGQERQYYEGCFRMHAAFCGCGDFINHLNSLASRIGSPGNGQPPRPDPPPRLRALPAPSSSSTPTDSRQLPWRGDGGGDDAPGGGAAAGGPDDGELGPEDVDELLELIDDAE

SEQ ID NO: 3993 - DNA, 2725 bp, Betatorquevirus sp.
cgggagccgaaggtgagtgaaaccaccgtagtctaggggcaattcgggctagttcagtctggcggaacgggcaagaaacttaaaaaatatatttactttacagatgagcgacaaaaaaccaacaagaagagacttaaaccaactaataaatgtctgctgtggagcccatgacttagtgtgctactgcaacgaaccaacaaagcacattattcttcatttattcagcaaccaagagccttactttgtaacaaaagaagaaaaggataatataacaaaatgccttattactaccgaagaaggcaaaacagatatcgtcgccgaagatggtttcgaccatggagatttagaggctttattcgccatagaagacgccgctggagaaaacaacgcagggtaagaagaaaacttaaaagactttctataaaagaatggcagcctgaaaacattaaaaaatgctgcataaaaggcttacactgcctattttactgtaacaaagatactttacaaagaaactttagaatgtatgaacatagcataaatcctgaacatatcccaggaggaggaggattttctataactaaatacagcttagatggactttacgaacagcatgaacttgatagaaactggtggactcaaactaattataatttacctatggcaagatacttaggtggatatctaaaatgttatcaaagcaaacatgttgattatcttgtaaaatgtcactttaattatcctatggtagcaactcaattactgtatcaatcttgtcaacctagttttatgatgatgagccgctatactcactttatacctagtaaagaaactagactactcaaaaaaggatacaaaaaaattaaattacaccccccacaacaaatgagtaacaaatggtacttccaaagagacctatgcaaaacaggcttagtactaatacaagcagtagcagcctcttttgaccaatattacataggaacatacaacacatctaacaactgtactttatatacactaaacccacacttttggaaaagacacgactttatacaaccaccagtagatggttacacaccatactcagcaggaacaatcacaaaacacctatggacaactcactcaattataaccgatataactaaattaaaagcagaaaacttaatctacttatctttaacacaaaaaaaccaaccaggaacagaacttacaaaaacaaaccaaaacacttactttacagaccacaaaaattggggaaacccatttaaagaagaatacttaactgaaacagacacaatttatgttacaactgaaccaatggtaacattaaaagaaaaactatttacctccctaaatagctcaacagcactacaaacaggaattattacacaagtatcacaaaaactactaatacaatgcagatactctccagacagggacacaggagaaggaaacaaaatgtacttaaaaaacttaataagagacacatcaggatgggaagaaccctcagaagaagacctaataaccgaaggctttcctttatggacattagcatttggtttcctagattggcacaaaaaactaggaacagcagtaaacctatatagatcatgggtaatagttatacaaagtaaatttatagaacctgaattaccatactatatattgctagactacaattttgttcacgacacatcaccttaccaagacacatcacaaaaaataaaagatccagatgatgaaaataaatggtatccaagctgcagataccaacaacagtcactagaatctctagtacaaacaggaccaggaatatatagatttcataatgaaaagtcagtacaagcaaaaataaaatataacttttattttaagtttggaggatgtgtaccaaagatggacactattcacaacccttgcgaacaagcaatatatcccattccaaatcaaatctcttcaacatattcgttacagaatccagcacagccaccagaaacattcctctaccaattcgacgtttacaaagacttacttacaaaagcagctacaaaaagaatcacaaaagattggcaaactgaaacatctttttcaacaggtcaatcaagaatgcaacccagcacagcacaaaaagccctcgaagaggaagagacagcatcggacgaggaaaaagacccgcaaaagatgttcctccagctccagcagtacaagcgggagcgacgactcctggagttccagctcagggaactcctaacacaaccataaactttcaatgtgtaaaaaaagtacttttgtttgaacctgaacgtaaaaaggttagaaaaatgaccaaggaagaattagaaactgaaagattttgtgctattgcttttaaaagaccacctgtatctatgtggggcgatattccttactggccctggttgcaaccagagcctctagttaatcaactcccaaaagtttcctttgacttaaactataaaccctaataaaatttcaaggccaacaaatttcacttagtggtgtctgtttattaaagtttaacctatataagctaacaccgcctcccaacagtgttggcgccaaaagggggctccgcccccttacacccccaagggggctccgcccccttaaacccccaagggggctctgcccccttacaccccctaattaatattcaacaggaaaaccacctaattagaattgccgaccacaaacggtcaaccgttacggg

SEQ ID NO: 3994 - protein, 660 aa, Betatorquevirus sp.
MPYYYRRRQNRYRRRRWFRPWRFRGFIRHRRRRWRKQRRVRRKLKRLSIKEWQPENIKKCCIKGLHCLFYCNKDTLQRNFRMYEHSINPEHIPGGGGFSITKYSLDGLYEQHELDRNWWTQTNYNLPMARYLGGYLKCYQSKHVDYLVKCHFNYPMVATQLLYQSCQPSFMMMSRYTHFIPSKETRLLKKGYKKIKLHPPQQMSNKWYFQRDLCKTGLVLIQAVAASFDQYYIGTYNTSNNCTLYTLNPHFWKRHDFIQPPVDGYTPYSAGTITKHLWTTHSIITDITKLKAENLIYLSLTQKNQPGTELTKTNQNTYFTDHKNWGNPFKEEYLTETDTIYVTTEPMVTLKEKLFTSLNSSTALQTGIITQVSQKLLIQCRYSPDRDTGEGNKMYLKNLIRDTSGWEEPSEEDLITEGFPLWTLAFGFLDWHKKLGTAVNLYRSWVIVIQSKFIEPELPYYILLDYNFVHDTSPYQDTSQKIKDPDDENKWYPSCRYQQQSLESLVQTGPGIYRFHNEKSVQAKIKYNFYFKFGGCVPKMDTIHNPCEQAIYPIPNQISSTYSLQNPAQPPETFLYQFDVYKDLLTKAATKRITKDWQTETSFSTGQSRMQPSTAQKALEEEETASDEEKDPQKMFLQLQQYKRERRLLEFQLRELLTQP

SEQ ID NO: 3995 - protein, 112 aa, Betatorquevirus sp.
LAERARNLKNIFTLQMSDKKPTRRDLNQLINVCCGAHDLVCYCNEPTKHIILHLFSNQEPYFVTKEEKDNITKCLITTEEGKTDIVAEDGFDHGDLEALFAIEDAAGENNAG

SEQ ID NO: 3996 - protein, 64 aa, Betatorquevirus sp.
LFEPERKKVRKMTKEELETERFCAIAFKRPPVSMWGDIPYWPWLQPEPLVNQLPKVSFDLNYKP

SEQ ID NO: 3997 - DNA, 2724 bp, Betatorquevirus sp.
cgggtgctgaaggtgagtgaaaccaccgaaatcaaggggcaattcgggctatggcagtctagcggaacgggcaagtaacttaaaatattttacaggtatgtcattaaaacctccaagatatggaccccgcggactggaactacaatttttgaactcaatataccaaaaccacgacttaatctgtggctgcgacgatcaacttttacatatcctttcaataattagcagaaacaacaaaacaaacctttccgatactaaacttaaagaaataaaatgcctgcttactggagaaactactggagaaacagaagaacccgctggcgccgcagacgtcctagacgctatcgacgatggagatttagacgcccttttcgaactttcagacgatatggacgccaacaatgggtaagaagaaaatttaaactatcttctataaaacttaaaatgtaccaacctagaacaataagaaactgtgtaataaaaggaatgaaatgtttatttgaaggaagtgccatgagaaaatctaacaactactggcaatatcctcacactataataccagaaaaatttccaggaggaggaggatggggactacaagtaattagcttaagttctttatgggaagattatcaacatttaagtaattacttcagcacaagcaatgctggactaccactggtacgttttagaggcatgaaactaatattttaccaaaatcaaacaacagactatgttgtagaaattgaaaactgctggccaatggttgatacacctctaaaacatgccaactcacaaccacaaagaatgttaatgagcaaaaagaaaattattgtacctagtatatatactaagagactaagaaaaggaaaaaagaaaacttatgtaaaaccaccagcacaaatgattaatcaatggtattttcaaaaagacgtgtgtaatacaaaactagcaatgataacagcaacagcctgtagccttacagattattacttaccatataaagcagaatcaaacaatatatcactaaatgcattaaatacaaacatctttaaaaatgcagactttcaacaacctgctgcaacaacaggatacagccctcgcaataattattatttttattcaacatggaatggcactcttggcattccaaaaaaagcacaacaactaatatacttaggagacagtaaaaactttgtacaaggaaaacaaacacctatagaaaaattaaaaaaagatggattcccaaaagaaaactggggtaaccctttatgggaacactatttaacaggtagtattccattatacacctcttctaaaggaccaacagatgaagtatggaaaaaaaatgccactaatccaattacagcaaatgacatagataaatggcttacaccattacactatccaccaacaactagagttagatataacccagacaaagacacaggcgagggaaacatagtttactttgtagacaactataacagagcaggagacaatagttttgatcccccagaagacgaaaacaaaaaaataacaggttttcctttatggatatgcctatggggatgggcagactggataaaaaaactaggcctactacctagagtagacaaagaccacattctagtaatacaaagttcattttttgatgtaaaatttccatactatgtgtttttagatgacagttttacaaacagtttcggtccttatgacacacctaaaactacagaagatgaatttaactggtatcctaaattttggtaccaacaaaaatccattgaaaccatttgtgcttgtggtccaggagtaagcagagcaaaagacgatgaatcattacaagctaaaatggaatataaagtatatgttaaatggggaggttgtccttcaacactagaaaaagtttatgatccctgttcacagccaaaatggcccacaaccagtggtgtccaacaaacaatttcgatcacgaatccagaattcgaaccagcaaactacttctacagctgggatactagaagggactatcttacagacacagctctcaaaagacttaaaaaaaaccaagagactgatgaaactatttcaattaaaacaggctcaaaaagcagcccaagcgcagacctacaagtcctccaaacactccaagaaagctccgacgaagcatcgacaccggaaaaaaagaaagagacactgcagcacaagctcctccgactccgccgaaaccacaagcaactgcagcagcagctcatcagatacctaaaatcaccataatacataaacctgttaaaataaacttatttaacgatcctaaacctgtaaaaaacagaccattcacagaatctgaatggcaagatgaaaaatttatagcttcctggttaaaaagacctcaaagacatttcttttacgatcctcctatttacccactctttcctcctgcaccccttgctaactttgaccttaattacaaagaataaaggcctacaattttcacttagtggtgtctgtttatttaagtttaaccttaataagcatccaccgcctcccaacctcgtaggcgccaaaatttaaaaaggggctccgccccttaaaccccagggggctccgccccctaacccccagggggctccgccccctctaacccccaagggggctccgccccctaccaccccctaataaatattcatacaggaaaccacaaaattagaattgccgaccacaggg

SEQ ID NO: 3998 - protein, 666 aa, Betatorquevirus sp.
MPAYWRNYWRNRRTRWRRRRPRRYRRWRFRRPFRTFRRYGRQQWVRRKFKLSSIKLKMYQPRTIRNCVIKGMKCLFEGSAMRKSNNYWQYPHTIIPEKFPGGGGWGLQVISLSSLWEDYQHLSNYFSTSNAGLPLVRFRGMKLIFYQNQTTDYVVEIENCWPMVDTPLKHANSQPQRMLMSKKKIIVPSIYTKRLRKGKKKTYVKPPAQMINQWYFQKDVCNTKLAMITATACSLTDYYLPYKAESNNISLNALNTNIFKNADFQQPAATTGYSPRNNYYFYSTWNGTLGIPKKAQQLIYLGDSKNFVQGKQTPIEKLKKDGFPKENWGNPLWEHYLTGSIPLYTSSKGPTDEVWKKNATNPITANDIDKWLTPLHYPPTTRVRYNPDKDTGEGNIVYFVDNYNRAGDNSFDPPEDENKKITGFPLWICLWGWADWIKKLGLLPRVDKDHILVIQSSFFDVKFPYYVFLDDSFTNSFGPYDTPKTTEDEFNWYPKFWYQQKSIETICACGPGVSRAKDDESLQAKMEYKVYVKWGGCPSTLEKVYDPCSQPKWPTTSGVQQTISITNPEFEPANYFYSWDTRRDYLTDTALKRLKKNQETDETISIKTGSKSSPSADLQVLQTLQESSDEASTPEKKKETLQHKLLRLRRNHKQLQQQLIRYLKSP

SEQ ID NO: 3999 - protein, 103 aa, Betatorquevirus sp.; identical to SEQ ID NO: 2208

SEQ ID NO: 4000 - DNA, 2723 bp, Betatorquevirus sp.
cgggagccggaggtgagtgaaaccaccgtagtctaggggcaattcgggctagatcagtctggcggaacgggcaagaaactaaaaatattttactttacagatgagcaagctctacaaacctttaaacattggaattaaacacagaaatctacaatggatgaacctacaagttggacttcatgatatgcactgccactgcgacaacccactgaaacatataattctacacattttggaacaagaacccacaattaaatttaacaaagaagaatctgaaattattcaaaaatgccttactacagaagaagaagacgatggagacgttattggacccggagatttagatacccttttcgcagaagacgtttttggagaagaagacaacaacgggtaagaaaaccaaaaaagaaacttaaaaaaattactataaaacaatggcaaccatctaccattaaaaaactatttgtaaaaggacaatacccactatttgccggtacatcagacagaatagcaaatgactatacagcctatgtagatgaaatagccccaaaagatgtaccaggaggtggactatattcaataactgtttttactttacaaggactatatgaactacatcaaaaagctagaaattggtggactcaaagtaactgtaacttacctttaataagatatatgggatgtaccttaaaactgtatttaaacagttcatgtgactatataactactgttgttaactgtggggaactgaaagcaaacttagaaatgtttcattctactcaaccttccgtgttacttttaaacaaacgaaaaaaagtaatgctttgcagaaactataagaaaaaaagacgaccctttaaaaaatggtttatacatccaccagctttactagaaaacaaatggtactttcaaaaagacctagcaaaatacccattattcatggtaataacaagtgccgctagctttgaaagatactatcaatgctctacatgcatatcagaaacagtaggatttcaatcccttaacacagatttttttgtaatacactcatggaaatatccttccacaacaccatacaaacctaaccaagaattttacatgtttggaataggaggcagaacaacttttgactcagccacaccacagcaactaattttattaggtgctcccacagacaacacactaggtaaaatgataggcgaacaaccagacccacaatgggaatcaaaagtagaaaaatacatgcaaaaatctacaaactggggtaacccctttcacccaacctggctacacgcagacacagcagaaggacttatatgcttaaaaaaagtagaagccacacaagacttaaaaacagttttaaaaggtttaaaaccaaacatgaccttaagcaatcaaggatttatagaacctacaaagccttttacagtacactgcagatataacccacaagctgatatgggacacaacgctatatttgttaccagaatatcaggtgacaacacaccatggcataaaccaaacgatgaacacctaatcacacaaggtttaccactatggattttacactggggatggctagactatttaagaaaaacaggcactccacaaagactagacacagactacatacatgttatagtgtctgactacattcaaccaaaagaattaagttactacgtaccagtagaccaaccctttttagacggaaaaagcccatattcagaccatattaaaccatatgatcaacaaaactggcacccaaaaataaactttcaacaacaagcaatatcacacatatgcaactcaggacccctaactgtaaaactaccaaaagacatatcagttgagggacacttatcttataaatttcattttaagcttggaggatgcccaccagcaatggacaaagtttgtgaaccttctagacaacccacctatccccagcccggtaacttcctatcatcaattatattgcagaacccacaaacaccaatcgaatactttctcagctccttcgaccaaagacgagacctccttacacacaaagctgcaaagcgcctcaaaaaagactcagactttacagaaccttttcttaaacctgcaggaaaaagtttcctcgatgtccaaacaacatctccccaaacaacatcgtcggaggactcatcgacggaggaagaaagcgaagaagagacacagcagcagctccagcgacaccaccgaaaacaccgaaaactccagcgaggaattctcaagctcctgaacctcctccaacattcaaaataattaatagtacaataaaagtaaacctatttcctgattccaaacaaaaaaatagacgcctgacagctaaggaaagatgtgaggatatacaagatgctaaaatatggggcagatatgtaaaaaattatctacttgaaactcatttctataaagatgtacccattactcccttagttccctctcttaactttaaccttggttacaaagaataaagcctgcatactttcacacctcggtgtccatttattaaagttttaacttatataaacatccaccacactccctaatacgcaggcgccaaagggggctccgcccccttaaaccccaagggggctccgcccccttaaacccccaggggggctaactacactgacgaatggctgagtttacgccgccagacggagacgggatcactacagtgactccaggctgatcttggg

SEQ ID NO: 4001 - protein, 665 aa, Betatorquevirus sp.
MPYYRRRRRWRRYWTRRFRYPFRRRRFWRRRQQRVRKPKKKLKKITIKQWQPSTIKKLFVKGQYPLFAGTSDRIANDYTAYVDEIAPKDVPGGGLYSITVFTLQGLYELHQKARNWWTQSNCNLPLIRYMGCTLKLYLNSSCDYITTVVNCGELKANLEMFHSTQPSVLLLNKRKKVMLCRNYKKKRRPFKKWFIHPPALLENKWYFQKDLAKYPLFMVITSAASFERYYQCSTCISETVGFQSLNTDFFVIHSWKYPSTTPYKPNQEFYMFGIGGRTTFDSATPQQLILLGAPTDNTLGKMIGEQPDPQWESKVEKYMQKSTNWGNPFHPTWLHADTAEGLICLKKVEATQDLKTVLKGLKPNMTLSNQGFIEPTKPFTVHCRYNPQADMGHNAIFVTRISGDNTPWHKPNDEHLITQGLPLWILHWGWLDYLRKTGTPQRLDTDYIHVIVSDYIQPKELSYYVPVDQPFLDGKSPYSDHIKPYDQQNWHPKINFQQQAISHICNSGPLTVKLPKDISVEGHLSYKFHFKLGGCPPAMDKVCEPSRQPTYPQPGNFLSSIILQNPQTPIEYFLSSFDQRRDLLTHKAAKRLKKDSDFTEPFLKPAGKSFLDVQTTSPQTTSSEDSSTEEESEEETQQQLQRHHRKHRKLQRGILKLLNLLQHSK

SEQ ID NO: 4002 - protein, 97 aa, Betatorquevirus sp.
MSKLYKPLNIGIKHRNLQWMNLQVGLHDMHCHCDNPLKHIILHILEQEPTIKFNKEESEIIQKCLTTEEEDDGDVIGPGDLDTLFAEDVFGEEDNNG

SEQ ID NO: 4003 - DNA, 2722 bp, Betatorquevirus sp.
caggagccgaaggtgagtgaaaccaccgtagtctaggggcaatatgggctagttcagtctggcggaacgggcaagaaacttaaaatatattttttcttacagaatgagctactcaaaacagacgccatctttatataaaacagaaagatcaaaaaataaccaaataattaacaccattattggaacccacgacttatgctgcggctgcaacgacccaacaagccaccttactcatctgttaattacaacctgtaaaccaacaagttttaacaaaaaagaaaaacaagaaattaaacaatggtgtggtacccttacagaagatactactggagaagaagacgaccaaactggattactccctggagaactagacgcgcttttcgccgaagaagatacaaacacagacgggtaagaacaaaatttaaattacccgctataccaataagacaatggcaaccaaaatcaataagatactgtcatataaaaggacttgaatgcctatgtctatttaatcaagcaagactacattctaacagtgtaatgtataaagaatcttttgtaccagaaggttacccgggagggggaggattctctgtaatgaaatttaccttacaaaacttgtatgaaatgcatcaaaaatgttataattggtggacacaaagtaatgatgatttaccattatgtagatatctaggatgtaaacttaaattttatagcagtgaaaattttgactacattgtaaaatatgacaatacattaccagcaacaagcaacaaactaacatatccatcgacacaaccaagcatgcttttaatgagcagccacaaaaaaataataccaagcagaaaaactaacccaaaaagaaaaccatatacaatagtaagagtaaaaccaccagcaaagttagaaaacaagtggtactttcaaaaagaatttagagaaataccactagtagtattatacacagcaccaacaagcttaaaacaattttacataaattcacaaaaagaaaacaacaacataaccattaacagcataaacacaacattaataacaaacagagacttcaaactagcaatatggccttttaaaatagatggaacaactacattatatatgtgggaatatgtaggagacgaaccagaaggagaagaactatgcaaatacatgataccactaacaaatattagacaatttacccaaggaggatgctataaagacatacatccaacatcagacacaagagacaacataatacaatactgtacaagaatacaacaatacacaggaaacccatttgtaccagaacacagagaaggaaaactagggggaagattttatagcagtaaaacaggaccacaaacatttgcaacatggtggaaagccaatccagaaatacaaaagaaagtatcagatgtagtagataacggaggaaaaatgcaaataaccagaatacatgacccactagtagaaaaatacagatacaacccatttagagacaccggacagagaacacaaatgtacttattaaaatgtaacgaatcaacacaagctagaacagcatggaatccaccaactaatccagacattatactaagcggatttcctttatggttaaatatttggggatatatagactttcaaataaaattaggagcaatacaatcaatagagggaaataccatgttagtatttaaatctgatgcactaaaaccaaacacaaacaaaccaatagtagtgatagactctgactatttaaatggaaaaagcccctaccaagataaagtatctaaagaagatgctaacaattggtggcctagtgtacaataccaaacagaacaaattaatttaatagcacaaacaggaccaggtacaacaaaattatatgataaaacaagtgaacaaatagtagtaaaatatgactttagatttaaatggggaggagaaccagctaaaatgataaatgttgaaaatccttcaaaacagattagatatcccctgcccagtgacgagtttaaacaaccttcgttgcagagtccagcacatgcctatgaaaccttgctgtactcctttgaccaaagacacgaccaacttacaaaacaagctcttaacagaatcacaaaagactgggacgttacagacattgtatctccaattacagaaccaactggagcagtaccagtactcccaacgtacccacaagcaacacaagagacggagaccgagaaaaaagaaaaagaagcattactcctccagctcatcaaccagcaacagcaacaacaacaactcagactcagaattgtcaacttaatgaaacaaatggatctgtaattaaaatgaaatgtgttaaaaaatgctatatatttgaacctccacaaaagaacaggaggctaacacctcaaaaatttgaggatgacttgtacatagctaaatggcttaaaagaccacctagaaactacctgttagacaaaccattttacccctggctcgtacctgagcccattgttaattttaaactaaactttactgaataaaggccagcattaattcactctcggtgtccatttaatataaaaaaaacttatataaaccaacaccgcctcccaaatacgcaggcgcaaagggggctccgcccccttaaacccccagggggggcaaagcccccccctaaccccccccaaaacacacccactaattaatattcaacaggaaaacccttggg

SEQ ID NO: 4004 - protein, 677 aa, Betatorquevirus sp.
MVWYPYRRYYWRRRRPNWITPWRTRRAFRRRRYKHRRVRTKFKLPAIPIRQWQPKSIRYCHIKGLECLCLFNQARLHSNSVMYKESFVPEGYPGGGGFSVMKFTLQNLYEMHQKCYNWWTQSNDDLPLCRYLGCKLKFYSSENFDYIVKYDNTLPATSNKLTYPSTQPSMLLMSSHKKIIPSRKTNPKRKPYTIVRVKPPAKLENKWYFQKEFREIPLVVLYTAPTSLKQFYINSQKENNNITINSINTTLITNRDFKLAIWPFKIDGTTTLYMWEYVGDEPEGEELCKYMIPLTNIRQFTQGGCYKDIHPTSDTRDNIIQYCTRIQQYTGNPFVPEHREGKLGGRFYSSKTGPQTFATWWKANPEIQKKVSDVVDNGGKMQITRIHDPLVEKYRYNPFRDTGQRTQMYLLKCNESTQARTAWNPPTNPDIILSGFPLWLNIWGYIDFQIKLGAIQSIEGNTMLVFKSDALKPNTNKPIVVIDSDYLNGKSPYQDKVSKEDANNWWPSVQYQTEQINLIAQTGPGTTKLYDKTSEQIVVKYDFRFKWGGEPAKMINVENPSKQIRYPLPSDEFKQPSLQSPAHAYETLLYSFDQRHDQLTKQALNRITKDWDVTDIVSPITEPTGAVPVLPTYPQATQETETEKKEKEALLLQLINQQQQQQQLRLRIVNLMKQMDL

SEQ ID NO: 4005 - protein, 117 aa, Betatorquevirus sp.
LAERARNLKYIFSYRMSYSKQTPSLYKTERSKNNQIINTIIGTHDLCCGCNDPTSHLTHLLITTCKPTSFNKKEKQEIKQWCGTLTEDTTGEEDDQTGLLPGELDALFAEEDTNTDG

SEQ ID NO: 4006 - protein, 135 aa, Betatorquevirus sp.
LGRYRHCISNYRTNWSSTSTPNVPTSNTRDGDREKRKRSITPPAHQPATATTTTQTQNCQLNETNGSVIKMKCVKKCYIFEPPQKNRRLTPQKFEDDLYIAKWLKRPPRNYLLDKPFYPWLVPEPIVNFKLNFTE

SEQ ID NO: 4007 - DNA, 2721 bp, Betatorquevirus sp.
caggtaccgaaggtgagtgaaaccaccgtagttaaggggcaatatgggctgaagcagtctggaggaccgggcaagaaacttaaatatatatttaatttacagatatgagcaactttctaacaccagcagtttacagcaaaaatggccttgaaaactgctggttaaactgcatttggaacacacacgaccttatgtgcggatgtaacaacgccattaaacatctttttgacatcttaaaaaaaagaagtgaactaccatgcctcccttcaacttctaccgaagacgctggcgtccaaactggagatggagacgaagaagacgttttacaacaaggagacttagacgccctcttcgcagacgattttggagacgacactgggtaagaagacgctactttactaaaaaaagaaaaagaaagcttaaaaaaattagactacaccaatggcaaccagaccagattaaaaaatgccacattaaaggacaattatgcttactaacctgcggcaaaggaaaaattaataataactttactctaactgctgaaagctatgtacctaccaaagaatcgggagggggagcatggagtataatgcaaataacattaagagctttgcatgatgaatatttacattttagaaactggtggacaacaagtaattgtggcttacctttaattagatatataggagtaactgtaaaattttataaaagtaatgattgtgactatattgtaactgtacaacacacaggaccatttgaagtaactagagacatttatttaagcacacaacccagcagacacatgatgaatcataaaagctttatagtaccaaaactaaatcctaacaaaaaaaaaagaccatacataaaaaaaagattttatccacctgctatgtggcaaaacaaatggtactttcaacaagacatatttaatcacccacttatactctttatagtaagtgcatgcagcctagatcaaatgtactgccccaacgacggagtaagtacaaatataacatttttatcactaaacacagacctttttcaaaacccacattgggaattagatgacgaacaaccttactacccaaaagtaacaggaacagtaaacacaggactatttactttatacaatggagaagattatcaaaccaaaaagaattggcaaacaataatacttttaggaaacacaactcaatttaaaaacatatctcatacacagcaacaaaacataaatacattttcagaatataacaaaaaacaaaactggggaaacccattttcaataacacacatagagggacacgaatctatacaaatatactatggaacaccaccaacatcaaacaattataatttaaaaccaaacatactacccataacaggactataccaagaatgcagatataatccatttcgagacaaaggcaaaaacaacaaagtgtatataaaatcaacaaaaacatttcaaggatcctttacttcactaccaacagacgaaagactattagtgcaagacatgccactatggttaatattctggggatggcaatcatggctacaaaaatctacacctgtacatcacttattagaagactaccaatttgttattcaatcagattacatatacccaccaatgaaaagctatgtaccactagatgcatactttactacacaacaaaaaacaccattaacagaaacagacaaacaacattggcacccaaaagcagaatttcaacaagaagtaatggctgcctttgccgctacaggcccagcagcaccaaaaataaacaaacaaaaccaaatacaaatacactgtttttatgatttttattttaagtggggaggatgcccaacacccatggaaacagtctgtaacccagcagaccaagaaaagttccccacgcccaataacctcatacaagaacctacaatcgagaatccagaaacaccaaaagaattctatttgtacaaattcgacgagcgacagggatttattacagcaccagctgcaaaaagacttaaaacagacattgaaacttcaaaatattttacagaatatggagcaagagacccaatactcgaagtcttcccaccgacggaccaaacacaaaagaaaaagaccacggaagaagaaaaagacccgctacagctccagctccagcagctccagctgtaccagcaacacctcagagaacgaatcaacagattaaccaaacgttcaaaattattccctatactgtagatatgtttggacaaactaaaaataaaaaccgtagattaactgcaaaagaaagagcagatgacttagaagatgctataatatggggcagataccctagaacctataaaaatgaaagttactattacaaagatatgaatattgaaccccttgtaaacttttcattaaactttaaattctaagccagcaaatattcacttgtcggtgtccatttattaaagttaaaacttatataaataatattcaacaggaaaaccacctaattagaattgccgaccacaaaccgtcaaccgttacacttacttcttctttttacattgcacttctgcttttttagaacacacccacctacttcattattagtcagacgcatatcctgggaggagcaacacctctatataactaagtacactgacgaatggctgagtttaccccgccagacggagacgagacaggacactgactcggctgcttcaggg

SEQ ID NO: 4008 - protein, 662 aa, Betatorquevirus sp.
MPPFNFYRRRWRPNWRWRRRRRFTTRRLRRPLRRRFWRRHWVRRRYFTKKRKRKLKKIRLHQWQPDQIKKCHIKGQLCLLTCGKGKINNNFTLTAESYVPTKESGGGAWSIMQITLRALHDEYLHFRNWWTTSNCGLPLIRYIGVTVKFYKSNDCDYIVTVQHTGPFEVTRDIYLSTQPSRHMMNHKSFIVPKLNPNKKKRPYIKKRFYPPAMWQNKWYFQQDIFNHPLILFIVSACSLDQMYCPNDGVSTNITFLSLNTDLFQNPHWELDDEQPYYPKVTGTVNTGLFTLYNGEDYQTKKNWQTIILLGNTTQFKNISHTQQQNINTFSEYNKKQNWGNPFSITHIEGHESIQIYYGTPPTSNNYNLKPNILPITGLYQECRYNPFRDKGKNNKVYIKSTKTFQGSFTSLPTDERLLVQDMPLWLIFWGWQSWLQKSTPVHHLLEDYQFVIQSDYIYPPMKSYVPLDAYFTTQQKTPLTETDKQHWHPKAEFQQEVMAAFAATGPAAPKINKQNQIQIHCFYDFYFKWGGCPTPMETVCNPADQEKFPTPNNLIQEPTIENPETPKEFYLYKFDERQGFITAPAAKRLKTDIETSKYFTEYGARDPILEVFPPTDQTQKKKTTEEEKDPLQLQLQQLQLYQQHLRERINRLTKRSKLFPIL

SEQ ID NO: 4009 - protein, 92 aa, Betatorquevirus sp.; identical to SEQ ID NO: 3017

SEQ ID NO: 4010 - protein, 58 aa, Betatorquevirus sp.; identical to SEQ ID NO: 3018

SEQ ID NO: 4011 - DNA, 2721 bp, Betatorquevirus sp.
caggtgccggaggtgagtgcaaccaccgcagtctaggggcttaatgggcaggcgaagtctaggcggaacgggcatcaaattaaaaatatatattttattacagatgacctactatatgaaagagcacaaacattctcctaaatacctagaattgggatggattaactctatttttcaaagccacgatcaaatttgtgcttgcaacaacgttataacccacttactgggagctataaatcaccaaaacagcaagaaaatccttagcagacaagaaataaagaaaatacaatgccaccttactggagaagaaactatcgataccgaaactggagaagacgacgcccttaccggtggagaactagaggctttgttcgcagacaacgttttcgaagaagaagagcctaccgggtaagaagacgacgaattcataaaaaactttataaaattagaatacatgaatttcaaccagagactataaaactttgtaaaataaaagggacaaaatgcctctttcaaggaggttcacaaagaaaaagcaataattatgctcaatacataggatctatagtaccagaacatgaaccagggggaggagggtggtctctaatggtattctctttagatagtctatgggaagactatgaacacttacaaaacatatggacacaaagcaatgcaggactaccactatgcaggtttttaggagtaacaatgaaattttatcaacaagaatatacagactatgtagttacatatgacttatgctggccaatgaaagacactccactaacacacgcaaacagccacccacaaagaatgctactacaaaaaaacaaaattgtagtacctagcctactaacaaaaagaagaaaaaagccatatgtaaaaaaatatattaaacctcctgcacaattaaaaaatgaatggtactttcaaaaagaccttgcaggagtagatttgctaatgctaaccacaaccgcttgtgacctaagaaacagttttatttcaccaccagccaagagcaataacataaccctaacttccttaaatactaacttctggtacaaccgcaatttccaaagaccttccccaactactggctacacacctaaaaataacacctacctttacacacagggtaacggtacaactgctactcccacactgaaaactcaattaatttatctaggaaactccatagattatcaaccaggaaaaaaaatggactcacatggaggatcaatgaccagctggggaaacccgttttatcacttatacacacaaacagacatacccatttatgtctcacaaaattcaccaaataccatgccagaagccataacagcaggaacaataacacaaacaacacaatatttagcagtaaaagttagatacaatcccgaaagagacacaggacaaggcaacatggcatactttgtatcaaacataacagggcaaggttgggaccccccagaagaccctaacctaagaatagaaggctttccactatggcttatgctatggggatgggcagactggattaaaaaactagcacatatcgctaaagtagatgaaaactacttattagtaattagaagtagattttttgactcagaactacctgcatatgtatttttagatgactctttttggcatggacaaggtccatacaacacagacttagacaactatgactattttcactggtacccacaatttaaataccaaaaaatggccatagaaacacttagtacttcaggtccttacgtagcacacccaccttctgacaattctttacaagcaaaatgcatatatacttttaaatttaaatggggaggctgtccaagaacaatagaaaaagtatatgctccttcctcacagcccacctggattacaccccataacttcagtatcggatctaaaatccagaatccaagaacaaacccacttacatacatctacccatgggacacaaaaagagacattatcacagagaaagctttacaaagaatacaagaacaacaagaaactgatgaacttttatcaaaacctacaggaataccaacaacaagccgaagcgacccaaaaccgatactccaaaaagcccaagaaagcgacgaggaaacatcgtcagaggaagaagagaaaacaccattacagctccagctcaacaagctccgcagacgacagcgactcctcaagcagctcctcctgaaaagccagccaaatatagaataatacacatacaaaaacaaataaatttatttgggcctgtacctactcctaataggagattaaatttatgggagcaacaacaagaaaaagaagacgcagccatatggttaagaccccaaagaacctttctaaaagaccgtcctacttatcctttctttcctattacaccccttgctaactttgatctaaacttcaaagaataaaggccagcatactttacttaatggtgtctgtttctttaagtaaaaccttactaaacgaactccgcctccctacactgttggcgccaaaagggggctccgcccccttaaaccccaggggggggggcccccccccctacgtcacaaactccacccaaaactccaccctaatgaataataaaaaggggagggactaagtaactatataactaacagtacttccgaatggctgagtttatgccgccagacggaggcaaggcaggacactgacttgactgagcctggg

SEQ ID NO: 4012 - protein, 649 aa, Betatorquevirus sp.; identical to SEQ ID NO: 3965

SEQ ID NO: 4013 - protein, 122 aa, Betatorquevirus sp.; identical to SEQ ID NO: 3966

SEQ ID NO: 4014 - DNA, 2716 bp, Alphatorquevirus sp.
ccaccagtggtatgaagcctgctaccgtggccatgctgcttattgtggctgtggcgattttattagtcaccttgttgctctgggtaatcagtttggtttcaggccgggtccccgggctcctggcgcaccgggactagggggactccccgtcccgccccgtagagccctgccggcacccccggctgaggctccggagcaccagcagggcaacaacaacaacaaccagcagctgcagagatggcctggggatggtggaaacgcagacggcgcagatggtggagaggcctctggaggagacgccgctttgccagaagacgacctagacggcctgctcgccgccctagacgacgaagagtaaggaggcgcagacggtggaggagggggcgactaaggaagcgcgtgtacaacaggagacgcagaatcagacgaaagagacgcagacagaaactgacaataagacagtggcagcctgacaaacgcaggatatgtagaattaaaggctaccttcctgccattatatatggagacgggacgttttccaaaaactatacaagtcacttagaggacagaatctccaaaggaccgtttgggggagggcacgggactgctagaatgtctcttaaagtactgtatgacgaccacctaaaaggacttaacatatggacgtatagtaacaaggacttggaactggttagatacatgcacaccacaattacattttacagacacccagacacagactttatagcagtatataacagaaaaacaccactaggtggcaacagatacactgcaccctcactgcaccctggtaacatgatgctgcagagaactaaaatactaattcctagctttaaaaccaaacccagaggtagtggcaaaattagagtagtaataagaccccccactttactagtagataagtggtactttcaaaaggacatatgcgacgttacactgtttaacctcaatattacagcagccagcctgcggtttccgttctgctcaccacaaacgaacaacccttgtgtaacatttcaagttctgcattctgtatatgacaaggcactaggcattaacacattcggtaccaaggaaacagcagatataacacaacaagagaatattaaaaactggataacaaaagcatttcagcaggcaggatgcactatactaaacacatttagatcagaaggcatctactctcatccacaaatacaaaaacctggtgcagacaacaaacccgatgcagagcactactttgcaccaaaagacagcctgtggggagacgccatatatgaaaatactaataatcaaactgcaacaacattaccaacactgctagcaaaaaacgcatatacatattatcaaaaagctaaacaaccaggaattgacaaacacagaggagccatggcacattgccacttaacaggaatatttagccctgcactgctaacacaaggcagattatcacctgaattttttggcctatacaaagaggtaatttacaacccatatgatgataaaggcaaaggtaacaaaatctggatagaccctttaacaaaacctgataacatatttgatgctagaagtaaagtagaactagaagacatgcccctctggatggcatgctttggatacaatgactggtgtaaaaaagagctaaataactggggcctagaagttgaatacagagtactactaagatgcccttacacatatccaaaactgtacaatgaagctaacccaaactacggctatgtacctatatcctacaattttagtgcaggaaaaactgtagaaggagatctttatgttccaataatgtggagaactaaatggtatcctacaatgtataaccaatttccagtattagaagatttatccatgtcagggccctttgcaccaagagataaaatacctagcagcacactcacagtaaaatacaaagctaaatttatattcgggggcaaccctatatctgaacagattgtcaaggacccctgcacccagcccacctacgaaattcccggaggcggtacgctccctcgcagagtacaagtcattaacccggaatacatcgggccacactactcattcaaaagcttcgacatcagacgtgggtactttagcgcgtcgagtgttaaaagagtgtcagaacaatcagacattgctgagtttatattctcaggtccaaaaaagccaaggatcgaccaagacaggtaccaagaagcagaagagcactcagattctcgactccgagaagaaaaaccgtggcagagctcgcaagaaacagagagcgaagcccaagaagaagagatacaagagacaaacatccagctccagctgcagcaccagctcaaagagcaactgcagctcagacggggaatccagtgcctcttcgagcaactaagcaaaacacaacagggagtccacataaacccttcccttgtgtaggcccaaaagcatacatgttcccagagagggcccctaaggctccccccacttcgggggactgggaaacagaatactttgcctgtaaaatgatgaatagaccagccagaaaattccttactgactttccctactatcctcactgcaaaaataattacaatgtaacctttcagcttaactacaaataaacaaggccgtgggagttttacttgtcggtgtctacctcttaaggtcactaagcactccgagcgccagcgaggag

SEQ ID NO: 4015 - protein, 739 aa, Alphatorquevirus sp.; identical to SEQ ID NO: 2201

SEQ ID NO: 4016 - DNA, 2716 bp, Betatorquevirus sp.
gggctccgcccccttacaccccccaccgtagtcaaggggcaattcgggctagctcagtctggcggaacgggcaagaaacttaaaataatactttattttacagatatgagctctatctggaagaaaccaacattctcaccgagacaacaagaaaaccactggcttggaattgtattttctactcatgatgccttctgccactgcgaagacccctggttgcatttaatgattcttcttaacaaacaaggccaagctcccaaaccagaatcagaagtaagaaatataaaatgcctccttactggaatcgatacaactactaccaaagaagaccataccgaagaagacgtggttaccggtttcgacgatggagagctggaaaaactattcgcagaagatggcaccgaagaaaatggagacgaaggaacaaggtaaaaagacgctttagaaagaaaaaactgaaaaagattgttttaaaacaatttcagccacataaaataacaaaatgtaaaattataggaaaaaaatgtctatttcaaggcagtcctctaagaagcagtaataattatattcaatactgttactcttatgtacctgaactatatcctgggggaggaggctggtctttacttgtacatagcttgggaagtttatatgaagattatcaacatttacataatgtatggacaactagcaatgctggcatgcctttagtacgctttttaggagtagaatttaagttctatcaagacttatatactgattatgttgttatatatgataactgctggcctttagtagacaccccttatacacatgctaacagctgtcctagccaaatgctacaaagaaaaaacaaaataatagtcccaagtaaaatgacacaaaatagaaaaaaaccttataaaagatgctttgtaaaacctccaacacaaatgtataaccgttggtatttccaaagagacatttgtgacacaccactaaacatgctaaccgcaactgccatctcacttacaaaaccattttgtgaccctaaagcaagaagcaataatataactgtttattgcctaaatccacatagatttagaaacccaaactttcaaaacccaccaataaccaatggttactcaccatttactgcagataatctacaaggccaccctgcaatgtacttatattcatctcatagtgtaattaacaaacgtaaagaactacaaacactcacaccactaaccaacacaaaagataacaaagcaggagctactctacaacacttatacagaaagagaggtgaaaacaacaaatttgaaaactggggaaatcccttttatagactaaacttttggggagaagaatttcatatataccaaagcaaatatggtccaacatcagagaaagccaaaatgtgggcaacaagtccagattatacaagttcagacataaatatatctgacgaagtaacattaatggtaggatacaatttatatgcctgtagatacaatccagaaagagacacaggagaaggtaatatgtgttacattttaaataattcttcagccacttcattagaacctccttcaaataaaaaccttatatttgaaggatttccactatacatactactatggggttggacagactttttaaaaaagctaaagcaaaccatagacattgacaaaaactattttttagttgtcaaatcacctttttttgaagaaaagctgccatactatatttttattgacgatgattttagagatggctttgaaccctatactccacacgacaaagacaatgcacaatcttacatttcaccttacaacatgaatcactggtatcctaaatacttatttcaaacacaaagcgttgaaaaaatttgcagatcaggtcctgcctgtactagaccaaataatgacaattacttacaagcattttacaaatataaattctactttaaatggggaggctgtccaaaacaattagcaaaagcctatgatccttgtttacagtcaaaatggcccactcccgataacatcactccaggacttgaaatctcgaatcctaatgagccaccacaaacccacatctatgactgggactgggaagaagattatgttaaagaaaaagctctccaaagaattagagtatacacagaatctcctaaacaaatactcttccttacagactcgaaacaaaaccccaaaccactccaaatcaaggaaaagaaagaggagtcagaaaacgaagaggaaacgcagctactcctccagctccaccacatccgacaccagcgaaagcagctcgaactccttctccagtcaaaacagggactaataaatacacaataaaacactgtaaaattagagtaaaactatttccatctccaacaaaaaaccgtagaatgactccaaaagaaagagaactagaaaaagaggtggcaaaaatatttaaaagaccaccaagagactttatatttgactttcctacttatccttatattccacctacaccccttgcaaactttgaccttaatttcaaagaataaaggccaacatacttcacttgatggtgtctgtttattaaagtttaacttaaataagctaactccgcctccctagtatgttggcgctgtaaagggggctccgcccccttacacccccaagggggctccgcccccttacacccccaaagggggctccgcccccttacacccccaagg

SEQ ID NO: 4017 - protein, 685 aa, Betatorquevirus sp.
MPPYWNRYNYYQRRPYRRRRGYRFRRWRAGKTIRRRWHRRKWRRRNKVKRRFRKKKLKKIVLKQFQPHKITKCKIIGKKCLFQGSPLRSSNNYIQYCYSYVPELYPGGGGWSLLVHSLGSLYEDYQHLHNVWTTSNAGMPLVRFLGVEFKFYQDLYTDYVVIYDNCWPLVDTPYTHANSCPSQMLQRKNKIIVPSKMTQNRKKPYKRCFVKPPTQMYNRWYFQRDICDTPLNMLTATAISLTKPFCDPKARSNNITVYCLNPHRFRNPNFQNPPITNGYSPFTADNLQGHPAMYLYSSHSVINKRKELQTLTPLTNTKDNKAGATLQHLYRKRGENNKFENWGNPFYRLNFWGEEFHIYQSKYGPTSEKAKMWATSPDYTSSDINISDEVTLMVGYNLYACRYNPERDTGEGNMCYILNNSSATSLEPPSNKNLIFEGFPLYILLWGWTDFLKKLKQTIDIDKNYFLVVKSPFFEEKLPYYIFIDDDFRDGFEPYTPHDKDNAQSYISPYNMNHWYPKYLFQTQSVEKICRSGPACTRPNNDNYLQAFYKYKFYFKWGGCPKQLAKAYDPCLQSKWPTPDNITPGLEISNPNEPPQTHIYDWDWEEDYVKEKALQRIRVYTESPKQILFLTDSKQNPKPLQIKEKKEESENEEETQLLLQLHHIRHQRKQLELLLQSKQGLINTQ

SEQ ID NO: 4018 - protein, 108 aa, Betatorquevirus sp.; identical to SEQ ID NO: 777

SEQ ID NO: 4019 - DNA, 2716 bp, Betatorquevirus sp.
gggctccgcccccttacaccccccaccgtagtcaaggggcaattcgggctagctcagtctggcggaacgggcaagaaacttaaaataatactttattttacagatatgagctctatctggaagaaaccaacattctcaccgagacaacaagaaaaccactggcttggaattgtattttctactcatgatgccttctgccactgcgaagacccctggttgcatttaatgattcttcttaacaaacaaggccaagctcccaaaccagaatcagaagtaagaaatataaaatgcctccttactggaatcgatacaactactaccaaagaagaccataccgaagaagacgtggttaccggtttcgacgatggagagctggaaaaactattcgcagaagatggcaccgaagaaaatggagacgaaggaacaaggtaaaaagacgctttagaaagaaaaaactgaaaaagattgttttaaaacaatttcagccacataaaataacaaaatgtaaaattataggaaaaaaatgtctatttcaaggcagtcctctaagaagcagtaataattatattcaatactgttactcttatgtacctgaactatatcctgggggaggaggctggtctttacttgtacatagcttgggaagtttatatgaagattatcaacatttacataatgtatggacaactagcaatgctggcatgcctttagtacgctttttaggagtagaatttaagttctatcaagacttatatactgattatgttgttatatatgataactgctggcctttagtagacaccccttatacacatgctaacagctgtcctagccaaatgctacaaagaaaaaacaaaataatagtcccaagtaaaatgacacaaaatagaaaaaaaccttataaaagatgctttgtaaaacctccaacacaaatgtataaccgttggtatttccaaagagacatttgtgacacaccactaaacatgctaaccgcaactgccatctcacttacaaaaccattttgtgaccctaaagcaagaagcaataatataactgtttattgcctaaatccacatagatttagaaacccaaactttcaaaacccaccaataaccaatggttactcaccatttactgcagataatctacaaggccaccctgcaatgtacttatattcatctcatagtgtaattaacaaacgtaaagaactacaaacactcacaccactaaccaacacaaaagataacacagcaggagctactctaggacacttatacagaaacggaggtcaaaacaacaaatttgaaaactggggaaatcccttttatagactaaacttttggggagaagaatttcatatataccaaagcaaacatggtccaacatcagacacagccaaaaagtgggcaacaagtccagactatacaaattcagacgcaagtatatctgacgaagtaacattaatggtaggatacaatttatatgcctgtagatacaatccagaaagagacacaggagaaggtaatatgtgttacattttaaataattcttcagccacttcattagaacctccttcaaataaaaaccttatatttgaaggatttccactatacatactactatggggttggacagactttttaaaaaagctaaagcaaaccatagacattgacaaaaactattttttagttgtcaaatcacctttttttgaagaaaagctgccatactatatttttattgacgatgattttagagatggctttgaaccctatactccacacgacaaagacaatgcacaatcttacatttcaccttacaacatgaatcactggtatcctaaatacttatttcaaacacaaagcgttgaaaaaatttgcagatcaggtcctgcctgtactagaccaaataatgacaattacttacaagcattttacaaatataaattctactttaaatggggaggctgtccaaaacaattagcaaaagcctatgatccttgtttacagtcaaaatggcccactcccgataacatcactccaggacttgaaatctcgaatcctaatgagccaccacaaacccacatctatgactgggactgggaagaagattatgttaaagaaaaagctctccaaagaattagagtatacacagaatctcctaaacaaatactcttccttacagactcgaaacaaaaccccaaaccactccaaatcaaggaaaagaaagaggagtcagaaaacgaagaggaaacgcagctactcctccagctccaccacatccgacaccagcgaaagcagctcgaactccttctccagtcaaaacagggactaataaatacacaataaaacactgtaaaattagagtaaaactatttccatctccaacaaaaaaccgtagaatgactccaaaagaaagagaactagaaaaagaggtggcaaaaatatttaaaagaccaccaagagactttatatttgactttcctacttatccttatattccacctacaccccttgcaaactttgaccttaatttcaaagaataaaggccaacatacttcacttgatggtgtctgtttattaaagtttaacttaaataagctaactccgcctccctagtatgttggcgctgtaaagggggctccgcccccttacacccccaagggggctccgcccccttacacccccaaagggggctccgcccccttacacccccaagg

SEQ ID NO: 4020 - protein, 685 aa, Betatorquevirus sp.
MPPYWNRYNYYQRRPYRRRRGYRFRRWRAGKTIRRRWHRRKWRRRNKVKRRFRKKKLKKIVLKQFQPHKITKCKIIGKKCLFQGSPLRSSNNYIQYCYSYVPELYPGGGGWSLLVHSLGSLYEDYQHLHNVWTTSNAGMPLVRFLGVEFKFYQDLYTDYVVIYDNCWPLVDTPYTHANSCPSQMLQRKNKIIVPSKMTQNRKKPYKRCFVKPPTQMYNRWYFQRDICDTPLNMLTATAISLTKPFCDPKARSNNITVYCLNPHRFRNPNFQNPPITNGYSPFTADNLQGHPAMYLYSSHSVINKRKELQTLTPLTNTKDNTAGATLGHLYRNGGQNNKFENWGNPFYRLNFWGEEFHIYQSKHGPTSDTAKKWATSPDYTNSDASISDEVTLMVGYNLYACRYNPERDTGEGNMCYILNNSSATSLEPPSNKNLIFEGFPLYILLWGWTDFLKKLKQTIDIDKNYFLVVKSPFFEEKLPYYIFIDDDFRDGFEPYTPHDKDNAQSYISPYNMNHWYPKYLFQTQSVEKICRSGPACTRPNNDNYLQAFYKYKFYFKWGGCPKQLAKAYDPCLQSKWPTPDNITPGLEISNPNEPPQTHIYDWDWEEDYVKEKALQRIRVYTESPKQILFLTDSKQNPKPLQIKEKKEESENEEETQLLLQLHHIRHQRKQLELLLQSKQGLINTQ

SEQ ID NO: 4021 - protein, 108 aa, Betatorquevirus sp.; identical to SEQ ID NO: 777

SEQ ID NO: 4022 - DNA, 2714 bp, Betatorquevirus sp.
cgggtaccgaaggtgagtgaaaccaccgtagttaaggggcaatatgggcacagtcagtctgggcagaagggcaactgtcttaattttatcttatagatgtcagactatattaaaccaactctatacaatggaaaaggactggaaaaccaactaaaaaacctttgctacaacgctcacgacctctgctgtggctgccaaaacccaactaaacatcttcaacacctctttacggaaaaatggctccctacaaccgctactacaaaagaagatggagaaaatactttagaaaccgtcgccccagaagacggtttcgacgctggggatttagaaagaattttcgccttagaagaagaaaaaacagggtaagaagaaaatattttaaaaactttaaatataaaaaactaagaaaaatagttcttaaacaatggcaaccaagccacataaaaaaatgtaaaattaaaggtacaatacagctttttcaagctggactcggtagatacagctataattatactatgtacaaagaatcttatgttccaccacatgaaccaggaggaggaggctggtgctacttaatgttatctttaggaaacttatacactgaaaatcaaagactacaaaactggtggactgtttccaacaaaggactaaaccttgtaagatatcaaggtgttatactaaaattttacagacaaaaacatacagactatgttgttacatggagtaatgaatatccaatggaagtaggaaagtatcactttccaagcattcatccacaaagaatgcttcaatacaatcataaaattgttgtaccaagctacgatactctacctcaatgtaaaaaaccatataaaagagtatatgtacctcctccaaaagaaatgatagataaatggtattttcaacaatttttccaaagatacccacttgtacttattgctagtactgcctgttctttaaacaatatgtatgttggaaaccaagcaatgaataacaactgttctataaactgtttaaatacaaacctgtttcaacataaatgttttcaatatcaaggaacaactggttatcaaccaaagggtggtatgtacttgtatgcactcgataacggtgaaattgaccctttaagcggaaaagtaggagaaatgacatacctaggaaactccatggactaccaacctggagaaaacttaaactcaactactgatatacaaaactacaacaaaacaaaatggggtaatccattctatactcaatatataaatgaacaaagaaaaattgtgactacttcacaacaatataccgctttatggggaaaaaaaaccaaaataatgaaacaagagagcatacaattacaaattgaacccttttactatgaatgccgatataacccttgtaaagatgatggcataggcaatgaagtatactgggtaaaaaactttgcagaagaaagtggctgggacacaaaaactgacccagacttagctattgacggatttccattatggatagcactttggggctggtatgattggtcaaaaaaattaaacaaagctaaaaacatatggaatgactacatattagtaattaaaacaagatatatggaaccaaaattacctgcctatgtttttttaaatgatgaatttccactaggactaggaaattatgatgaacctttaaaaaaaatagaccccaacgacttaaaacactggtatccaaaatggaaatttcaaaaagaagcagtagaaacattactaatgacaggcactgcagtatgcagaccagaaaacgctaggcaaatccaagctcattgtggttataaatttctttttaagtggggaggcaaccctgcctcaatggaacaagtcgttgatcccacagcacagcctcaataccctgtgcccagtggactcttccaaagccctgaaatcgttgatccaagcacatccatctttaactacttgtacaacttcgacgtcagacgtcacctccttacacaaacagctgaaaaaagaattaaaaacctctcagacactgacatctctatgttcacagatggaactcaacaaccactctacgagccaccaatccaaacaccgcaaacaacatggacggaagagacatcggaagaagagaaaaagacattactcctccagctccaacagctccaacaacacaacctacacctcctccagcgataccaacaactcaaattaatgactctaaatacataatatacaaatgtaaagaacctgcattactttttgctcctaataaaataaaaccccgtagattcagaccacatgaatgggaagacgaaaaatatttagctagctggatgaaacgcccccttagacacttttttactgataccccattttacccatggtgtgtacctgaacctaaagttaactttgaccttaatttcattaaataaaggccaacaaacttcacttgaggtgtccatttatttaagtttaaacctatacaaacatccaccgcctccctaatacgcaggcgcagcagggggctccgcctcctaacccccaggggttactttaacttccttaaattataaccactcctactaattaattaataaacaacatcatatccaccacgtcacaaccactagtataaaactaagtacactttcgaatggctgagtttatgctgccagacggagacgcgacaacttcgcggctgactgtggg

SEQ ID NO: 4023 - protein, 665 aa, Betatorquevirus sp.; identical to SEQ ID NO: 3319

SEQ ID NO: 4024 - protein, 89 aa, Betatorquevirus sp.; identical to SEQ ID NO: 3320

SEQ ID NO: 4025 - protein, 109 aa, Betatorquevirus sp.; identical to SEQ ID NO: 3310

SEQ ID NO: 4026 - DNA, 2714 bp, Alphatorquevirus sp.
ccaccagtggtatgaagcctgctaccgtggccatgctgcttattgtggctgtggcaattttattagtcaccttgttgctctgggtgatcagtttggtttcaggccgggtccccgcgctcctggcgccccgggagtagggggacccccttcgccgccccgtagagcgctgcccgcacccctggcggccgctccggagccccaacaggagaacaacaacaacaacctgcagctgcacagatggcctggggatggtggagacgccgcagacgcggatggctccgccgctggggatggaggcgccgccgcagacctgccagaagacgagctagatgggctgctcgccgagctcgacgacgaagagtaaggaggcgcagactaaggaggagggggcgaccaagacgcaggacttttaaacgtaggaggcgacgcagacgctttaggagaaagcctaagataaaactaactcagtggcagccagacatggtcaggcgatgctttataaggggctttctacctgctgtaatatgcggacagggcaccttctccaacaactatagcagccaccttgaggacagaatagccaggggaggctttggagggggccacagcaccatgaggttctcactaaaggtgttctatgaggagcacttaaggagactaaactactggacttgctccaacaaagacctagaactagtgagatacttctacacaacagtaaccttctacaggcaccccactcaggactttatagccaggtacaacagaaaaactcccttggggggcaacatactaacagccccatcactacacccaggcagcatgatgaccagcaaacacagaataatgatacccagtctagagacaagacccaaggggaaaaagactgttaaagtaagaatagcagcccccactctattcactgacaagtggtacttttccaaagacgtttgtgacttgacattgctaaacttggacgttacaatggccgacttgcggtttccgttctgctcaccacaaactgacaacccttgcatcactttccaaactctagccgcagtttacaacaacttcctgtctataaccatattccaaggcacctcagagtcaacacaaattaaagaatttttaaaagctgcaatgccaactaaggaaagcgttagagttttaaacacctttaaaacagaaggcaactacagccaccctcaaatacctaaagcaacagcacagcagtctaaacctcaaaacaacgatacagagtactttggaaccctagatggactatggggagatcctatatacatgcccttaaatcaaaccctagataacttaatagagcaaatacaaaaaaatatgcaaaactacaacagcaaacttaaaacagagtttccagccatggtaggctcagcagcacacacacacctcacaggcatatttggcagcagctggctaaactctggcagaataagcccagaagtactaggcctctacacagaaataatttacaacccatacaaagataagggcacaggcaaccacatatggatagactcactgactagaaacaacaaccactttaaagagggtcagagtaaatgtcacctacaagacatgcccctctggatgatggcatttggctatatagactggattaaaaaagatctaaaccagtgggacgctcccttaaactacagagtaatgataataagtccctatacatttcccatgatgtacaagcagacagaccccacatacgggtatgtgccagtaagctacagattcacctcaggtctaatgccagacggcagcagttacattcccttcagtttcaggggcaagtggtaccccaacctactaaaccaacaacaagtactagaggacctcagcagatcagggccctttgcacccaagacaaacgtccctagtgccaccctagtaatgaaatacaagagcagatttaactttggtggcaatcctatatctgaacaggttattagagacccctgcacacaaccaacctacgacatacccggtgccaatacgctccctcgagcaatacaagttatcgacccgaaagtcctcggcccaggttacagcttcaggtcgttcgacatcagacgtggatactttagcacgacgagtattaaaagagtgtcacaacaatcagaaactactgagtttctattcccaggcccaaaaaaacccagaatcgatcttcaaaagtacgagccaccagaagacgtctacaatacactccaaaaagaaacgagaccgtgggagagcagccaggaagaagagacagaagccccatcagaagaagaagaagagagacccctccgagagcagctgcagcagcagctccgagagcagcatcaactccgaaagggaatccagcacctcttccagcagctagtcaaaacacagcagggagtccacgtaaacccatgcctacagtagggcctgcacagtggctattcccagagagaaagccagccccgccgcccaccagcggcgactgggctacagagttcctagcagctaagatatttaacagaccagtcaggagcaacctaaaagacacccctttctacccctacgtgaagcaccagtacaatgtctactttggcctaaactatcaataaagctcagctcaaacttgcaaggccgtgggagtttcacttgtcggtgtctacctctaaaggtcactaagcact

SEQ ID NO: 4027 - protein, 739 aa, Alphatorquevirus sp.
MAWGWWRRRRRGWLRRWGWRRRRRPARRRARWAARRARRRRVRRRRLRRRGRPRRRTFKRRRRRRRFRRKPKIKLTQWQPDMVRRCFIRGFLPAVICGQGTFSNNYSSHLEDRIARGGFGGGHSTMRFSLKVFYEEHLRRLNYWTCSNKDLELVRYFYTTVTFYRHPTQDFIARYNRKTPLGGNILTAPSLHPGSMMTSKHRIMIPSLETRPKGKKTVKVRIAAPTLFTDKWYFSKDVCDLTLLNLDVTMADLRFPFCSPQTDNPCITFQTLAAVYNNFLSITIFQGTSESTQIKEFLKAAMPTKESVRVLNTFKTEGNYSHPQIPKATAQQSKPQNNDTEYFGTLDGLWGDPIYMPLNQTLDNLIEQIQKNMQNYNSKLKTEFPAMVGSAAHTHLTGIFGSSWLNSGRISPEVLGLYTEIIYNPYKDKGTGNHIWIDSLTRNNNHFKEGQSKCHLQDMPLWMMAFGYIDWIKKDLNQWDAPLNYRVMIISPYTFPMMYKQTDPTYGYVPVSYRFTSGLMPDGSSYIPFSFRGKWYPNLLNQQQVLEDLSRSGPFAPKTNVPSATLVMKYKSRFNFGGNPISEQVIRDPCTQPTYDIPGANTLPRAIQVIDPKVLGPGYSFRSFDIRRGYFSTTSIKRVSQQSETTEFLFPGPKKPRIDLQKYEPPEDVYNTLQKETRPWESSQEEETEAPSEEEEERPLREQLQQQLREQHQLRKGIQHLFQQLVKTQQGVHVNPCLQ

SEQ ID NO: 4028 - DNA, 2712 bp, Alphatorquevirus sp.
caccagtggtatgaagcctgctaccgtggccatgctgcttattgtggctgtggcaattttattagtcaccttgttgctctgggtgatcagtttggtttcaggccgggtccccgcgctcctggcgccccgggagtagggggacccccttcgccgccccgtagagcgctgcccgcacccctggcggccgctccggagccccaacaggagaacaacaacaacaacctgcagctgcacagatggcctggggatggtggagacgccgcagacgcggatggctccgccgctggggatggaggcgccgccgcagacctgccagaagacgagctagatgggctgctcgccgagctcgacgacgaagagtaaggaggcgcagactaaggaggagggggcgaccaagacgcaggacttttaaacgtaggaggcgacgcagacgctttaggagaaagcctaagataaaactaactcagtggcagccagacatggtcaggcgatgctttataaggggctttctacctgctgtaatatgcggacagggcaccttctccaacaactatagcagccaccttgaggacagaatagccaggggaggctttggagggggccacagcaccatgaggttctcactaaaggtgttctatgaggagcacttaaggagactaaactactggacttgctccaacaaagacctagaactagtgagatacttctacacaacagtaaccttctacaggcaccccactcaggactttatagccaggtacaacagaaaaactcccttggggggcaacatactaacagccccatcactacacccaggcagcatgatgaccagcaaacacagaataatgatacccagtctagagacaagacccaaggggaaaaagactgttaaagtaagaatagcagcccccactctattcactgacaagtggtacttttccaaagacgtttgtgacttgacattgctaaacttggacgttacaatggccgacttgcggtttccgttctgctcaccacaaactgacaacccttgcatcactttccaaactctagccgcagtttacaacaacttcctgtctataaccatattccaaggcacctcagagtcaacacaaattaaagaatttttaaaagctgcaatgccaactaaggaaagcgttagagttttaaacacctttaaaacagaaggcaactacagccaccctcaaatacctaaagcaacagcacagcagtctaaacctcaaaacaacgatacagagtactttggaaccctagatggactatggggagatcctatatacatgcccttaaatcaaaccctagataacttaatagagcaaatacaaaaaaatatgcaaaactacaacagcaaacttaaaacagagtttccagccatggtaggctcagcagcacacacacacctcacaggcatatttggcagcagctggctaaactctggcagaataagcccagaagtactaggcctctacacagaaataatttacaacccatacaaagataagggcacaggcaaccacatatggatagactcactgactagaaacaacaaccactttaaagagggtcagagtaaatgtcacctacaagacatgcccctctggatgatggcatttggctatatagactggattaaaaaagatctaaaccagtgggacgctcccttaaactacagagtaatgataataagtccctatacatttcccatgatgtacaagcagacagaccccacatacgggtatgtgccagtaagctacagattcacctcaggtctaatgccagacggcagcagttacattcccttcagtttcaggggcaagtggtaccccaacctactaaaccaacaacaagtactagaggacctcagcagatcagggccctttgcacccaagacaaacgtccctagtgccaccctagtaatgaaatacaagagcagatttaactttggtggcaatcctatatctgaacaggttattagagacccctgcacacaaccaacctacgacatacccggtgccaatacgctccctcgagcaatacaagttatcgacccgaaagtcctcggcccaggttacagcttcaggtcgttcgacatcagacgtggatactttagcacgacgagtattaaaagagtgtcacaacaatcagaaactactgagtttctattcccaggcccaaaaaaacccagaatcgatcttcaaaagtacgagccaccagaagacgtctacaatacactccaaaaagaaacgagaccgtgggagagcagccaggaagaagagacagaagccccatcagaagaagaagaagagagacccctccgagagcagctgcagcagcagctccgagagcagcatcaactccgaaagggaatccagcacctcttccagcagctagtcaaaacacagcagggagtccacgtaaacccatgcctacagtagggcctgcacagtggctattcccagagagaaagccagccccgccgcccaccagcggcgactgggctacagagttcctagcagctaagatatttaacagaccagtcaggagcaacctaaaagacacccctttctacccctacgtgaagcaccagtacaatgtctactttggcctaaactatcaataaagctcagctcaaacttgcaaggccgtgggagtttcacttgtcggtgtctacctctaaaggtcactaagcac

SEQ ID NO: 4029 - protein, 739 aa, Alphatorquevirus sp.; identical to SEQ ID NO: 4027

SEQ ID NO: 4030 - DNA, 2712 bp, Betatorquevirus sp.
cgggagccgaaggtgagtgaaaccaccgaagtctaggggcaattcgggctagttcagtctagcggaacgggcaagaaacttaatatttttattttacagatgtcctttccatggatgccaccaatctataatgtaaaaggcagaaccacacaatggattaacagctgcgtttcaacccacgactgcttctgcggctgcgacaaaccactataccacttagtatacgagctacaaaaacaaggaggatttcaccaaattggcatagaagaagaaaaattaattaaaaaatgccttggtacccgtggcgccgaaaccgtagacgcttctaccactaccgagccagaaaaaccagagctagaaggagatatcaacattggagacctagaattacttttcgcagaagatggaggagacatagacgatacccggtaagaagacgacaatttaaaaaaaagcttagaaaaataactgttaaacaatggcaaccaaaaagaattataaaatgtactataaaaggcttaatgtgcctatttcaatgtggtccacacagaatagaacacaactggacccaatacatgaacagctttgtaccagaaaatacagacggagggggaggatggtctcaactaaaatttagtttgggaagtttatatgaagaaagacaacttgtaagaaacacctggactaaaagtaatgtgggcttacctctagtaagatacactggctgtacttttaaattttatagaactgaaaaagttgattatattgtacattatagtaactgcttacctatgcttgatactgaaatgcaacatacaaacgcacaaccttctgctatgctaatgtataacaaaaaaatattagtacctagctttcaaacagaacctctgaaaagaaaaccatatataagaaaacacattaaaccaccaccacagcttaaaagccagtggtacttccaaaaagacatatgtgataccggacttcttttactaacaaccactgcaacagactttaacagattttacctaaacccattctcacaatcaaacaacattagcttaaaatgcttaaacaccacattttttcaaaacagaaactttcaacaaacagaactagctgatacatactggagtccaaaaccacaagtatggctatttggactacaccaagtattttatgacaacgcaaaaatatctgatttaataccactttttcagacacaaagatatcaacaaggaaacacaatggaaaaactaagtaaaatagcaccagtgaaagcacaattttcaagtcatatagagtacagataccaaatagaatatatgggaaacatattttggtcagaatacatacatggcgaatcagaagtattaatttattcaggaacacagtcacctgatgaaaaattttttaaaaattatgacacaattaaaaatcagcctgttaaatcacataacttaacacctttaacacaagacatattcgtaacagtacgatacaatcctaacaaagacacaggcataggaaacaatatatattttaaaaaaaatacaagaaatgaaacaggatgggatccaccaccaaccccatcactacaattaacaggatttccactatggctaggcctatggggttactatgactggcatgaaaaactacatgaaatgcagcaaattaaactaaactatatgctatgtattagatcagatttctttgatcaaaaactacctgcttatgtacctttcaatttgtcatttactaatggacattctaactacttaaatgaaggcgatccactaccagaagatagagctcattggctacctaaatataaataccaagaaatagcaattgatgaaatttgcaaaacaggcccaggtacagttaaaactacaactcaaagtatagaagctcactgtttttatcgctttcattttaagtggggaggatgtccaaaccaacttgaaaacatcgcagacccctgccaacaaccctcgtatcccgtccccagtaacttcatacaaggatctgaggtacaggatccaaacagctcaccatacaaagaactgtaccccttcgacttccgcagatttatgcttacaagaaaagcttcagacagaattaaaaaagacaaaattactgaaacgtctttattcgcagatacaagatggaatgcccaagcataccgagaaacaagcagctcggaagaagaagaagtatgcccactcccgcagacggaaacacaggaacagctcgaccagctcaaactccagcagcgccacctcagaaagcgaatcaaccaactaatgcgggagtcaccaatcttaagatcaaaaattctaaaattaaagtaaatctgttctatgaaacaccaaaaaacagacgcatgacacctagagaaaagcaatgggaaaaagaggacgcaaaaatatgggacagagctgaaagagactttatctttgatagtcatttttaccataaaatgcctataacccctaaaactatacaacccagagtgtgttttgaccttggtttcactaaataaaggcccattgattcactggaggtgtccgtttatttaagtttaacctatataagcatccaccacctccctaacaatgggcgccattttgttaaacaaaatggcggctttaaggggggggggggggggggggggggggggggggggggggggggggggggggggggggg

SEQ ID NO: 4031 - protein, 688 aa, Betatorquevirus sp.
MPWYPWRRNRRRFYHYRARKTRARRRYQHWRPRITFRRRWRRHRRYPVRRRQFKKKLRKITVKQWQPKRIIKCTIKGLMCLFQCGPHRIEHNWTQYMNSFVPENTDGGGGWSQLKFSLGSLYEERQLVRNTWTKSNVGLPLVRYTGCTFKFYRTEKVDYIVHYSNCLPMLDTEMQHTNAQPSAMLMYNKKILVPSFQTEPLKRKPYIRKHIKPPPQLKSQWYFQKDICDTGLLLLTTTATDFNRFYLNPFSQSNNISLKCLNTTFFQNRNFQQTELADTYWSPKPQVWLFGLHQVFYDNAKISDLIPLFQTQRYQQGNTMEKLSKIAPVKAQFSSHIEYRYQIEYMGNIFWSEYIHGESEVLIYSGTQSPDEKFFKNYDTIKNQPVKSHNLTPLTQDIFVTVRYNPNKDTGIGNNIYFKKNTRNETGWDPPPTPSLQLTGFPLWLGLWGYYDWHEKLHEMQQIKLNYMLCIRSDFFDQKLPAYVPFNLSFTNGHSNYLNEGDPLPEDRAHWLPKYKYQEIAIDEICKTGPGTVKTTTQSIEAHCFYRFHFKWGGCPNQLENIADPCQQPSYPVPSNFIQGSEVQDPNSSPYKELYPFDFRRFMLTRKASDRIKKDKITETSLFADTRWNAQAYRETSSSEEEEVCPLPQTETQEQLDQLKLQQRHLRKRINQLMRESPILRSKILKLK

SEQ ID NO: 4032 - protein, 110 aa, Betatorquevirus sp.
MSFPWMPPIYNVKGRTTQWINSCVSTHDCFCGCDKPLYHLVYELQKQGGFHQIGIEEEKLIKKCLGTRGAETVDASTTTEPEKPELEGDINIGDLELLFAEDGGDIDDTR

SEQ ID NO: 4033 - protein, 125 aa, Betatorquevirus sp.
MECPSIPRNKQLGRRRSMPTPADGNTGTARPAQTPAAPPQKANQPTNAGVTNLKIKNSKIKVNLFYETPKNRRMTPREKQWEKEDAKIWDRAERDFIFDSHFYHKMPITPKTIQPRVCFDLGFTK

SEQ ID NO: 4034 - DNA, 2711 bp, Betatorquevirus sp.
cgggagccgaaggtgagtgaaaccaccgaagtctaggggcaattcgggctagttcagtctagcggaacgggcaagaaacttaatatttttattttacagatgtcctttccatggatgccaccaatctataatgtaaaaggcagaaccacacaatggattaacagctgcgtttcaacccacgactgcttctgcggctgcgacaaaccactataccacttagtatacgagctacaaaaacaaggaggatttcaccaaattggcatagaagaagaaaaattaattaaaaaatgccttggtacccgtggcgccgaaaccgtagacgcttctaccactaccgagccagaaaaaccagagctagaaggagatatcaacattggagacctagaattacttttcgcagaagatggaggagacatagacgatacccggtaagaagacgacaatttaaaaaaaagcttagaaaaataactgttaaacaatggcaaccaaaaagaattataaaatgtactataaaaggcttaatgtgcctatttcaatgtggtccacacagaatagaacacaactggacccaatacatgaacagctttgtaccagaaaatacagacggagggggaggatggtctcaactaaaatttagtttgggaagtttatatgaagaaagacaacttgtaagaaacacctggactaaaagtaatgtgggcttacctctagtaagatacactggctgtacttttaaattttatagaactgaaaaagttgattatattgtacattatagtaactgcttacctatgcttgatactgaaatgcaacatacaaacgcacaaccttctgctatgctaatgtataacaaaaaaatattagtacctagctttcaaacagaacctctgaaaagaaaaccatatataagaaaacacattaaaccaccaccacagcttaaaagccagtggtacttccaaaaagacatatgtgataccggacttcttttactaacaaccactgcaacagactttaacagattttacctaaacccattctcacaatcaaacaacattagcttaaaatgcttaaacaccacattttttcaaaacagaaactttcaacaaacagaactagctgatacatactggagtccaaaaccacaagtatggctatttggactacaccaagtattttatgacaacgcaaaaatatctgatttaataccactttttcagacacaaagatatcaacaaggaaacacaatggaaaaactaagtagaataacagcagtgaaacaacaattttcaactcatatagactacagataccaaatagaatatatgggaaacatattttggtcagaatacatacatggcgaatcagaagtattaatttattcaggaacacagtcacctgatgaaaaattttttaaaaattatgacacaattaaaaatcagcctgttaaatcacataacttaacacctttaacacaagacatattcgtaacagtacgatacaatcctaacaaagacacaggcataggaaacaatatatattttaaaaaaaatacaagaaatgaaacaggatgggatccaccaccaaccccatcactacaattaacaggatttccactatggctaggcctatggggttactatgactggcatgaaaaactacatgaaatgcagcaaattaaactaaactatatgctatgtattagatcagatttctttgatcaaaaactacctgcttatgtacctttcaatttgtcatttactaatggacattctaactacttaaatgaaggcgatccactaccagaagatagagctcattggctacctaaatataaataccaagaaatagcaattgatgaaatttgcaaaacaggcccaggtacagttaaaactacaactcaaagtatagaagctcactgtttttatcgctttcattttaagtggggaggatgtccaaaccaacttgaaaacatcgcagacccctgccaacaaccctcgtatcccgtccccagtaacttcatacaaggatctgaggtacaggatccaaacagctcaccatacaaagaactgtaccccttcgacttccgcagatttatgcttacaagaaaagcttcagacagaattaaaaaagacaaaattactgaaacgtctttattcgcagatacaagatggaatgcccaagcataccgagaaacaagcagctcggaagaagaagaagtatgcccactcccgcagacggaaacacaggaacagctcgaccagctcaaactccagcagcgccacctcagaaagcgaatcaaccaactaatgcgggagtcaccaatcttaagatcaaaaattctaaaattaaagtaaatctgttctatgaaacaccaaaaaacagacgcatgacacctagagaaaagcaatgggaaaaagaggacgcaaaaatatgggacagagctgaaagagactttatctttgatagtcatttttaccataaaatgcctataaccccgaaaactatacaacccagagtgtgttttgaccttggtttcactaaataaaggcccattgattcactggaggtgtccgtttatttaagtttaacctatataagcatccaccacctccctaacaatgggcgccattttgttaaacaaaatggcggctttaagggggggggggggggggggggggggggggggggggggggggggggggggggggggg

SEQ ID NO: 4035 - protein, 688 aa, Betatorquevirus sp.
MPWYPWRRNRRRFYHYRARKTRARRRYQHWRPRITFRRRWRRHRRYPVRRRQFKKKLRKITVKQWQPKRIIKCTIKGLMCLFQCGPHRIEHNWTQYMNSFVPENTDGGGGWSQLKFSLGSLYEERQLVRNTWTKSNVGLPLVRYTGCTFKFYRTEKVDYIVHYSNCLPMLDTEMQHTNAQPSAMLMYNKKILVPSFQTEPLKRKPYIRKHIKPPPQLKSQWYFQKDICDTGLLLLTTTATDFNRFYLNPFSQSNNISLKCLNTTFFQNRNFQQTELADTYWSPKPQVWLFGLHQVFYDNAKISDLIPLFQTQRYQQGNTMEKLSRITAVKQQFSTHIDYRYQIEYMGNIFWSEYIHGESEVLIYSGTQSPDEKFFKNYDTIKNQPVKSHNLTPLTQDIFVTVRYNPNKDTGIGNNIYFKKNTRNETGWDPPPTPSLQLTGFPLWLGLWGYYDWHEKLHEMQQIKLNYMLCIRSDFFDQKLPAYVPFNLSFTNGHSNYLNEGDPLPEDRAHWLPKYKYQEIAIDEICKTGPGTVKTTTQSIEAHCFYRFHFKWGGCPNQLENIADPCQQPSYPVPSNFIQGSEVQDPNSSPYKELYPFDFRRFMLTRKASDRIKKDKITETSLFADTRWNAQAYRETSSSEEEEVCPLPQTETQEQLDQLKLQQRHLRKRINQLMRESPILRSKILKLK

SEQ ID NO: 4036 - protein, 110 aa, Betatorquevirus sp.; identical to SEQ ID NO: 4032

SEQ ID NO: 4037 - protein, 125 aa, Betatorquevirus sp.; identical to SEQ ID NO: 4033

SEQ ID NO: 4038 - DNA, 2705 bp, Betatorquevirus sp.
cccccttacaccccctaattaatattcaacaggaaagggcaattcgggctagatcagtctggcggaacgggcaagaaacttaaaataatatttattttacagatatgagctctgtttggaagaaacccacatcatcaccgagacaacaagaactagcttggagaaacttaatctatcaaagccacgaccaattctgccactgtgaagatgtggatttacacttcatacttttaatgaataaattcggaaactcaccaaaaccagaatctgaaattaaaaacataaaatggcttataacaggaaaaccacataccgaagaagaagatggcgaaccaaaagacgaccctggttttctagatggagaactagaaatccttttcaaagaaaacaatggagaagaaaaaaatatagaagacgcaactacaaggtaaaaaaatataaactacctaaaaaaaagaaagcaataattgttaaacaatttcaaccatatactgtaaagagatgtaaaattaaaggatataaatgtttatttcaaggaggaccagacagaactaataataactatattcaatatgtatatagctttatacctgaaaaacaacctggagggggaggatggagtttacttgtattctcattagactctttatttgaagactataaacatttagaaaatgtatggacagttagtaatgcaggcttaccactaataagatacagaggatgtcaatttaaattttaccaaagcaaagaaacagactacgttgttacttatgataactgctggcctatggttgacacaccacataaacacgcagacagcgcaccatttagaatgttaatgaaacatcacaaaataataataccaagtagagatacacaaaggagaaaaaaaccatacaagaaagtttttattaaaccaccagcacaaatgatgacaaaatggtactttcaaaaagacatatgcagaacaccactagtaatgcttacaactacatcttgttcccttacatacccttttacagctccagaagcagaaagcaacaatattagtttctacattttaaatccatacctattcaaaaatagtaatttccaacacctagatacatcaggatacttttgcaaatatgctaatgcaaacaacacagaaccactatacctatatgcttcaacttcttataatgttacatatgacaaaattaaacagggtgacccaagcataacacaattaatagcactagccaacacaaaagaccatacagcaggacataccttaattaaacaagaacaaaaaaatctacaatcactactaggaaatccttttcatgaagactacacaaatggagacatgtatatttacatctcaaaaatgacacccttagaaatgctaaacttagcatcagacaagcaccaagaaccaacaacagaaaaacaaagcattaccaacacaggcagcatactatactccgtaagatataacccacaaaaagatgacggatccacaaacaaagcttatatagtaaacaacgagcttggaggactaatacaacccccatcaaacacaaactttattatagaaggatttccactacacacaatgttatggggatggacagactttattagaaaactaggagaagcaatacaatttgacacaaactactttgtatgtcttgaaacaaaagtaactaacaatgataaactaccatacttaataccagtagacgacacatttgtacatggattaaacccatatagtcctatatacgttgaccacgaacaccaaatagcaatagatgactataataaaaaaaactggtaccctagacatgaataccaaaaagttacaattaataaaatttgtatgactggacccgcgtgtccaagacaaccttggaaacattatatgcaagcacactgtagctataaattctactttactcttggaggatgtccaaaaactctggaaaaaatttataatccttgttcacagcctaaatggcccactcccgataacctccttggaagatttgaagtgcaggatcctaacaaacaccccgcaacagaactctacaactgggactggcaaaaagactatgttacagaatcagctctacaacgaattagaaaatacacagaaattgatccaaaaattttctcaatttcagaaagcaaaaaccaaccgatcatcctccaaaaaccacaagaaaaagacccatcgaaggaagaggagaaggagctccagctccagctccagcacatcagataccaacgactcctcctgcaactccaactccgacaattaaaataactaaatcaaaatttaaagttcttctttttgatgaaccaccaaaaaatagaagaatgacaccttgggaaaaagaacaagaaaaaatagatgcagctatttggaaaagacctcaaagagactttatttttgatgtacctttttaccctggtatacctcctacaccattagttaactttgacttaaaatacaaatatgaataaacaaggccaacagtaattcacttagtggtgtccatttatttaagtaaaaacttatataaacatccaccgcctccctaaaattcgggcgcaaaaattcaaagggggctccgcccccttcaacccccaagggggctccgcccccttacacccccaagggggctctgcccccttacacccccaagggggctccg

SEQ ID NO: 4039 - protein, 675 aa, Betatorquevirus sp.; identical to SEQ ID NO: 1398

SEQ ID NO: 4040 - DNA, 2704 bp, Gammatorquevirus sp.
cgggtgcccgaggtgagtgaaaccaccgaggtcaaggggcaattcgggctagggcagtctagcggaacgggcaagaaacttaaattattttattttacagatgcaaaacatctccagctctgacttttttatgccaacaccatacaaccaagagacgaaaacacaaatatggatgtctcaaattgctgactctcatgataatatctgccattgctgtcatccatttgctcaccttattgcttccatttttcctcctggccacaaagacagggagcttactattaatcaaatactcgcaagggattacacagataaatgcctttctggtggaaaagaagacgccgcccctggtttgggcgctaccggtaccggaggaggtttcaaaccaaaagaagaaaatacagaagaagaaaatttaccagaagaagaaatagaagggctcctcgccgccgccgccgcacaagacgccacaaggtaagaagaaaactcaaaaaaattaaaatacagcagtggcaaccagatagcataagaaaatgcaaaataaagggattaagtactattgtgcttggggcatcaggaaggcaatctagatgctacacaaacacatatggagaatatgttcaaccaaaagccccagcaggaggcggttttggcagtgaacttattactcttaaatggctatacaatgaatacctagctcacaggaatatttggacaacttctaatgaatacaaagacttacttagatacacaggagctacaataaccctttttagacataaatacgtagactttataattacctatgaattacaaccaccttttgacttaaacaaatacacatatgctgaactgcaaccccacaacatgctacttagacgcagaaaaaaaatactactcagccaagaatcaaatccaaaaggcaaacttaaagttaaactaaaaattaaacctcctaaacaaatgataactaaatggttttttgctaaagacttttgtccctttggcttagtaaaaatatcagcttcagcagctaattttaactacccaaatttaccacctggaggacaaagcaacatactaacattatacagcctaaacacttttttttaccacaacagtgactgggcaaaaacacaacaggacggatacaaaaacataacaacacaaaaatatccacttttttttaaatacaaagacaaaacaggcaataaattctataaatatgaaccagacgatgcaaacatacttagaaaatacaataatgacaaatatttaagaagcattagctatgaagatggcatgtttaatccaaaaattttactagcatttgaagtatgggcaggaggtactcaaactggcactgcagaccctataggaagtgaaaagctagccacactaccaatactaccacttagatataatccagaagtggactcaggctttgacaatatagtttatttaacaagcatttttaaaggctcatttgacaaacctacagttacacctgactatattttcacaggtataccactatggatggttttttttggatatgcagacttcttactgcaaaaatccaatgacaaaggcttattaacaacacatatgtttgttgtaaaaagcccagcacttcaccctatctcacaaaacacagaacaaaaataccatccaataattaacttagactttgcatttggcaaactaccatatgatgaatacatatcacaacaaataaaagctaaatggtatcctacagcagaacaacaagacacaattataaatgacatagtaaccacaggaccatatgtgccaaaattttacacaaatcaaccagtaactacatgggaacttgactatagatattccttttattttaagtggggaggcccagaagttacagatccaaaaattgaagacccctgcacaagacctacataccctgtgcccgataagctgttcaaaacagtacaaattaaaaacccagaaaaacttgacacaaacaccattttccatgagtgggactacagaaggggcattattacacagtcagctcttaaaagaatgtcagcgcacctcgaaattgatacagacttcgaaaatgatattacagaaacaccaagaaaaagacagaaagtcacaaaagagatcccatgcatcgagaacaagcaaaaagaaatccaaacatgtctccaggaactctgcagcgaaaattccttccaagaaacaccagaggacctacagcagtacatccagcaacagcagcagcaacagcacaagctcaaaagaaacctcatcttactcctcactcacctgaaaaaagaacagagatgcctacagctacaaacaggaatgctagattaactccttttcaaaaaggctttgaaatggacacagaacatgagttagcacaagcatttaaaagaccccctagaatgtttaaagaagacacccccttctatccatggcttcctaaacttgaaccccttgtaaactttcaccttaattttaagttctaggccgacactgttcacttagcggagtctgtttatataagtttgcaccccaaaaaaattgtaaaataaaaaaaaaaaaaaaaaataaaaaattgcaaaaattcggcgctcgcgcgcgctgcgcgcgcccgctagacggtgcagggaccggatcgagcgcagcgaggaggtccccggctgcccatggg

SEQ ID NO: 4041 - protein, 682 aa, Gammatorquevirus sp.
MPFWWKRRRRPWFGRYRYRRRFQTKRRKYRRRKFTRRRNRRAPRRRRRTRRHKVRRKLKKIKIQQWQPDSIRKCKIKGLSTIVLGASGRQSRCYTNTYGEYVQPKAPAGGGFGSELITLKWLYNEYLAHRNIWTTSNEYKDLLRYTGATITLFRHKYVDFIITYELQPPFDLNKYTYAELQPHNMLLRRRKKILLSQESNPKGKLKVKLKIKPPKQMITKWFFAKDFCPFGLVKISASAANFNYPNLPPGGQSNILTLYSLNTFFYHNSDWAKTQQDGYKNITTQKYPLFFKYKDKTGNKFYKYEPDDANILRKYNNDKYLRSISYEDGMFNPKILLAFEVWAGGTQTGTADPIGSEKLATLPILPLRYNPEVDSGFDNIVYLTSIFKGSFDKPTVTPDYIFTGIPLWMVFFGYADFLLQKSNDKGLLTTHMFVVKSPALHPISQNTEQKYHPIINLDFAFGKLPYDEYISQQIKAKWYPTAEQQDTIINDIVTTGPYVPKFYTNQPVTTWELDYRYSFYFKWGGPEVTDPKIEDPCTRPTYPVPDKLFKTVQIKNPEKLDTNTIFHEWDYRRGIITQSALKRMSAHLEIDTDFENDITETPRKRQKVTKEIPCIENKQKEIQTCLQELCSENSFQETPEDLQQYIQQQQQQQHKLKRNLILLLTHLKKEQRCLQLQTGMLD

SEQ ID NO: 4042 - protein, 125 aa, Gammatorquevirus sp.; identical to SEQ ID NO: 2438

SEQ ID NO: 4043 - protein, 121 aa, Gammatorquevirus sp.; identical to SEQ ID NO: 2439

SEQ ID NO: 4044 - DNA, 2703 bp, Gammatorquevirus sp.
cagcagcagagatacctaagtttgcaaacaggataggggcaattcgggctagggcagtctagcggaacgggcaagaaacttaaattatacccttgtttttagatgagccatctatgtccagctgacttttaccacagaactacatttaaccttgatactcaaaaccaaatatggatgtctcagctagcagacgggcatgacaatttctgtgactgcaaaactccttttggccatttgcttgcttctatttttcctcctggtcataaagaccgtgatctcacaattaatcaaattttgctgcgagactaccaagaacaatgccattctggtggaaaagaagaaggcggccatggtatggcaccttcaggagacgctggagacgcagacaatataaaacaagaaaaagaagaagaagatatcccagaagaagaactagaaaaacttatggccgccgtagaagaagaagaaaacacaaggtaagaagaaaaattcaaaaactaactcttaaagtatggcaaccagactctgttagaaaatgtaaaattaaactactcgggactctagtaaatggagcccaaggaagacaaatgtactgctatacaaatgaaataggtaattacttacctcctaaatcacctgggggagggggatttggctgtgaaataattaccctagaatacttatatgaacaatacttacaaagaaactgcatatggactagaagtaatcaatacagtgacctttgtagatatacaggtggaaaaataacattgtacagacatccaacaatagactttgttttctcatacaacatacaaccaccatttactatagaaaaagacacttatttaaacctacaaccacaactacaattactaagcagaagacacagagtaatactcagcaaagctactaatccaaaaggcagaataaaacacacaataaaatttaaaccacccaaagaaatgtccactaaatggttttttcaaaatgatttttcacatacacccctaatacaattaaatgctagtgcagcagacttccaatatgtaactatgggctgctgcaatgtaagccaaatgtctacattttatgcacttaactcagcacacttctttaaacaatccacatggggagagttcactagcaatccttacgagccatacccaacaataaatttacctttaacatttgtatacactgaaaaaggaggtagggaaggcagatatgttattacaacaactacatttggaacaggaacaggctcatacacaaaaagtgttagcagactagcgggatggtttaataacagagtactactagcaaaagcagtttaccaaggaaactttccacaaggaaacctaccagaagcatcaaaacttggtaccttacccatagttacagctagatataacccaatagaagacactggtcaaggcaatgaagtatggctaacatccatatttcatggagcctatgacaaaccaacagttactcctgactacttaatacaaggatacccactatacattgcattctttggctactataactttttacttcaaaaatctaatgataaaggtatcatgtacagccatatgtttgtagttaaaagcaaagcacttagacctttacaatcatctacaggccaaacatattaccctatagtagactgggactttttaaatggcaaactaccctatgatgaatacattggagacaatgacaccagaaaatggtttcccacagtagaatctcaactgatatccattaataactttgtacaatcaggaccatacatacctagactagacaatgttaaaaacagtacctgggaacttagatacaaacttaccatgtactttaaatgggggggtcctcaggttacagacccaccaattgatgacccacaacacaaacaagactaccccactccaggtactttccaagaaacattacaaattgctgacccgaaaaaacaaaaacctgaaaccatgtttcatgaatgggactacagaagggggattattacaacagcagctattaaaagaatgtcagaaaacctcgaaactgattcatctatccaatctgatgcttcagaaccaccaaaaaagaaaaaaagaacaaccaaagaactcccctgcctccaaaagaaggaagaaaaaatcaagagatgtctccaggaactctgcgaagaaaatatcttccaagaatcacaagacctccagctcctcatccaacagcagcaccagcaacagcaacagctcaagtcaaacatcctggagctcctcaaagacctcaaacagcagcagagatacctaagtttgcaaacaggaaacctacattaacaagatttaaaccaggctttgaatgggaaacagaaaaacaagtagcaaaagcatttaacagaccccctagattatttaaagaagataaacccttttacccatggcttcctaaaccagaacccattgtaaactttcaccttaattttaaattctaggcctacaatgttcacttagtggagtatttctgtgtcccattcaaagcctggtttaaatcttgttaatgtaggtttcctgtttgcaaacttaggtatctctgctgctgtttgaggtctttgaggagctcctcatccaacagcagcaccagcaacagcaacagctcaagtcaaacatcctggagctcctcaaagacctcaaa

SEQ ID NO: 4045 - protein, 676 aa, Gammatorquevirus sp.
MPFWWKRRRRPWYGTFRRRWRRRQYKTRKRRRRYPRRRTRKTYGRRRRRRKHKVRRKIQKLTLKVWQPDSVRKCKIKLLGTLVNGAQGRQMYCYTNEIGNYLPPKSPGGGGFGCEIITLEYLYEQYLQRNCIWTRSNQYSDLCRYTGGKITLYRHPTIDFVFSYNIQPPFTIEKDTYLNLQPQLQLLSRRHRVILSKATNPKGRIKHTIKFKPPKEMSTKWFFQNDFSHTPLIQLNASAADFQYVTMGCCNVSQMSTFYALNSAHFFKQSTWGEFTSNPYEPYPTINLPLTFVYTEKGGREGRYVITTTTFGTGTGSYTKSVSRLAGWFNNRVLLAKAVYQGNFPQGNLPEASKLGTLPIVTARYNPIEDTGQGNEVWLTSIFHGAYDKPTVTPDYLIQGYPLYIAFFGYYNFLLQKSNDKGIMYSHMFVVKSKALRPLQSSTGQTYYPIVDWDFLNGKLPYDEYIGDNDTRKWFPTVESQLISINNFVQSGPYIPRLDNVKNSTWELRYKLTMYFKWGGPQVTDPPIDDPQHKQDYPTPGTFQETLQIADPKKQKPETMFHEWDYRRGIITTAAIKRMSENLETDSSIQSDASEPPKKKKRTTKELPCLQKKEEKIKRCLQELCEENIFQESQDLQLLIQQQHQQQQQLKSNILELLKDLKQQQRYLSLQTGNLH

SEQ ID NO: 4046 - protein, 125 aa, Gammatorquevirus sp.; identical to SEQ ID NO: 2128

SEQ ID NO: 4047 - protein, 120 aa, Gammatorquevirus sp.; identical to SEQ ID NO: 2904

SEQ ID NO: 4048 - DNA, 2696 bp, Betatorquevirus sp.
cgggagccgaaggtgagtacaaccaccgaagtctaggggcaattcgggctgggtcagtctggcggaacgggcaactaatttaaactatattacagatgagtgactatgtaccaccaaaattatcaaaaaaacaactggatttacaaaatgtgaatacctacgtaaacgtccattgcctgacctgcgactgcgaacaaccattaaaacatatcatcaaacaaattactaaccaagaaccatccctgaaaccatggctcgctactatcgccgatactggagaccacgctaccgaaaaagatatcgatggtttcgaacctggagaactagagcgcctcttcgctggagaagacgcagaaagcgcagggtaagaagaaaactttcttctattaaaataagacaatatcaaccacaaagaattaacagacttaatataaaaggactatactgtctaatgttagtacataaagtacgctacaatcatgactttaatcaatatgaaacaagcgtaccaccagaaggactccctaacggaggtggatttacaattttaagatttacttggaatgctctttttgaacaacacgaaaaagcacataatgtatggactaaatcaaacaaaaacttgcctttatttagatacttaggatgttctataaaaatatatagacctttactagtagacttagtagttaaatttcaaacatgctatcctatgtcgagctcaaaactaatgtttacaggaacacaaccctctataatgatgatgactagaggagcaaaaattattaaatgccaaaaaaacgctccgaatgccaaaccttacaaaaaattcttttttaaaccaccacaacaaatgacaaacaaatggtacttccaacacacagaacaaaacacaggactcttattaatacaagcagcctcagcaagtctagaccaatactatgtatctcaatattcagacagctcaaccatacaattagtatcattaaacacaagaatatttcaaaaccttaaatttgacacaaaagacacatatgggtatcatccaagaaaagactactatttatgggccacaaacggaacagataaactaggagacttaatatacttaggacaatccaaactatataacgatggagaacaaattggcaaaggaacagatgaaaaaatgtggagaacaaaaagctttaaagaggcattagctacatatatgcaacaaaaccaaaaatggggcaacccatttcacagcaaccacatacaccaacaacaccctaactactactttacaagaaaacctccactactagcattcaccgacccacaattaaaattagacacaaatatatccaacgtactggaaggaagcacaccaatactacataaaatttcagacacatttttaattaatgtccgatataacccatttaaagacaaaggatacaacaacaatgtatacatactcccaaactttacagaccacgaagacaacctagaacccttaccagacccagacttacaaaacccaggattccctaattggctatctacatttggctttgaagactacttaataaaactaggaaaaaaaacaaaaatacctgaacattacatcatgctacacaaatccacattctttgacggacccctcacatactacctatttttagaccactggtttttacacggagacagtgaaaatttaataggcagaacacaatgggacaatactaactggtatccaatgataaaacaccaagaacaagaattaacaaatttagtgctttcaggaccaggaacacctaagctaggaagcacaaaactagcagaatgtaaaatggaatacaactttaaatttaaggttggaggatgctcagcccctgtggaaaaagttgcaaacccagcaacacaaccgacttttgctacaccaaataatatccttgacacaaattcgttacagagtccagaagaaccaatcgaaagcttcctctaccaattcgattggagacgagaccaaattacagaaagcgctgcacaacgaattacaaaagacttcccaactaaaaaatatctatttacagatgcagcaccaactggaacaagcgtcccactccaccaaacactccaaaaagaaatcctctcgtcgtcggaggaggaaacccaagaagagacactattcgagcagctccagcgacagcgaatcaagcaaaaagacctccgacacagaatcagacagctcctaactcaaatacaacaattacaataaaaaaacaaaaactaacggtaaacctatggggagacccacctaaaaatagaagaatgactgcaaaagaaaaagaagaagaaatacaagaaagtaaaatatggggacattatgtacgagactatatactagataagcctttttacaaaaatatgccaattaccccaataatcccaagacttaactttgatcttaattacaaagaataaagcctgcatactttcaaacctcggtgtccatttatttaagtttaaactaatataaacatccaccacatctcccaaatacgcaggcgcaaagggggctccgcccccttacacccccaagggggctccgcccccttacacccctatataactaactacacttccgaatggctgagtttatgccgccagacggagactggagcagtacactgattcaggctgaccaaggg

SEQ ID NO: 4049 - protein, 670 aa, Betatorquevirus sp.; identical to SEQ ID NO: 3280

SEQ ID NO: 4050 - protein, 90 aa, Betatorquevirus sp.; identical to SEQ ID NO: 3281

SEQ ID NO: 4051 - DNA, 2695 bp, Betatorquevirus sp.
ttacacccccaagggggctccgcccccttacactaggggcaattcgggctagatcagtctggcggaacgggcaagaaacttaaaattattattttacagatgtcttcaagatggattccaacaaaatcaactaaaagacaacaacaactaaaatggattaatatgctctgccatgttcatgattccttctgcgactgctaccaaccattagcacatacagcaaccttaatttttgaacaagaaaaagaattaccttttacaccacctgaaaaagatcttatacaaaaatgcctttctggagacgcccctaccgcttcaggtggcgccgcagacgacaatattggagacggagacctagaacgacttttcgaagaaccctttaccgaagaagacgccgacgggtaaggaaacgatttcctaaaagaaaacttaaaagaattaaaatagaacaatggcaaccgccaaccataaaaaaactaactataaaaggaatataccaactattttttaccacaaaagacagaattgaaaataacaatactatgtacatagatgaaacagcaccatttcatattccttctggtggcggatggtctctaagtcaatttactttacaaaacctctttgaccaacacctaagactgagaaactggtggactaaaggaaatgatgttttaccattaattagatactttgggtgtacaatgtacttttactatgaatctaatgttgattatattgtttcctatgatactaactatcccctaagagcaagtagactaacatacaatggatctcaaccaagtgtaatgcttcttagtaaacatagaaaaattattccatgtaaatactataacagaaaaaagaaaccatacaaaagagtatttataagacccccaagccaactaaaaaatcaatggtactttcaacataattttgcagacattccactagtaaacataatggctactgctgcatcactagacagattttatgcacactccaatgctataacaacaaccataagattttacatactagaccctagagtatggctacaacataacttcaaagaccaaccaacatatggataccaaccacaagaaaatcaaccactatttggccttgaaaacggtcatgacacactgacatcaattaaatttgaagacttaatatacttaggaaatgcacaacaatacggatatggcacagaattcaaaaatgtaaaatcaggaacccaagaaacaagattcacaaactattttacagacaaacaacactggggaaatccttttatgctagactatttagatcacacaaaaacaacaataaaacacaacggagacataaacttaataaaacaaaaactaaagaacaaaaattggaaatttgacacacctttatctgaattagggggatttacaataacaaccataccaaacttaatagaatgcagatacaatccacacaaagacaaaggaataggaaacgaagtatactttctgcctattacaaacaatgccaactatggatgggaaccccttccaaacaaaccagaattaatagcgaaagatttacccatttggtgcttatactggggcctagtagactggcaaaagagagcaggaacaataacatccatagaaacacatgcacttacagtttttaaaacaaaatacatagacccaaacaatgaagtatattatataccactaggacaatactttttatcagaaagatctcaatactttccacctgctcaagacacacttacttccataacaaaaccagaccaattaaactggcatccgaaacttaaattccaactagatgttataaattctatatgtcaaacaggccctgctactgttaaattacccaaagacacaagtatagaagcccatgtttactataaatttcattttaagattggaggggcaccaccaccaatggaacttgtcaaagatccaacctcacaacccatatggactattcccaataacatcaatgaaacaccttcgttacagagtccagggacgccatttgaacacttcttatacaacttcgaccaaagaggagaatacattacacaaaaagctatcgcacgcctcaaaaaagacctgccaactaaagaaattatatcttcaattacaggatcaactggactcaacgtaccaatccaaaaaacccaagaaagcgactcggaaacatcggaagaggaagaagcccaccaaacattacagcagcagctcctcaaccagcagcgggagcagcacaaactccgaaagcgaatacagctcctcctgaacaaactatcaacctaaaaataacaaaatgtatttttaaacaaaaattatttccaagtcctaaaaagaacaggagaatgactcctgaagaatatgaacaagaattatttgatgctaaatgctggcttagagtacctagaacccacatttttgataaacctacctacccatgggtaccccaaataccaaaatacactgtaaactttgatttaaacgcgccgcaataaactacgcctgcaaacttcaacttgaggtgtccatttattattaataaaacttatataaacatccaccacactcccaaatacgcaggcgcagaagggggctccgcccccttacacccccaagggggctccgcccccttaaacccccaagggggctctgccccc

SEQ ID NO: 4052 - protein, 678 aa, Betatorquevirus sp.
MPFWRRPYRFRWRRRRQYWRRRPRTTFRRTLYRRRRRRVRKRFPKRKLKRIKIEQWQPPTIKKLTIKGIYQLFFTTKDRIENNNTMYIDETAPFHIPSGGGWSLSQFTLQNLFDQHLRLRNWWTKGNDVLPLIRYFGCTMYFYYESNVDYIVSYDTNYPLRASRLTYNGSQPSVMLLSKHRKIIPCKYYNRKKKPYKRVFIRPPSQLKNQWYFQHNFADIPLVNIMATAASLDRFYAHSNAITTTIRFYILDPRVWLQHNFKDQPTYGYQPQENQPLFGLENGHDTLTSIKFEDLIYLGNAQQYGYGTEFKNVKSGTQETRFTNYFTDKQHWGNPFMLDYLDHTKTTIKHNGDINLIKQKLKNKNWKFDTPLSELGGFTITTIPNLIECRYNPHKDKGIGNEVYFLPITNNANYGWEPLPNKPELIAKDLPIWCLYWGLVDWQKRAGTITSIETHALTVFKTKYIDPNNEVYYIPLGQYFLSERSQYFPPAQDTLTSITKPDQLNWHPKLKFQLDVINSICQTGPATVKLPKDTSIEAHVYYKFHFKIGGAPPPMELVKDPTSQPIWTIPNNINETPSLQSPGTPFEHFLYNFDQRGEYITQKAIARLKKDLPTKEIISSITGSTGLNVPIQKTQESDSETSEEEEAHQTLQQQLLNQQREQHKLRKRIQLLLNKLST

SEQ ID NO: 4053 - protein, 101 aa, Betatorquevirus sp.
MSSRWIPTKSTKRQQQLKWINMLCHVHDSFCDCYQPLAHTATLIFEQEKELPFTPPEKDLIQKCLSGDAPTASGGAADDNIGDGDLERLFEEPFTEEDADG

SEQ ID NO: 4054 - DNA, 2693 bp, Gammatorquevirus sp.
cgggagcccgaggtgagtgaaaccaccgaggtctaggggcaattcgggctagggcagtctagcggaacgggcaagaaactaaatactatttttgttttctagatgcaaaacatttcttcaaaagacttttttacaccaactccatttaaccaggagacaaaaaaccaaatatggatgtctcaaattgcagatgcccatgacaatatctgtcactgcaactttccttttgctcatttgcttgctaatatttttcctgttggccataaagacagggatcttaccattaatcaaattcttgaaagagattacaaagaaagatgcctttctggtggaaaagacgaaggaaaaactggtggggccgcttcaggtaccggaggaggattccaaggtataaaagacgaagaagaagaattccaagaagaagaaatagaaaatctacttaccgccgccgccgccgcagaaaatacaaggtaagaagaaaaaacaaaagaattactataaaacaatggaatccagacagcataaggaaatgtaaaattaagctatttgggacattagtagcaggagctgaaggtagacaaatgtactgttatacaaatgaaacttctgaatttatacaacctaaggctccagctgggggtggctttggaactgaagttataactttacaatacctatatcagcaatacaaagctagaaactgtatatggactagaactaatcaatatacagatctatgtagatatacaggctccaaaataactctatatagacaccctgaagtagattttgtttttcactataacctacaacctccatttacaattgatagattttcctaccaagacttacaaccacaaatcatgcttcaacgtccacagcatagagttattatgagtacattaactaatccaaaaggaaaactaaaaacaacacttaaaataaagccacctaaagaactaagtactaaatggttttttcaaagagacttttcacacattccccttttacaactaagtgcatctgcagctgactttagacacccaacaatgggagctggagcagcaagtcaaatgctaactatatttgcacttaattcctcacacttttataaaaattcaaattggggtcaatattcagcaagagcttacaaaccctatgataatatgcgcttcccattatctttcaaatacaaaccaaaaggacaatcatatcaatatttagtcatagacagccacacctttcaagatagcaccacaggatacttaaaaagtgttagtagaaatgaaggctggtttcaaaacaaaatattatcagctgtaaaagtttttcaaggaaacgtaactcaaccatctcaagaatcatcagctacagaactaggcacattacccatagttacagcaagatacaacccacttgaagatgatgggggtggcaatgagctatggctcactaacatttttcatggtacctatgataagccttcagttacacctaactttttaatacaaggagtaccccttccaatagccttctttggatactggaactaccttatagaaacatctaaagacaaaggtataatggagtcacacatgtttgtagctaaatgcaaagcaattagaccaacaaacacatccacaggtcaagaattttatccatttcttgaccccagctttctagatgctaaattaccttatgatgaatacattttagattcagataacagaaaatggtatcccactgcagaaaaacaagtagtaacaataaatgcttttgttaaagctgggccatatattccaagattagataaccaaaaatctagcacttgggaattaagatataaactcacatcctattttaaatgggggggtcctaaggttacagatccaccaattgatgacccccacaacaaaggagaataccccactcccggtgctctgcaacaaacaatacaaatatcaaacccagaaaagcaacaaccagaaaccttatttcatgagtgggactatagaagggggtttattacagcagcagctattaaaagaatgtcagaaaacctcagatctgattcatctctcgaatctgatgattcagaaacaccaaacaaaaaaaggaaaattaccaaagagcttccacacctccaacaaaaagaagacaagatcaaagcatgtctccaggaactctacgaagaaagtaccttccaagaggagacacaagacatcaaccagctcatccagcagcagcaccaacagcagcacaagctcaaaagaaacatcctcaagctgctcacagagctgaagaaaaaacagagactactaggtctccaaacaggcatgttagactaaccagatttaaacccggctttgaacaacaaacagaatatgaactttcttgtatttttttaaggcctatgagaacatacaaagaagacctcccttactatccctggcttccccctgaaccatatgtaaactttagccttaacttcaaaggctaggccgtccccatacacttgttcaagcatgtttatataagttgtacccccaataaaaaaaaaaaaaaaaaaaaataaaaaattgcaaaaattcggcgtatataactaagtgaggtgacgaatggctgagtttaccccgctagacggtgcaggaaccggatcgagcgcagcgaggaggttcccggctgcccgtggg

SEQ ID NO: 4055 - protein, 676 aa, Gammatorquevirus sp.
MPFWWKRRRKNWWGRFRYRRRIPRYKRRRRRIPRRRNRKSTYRRRRRRKYKVRRKNKRITIKQWNPDSIRKCKIKLFGTLVAGAEGRQMYCYTNETSEFIQPKAPAGGGFGTEVITLQYLYQQYKARNCIWTRTNQYTDLCRYTGSKITLYRHPEVDFVFHYNLQPPFTIDRFSYQDLQPQIMLQRPQHRVIMSTLTNPKGKLKTTLKIKPPKELSTKWFFQRDFSHIPLLQLSASAADFRHPTMGAGAASQMLTIFALNSSHFYKNSNWGQYSARAYKPYDNMRFPLSFKYKPKGQSYQYLVIDSHTFQDSTTGYLKSVSRNEGWFQNKILSAVKVFQGNVTQPSQESSATELGTLPIVTARYNPLEDDGGGNELWLTNIFHGTYDKPSVTPNFLIQGVPLPIAFFGYWNYLIETSKDKGIMESHMFVAKCKAIRPTNTSTGQEFYPFLDPSFLDAKLPYDEYILDSDNRKWYPTAEKQVVTINAFVKAGPYIPRLDNQKSSTWELRYKLTSYFKWGGPKVTDPPIDDPHNKGEYPTPGALQQTIQISNPEKQQPETLFHEWDYRRGFITAAAIKRMSENLRSDSSLESDDSETPNKKRKITKELPHLQQKEDKIKACLQELYEESTFQEETQDINQLIQQQHQQQHKLKRNILKLLTELKKKQRLLGLQTGMLD

SEQ ID NO: 4056 - protein, 123 aa, Gammatorquevirus sp.
MQNISSKDFFTPTPFNQETKNQIWMSQIADAHDNICHCNFPFAHLLANIFPVGHKDRDLTINQILERDYKERCLSGGKDEGKTGGAASGTGGGFQGIKDEEEEFQEEEIENLLTAAAAAENTR

SEQ ID NO: 4057 - protein, 109 aa, Gammatorquevirus sp.
MSPGTLRRKYLPRGDTRHQPAHPAAAPTAAQAQKKHPQAAHRAEEKTETTRSPNRHVRLTRFKPGFEQQTEYELSCIFLRPMRTYKEDLPYYPWLPPEPYVNFSLNFKG

SEQ ID NO: 4058 - DNA, 2692 bp, Gammatorquevirus sp.
cgggagcccgaggtgagtgaaaccaccgaggtctaggggcaattcgggctagggcagtctagcggaacgggcaagaaactaaatactatttttgttttctagatgcaaaacatttcttcaaaagacttttttacaccaactccatttaaccaggagacaaaaaaccaaatatggatgtctcaaattgcagatgcccatgacaatatctgtcactgcaactttccttttgctcatttgcttgctaatatttttcctgttggccataaagacagggatcttaccattaatcaaattcttgaaagagattacaaagaaagatgcctttctggtggaaaagacgaaggaaaaactggtggggccgcttcaggtaccggaggaggattccaaggtataaaagacgaagaagaagaattccaagaagaagaaatagaaaatctacttaccgccgccgccgccgcagaaaatacaaggtaagaagaaaaaacaaaagaattactataaaacaatggaatccagacagcataaggaaatgtaaaattaagctatttgggacattagtagcaggagctgaaggtagacaaatgtactgttatacaaatgaaacttctgaatttatacaacctaaggctccagctgggggtggctttggaactgaagttataactttacaatacctatatcagcaatacaaagctagaaactgtatatggactagaactaatcaatatacagatctatgtagatatacaggctccaaaataactctatatagacaccctgaagtagattttgtttttcactataacctacaacctccatttacaattgatagattttcctaccaagacttacaaccacaaatcatgcttcaacgtccacagcatagagttattatgagtacattaactaatccaaaaggaaaactaaaaacaacacttaaaataaagccacctaaagaactaagtactaaatggttttttcaaagagacttttcacacattccccttttacaactaagtgcatctgcagctgactttagacacccaacaatgggagctggagcagcaagtcaaatgctaactatatttgcacttaattcctcacacttttataaaaattcaaattggggtcaatattcagcaagagcttacaaaccctatgataatatgcgcttcccattatctttcaaatacaaaccaaaaggacaatcatatcaatatttagtcatagacagccacacctttcaagatagcaccacaggatacttaaaaagtgttagtagaaatgaaggctggtttcaaaacaaaatattatcagctgtaaaagtttttcaaggaaacgtaactcaaccatctcaagaatcatcagctacagaactaggcacattacccatagttacagcaagatacaacccacttgaagatgatgggggtggcaatgagctatggctcactaacatttttcatggtacctatgataagccttcagttacacctaactttttaatacaaggagtaccccttccaatagccttctttggatactggaactaccttatagaaacatctaaagacaaaggtataatggagtcacacatgtttgtagctaaatgcaaagcaattagaccaacaaacacatccacaggtcaagaattttatccatttcttgaccccagctttctagatgctaaattaccttatgatgaatacattttagattcagataacagaaaatggtatcccactgcagaaaaacaagtagtaacaataaatgcttttgttaaagctgggccatatattccaagattagataaccaaaaatctagcacttgggaattaagatataaactcacatcctattttaaatgggggggtcctaaggttacagatccaccaattgatgacccccacaacaaaggagaataccccactcccggtgctctgcaacaaacaatacaaatatcaaacccagaaaagcaacaaccagaaaccttatttcatgagtgggactatagaagggggtttattacagcagcagctattaaaagaatgtcagaaaacctcagatctgattcatctctcgaatctgatgattcagaaacaccaaacaaaaaaaggaaaattaccaaagagcttccacacctccaacaaaaagaagacaagatcaaagcatgtctccaggaactctacgaagaaagtaccttccaagaggagacacaagacatcaaccagctcatccagcagcagcaccaacagcagcacaagctcaaaagaaacatcctcaagctgctcacagagctgaagaaaaaacagagactactaggtctccaaacaggcatgttagactaaccagatttaaacccggctttgaacaacaaacagaatatgaactttcttgtatttttttaaggcctatgagaacatacaaagaagacctcccttactatccctggcttccccctgaaccatatgtaaactttagccttaacttcaaaggctaggccgtccccatacacttgttcaagcatgtttatataagttgtacccccaataaaaaaaaaaaaaaaaaaaaaataaaaaattgaaaaaattcggtatataactaagtgaggtgacgaatggctgagtttaccccgctagacggtgcaggaaccggatcgagcgcagcgaggaggttcccggctgcccgtggg

SEQ ID NO: 4059 - protein, 676 aa, Gammatorquevirus sp.; identical to SEQ ID NO: 4055

SEQ ID NO: 4060 - protein, 123 aa, Gammatorquevirus sp.; identical to SEQ ID NO: 4056

SEQ ID NO: 4061 - protein, 109 aa, Gammatorquevirus sp.; identical to SEQ ID NO: 4057

SEQ ID NO: 4062 - DNA, 2690 bp, Betatorquevirus sp.
caagcgccgaaggtgagtgaaaccaccgtagtctaggggcaattcgggctagttcagtctagcggaacgggcaacaaacttaaaacatatttttatattacagatgtcaagttcttactacaaaaaaacaaaatatacaccaagagaacaagaaacagcatggcttaacattgttaatgctactcatgatatgttttgcttttgtgatacaccttggaatcatcttttacaatccgtgttacaaagaggatcaacctttgaattggatcaaaaaagcattagattaatgcaaaaatgccttatttctacaaccgacgctggtaccgacccagaacaacctacaacttcaagaggagataccgtaaacgctggtttagaccttttggatggagaattagaagaactattcgcagaaaaagaagaaaacgaagggtaagaaaaagaactttttttaaaagaaaaaaactaaaaaaattaagactatttcaatggcaaccagaacttattagacactgtaaaattaaaggactatttactatgtttcaaggagctagagaacgttggtcaaacaactatatacaatacagagactcttttactcctgaattttatcccggaggtggaggctggggactatttgtatttaatttaggagcactatttgatgaattcttaagaattagaaactggtggacattttctaatattaatatgcctttagtacgatacttaaaatgtaatgtaaagttttatagagatgattttgttgactatattgtaacatataacagaaactaccccatgacagactctgctctacaccatgcaaatgctcaacctagcagaatgcttgcacaaaaacataaaattatagttcagagtagagcacacgcacaaaacaaaaaaccatacgtacgcagacgcataaatcctcccagacaattaattaacaaatggttttttcaaagagaaatggtaaacacaaacttaattatgtttacagcctcagcagcctcactgtccgactttgacgttagctatcaaaaaacaacaaacaacattacactactaaccttaaatccaaaaatgtttccacacattaactatgacacacataacacaaacgggtggcaacctaagtctaacctttatttttatggcacaaacagtccatcaattaatcctcaatcaacaaaccccataacaaatgtcaaatactcagaactaatttacctaggcgaagcaaatgcactaagagaaggaaccccacttggcataaaaacaaatcagacagaggtaactgcatttttttctaacagacaacactggggaaatatttttcacgaaaaatacttaaaccacgaatggcatatacttaccagcaatgtacaacacactaactggcagatagcaaatacaacaaaccttacaattgacacaactaaatttaatttaatgatagaacctatttacataaaggtaagatacaacccagataaagacacaggagaaaacacaaaagtttactttgtgcccaattttcaacaattaactgaatggaaagaacctgaaaatgaagatttaaagtttgcaggctttccactatggatgctactatgggggtggccagactggcaaaaaaaactatcccttattaaccaaatagatgaccactatattttaattgttgaaagtccatactttgaacctaaacaaagtaaatacatgtttttagatatagactttattgaaaataaaagactataccccgaacacggagatgacagtacagatgccaaaccacttttaacagatcaattatcctggcatccaaaatttaaataccaacaaaaatctgtagatgctatttgtatgtgtggacctggggcccctaaatacccaaatttaaaaagtgtacaagctcatatgggatactctttttcatttaagtggggaggaagccctagttccatggaaaccattgcaaacccagcaaaacaacccagctatcccgttcccggtaacctcccacaaggacttcaaatccagaatccaacatacgacccctccaactacatctacacttgggacaccagaagagaataccttacacaaaaagctgttaaaagacttacagaagaccaaacaacttacacacctcttttaccaattacagaatcctacatcaatccaaacccacgagaaacaacttcaaaagacatcttggaaacactcatccaagcacagacaacggaagaagagaaagcgcaaaaactacagctctaccagcagctccgagagcagcaacaactactcaacaacagactcagacacctaatactgtcaaatataaaataataaaccaaaaatgtaacattaacctgtttgcagacgaacctcctaaaaaaaataggagattcactcctaaagagtttgaagaggagttaactttatctcgcatatttcacagacgacctagaacatacttttatgataagcctacctatgactggttaccccctactcctttagtaaactttgatcttggatataaacaataaactttcaaggccagcaaatattcactcttggtgtctctttattaaagtttaaacttaaaggaacatccaccgcctccctaatacgcaggcgcacaagggggctccgcccccttaaacccccaggggggg

SEQ ID NO: 4063 - protein, 687 aa, Betatorquevirus sp.
MPYFYNRRWYRPRTTYNFKRRYRKRWFRPFGWRIRRTIRRKRRKRRVRKRTFFKRKKLKKLRLFQWQPELIRHCKIKGLFTMFQGARERWSNNYIQYRDSFTPEFYPGGGGWGLFVFNLGALFDEFLRIRNWWTFSNINMPLVRYLKCNVKFYRDDFVDYIVTYNRNYPMTDSALHHANAQPSRMLAQKHKIIVQSRAHAQNKKPYVRRRINPPRQLINKWFFQREMVNTNLIMFTASAASLSDFDVSYQKTTNNITLLTLNPKMFPHINYDTHNTNGWQPKSNLYFYGTNSPSINPQSTNPITNVKYSELIYLGEANALREGTPLGIKTNQTEVTAFFSNRQHWGNIFHEKYLNHEWHILTSNVQHTNWQIANTTNLTIDTTKFNLMIEPIYIKVRYNPDKDTGENTKVYFVPNFQQLTEWKEPENEDLKFAGFPLWMLLWGWPDWQKKLSLINQIDDHYILIVESPYFEPKQSKYMFLDIDFIENKRLYPEHGDDSTDAKPLLTDQLSWHPKFKYQQKSVDAICMCGPGAPKYPNLKSVQAHMGYSFSFKWGGSPSSMETIANPAKQPSYPVPGNLPQGLQIQNPTYDPSNYIYTWDTRREYLTQKAVKRLTEDQTTYTPLLPITESYINPNPRETTSKDILETLIQAQTTEEEKAQKLQLYQQLREQQQLLNNRLRHLILSNIK

SEQ ID NO: 4064 - protein, 110 aa, Betatorquevirus sp.
MSSSYYKKTKYTPREQETAWLNIVNATHDMFCFCDTPWNHLLQSVLQRGSTFELDQKSIRLMQKCLISTTDAGTDPEQPTTSRGDTVNAGLDLLDGELEELFAEKEENEG

SEQ ID NO: 4065 - protein, 59 aa, Betatorquevirus sp.
LFADEPPKKNRRFTPKEFEEELTLSRIFHRRPRTYFYDKPTYDWLPPTPLVNFDLGYKQ

SEQ ID NO: 4066 - DNA, 2689 bp, Gammatorquevirus sp.
cgggtgcccgaggtgagtgaaaccaccgaggtcaaggggcaattcgggctagggcagtctagcggaacgggcaagaaacttaaattattttattttacagatgcaaaacatctccagctctgacttttttatgccaacaccatacaaccaagagacgaaaacacaaatatggatgtctcaaattgctgactctcatgataatatctgccattgctgtcatccatttgctcaccttattgcttccatttttcctcctggccacaaagacagggagcttactattaatcaaatactcgcaagggattacacagataaatgcctttctggtggaaaagaagacgccgcccctggtttgggcgctaccggtaccggaggaggtttcaaaccaaaagaagaaaatacagaagaagaaaatttaccagaagaagaaatagaagggctcctcgccgccgccgccgcacaagacgccacaaggtaagaagaaaactcaaaaaaattaaaatacagcagtggcaaccagatagcataagaaaatgcaaaataaagggattaagtactattgtgcttggggcatcaggaaggcaatctagatgctacacaaacacatatggagaatatgttcaaccaaaagccccagcaggaggcggttttggcagtgaacttattactcttaaatggctatacaatgaatacctagctcacaggaatatttggacaacttctaatgaatacaaagacttacttagatacacaggagctacaataaccctttttagacataaatacgtagactttataattacctatgaattacaaccaccttttgacttaaacaaatacacatatgctgaactgcaaccccacaacatgctacttagacgcagaaaaaaaatactactcagccaagaatcaaatccaaaaggcaaacttaaagttaaactaaaaattaaacctcctaaacaaatgataactaaatggttttttgctaaagacttttgtccctttggcttagtaaaaatatcagcttcagcagctaattttaactacccaaatttaccacctggaggacaaagcaacatactaacattatacagcctaaacacttttttttaccacaacagtgactgggcaaaaacacaacaggacggatacaaaaacataacaacacaaaaatatccacttttttttaaatacaaagacaaaacaggcaataaattctataaatatgaaccagaagatgcaaacatacttagaaaatacaataataacaaatatttaagaagcattagctatgaagatggcatgtttaatccaaaaattttactagcatttgaagtatgggcaggaggtactcaaactggcactgaagaccctaaaggaagtgaaaagctagccacactaccaatactaccacttagatataatccagaagtggactcaggctttgacaatatagtttatttaacaagcatttttaaaggctcatttgacaaacctacagttacacctgactatattttcacaggtataccactatggatggttttttttggatatgcagacttcttactgcaaaaatccaatgacaaaggcttattaacaacacatatgtttgttgtaaaaagcccagcacttcaccctatctcacaaaacacagaacaaaaataccatccaataattaacttagactttgcatttggcaaactaccatatgatgaatacatatcacaacaaataaaagctaaatggtatcctacagcagaacaacaagacacaattataaatgacatagtaaccacaggaccatatgtgccaaaattttacacaaatcaaccagtaactacatgggaacttgactatagatattccttttattttaagtggggaggcccagaagttacagatccaaaaattgaagacccctgcacaagacctacataccctgtgcccgataagctgttcaaaacagtacaaattaaaaacccagagaaacttgacacaaacaccattttccatgagtgggactacagaaggggcattattacacagtcagctcttaaaagaatgtcagcgcacctcgaaattgatacagacttcgaaaatgatattacagaaacaccaagaaaaagacagaaagtcacaaaagagatcccatgcatcgagaacaagcaaaaagaaatccaaacatgtctccaggaactctgcagcgaaaattccttccaagaaacaccagaggacctacagcagtacatccagcaacagcagcagcaacagcacaagctcaaaagaaacctcatcttactcctcactcacctgaaaaaagaacagagatgcctacagctacaaacaggaatgctagattaactccttttcaaaaaggctttgaaatggacacagaacatgagttagcacaagcatttaaaagaccccctagaatgtttaaagaagacacccccttctatccatggcttcctaaacttgaaccccttgtaaactttcaccttaattttaagttctaggccgacactgttcacttagcggagtctgtttatataagtttgcaccccaaaaaaattgtaaaataaaaaaaaaaaaaaaaaataaaaaattgcaaaaattcggcgctcgcgcgcgctgcggtgcagggaccggatcgagcgcagcgaggaggtccccggctgcccatggg

SEQ ID NO: 4067 - protein, 682 aa, Gammatorquevirus sp.
MPFWWKRRRRPWFGRYRYRRRFQTKRRKYRRRKFTRRRNRRAPRRRRRTRRHKVRRKLKKIKIQQWQPDSIRKCKIKGLSTIVLGASGRQSRCYTNTYGEYVQPKAPAGGGFGSELITLKWLYNEYLAHRNIWTTSNEYKDLLRYTGATITLFRHKYVDFIITYELQPPFDLNKYTYAELQPHNMLLRRRKKILLSQESNPKGKLKVKLKIKPPKQMITKWFFAKDFCPFGLVKISASAANFNYPNLPPGGQSNILTLYSLNTFFYHNSDWAKTQQDGYKNITTQKYPLFFKYKDKTGNKFYKYEPEDANILRKYNNNKYLRSISYEDGMFNPKILLAFEVWAGGTQTGTEDPKGSEKLATLPILPLRYNPEVDSGFDNIVYLTSIFKGSFDKPTVTPDYIFTGIPLWMVFFGYADFLLQKSNDKGLLTTHMFVVKSPALHPISQNTEQKYHPIINLDFAFGKLPYDEYISQQIKAKWYPTAEQQDTIINDIVTTGPYVPKFYTNQPVTTWELDYRYSFYFKWGGPEVTDPKIEDPCTRPTYPVPDKLFKTVQIKNPEKLDTNTIFHEWDYRRGIITQSALKRMSAHLEIDTDFENDITETPRKRQKVTKEIPCIENKQKEIQTCLQELCSENSFQETPEDLQQYIQQQQQQQHKLKRNLILLLTHLKKEQRCLQLQTGMLD

SEQ ID NO: 4068 - protein, 125 aa, Gammatorquevirus sp.; identical to SEQ ID NO: 2438

SEQ ID NO: 4069 - protein, 121 aa, Gammatorquevirus sp.; identical to SEQ ID NO: 2439

SEQ ID NO: 4070 - DNA, 2689 bp, Betatorquevirus sp.
cgggagccgaaggtgagtgaaaccaccgtagtctaggggcaattcgggctagttcagtctagcggaacgggcaacaaacttaaaacatatttttatattacagatgtcaagttcttactacaaaaaaacaaaatatacaccaagagaacaagaaacagcatggcttaacattgttaatgctactcatgatatgttttgcttttgtgatacaccttggaatcatcttttacaatccgtgttacaaagaggatcaacctttgaattggatcaaaaaagcattagattaatgcaaaaatgccttatttctacaaccgacgctggtaccgacccagaacaacctacaacttcaagaggagataccgtaaacgctggtttagaccttttggatggagaattagaagaactattcgcagaaaaagaagaaaacgaagggtaagaaaaagaactttttttaaaagaaaaaaactaaaaaaattaagactatttcaatggcaaccagaacttattagacactgtaaaattaaaggactatttactatgtttcaaggagctagagaacgttggtcaaacaactatatacaatacagagactcttttactcctgaattttatcccggaggtggaggctggggactatttgtatttaatttaggagcactatttgatgaattcttaagaattagaaactggtggacattttctaatattaatatgcctttagtacgatacttaaaatgtaatgtaaagttttatagagatgattttgttgactatattgtaacatataacagaaactaccccatgacagactctgctctacaccatgcaaatgctcaacctagcagaatgcttgcacaaaaacataaaattatagttcagagtagagcacacgcacaaaacaaaaaaccatacgtacgcagacgcataaatcctcccagacaattaattaacaaatggttttttcaaagagaaatggtaaacacaaacttaattatgtttacagcctcagcagcctcactgtccgactttgacgttagctatcaaaaaacaacaaacaacattacactactaaccttaaatccaaaaatgtttccacacattaactatgacacacataacacaaacgggtggcaacctaagtctaacctttatttttatggcacaaacagtccatcaattaatcctcaatcaacaaaccccataacaaatgtcaaatactcagaactaatttacctaggcgaagcaaatgcactaagagaaggaaccccacttggcataaaaacaaatcagacagaggtaactgcatttttttctaacagacaacactggggaaatatttttcacgaaaaatacttaaaccacgaatggcatatacttaccagcaatgtacaacacactaactggcagatagcaaatacaacaaaccttacaattgacacaactaaatttaatttaatgatagaacctatttacataaaggtaagatacaacccagataaagacacaggagaaaacacaaaagtttactttgtgcccaattttcaacaattaactgaatggaaagaacctgaaaatgaagatttaaagtttgcaggctttccactatggatgctactatgggggtggccagactggcaaaaaaaactatcccttattaaccaaatagatgaccactatattttaattgttgaaagtccatactttgaacctaaacaaagtaaatacatgtttttagatatagactttattgaaaataaaagactataccccgaacacggagatgacagtacagatgccaaaccacttttaacagatcaattatcctggcatccaaaatttaaataccaacaaaaatctgtagatgctatttgtatgtgtggacctggggcccctaaatacccaaatttaaaaagtgtacaagctcatatgggatactctttttcatttaagtggggaggaagccctagttccatggaaaccattgcaaacccagcaaaacaacccagctatcccgttcccggtaacctcccacaaggacttcaaatccagaatccaacatacgacccctccaactacatctacacttgggacaccagaagagaataccttacacaaaaagctgttaaaagacttacagaagaccaaacaacttacacacctcttttaccaattacagaatcctacatcaatccaaacccacgagaaacaacttcaaaagacatcttggaaacactcatccaagcacagacaacggaagaagagaaagcgcaaaaactacagctctaccagcagctccgagagcagcaacaactactcaacaacagactcagacacctaatactgtcaaatataaaataataaaccaaaaatgtaacattaacctgtttgcagacgaacctcctaaaaaaaataggagattcactcctaaagagtttgaagaggagttaactttatctcgcatatttcacagacgacctagaacatacttttatgataagcctacctatgactggttaccccctactcctttagtaaactttgatcttggatataaacaataaactttcaaggccagcaaatattcactcttggtgtctctttattaaagtttaaacttaaaggaacatccaccgcctccctaatacgcaggcgcacaagggggctccgcccccttaaacccccaaggggg

SEQ ID NO: 4071 - protein, 687 aa, Betatorquevirus sp.; identical to SEQ ID NO: 4063

SEQ ID NO: 4072 - protein, 110 aa, Betatorquevirus sp.; identical to SEQ ID NO: 4064

SEQ ID NO: 4073 - protein, 59 aa, Betatorquevirus sp.; identical to SEQ ID NO: 4065

SEQ ID NO: 4074 - DNA, 2677 bp, Betatorquevirus sp.
caggtaccgaaggtgagtgaaaccaccggagttaaggggcttattgggctaaagcagtcttggcggaacgggcaagaaactaaaataaactattattttacagcaatgagctcctaccttacaccagttatctacagcaagaatgctttagaaaaccagtgggtaaatactattttcaacacacacgatctttgctgtggatgcaacgacgccattaaacacctagccgccattttacaaagaaaaggaacacaactatgcctcccttcaacttctaccggagacgctactacccaaaccgatggagacgccgtagatactttagacgccggagatttagaccttctattcgccgaagattttggagaagacgaacggtaagaagacgccgtttttttaaaaaatataaaagaaaacttactaaaattaaacttaaccaatggcaaccacaaactataaacaaatgccacataaaaggaaatctttgtgcttttacttgtggaagaggtagagaaaaccacaattttattttaacacaagaaagctatgtacctacatctcaacctggagggggatcttggtctatactacaatttaccttaagagtactatatgatgaacataaagcaggcagaaattggtggacaaaaggaaatacaggtttaccacttgtaagatatatactatgcaaacttaaattttacagaagtaaagacacagactacctagtaacaatacaaagaacaccacctttcgaagtaactagagactcatacttaagcacacaaccatctagacacttaatgcaccacaaatctattatagttcctaaactaggaagaggaccaaacaaaaaaacatatataaaaagaaaagttctccctccagcaatgtttcaaaacaaatggtactttcaacaagacatatataatataccattttttatgttaaccatttcagcactagaactagatcaaatgtacgccccagaagaccaaataagctcaaatataacacttatatcactaaatacaaatgcatttcaaatgagtaactgggaaagacaaccatacagcacaaaatcagcaggaacatataacatatacttatggagttaccaaaatggtgacgataaaaataaaaaatggcaaaacatatattttttaggaaactgtaaagaatacacagaaggaactaagttaaatacattgcaagactgcaaagaggtagcagaaattaaaaataaacaaaaatggggaaatccatttacacactggtataaccataaagatgcaagaatattttatggtgctataccaacaacaacacaagaaaccgatgatgctaacatattagaattagaagatttgtttatagaatgcagatacaacccatttaaagacaaaggcacaggaaacaaagtatacttagtacccacagacacaggcctaggtagctttttaacattaccaacaaaaaatgaattattaatagaaaatttaccactatggcttatattttggggttgggcagactggataaaaaagtctaaaccaatagcacacttagaagaagaataccaaataataatacaaactccatatatatttccaaaattaccatgttatgtactaacagacaaatactttctacacccaccaaatgacggaacacacacaaccacactatcacaaacagaccaactacattggcacataaaatacaactttcaagaacaacaatttaacttactagcaaaaacaggaccagcagcaccaaaaataaatgaagttaaacaaatagaagcacactttaactataacttttattttaagtggggaggaagcccagctccaatggaacaaattagtgacccagcagaccaagaaaaattccccacgcccaatacgcaactccaaagacttgagattgagagtccaacaaaacccaaacaacacttcttgtacaccttcgacgaaaagcgacacacactcacactcaaagctgcaaaaagacttaaaaaagactattcaactccaacattttttacagactttggagcaaaagacatcccgctcaaagcacaaacggaaagcgacagctcatcggaggaggaagaaatccaaacatcactccagagagaagacaaactcaagcagtacctccagcgaaagcgactccagtacagacagcgaatccacaacctcctaaaaacaaaaaaattattccccctttaagagacatgtttggacaaccttactataaaaaccgtagatttaatgctaaagaatttgaacaagaattgcttgatgctaaatgctggaaaagacgccccagactgtatatctttgataaacctgattatgaattacctactattgaaccacttgtaaacattggtgtaaatttttcattaaactttaaagagtaggccagcaaatattcacttgtcggtgtcagtttatataagtaataaccttaataaacatccatcacctccctaatacgcaggcgcacaagggggctccgcccccttaaacccccaagggggtcattaataatcagacgctattcctgggaggagcaacacatctatataaccaagtgcactgacgaatggctgagtttaccccgccagacggagaccagacaggacactgactgggctgcttttggg

SEQ ID NO: 4075 - protein, 659 aa, Betatorquevirus sp.
MPPFNFYRRRYYPNRWRRRRYFRRRRFRPSIRRRFWRRRTVRRRRFFKKYKRKLTKIKLNQWQPQTINKCHIKGNLCAFTCGRGRENHNFILTQESYVPTSQPGGGSWSILQFTLRVLYDEHKAGRNWWTKGNTGLPLVRYILCKLKFYRSKDTDYLVTIQRTPPFEVTRDSYLSTQPSRHLMHHKSIIVPKLGRGPNKKTYIKRKVLPPAMFQNKWYFQQDIYNIPFFMLTISALELDQMYAPEDQISSNITLISLNTNAFQMSNWERQPYSTKSAGTYNIYLWSYQNGDDKNKKWQNIYFLGNCKEYTEGTKLNTLQDCKEVAEIKNKQKWGNPFTHWYNHKDARIFYGAIPTTTQETDDANILELEDLFIECRYNPFKDKGTGNKVYLVPTDTGLGSFLTLPTKNELLIENLPLWLIFWGWADWIKKSKPIAHLEEEYQIIIQTPYIFPKLPCYVLTDKYFLHPPNDGTHTTTLSQTDQLHWHIKYNFQEQQFNLLAKTGPAAPKINEVKQIEAHFNYNFYFKWGGSPAPMEQISDPADQEKFPTPNTQLQRLEIESPTKPKQHFLYTFDEKRHTLTLKAAKRLKKDYSTPTFFTDFGAKDIPLKAQTESDSSSEEEEIQTSLQREDKLKQYLQRKRLQYRQRIHNLLKTKKLFPL

SEQ ID NO: 4076 - protein, 91 aa, Betatorquevirus sp.; identical to SEQ ID NO: 1300

SEQ ID NO: 4077 - protein, 62 aa, Betatorquevirus sp.; identical to SEQ ID NO: 1301

SEQ ID NO: 4078 - DNA, 2674 bp, Betatorquevirus sp.
caggtgccggaggtgagtgcaaccaccgcagtctaggggcttaatgggcaggcgaagtctaggcggaacgggcatcaaattaaaaatatatattttattacagatgacctactatatgaaagagcacaaacattctcctaaatacctagaattgggatggattaactctatttttcaaagccacgatcaaatttgtgcttgcaacaacgttataacccacttactgggagctataaatcaccaaaacagcaagaaaatccttaccagacgagaaataaagaaaatacaatgccaccttactggagaagaaactatcgataccgaaactggagaagacgacgcccttaccggtggagaactagaggctttgttcgcagacaacgttttcgaagaagaagagcctaccgggtaagaagacgacgaattcataaaaaactttataaaattagaatacatgaatttcaaccagagactataaaactctgtaaaataaaagggacaaaatgcctctttcaaggaggttcacaaagaaaaagcaataattatgctcaatacataggatctatagtaccagaacatgaaccagggggaggagggtggtctctaatggtattctctttagatagtctatgggaagactatgaacacttacaaaacatatggacacaaagcaatgcaggactaccactatgcaggtttttaggagtaacaatgaaattttatcaacaagaatatacagactatgtagttacatatgacttatgctggccaatgaaagacactccactaacacacgcaaacagccacccacaaagaatgctactacaaaaaaacaaaattgtagtacctagcctactaacaaaaagaagaaaaaagccatatgtaaaaaaatatattaaacctcctgcacaattaaaaaatgaatggtactttcaaaaagaccttgcaggagtagatttgctaatgctaaccacaaccgcttgtgacctaagaaacagttttatttcaccaccagccaagagcaataacataaccctaacttccttaaatactaacttctggtacaaccgcaatttccaaagaccttccacaactactggctacacacctaaaaataacacctacctttacacacagggtaacggtacaactgctactcccacaaagaaaactcaattaatttatctaggaaactccatagattatcaaccaggaaaaaaaatgacctcagacggaggatcaatgcacacctggggaaacccgttttatcacttatacacacaaacagacatacccatttatgtctcacaaacttcaccaactaccatgtcagaaaccataacagaaggaacaataacagaaacaacacaatatttaggagtaaaagttagatacaatcccgaaagagacacaggagaaggcaacatggcatactttgtatcaaacataacagggcaaggttgggaccccccagaagaccctaacctaagaatagaaggctttccactatggcttatgctatggggatgggcagactggattaaaaaactagcacatatctctaaagtagatgaaaactacttattagtaattagaagtagattttttgactcagaactacctgcatatgtatttttagatgactctttttggcatggacaaggtccatacaacacaaacttagacaactatgactattttcactggtacccacaatttaaataccaaaaaatggccatagaaacacttagtacttcaggtccttacgtagcacacccaccttctgacaattctttacaagcaaaatgcatatatacttttaaatttaaatggggaggctgtccaagaacaatagaaaaagtatatgctccttcctcacagcccacctggattacaccccataacttcagtatcggatctaaaatccagaatccaagaacaaacccacttacatacatctacccatgggacacaaaaagagacattatcacagagaaagctttacaaagaatacaagaacaacaagaaactgatgaacttttatcaaaacctacaggaataccaacaacaagccgaagcgacccaaaaccgatactccaaaaagcccaagaaagcgacgaggaaacatcgtcagaggaagaagagaaaacaccattacagctccagctcaacaagctccgcagacgacagcgactcctcaagcagctcctcctgaaaagccagccaaatatagaataatacacatacaaaaacaaataaatttatttgggcctgtacctactcctaataggagattaaatttatgggagcaacaacaagaaaaagaagacgcagccatatggttaagaccccaaagaacctttctaaaagaccgtcctacttatcctttctttcctattacaccccttgctaactttgatctaaacttcaaagaataaaggccagcatactttacttaatggtgtctgtttctttaagtaaaaccttactaaacgaactccgcctccctacactgttggcgccaaaagggggctccgcccccttaaaccccagggggggggcaaagcccccccccataccactaagtaactatataactaacagtacttccgaatggctgagtttatgccgccagacggaggcaaggcaggacactgacttgactgagcctggg

SEQ ID NO: 4079 - protein, 681 aa, Betatorquevirus sp.
LCLQQRYNPLTGSYKSPKQQENPYQTRNKENTMPPYWRRNYRYRNWRRRRPYRWRTRGFVRRQRFRRRRAYRVRRRRIHKKLYKIRIHEFQPETIKLCKIKGTKCLFQGGSQRKSNNYAQYIGSIVPEHEPGGGGWSLMVFSLDSLWEDYEHLQNIWTQSNAGLPLCRFLGVTMKFYQQEYTDYVVTYDLCWPMKDTPLTHANSHPQRMLLQKNKIVVPSLLTKRRKKPYVKKYIKPPAQLKNEWYFQKDLAGVDLLMLTTTACDLRNSFISPPAKSNNITLTSLNTNFWYNRNFQRPSTTTGYTPKNNTYLYTQGNGTTATPTKKTQLIYLGNSIDYQPGKKMTSDGGSMHTWGNPFYHLYTQTDIPIYVSQTSPTTMSETITEGTITETTQYLGVKVRYNPERDTGEGNMAYFVSNITGQGWDPPEDPNLRIEGFPLWLMLWGWADWIKKLAHISKVDENYLLVIRSRFFDSELPAYVFLDDSFWHGQGPYNTNLDNYDYFHWYPQFKYQKMAIETLSTSGPYVAHPPSDNSLQAKCIYTFKFKWGGCPRTIEKVYAPSSQPTWITPHNFSIGSKIQNPRTNPLTYIYPWDTKRDIITEKALQRIQEQQETDELLSKPTGIPTTSRSDPKPILQKAQESDEETSSEEEEKTPLQLQLNKLRRRQRLLKQLLLKSQPNIE

SEQ ID NO: 4080 - protein, 122 aa, Betatorquevirus sp.
MGRRSLGGTGIKLKIYILLQMTYYMKEHKHSPKYLELGWINSIFQSHDQICACNNVITHLLGAINHQNSKKILTRREIKKIQCHLTGEETIDTETGEDDALTGGELEALFADNVFEEEEPTG

SEQ ID NO: 4081 - DNA, 2674 bp, Gammatorquevirus sp.
cgggagcccgaggtgagtgaaaccaccgaggtctaggggcaattcgggctagggcagtctagcggaacgggcaagaaacttaaaatgtacactcttttacagatgtctaccctgtttacaccaactaaatataatggctgcaccaaaaatcaactgtggatgtcaataataagtgattctcatgatattcactgtggatgtgaagcaccatttagtcaccttcttgacagcatttttccagagggtcacagtgacagacacaagactatagctgaaataattgcaagagacactcaaacatgccattctggtggtacagaagaaaaaagccatggttttacaacaatcaaagaagaagatacaaaaagagatggagaagaaaaccaagaagaagaccttatagaagacgccgctttacaagaactaatcgccgcaggagaagacgccataggaaggtaaggaaaaaaagacaaaccttacctgttagacaatggcagccagactgtattagaaactgtaaaataagaggcttttcagcacttgtagtaggagctgaaggaactcaaatgtactgttatacagaagaaaaatttaactatgtgccaccaaaagtaccatggggtgggggtataggagtagaaaattatacacttaaatatctatatgaagaattaatttttcacaacaatttctggactacttcaaatgtaatgctagatctatgcagatacttaagatgcaaaattatactttttagacatagcacacaagactttgttgttagctatgatagacagccacctttcaaactaacaaaatggacatatcccagctgtcaccctcaccaaatacttttgcaaaaacacaaaaaaattatactcagtttaaaatctaaaccaaatggcaaatactacaaaaaactaattattaaacccccaaaacaaatgataacaaaatggttctttactaaaagcttttgcactgaatccttatttcttctaaaaggtgcagtagcaaactttagaaattcatacttaagtgcttcaaatgaaaataggctagttaatataatgtcaataaacacaaccttttatcaacactctaattgggcacaaaccagacatcaagaaactccatacctaccatacaacaatgctccaactaaaatgaaatacaaaataaaaaaaaaagatggcagcacacaagagttattcatgaatataaccacctatgaggacagtatttcatatgacaaaggatggtttaaaagccaatttttacaagcctatgaaataccacttcaatcaacacatgcagctaccatacctatgttaatagctagatacaacccaaacaaagacacaggtgaaggcaacaaaatatttataaaatctgtactgtcagatggctgggtaccaccatccactgacaaacaattagaaatagacaatgttccactatggctaggcctactaggctttctatcatatgttaaagaaaccaaaaatgtagactacttaaaatcatctgtagttgttataaaaagcacagctatacactgctcaagccaaataggaagctgtgacctttactgcccaatagacacagaatacatactaggtaaaaaaccatatgaacaagtaattaccagcacacaaaaacaattttggtaccccacaactgaatggcaattaaaaacactgaatgccatagtagagtcaggaccctacatgccaaaactatcagaagaaaaagagagtacatgggaactaaaatatatgtacaattttttctttaagtggggaggaccacacacgccagataaagaaatcacaaatccagaaaactttaacacctatgatgtacccgatactatcacaaggtcaatacaaattaccaacccagaaaaaaacacaacagaaacaatacttcacccctgggacttcagaaggggccttgttaaagaatcagctcttaaaagaatgtgcgaccacctcgacactgatacagaatttcaattctctacagaagaagctccaaagaaaaagagaaagatccagggagcagcacttcaacacccccagaaagaaacagaagaaatctaccactgtctccatggtctctgcgaaaaaagttcattcccacaagaagaggaaaaaacactcgaagcactcatccagcagcagcagcagcagcaggagctactcaagtacaacatcctccagctcctgatagacctgagagaaagacagaaacagcttcaactacacacaggaatgttacattaacaacatttaaaataggctttgaacaagacacagaaagagaaatggctatagctttttgtagaccacctagaacatataaagaagaccccccattttatccctggcttcctaaacctgaaccccttatttcttctaaaaggtgcagtagcaaactttagaaattcatacttaagtgccatgttgggtgtggtagggcgggggctaaaatggcgggagccaatcattttatactttcactttccaattacaaactgccacatcacaaaaaggaggtggagcctctaaaactatataagtaagtgaggtggcgaatggctgagtttatcccgctagacggtgcagggaccggatcgagcgcagcgaggaggtccccagctgcccctggg

SEQ ID NO: 4082 - protein, 662 aa, Gammatorquevirus sp.
MPFWWYRRKKPWFYNNQRRRYKKRWRRKPRRRPYRRRRFTRTNRRRRRRHRKVRKKRQTLPVRQWQPDCIRNCKIRGFSALVVGAEGTQMYCYTEEKFNYVPPKVPWGGGIGVENYTLKYLYEELIFHNNFWTTSNVMLDLCRYLRCKIILFRHSTQDFVVSYDRQPPFKLTKWTYPSCHPHQILLQKHKKIILSLKSKPNGKYYKKLIIKPPKQMITKWFFTKSFCTESLFLLKGAVANFRNSYLSASNENRLVNIMSINTTFYQHSNWAQTRHQETPYLPYNNAPTKMKYKIKKKDGSTQELFMNITTYEDSISYDKGWFKSQFLQAYEIPLQSTHAATIPMLIARYNPNKDTGEGNKIFIKSVLSDGWVPPSTDKQLEIDNVPLWLGLLGFLSYVKETKNVDYLKSSVVVIKSTAIHCSSQIGSCDLYCPIDTEYILGKKPYEQVITSTQKQFWYPTTEWQLKTLNAIVESGPYMPKLSEEKESTWELKYMYNFFFKWGGPHTPDKEITNPENFNTYDVPDTITRSIQITNPEKNTTETILHPWDFRRGLVKESALKRMCDHLDTDTEFQFSTEEAPKKKRKIQGAALQHPQKETEEIYHCLHGLCEKSSFPQEEEKTLEALIQQQQQQQELLKYNILQLLIDLRERQKQLQLHTGMLH

SEQ ID NO: 4083 - protein, 124 aa, Gammatorquevirus sp.
MYTLLQMSTLFTPTKYNGCTKNQLWMSIISDSHDIHCGCEAPFSHLLDSIFPEGHSDRHKTIAEIIARDTQTCHSGGTEEKSHGFTTIKEEDTKRDGEENQEEDLIEDAALQELIAAGEDAIGR

SEQ ID NO: 4084 - protein, 112 aa, Gammatorquevirus sp.
LSPWSLRKKFIPTRRGKNTRSTHPAAAAAAGATQVQHPPAPDRPERKTETASTTHRNVTLTTFKIGFEQDTEREMAIAFCRPPRTYKEDPPFYPWLPKPEPLISSKRCSSKL

SEQ ID NO: 4085 - DNA, 2674 bp, Betatorquevirus sp.
ggcgggtgcggaggtgagtgaaaccaccgattcaaggggcaattcgggctagttcagtatagcggaacgggcaagaaacttaaatatattaattttttctctagatgagcttatctaaaccagcgaaatactccaaaaaacaactaaatctacaaattgttaacacttatgttaacattcatgaccttaactgcggctgtgatgaaccactaaaacatataattcaacaaattgaacaacaagaacccaccttaaaacaatgccgtacttctaccgcaactggagacgaccctggacccgtagatggcgtcgacggacttggagaaggagaattagaggcacttttcgcagaaacaaacgaagaagattccaccgggtaagaaaaaaacttaaaactataagactaaaagaatggcaaccttctcatataaaaaaaatttgtgtaaaaggactttactgcatatggcaagccaaccacacacaaattaacaaaaactgggcacaatatgaagcctcagtaccaagagaaggaataccacttggaggaggatactctttattaagatttaatttacaaactttatttgaacaacatgaacttgttaaaaatgtatggactaaatcaaacaagtactttcctttgtatagatatttaggatgtaccataaaagtttatagacctgaagaggtagactgtttagtaaaatttcaaacatgttatcctatgtcagctagctcatttttgtatatgggatgtcaaccaagtataatgtcaatgtctaaaggttgtaaacgcataagaagcttaaaaaatgcacctaacgctaggccctacaaaaaatttagactaccgccaccacaacaaatgacaaacaaatggctatttcaaagccaaaacagtaaaacaggcctattactaatccagtcagcagcatcaagctttactcaattttttctaagtagggaatcagagagtcaagtaattaacttaaaaactttaaatacaaaaatatttgaaaacctaaattttaaaaacttacctacatatggatacataccaaaacaaaactttgcattatatgcatccaatggtaatgacaaagtaggtgatttacactggctaggaaataccatagaataccaagaaggaaaatcatttaaccaaataacatcaaaatcaacatttaaagaaaatctacaaatctacatgcaaaacagacaaaattggggaaaccccttccaccacacaatattgtctaaatcttggaaaatatggtttggaccaaacaacccaatactactatttacaacaggaaccactactccacaaaacataaatatggacacgcccatttcccaaacacaacttaaagaagtaacacaagaacttatttttgactgtagatacaatcctaacacagacaaaggttatgacagcatggtttacttaaaatccaactggaaagacccagaaacattagaacccccacaagacacagacctcataacggcaggtttcccagcatggttatcagcatggggattcttagattaccatagaaaactaggcaaagttacagaaatatcaacaaaatacattgcagtacacaaatcaaactacatccaaccaaaattagaatactacatatttgtagataaagactttgtagaaggcaactcagaatactacacaggccgaacaggctgggacaacttaaactggtatccaatgacactgcatcaagatagagcctttgaaacactagctcaatgcggtccaggaacaccaaaactaggtaaaaacaaaagtgcagaatgtcatatagaatatcaattttattttaaggttggaggctgcgcagcacctctggaaaaagttacagacccaacaacacaaccatattatcctacaccaaataacatccttgacacaaattcgttacagaatccagaggaaccatgtgaatcattcctctatcaatttgactggagacgaaatcaaattacggaaacagctgcaaaacgaatccttaaagaccactcaattgaaaaatatttatttacagatggaacaacaacttcaacagcagcagatgtcccaacacacaaaacacaagaaaaagaactgctctcgtcggaggaggaggaaacccaaacggagacactattcgagcagctccagctccagcgaaacaagcaaaaacaactccgacaccgaatcaagcagctcctaacacaactacaaaatatacaataaaaaactgtaaagtaaaagtaaacctatttggcgaacaaccaaataggagacttaacagtagagaaagggcagaagataaaattgaggcagctatttggggcagatctgaaaaatatttcctaaaagatattccttactattatggctgtgtacctgaaccccgtgtaaactttgatttaaactatcattaaacaaggcccattgattcacatctcggtgtccgtttctttaagtttaaacctttataaacatccaccacttctccctatcaataggcgccaaaagggggctccgcccccttacacccccaagggggctccgcccccttaaacccccataactaactacacagacgaatggctgagtttatgccgctagacggaggacgcatcagtcactgactgcggactgaacttg

SEQ ID NO: 4086 - protein, 665 aa, Betatorquevirus sp.
MPYFYRNWRRPWTRRWRRRTWRRRIRGTFRRNKRRRFHRVRKKLKTIRLKEWQPSHIKKICVKGLYCIWQANHTQINKNWAQYEASVPREGIPLGGGYSLLRFNLQTLFEQHELVKNVWTKSNKYFPLYRYLGCTIKVYRPEEVDCLVKFQTCYPMSASSFLYMGCQPSIMSMSKGCKRIRSLKNAPNARPYKKFRLPPPQQMTNKWLFQSQNSKTGLLLIQSAASSFTQFFLSRESESQVINLKTLNTKIFENLNFKNLPTYGYIPKQNFALYASNGNDKVGDLHWLGNTIEYQEGKSFNQITSKSTFKENLQIYMQNRQNWGNPFHHTILSKSWKIWFGPNNPILLFTTGTTTPQNINMDTPISQTQLKEVTQELIFDCRYNPNTDKGYDSMVYLKSNWKDPETLEPPQDTDLITAGFPAWLSAWGFLDYHRKLGKVTEISTKYIAVHKSNYIQPKLEYYIFVDKDFVEGNSEYYTGRTGWDNLNWYPMTLHQDRAFETLAQCGPGTPKLGKNKSAECHIEYQFYFKVGGCAAPLEKVTDPTTQPYYPTPNNILDTNSLQNPEEPCESFLYQFDWRRNQITETAAKRILKDHSIEKYLFTDGTTTSTAADVPTHKTQEKELLSSEEEETQTETLFEQLQLQRNKQKQLRHRIKQLLTQLQNIQ

SEQ ID NO: 4087 - protein, 91 aa, Betatorquevirus sp.
MSLSKPAKYSKKQLNLQIVNTYVNIHDLNCGCDEPLKHIIQQIEQQEPTLKQCRTSTATGDDPGPVDGVDGLGEGELEALFAETNEEDSTG

SEQ ID NO: 4088 - DNA, 2674 bp, Betatorquevirus sp.
ggcgggtgctgaggtgagtgaaaccaccgaatcaaggggcaattcgggctagttcagtctagcggaacgggcaagaaacttaaaataatttatattttacagatgtctgactttgtaccaccaaaatactcaccaagacaacttaatcttcaaatggtaaatgcttatgtttccatccatgatttaaaatgccactgcaaagaaccacttaaacatattattcaacaaatacaagaacaagaaccaactacaaaatgcctgcctactactaccgaagacgctggagaccacgttggagaaaaagatatcgaccattttggacctggagaattggaacgtcttttcgcagaagacgtagaagaaaaagaagggtaagaagaaaactaccttttatacacttaaaacaatggcaaccgccacatattaacaaaatgacagtaaagggactatactgtttattacaagttcataaaactagatataaccatgactttaatcaatatgaaatttgtgtacctaaagaaggactcccaaatggaggaggatttactataacaaggtttactttacaagctttatttgaacaacatgaaaaagcacataacttatggacaaaaagtaacaaaaatatgcctttatttagatatactggttgtactattaaaatatatagacctgaaaatatagatcttgttgtcaaatttcaaacctgttatcctatgtgctgtagcaaattactgtttacaggcagtcaacctagcataatgatgatgagtaaaggatcaaaactaattagatgcagaaaatctgtacctaataaggccccatacaaaaaatttaaactaaaagtaccatcacaaatgtccaacaaatggtactttcaacacactgaaagccaaacaggattactactaattcaagctgcagctgcatcatttgacaattactatacatcctcagaagcagagagctcaacaataacattacactcattaaatactagaattttcaaaaatatgaacttctccacataccccacatatggttacatgcctaattcaacatatgcactatgggcatcaaatggtaacgacgaactagaaaacttaatttggctaggaaacactaaaaaataccaaaaaggaaaaatgataaaagaaatacagtcagatttaagcacagcacaaaaatggaaagagggtttacaaaagtacatgtcagatgagaaaaactggggaaaccccttttttgaacaacatttacaccaccaaagtacactatggagaggcactaaagcccccttattagacttagcatcaagccttcacagttataccggagcaacaaaagcaaacttagcaggcttacaaaaagtaactgaggacttatttattacagtaagatacaatccatttaaagacaaaggctatgaaaataacatatacatattagcaaactacacctcaaacgaagataacctacaaccactacctgacattgacttacaaaacccaggttttcctaactggcttagctgttttggctttcaagattggcttataaaacttggtaaaaagagcagaataaatgaacattggataatgatatggaaatctaattactttgatcctacactcccatattatatatttatggaccactggtttttacatggagactctgaagaattacagggcagaacaagttgggacgatgtaaattggtatccacaaatacaacaccaacaaggtgaattaaacaccttagcattatgtggccccggagccccaaaactaggccctgttaaactagcagaagccaaatgtgaataccgcttttattttaaggttggaggatgtggtgcccctgttgaaaaggttaaaaaccctgcagaacaaccgacttatgcgacaccaactaacatccttgaccaaaattcgttacagagtccagaggaaccaattgaatcgttcctctaccaattcgattggcgcagagatcaaattacagaaacagctgcaaaacgaatcacacaagacttctcaattggaaaaactttattttcacatgcagaaacaactggaacaacagtacccacactccaaacacacgaaaaagagctgctctcgtcggagacggaggaaacccaaaaagaaacattattccagcagctcctcgaccagcgaatcaagcagaaacaactccgacagcgaatcaagcaactaatgcaaaccatacaaacattagaataaaaaaactaaagtatactgttaatctttttgaacaaaagcctgtaaatagacgaatgactaaatgggaatatgaacaggaattacaagaaagtaaaatatgggatcactatcctagaacacatatttttgataggcctttttacaaaaacatgtttataaccccgcttgtaccaaaattaaactttgacctaaactttaaagaataaagccagcaaatattcacagctcggtgtccatttatttaagtttaaacttatataaacatccaccaccctcccaaatacgcaggcgcacaagggggctccgcccccttaaacccccaagggggctccgcacctatataactaactacacttccgaatggctgagtttatgccgctagacggagtacgcatcagcacactgactgcggactgaacttg

SEQ ID NO: 4089 - protein, 665 aa, Betatorquevirus sp.; identical to SEQ ID NO: 3013

SEQ ID NO: 4090 - protein, 90 aa, Betatorquevirus sp.; identical to SEQ ID NO: 3014

SEQ ID NO: 4091 - DNA, 2672 bp, Betatorquevirus sp.
ccggagccgaaggtgagtgaaaccaccgaagtctaggggcaattcgggctagatcagactggcggaacgggcaagaaacttaaatataactattttacaggtatgagttctacttggaagaaaccaatatggtcaccgagacaacacgaaaacaaatggatcaatattatctttgaatcccacgaccaattttgcatgtgcgacgacccctggctacacctacttatctgcttaaacaagaacggcaacgcaccaaaacccagcattgacatccaaaatataaaatggctccttattggcaaaccagataccaaagaagaccctggagacaaagatggagaagaagaaacaggttttatagaaggagaattagaacggctattcgacgaagaaaatacaacagacgttacagaagacaaagatataaggtaaagagactaaaatttagaaaaagaaaactaattaaaattaaacaatggcaacctaaaagcataaaaagatgtaaaataacaggttttaaatgtttatttcaaggaagtctattaagagctaataataactatgtacaatatatgtatagcaatgtacctataaataatccaggaggtggaggatggagcttaatggtgttctcattaggatctctatatgaagattatgaccacttacaaaatgtatggacaactagtaatgctgcactaccgctagctagatttatatatgctaaatttagactatatcaaagtgattctactgactatgtagttacatatgatacttgttggcctatggtagacacaccacacacacacgcagacagctcaccatcaagaatgttactaaaaaaacacaaaataataatgccaagtaaacaaacacaacatagaagaaagccatacaaaacattcaaagtacatccaccaaaccaaatgtataaccgttggtattttcaaagagacatttgcgacacacctttagtaatgataaccgcaactgccatctctttaaccacaccatttgcaaaaccaactgccattagtaacaacatactaattcatagcttaaacacatttatttttcaaaatcctaactttgaacactttccagagacaacaggatactcacataaaatattgaattcaaaatccatgtatttatacgccacacatatgacaaaacccaattccacaaccttcaatcagccatacaaagagtggtgtaaaacattaatatttttaggaaacaccagaacaaaccaaagaggcaaaacaatgcaggacttaataacttcaggtaacaccaaacaaaactggggaaatccttttttccatgaatttttagaaataggagacaaagacaacacctcatatacaatttacacaactacatgtacagtaataaacatgttacaatatataaatacctcaaacgaaccagatgatgcaaaacccacaaatattcaagccctaacaggaccaataatatatagagtaacatacaacccagacaaagacactggactaaacaaaatatacttactaaaaacttacggaccaataacacttgacgaacctgaaaacacaaaccaaatatttgaaggttttccattatacaacctaatatggggatggacagactttataaaaaaactaaaaattatcacagacttagacagacacagcacattactaatcaaaaccaaaaactttagtgacaatactctaaacattttctggcctatcgataaagatttcatagacggctttgatccatacacaacacaagaagacacagcacaaacaaataattacaactatgaaaactggtacccaaaagtacaatttcaagaacaaaccataaacaacatagcactaacaggcagaaactcaccaacaaacacaaattacctacaggcattaatgaaatatagcttttactttaaatggggaggatgtcccaaaacattagaaaaagcttatgatccatgtttacagtcaaaatggaccacgcccgataacctccaaggaagacttacaatacagaatccttacacaccaccagaaacagaactatactcctgggactgggacaaagactatgttgaagaggcagctattaaaagaatacaacaatatacaacaactgatgaacctatcctctcaattacagactcaaagttccaaccgaaagccctcaaaaagcaagaaaaagaccaagcaccgaaagaggaggagacactcttcctcaagctccacaaactcagaaaagagcgactccacctcgagctccagtgcaagctaaaaatgatggaattaaaatctacaaaagcaaaataaacattaaactatttccagacaaaaaaccaaaaccaagaagatttacaccatgggaacaacaacaagaaaaagaagacgctgcaatatggaaaagaccacaaagacacttttggggggacccccctatatacccatggtgccccccagaaccatatgttaactttgacttaatatttagagataaataaacaaggccaacataaattcacttagtggtgtccatttatataagttaaactttaataaacatccaccaccctccctatcaatagggcctagaaaattaaagggggctccgcccccttacacccccaagggggctccgcccccttacac

SEQ ID NO: 4092 - protein, 683 aa, Betatorquevirus sp.
MAPYWQTRYQRRPWRQRWRRRNRFYRRRIRTAIRRRKYNRRYRRQRYKVKRLKFRKRKLIKIKQWQPKSIKRCKITGFKCLFQGSLLRANNNYVQYMYSNVPINNPGGGGWSLMVFSLGSLYEDYDHLQNVWTTSNAALPLARFIYAKFRLYQSDSTDYVVTYDTCWPMVDTPHTHADSSPSRMLLKKHKIIMPSKQTQHRRKPYKTFKVHPPNQMYNRWYFQRDICDTPLVMITATAISLTTPFAKPTAISNNILIHSLNTFIFQNPNFEHFPETTGYSHKILNSKSMYLYATHMTKPNSTTFNQPYKEWCKTLIFLGNTRTNQRGKTMQDLITSGNTKQNWGNPFFHEFLEIGDKDNTSYTIYTTTCTVINMLQYINTSNEPDDAKPTNIQALTGPIIYRVTYNPDKDTGLNKIYLLKTYGPITLDEPENTNQIFEGFPLYNLIWGWTDFIKKLKIITDLDRHSTLLIKTKNFSDNTLNIFWPIDKDFIDGFDPYTTQEDTAQTNNYNYENWYPKVQFQEQTINNIALTGRNSPTNTNYLQALMKYSFYFKWGGCPKTLEKAYDPCLQSKWTTPDNLQGRLTIQNPYTPPETELYSWDWDKDYVEEAAIKRIQQYTTTDEPILSITDSKFQPKALKKQEKDQAPKEEETLFLKLHKLRKERLHLELQCKLKMMELKSTKAK

SEQ ID NO: 4093 - protein, 109 aa, Betatorquevirus sp.; identical to SEQ ID NO: 2699

SEQ ID NO: 4094 - DNA, 2671 bp, Betatorquevirus sp.
ccggagccgaaggtgagtgaaaccaccgaagtctaggggcaattcgggctagatcagactggcggaacgggcaagaaacttaaatataactattttacaggtatgagttctacttggaagaaaccaatatggtcaccgagacaacacgaaaacaaatggataaatattatctttgaatcccacgaccaattttgcatgtgcgacgacccctggctacacctacttatctgcttaaacaagaacggcaacgcaccaaaacccagcattgacatccaaaatataaaatggctccttattggcaaaccagataccaaagaagaccctggagacaaagatggagaagaagaaacaggttttatagaaggagaattagaacggctattcgacgaagaaaatacaacagacgttacagaagacaaagatataaggtaaagagactaaaatttagaaaaagaaaactaattaaaattaaacaatggcaacctaaaagcataaaaagatgtaaaataacaggttttaaatgtttatttcaaggaagtctattaagagctaataataactatgtacaatatatgtatagcaatgtacctataaataatccaggaggtggaggatggagcttaatggtgttctcattaggatctctatatgaagattatgaccacttacaaaatgtatggacaactagtaatgctgcactaccgctagctagatttatatatgctaaatttagactatatcaaagtgattctactgactatgtagttacatatgatacttgttggcctatggtagacacaccacacacacacgcagacagctcaccatcaagaatgttactaaaaaaacacaaaataataatgccaagtaaacaaacacaacatagaagaaagccatacaaaacattcaaagtacatccaccaaaccaaatgtataaccgttggtattttcaaagagacatttgcgacacacctttagtaatgataaccgcaactgccatctctttaaccacaccatttgcaaaaccaactgccattagtaacaacatactaattcatagcttaaacacatttatttttcaaaatcctaactttgaacactttccagagacaacaggatactcacataaaatattgaattcaaaatccatgtatttatacgccacacatagtacaaaacccaatggcacaaccttcaatgacacatacaaacagtggtgtaaaacattaatatttttaggaaacaccagaacaaaccaaagaggcaaaacaatgcaggaattaacaaatacaactaacaccaaacaaaactggggaaatccttttttccatgaatttttagaaataggagacaaagacaacacctcatatacaatttacacaactacatgtacagtaataaacatgttagaatatgtaaaaaactcaaccgaagcagaagatgcaaaacccacaaatattcaagccctaacaggaccaataatatatagagtaacatacaacccagacaaagacactggactaaacaaaatatacttactaaaaacttacggaccaataacacttgacgaacctgaaaacacaaaccaaatatttgaaggttttccattatacaacctaatatggggatggacagactttataaaaaaactaaaaattatcacagacttagacagacacagcacattactaatcaaaaccaaaaactttagtgacaatactctaaacattttctggcctatcgataaagatttcatagacggctttgatccatacacaacacaagaagacacagcacaaacaaataattacaactatgaaaactggtacccaaaagtacaatttcaagaacaaaccataaacaacatagcactaacaggcagaaactcaccaacaaacacaaattacctacaggcattaatgaaatatagcttttactttaaatggggaggatgtcccaaaacattagaaaaagcttatgatccatgtttacagtcaaaatggaccacgcccgataacctccaaggacgacttacaatacagaatccttacacaccaccagaaacagaactatactcctgggactgggacaaagactatgttgaagaggcagctattaaaagaatacaacaatatacaacaactgatgaacctatcctctcaattacagactcaaagttccaaccgaaagccctcaaaaagcaagaaaaagagcaagcaccgaaagaggaggagacactcttcctcaagctccacaaactcagaaaagagcgactccacctcgagctccagtgccagctaaaaatgatggaattaaaatctacaaaagcaaaataaacattaaactatttccagacaaaaaaccaaaaccaagaagatttacaccatgggaacaacaacaagaaaaagaagacgctgcaatatggaaaagaccacaaagacacttttggggggacccccctatatacccatggtgccccccagaaccatatgttaactttgacttaatatttagagataaataaacaaggccaacataaattcacttagtggtgtccatttatataagttaaactttaataaacatccaccaccctccctatcaatagggcctagaaaattaaagggggctccgcccccttacacccccaagggggctccgcccccttaca

SEQ ID NO: 4095 - protein, 683 aa, Betatorquevirus sp.
MAPYWQTRYQRRPWRQRWRRRNRFYRRRIRTAIRRRKYNRRYRRQRYKVKRLKFRKRKLIKIKQWQPKSIKRCKITGFKCLFQGSLLRANNNYVQYMYSNVPINNPGGGGWSLMVFSLGSLYEDYDHLQNVWTTSNAALPLARFIYAKFRLYQSDSTDYVVTYDTCWPMVDTPHTHADSSPSRMLLKKHKIIMPSKQTQHRRKPYKTFKVHPPNQMYNRWYFQRDICDTPLVMITATAISLTTPFAKPTAISNNILIHSLNTFIFQNPNFEHFPETTGYSHKILNSKSMYLYATHSTKPNGTTFNDTYKQWCKTLIFLGNTRTNQRGKTMQELTNTTNTKQNWGNPFFHEFLEIGDKDNTSYTIYTTTCTVINMLEYVKNSTEAEDAKPTNIQALTGPIIYRVTYNPDKDTGLNKIYLLKTYGPITLDEPENTNQIFEGFPLYNLIWGWTDFIKKLKIITDLDRHSTLLIKTKNFSDNTLNIFWPIDKDFIDGFDPYTTQEDTAQTNNYNYENWYPKVQFQEQTINNIALTGRNSPTNTNYLQALMKYSFYFKWGGCPKTLEKAYDPCLQSKWTTPDNLQGRLTIQNPYTPPETELYSWDWDKDYVEEAAIKRIQQYTTTDEPILSITDSKFQPKALKKQEKEQAPKEEETLFLKLHKLRKERLHLELQCQLKMMELKSTKAK

SEQ ID NO: 4096 - protein, 109 aa, Betatorquevirus sp.; identical to SEQ ID NO: 2699

SEQ ID NO: 4097 - DNA, 2670 bp, Betatorquevirus sp.
cgggtgctgaaggtgagtgaaaccaccgaaatcaaggggcaattcgggctaattcagtctggcggaccgggcaagaaacttaaaatattattttttacagatgagcaaactataccgaccaccattatacacaaccaaaggacaacaaaaccaatggattaaccttatctatacatctcacgacctcatttgcggctgcaacaaaccaattgatcatctaaacgatattattaatcaacaaaaatgccacccttctacagaagaccatactacagacgccgctggtggaactaccctcaaagacgaaaccggtttcgacgaaggagacttagaaagacttttcgaaaattctcaagaagacgacgggtaagaaaaagacgtttttactctaaatataagaaaaaagctaaaaaaataactgttaaagaatggcaaccatcttccataagaagatgccaaattaaaggatacttactattatttgaagcaggacatggccgttttggcaataactttaccgcctacaaagaaagttttgtacctccacgaactccgggagggggaggttggagtatacaacaactaggacttggaaatttatttacacaaaatgaatactttatgaactggtggacacactcaaacaaaggactaaacatggttagatactatggatgcaaaataagactttacagacaaccagaaatagactatatatttacatactttacagaaaaaccagtaaacgcagatcaattttggtatccatcctttcatcctataaaattactgttagacaaaagaagaataatagtaccaagcttacaaacccaaccactaaaaagaaagttatacaaatcagtatttattaaacctccaaaaatgctaaaaacagactggtactttcaacaaaatttatccaactatcctctaatatactttgctacaactgcattttcactaaaccacatgtttatatcatctaaagcagaaaacaacaattgttcagtatttacactaaacacaggattctttatgcactcagcatttcaatactatgcacaagacaaaggatacacaccaaaacaaaatacatacatgtacggtttaaaaaacggacaaattagcttaaaagatgaagaaaaaagaaatgtagtatacttaggagacacacattttaatgatccaggacaaacagtaggcacaactggttgggaaaaatataaaaactctaaaaactggggtaatatattctaccatgaatattttaacttatacagaactgttttcataacagcatcagaaccctcagtcttccttaaagacacaacctcaggacacaaaataggagaacaaggcattactaaatctgaaccattatggtatgaattaagatataatccttacaaagacaaaggcaacggtaacattgcctactggaaaagcgtctcagacgccacaaacaacaactgggaattacctcgagacccagatttaatgataaaaggctacccattctggttaatgctgtggggatgggaagatcacagtagaaaactttctaaactaagagatttagataacggatggatattagtattaagaagcacatactttaataacaattttcaggcagtagtacctttaagctacagctttgtaaatggcagagcaccctacaataatgacccagaagatattagcccagaagattatagacaatggtatcctaaatggaaatttcaaaaagaagcaatagactctatattaatgacaggacctggagtctgtaaagctgaatctgtaaactcaatacaagcatttatgaaatatattttcttttttaagtggggaggcgaaccagccacaatggaaaacattgcagaccctaacagccaaccaatctcacctactccccgtcaaatctttgaaacaaatgaaatcaataatccagaagactccatacaaaacctcatatacaaatgggacacacgtcgagacatccttacacaaacagctttacaacgaattacagactactcaaaacctgactcatttgtgttcacagatggaagaacaacttcaacagacctcccacaaacgccacagaaaaaagacacgaaaacgaccccgaaaacacaagaagaggcactattccagcagctcaacagactccaacaactcaacaacagcctacaactcagattcctcaaactcagacaactaacaatggaaaaataaactttacacttgtaaaaaaagcatatctttttgatccaccaaaaactaaaaaccgtagaataactgggcgggactgggaaactgagttacaaatatcaaaatggttaaaaagaccacttagaacctttcatgacgaccgtccttattacccttggcttgtaccagaaccccttgcaaatcaatttgtaaactttgaacttgtaaaaggatttaataaaggccagcattaattcacttaacaagtctgtttattaaagtaaaacttatataaaccaacaccgcctccctaatacgcaggcgcacaagggggctccgcccccttaaacccccgggggggaaaccccccctaagccccccctaactaccatgacgaatggctgagtttataccgctagacggagacgcgacaacttcgcggctgaatttggg

SEQ ID NO: 4098 - protein, 665 aa, Betatorquevirus sp.
MPPFYRRPYYRRRWWNYPQRRNRFRRRRLRKTFRKFSRRRRVRKRRFYSKYKKKAKKITVKEWQPSSIRRCQIKGYLLLFEAGHGRFGNNFTAYKESFVPPRTPGGGGWSIQQLGLGNLFTQNEYFMNWWTHSNKGLNMVRYYGCKIRLYRQPEIDYIFTYFTEKPVNADQFWYPSFHPIKLLLDKRRIIVPSLQTQPLKRKLYKSVFIKPPKMLKTDWYFQQNLSNYPLIYFATTAFSLNHMFISSKAENNNCSVFTLNTGFFMHSAFQYYAQDKGYTPKQNTYMYGLKNGQISLKDEEKRNVVYLGDTHFNDPGQTVGTTGWEKYKNSKNWGNIFYHEYFNLYRTVFITASEPSVFLKDTTSGHKIGEQGITKSEPLWYELRYNPYKDKGNGNIAYWKSVSDATNNNWELPRDPDLMIKGYPFWLMLWGWEDHSRKLSKLRDLDNGWILVLRSTYFNNNFQAVVPLSYSFVNGRAPYNNDPEDISPEDYRQWYPKWKFQKEAIDSILMTGPGVCKAESVNSIQAFMKYIFFFKWGGEPATMENIADPNSQPISPTPRQIFETNEINNPEDSIQNLIYKWDTRRDILTQTALQRITDYSKPDSFVFTDGRTTSTDLPQTPQKKDTKTTPKTQEEALFQQLNRLQQLNNSLQLRFLKLRQLTMEK

SEQ ID NO: 4099 - protein, 103 aa, Betatorquevirus sp.
LADRARNLKYYFLQMSKLYRPPLYTTKGQQNQWINLIYTSHDLICGCNKPIDHLNDIINQQKCHPSTEDHTTDAAGGTTLKDETGFDEGDLERLFENSQEDDG

SEQ ID NO: 4100 - DNA, 2670 bp, Betatorquevirus sp.
gaaaaccacctaatttaaattgccgaccacaaacaggggcaattcgggctagatcagtctggcggaacgggcaagaaacttaaaataatttattttacagatgaactttgaaaacaccaactttactccaagacaacttcaattacaatgggtgaataacattgtccaaacccacgacttaatctgcaactgcaacaaaccactagaacacgccatttactgcatctttaaacaagaaccagaccttcgaattaacaaagaaacaaaagaattaattgaaaaatgccttactactcaagatggtggccgcgacgtagatatcgtagacgaatttggagaagaagagctaaacgccctcttcgcagaagatactggcgacgacactgggtaagaaattattctcgaaagagaaaacttaataaactatctttaaaacaatggcagccacaaacaattaaaaaagcaactgtaaaaggaatatatccactgtttttatgtgacagagacagaattaacaacaatttaatacaatatttggaatccattgctcccctacactttccaggaggcggaggattctccattatacaatttactttgaaaggactatatgatgaatttattgccggtagaaactggtggactaaatctaactgtactttacctttaattagatacctaggatgtaacttaaaattgtatagagctgaaaaatatgactatgttgttgtaattcatagatgttaccctttaaaagcctcagaccacctatacatgagtacacaacctagcatacaaatgatgcaaagaaaatccatacttgtaccatgcagacaaaattcaaacagcaaaaaaccatacaaaagagtacacataaaacccccaacacaatttgaaacaggatggcattttcaacaagacctctgtaactttccactagtagttataactgcctctgtagccagctttgacagatactacacagctagcgactcgaaatcaacaacagtaggattctattctctaaatacacaaacatttcaattacatgactggcaagaccccccaacaactggttataaaccacaagataaattatggctatggggaacactaaatggtgcagatccacctgacaacacacttgtaaaacatttaatatacttaggaggcacaggaccttacacaaaaggcgtaaatgtaggaaacaattctaattatgcatcccaacctcaaaactggggtaatatcttccacaatgattacttatttggcacatcagctatatttgcaagtaacagaactgttcaagaatgtgtaagctacatactacaacatcaaggagacacagacagcgacaaagttaaagctgcaggctcatactggacagtacgaaccataccaaacatagtagaatgtagatataatccatttaatgacaaatcaacaggaaacaaaacatatatggtatcaaatcattcagatcatacagcttggcacccaatagacaatgacaaactacaaagaaacgatttaccactttggctagaaacatggggatggatggactggatgaaaaaagcacagttaatatctcaaccagaactaaactatgtaacagtaatacaaactaaatttatttccagttacccaaaacttacatactatgtacccatagacaacaacatggaactgggccaatcaccatatataggatcactcacagcctcagacagacaacactggtacccaaaaggcacatttcaaatacaaacattaaatttactgggtatgacaggaccaggaactgtaaaaatgcaaaagaatcaagcttgtgagggtcatatggaatatcgttttaaatttaagctcggaggatgtccagcacaaatggaaaaaatatgcgatccagctgaacagccaaaatatcccattcccaatattaagcaaacaacaccttcgttacaggatccaacaaccaattttagaaccttcctgtacgacttcgacgaaagggacggacatcttacgaaaagagctgtcaaaagaattaaaaaagactcagaatctgaacaaactattcttgacattacaggaccaatggacctcccggcaccccaccaaaaaacatcaacatgggacacggagacatcggaagaagaagaagaagagggtctccagttcgagctcctcaagctcagaagaaaacaacacctcctcagacagcgaataaagaacctcctacaacaacaaaatttagaataatacattctaaagttaaaattgacttatttaatgatcaaaaacctgtaaacagaagaatgactccctctgaattagaggacgaaaagttttgggcctctatgtttaaaaggccacttagagcttttatttatgataaacctacatatccttatgtaccaactcctcctccacctttcaaatatatggttaactttgacttaaaccctcccctataaataaaggccaacattatttcactctcggtgtccatttatttaagttctaaccttaataaacatccaccactctcccaatcaatagggcctctaagggggctccgcccccttaaacccccaagggggctccgcccccttcaacccccaagggggctccgcccccttacaccccctaataaatattcaacag

SEQ ID NO: 4101 - protein, 660 aa, Betatorquevirus sp.
MPYYSRWWPRRRYRRRIWRRRAKRPLRRRYWRRHWVRNYSRKRKLNKLSLKQWQPQTIKKATVKGIYPLFLCDRDRINNNLIQYLESIAPLHFPGGGGFSIIQFTLKGLYDEFIAGRNWWTKSNCTLPLIRYLGCNLKLYRAEKYDYVVVIHRCYPLKASDHLYMSTQPSIQMMQRKSILVPCRQNSNSKKPYKRVHIKPPTQFETGWHFQQDLCNFPLVVITASVASFDRYYTASDSKSTTVGFYSLNTQTFQLHDWQDPPTTGYKPQDKLWLWGTLNGADPPDNTLVKHLIYLGGTGPYTKGVNVGNNSNYASQPQNWGNIFHNDYLFGTSAIFASNRTVQECVSYILQHQGDTDSDKVKAAGSYWTVRTIPNIVECRYNPFNDKSTGNKTYMVSNHSDHTAWHPIDNDKLQRNDLPLWLETWGWMDWMKKAQLISQPELNYVTVIQTKFISSYPKLTYYVPIDNNMELGQSPYIGSLTASDRQHWYPKGTFQIQTLNLLGMTGPGTVKMQKNQACEGHMEYRFKFKLGGCPAQMEKICDPAEQPKYPIPNIKQTTPSLQDPTTNFRTFLYDFDERDGHLTKRAVKRIKKDSESEQTILDITGPMDLPAPHQKTSTWDTETSEEEEEEGLQFELLKLRRKQHLLRQRIKNLLQQQNLE

SEQ ID NO: 4102 - protein, 96 aa, Betatorquevirus sp.; identical to SEQ ID NO: 1334

SEQ ID NO: 4103 - protein, 114 aa, Betatorquevirus sp.; identical to SEQ ID NO: 1335

SEQ ID NO: 4104 - DNA, 2670 bp, Betatorquevirus sp.
aaaaccacataggtgagtgaaaccaccgtagtctaggggcaattcgggctagatcagtctggcgtaccgggcaagtaacttaaattttaattacagatgtccaaacttttaaaaccaactaacttcactgaaaatggaattattggacaaaatataaacgcctttgtgaccatccacgacctatcctgttcctgcaacaaccccttgagatgcataattaaacaaatttactcaaaagaaaaaggattaaaatttaagcctgaagaattaaaacaatggcttactggtggagaaactaccgctacaactggagaagaagaagaccctattaccgcagaagacgtagacgcccttttcgccgctatcgatacagaaaatacagggtaaggaacaaaaaacttaaatttttaagacttaaagaatggcaacctaatgtaattagaagactatcagttaaaggaatgtactgtttatttcaatgtaatcataaacttttaaatagaaactatacacaatataaagaagatataccaccagaagggacaccagcgggcggtggatacagcttaaatgtttttaccttagactcattatttactgagcacgaaaaggctagaaacaaatggtctagaggaaacaaaaatttaccacttataagatacaccggatgtgaatttaaaatatacagaccaaaattagtagacgcacttgtaaaatttcaaaactgttaccctatgaaagctacaaatctcacatatacaggaacacaaccatatataatgtcaatgtcattaggaacaaaaagaataaaaagacttgatgacacaaataaaaaaaaaccatacaaaaagttcaaatttaaaccaccacaacaaatgactaacaaatggtttttttcagctgacttagctaaacaaggcctaattcttgtagcagccacagcagcagactttaataatatatatataagcccattttctgaatcagatactatatcctttaaagtactcaacacaaaaatattccaaaacagacactttgctacactgcccacaacaggataccaccccaaagatggtttctggctatgggcctctgaaaacggagaagatgatccacaatttaaatctatgatatttttaggagacacaacacaatataaacaaggacacccaataagactactaccaaacataactgataccacaactataggtgaggcagtaactaaactcacacaaaatacagaacactggggaaatccttttgcagaaccctacatggataaaaaacacagaatatggagaacagctaattcacctacaattacactatctcaatataaacaacaaaaagtaacagaaactatttcaaagctaggatttacagaagtacaccaagaactatactttcaagtaagatacaatccaaacagagacaaaggctataacacacaaatatactttttatcaaactggcaagaaaaagaaggatgggaaccaccactaaacccaaatttaatactaacaggatttccaatatggttaatagtatggggatgggtagattatcacttaaaattatcagaaataacaaacatagacactcactacttaacagtcataaaatcagacgccatagaaccccaagatttacgtttagatgcatgggtaattttagataacacatttacacatggagatagtcaatggcatccagaccatggaagaacagactgggacaacacacattggtaccccatgacacattatcaaatgtcaacattagaaaatatagcacaatcaggaccaatgacagcacacctaggagacaaaaaaactgaagaactacattgtgaatacacattctattttaagacaggaggatgtgtaccaccaatggaaaaaattacagatccaacaaaacaacctatttacccaattccaactaacatcgccaatgcaaattcgttacagagtccaacagaaccaattgaaacctacttatactccttcgacgaaaggagagggcaaattactcaaacagcttcagacagaatcaaacaggactttacaacttcaacatctttattcacagatacaacaacaactggaacagacatccaagccctccaaacattcccgaaaatccaagactcatcggaggaagaggaaacccaagaaacgccactattccagcagctcatcaagcagcgactcaaacaacaacgaatccgacagcgaatccaacagctcctaattcaacttcaacaatcaacctaatctgtataaaaaaggttgaactttttccaacagaaaaaaacagaagaatgaccccatgggaactagctcaagaaaaagaagacgccagaatttggaaaagaccagaaagaagatttattaaagataaaccattttaccctggaataatagaacccttagttaactttgaccttggttacaaatttaaataaagaaataaagggctaggccccattgattcatagctcggtgtctgtttctttaagtgtgaccttattaaactgactccgcctcccaatcactagggcgccaaagggggctccgcccccttaaaccccaagggggctccgccccctaacccccaaagggggctccgcccccttacaccccctaataaatattcaacagg

SEQ ID NO: 4105 - protein, 668 aa, Betatorquevirus sp.
MAYWWRNYRYNWRRRRPYYRRRRRRPFRRYRYRKYRVRNKKLKFLRLKEWQPNVIRRLSVKGMYCLFQCNHKLLNRNYTQYKEDIPPEGTPAGGGYSLNVFTLDSLFTEHEKARNKWSRGNKNLPLIRYTGCEFKIYRPKLVDALVKFQNCYPMKATNLTYTGTQPYIMSMSLGTKRIKRLDDTNKKKPYKKFKFKPPQQMTNKWFFSADLAKQGLILVAATAADFNNIYISPFSESDTISFKVLNTKIFQNRHFATLPTTGYHPKDGFWLWASENGEDDPQFKSMIFLGDTTQYKQGHPIRLLPNITDTTTIGEAVTKLTQNTEHWGNPFAEPYMDKKHRIWRTANSPTITLSQYKQQKVTETISKLGFTEVHQELYFQVRYNPNRDKGYNTQIYFLSNWQEKEGWEPPLNPNLILTGFPIWLIVWGWVDYHLKLSEITNIDTHYLTVIKSDAIEPQDLRLDAWVILDNTFTHGDSQWHPDHGRTDWDNTHWYPMTHYQMSTLENIAQSGPMTAHLGDKKTEELHCEYTFYFKTGGCVPPMEKITDPTKQPIYPIPTNIANANSLQSPTEPIETYLYSFDERRGQITQTASDRIKQDFTTSTSLFTDTTTTGTDIQALQTFPKIQDSSEEEETQETPLFQQLIKQRLKQQRIRQRIQQLLIQLQQST

SEQ ID NO: 4106 - protein, 96 aa, Betatorquevirus sp.; identical to SEQ ID NO: 2982

SEQ ID NO: 4107 - DNA, 2668 bp, Betatorquevirus sp.
ttacttctgaaggtgagtgaaaccaccgaaatcaaggggcaattcgggctaattcagtctaggcgaccgggcaagaaacttaaaataatattattttttacagatgagcaaatttatgagagaaccagtatactctcctaaacaccttgaacaacaatggattaatggctgtattcatcttcatgacctctgctgtggctgccctgaaccattaaaacatctaaaacacctattaaacaaagaagaaaaatgccacctttctaccgccgacgaggctactactaccgccgcaactggtggaactacaaccgaagacgaaataaatatagacgccggagatttagaggcccttttcgccgctacagacgaagacttagggtaagaaacaaaagacgctttaaaaactatagaaagaaactgaaaaaaattaaaatacaagaatggcaaccagctcatataaaaaaatgtaaaattaaaggttatttattactatttgaagcaggacaaggacgttttggtaataacttttgtccatacaaagaaagctacactccagctagaactccaggaggagggggttggagtatacaaaaactaaacttaggaaacctatatatacaaaacagctttattatgaacaaatggactcgtagtaatcgctcgttaaatatgtgcagatattttggtgtatacataactctttatagacaaccagacatagattacatatttacatactatagagaagaacctaaacaagcaggaaaatattggtatcctagcttccatccaatgcaaatgatactagataaacacagagtaattgtaccaagtttaaaaactcaaccattaaaacgtaaaaactacaaaagactttggattagaccacctaaaatgatgaaaacagaatggtattttcaacaacatataagtaattatcctttaatacactttgcagccacagcatgcagcttacaacacatgtttttaagtagtagaagtgctaatagcaatgtaacaataataactctaaatactaacttttttcaaagaagcgcctggcaataccctgatgccggcgtaggatactatcctaagcaaggcacctatatgtatggtcttagaaacggatcttacggtccaatacaaaacgaactaaaaaaaaatgtgatatatttaggtgacacacatttcaatgatggtggagaaccatgtggcgtaataacacactttacagactaccacaaagaaaaatggggaaacatattttttcacgaaaacttaaacttaataagaacagtatttctagcaacaaatccaaatacatttcttgcaaacgtaacctcaaccacacaaataggaagcgtagtacaaaaacaagaacccttactattctatgccagatacaatccctataaagacaagggagacggaaacatggcatattggaaatcagtttcagacgctaccaacaataactgggaacctccaaaagacgaggacttaataatatcaggatacccattttggttaatgctttggggatgggaagattactctaaaaaactagctaaaatacaaaaaattgatgatgaatacatgctagttttaaggtcatcatatatatcagaaggattaagagcatatgtaccactaggagaatcatttgtaaatggcagagctacctgggatagagacccagaagaaattgctcctacagaccaaagaacctggtttccaaaatggaaatttcaaaaagaagcaatagataaaatattaatgtcaggaccaggtgtttgtaaagctgaaggattacaatccatacaagcctttataaaatatgacttttcttttaagtggggaggagatccagacacaatggaaaaaatctacgaccccaacagccaaccaacaacagatatacccagtgagatctctctcacaaatgaaattacaaatccagaaacctcaattgaaaaccttatatacagatgggacgttagacgagaaatgcttacacaaacagctaaaaaaagaattgaaaaatgctcagaacctacaaactttatgttcacagatggaatacaaacttcaacagacatcccgctccagacacaaaaaacacaagagaaaacaacccaggaagaaaaggaaacattactcctccacctccagcagctccaacaattcaacagcgacctgcaacagcgattcaagcgactccaacaactagccaaaacaacataaactttacattaattaaaaaagcttacttatttgacccaccacaaaacaaacatagattaataactggtagagactgggaaactgagttacaactgtgtaaatggttaaaaagacccatgagacgctatcatgacgaccccccaacttatccctggcttccccctgaacctcttgttaatcaaccatatataaactttgacattgtatctgctttcaataaaggccagcattaattcacttaacaagtctgtttattaaagtaaaacttaactaaaccaacaccgcctccctaatacgcaggcgcaaaagggggctccgcccccttaaacccccgggggggaaaccccccctaagcccccccaaaaaattaatattcataaaggaaaccacaaaattagaattgccgaccacaaaccgtcac

SEQ ID NO: 4108 - protein, 665 aa, Betatorquevirus sp.
MPPFYRRRGYYYRRNWWNYNRRRNKYRRRRFRGPFRRYRRRLRVRNKRRFKNYRKKLKKIKIQEWQPAHIKKCKIKGYLLLFEAGQGRFGNNFCPYKESYTPARTPGGGGWSIQKLNLGNLYIQNSFIMNKWTRSNRSLNMCRYFGVYITLYRQPDIDYIFTYYREEPKQAGKYWYPSFHPMQMILDKHRVIVPSLKTQPLKRKNYKRLWIRPPKMMKTEWYFQQHISNYPLIHFAATACSLQHMFLSSRSANSNVTIITLNTNFFQRSAWQYPDAGVGYYPKQGTYMYGLRNGSYGPIQNELKKNVIYLGDTHFNDGGEPCGVITHFTDYHKEKWGNIFFHENLNLIRTVFLATNPNTFLANVTSTTQIGSVVQKQEPLLFYARYNPYKDKGDGNMAYWKSVSDATNNNWEPPKDEDLIISGYPFWLMLWGWEDYSKKLAKIQKIDDEYMLVLRSSYISEGLRAYVPLGESFVNGRATWDRDPEEIAPTDQRTWFPKWKFQKEAIDKILMSGPGVCKAEGLQSIQAFIKYDFSFKWGGDPDTMEKIYDPNSQPTTDIPSEISLTNEITNPETSIENLIYRWDVRREMLTQTAKKRIEKCSEPTNFMFTDGIQTSTDIPLQTQKTQEKTTQEEKETLLLHLQQLQQFNSDLQQRFKRLQQLAKTT

SEQ ID NO: 4109 - protein, 92 aa, Betatorquevirus sp.
MSKFMREPVYSPKHLEQQWINGCIHLHDLCCGCPEPLKHLKHLLNKEEKCHLSTADEATTTAATGGTTTEDEINIDAGDLEALFAATDEDLG

SEQ ID NO: 4110 - protein, 144 aa, Betatorquevirus sp.
MLRTYKLYVHRWNTNFNRHPAPDTKNTRENNPGRKGNITPPPPAAPTIQQRPATAIQATPTTSQNNINFTLIKKAYLFDPPQNKHRLITGRDWETELQLCKWLKRPMRRYHDDPPTYPWLPPEPLVNQPYINFDIVSAFNKGQH

SEQ ID NO: 4111 - DNA, 2664 bp, Betatorquevirus sp.
cgggagccgaaggtgagtgaaaccaccgtagtctaggggcaattcgggctagttcagtctggcggaacgggcaagaaacttaaaatgttatattttacagatgagcaaatttatgacaccaccactatacacatctaaaggcttggaaaatcaactaaaaaatattggatttcaagcacacgaccttgtttgtggctgctcaaaaccatcagaacacctggaatacatattttctacaacatgccaccgtacagaagaagactattctaccaaaactactggagaccaagacgccgtagacggcctttcacctggagaactcgaaaaactcttttcagaagacgccaccgaagacgacagcgggtaaggagacgccgccgaccaaaaattaaaagaaaactaagacatttaaaacttgtacaatggcaacctgtaagaattagaaactgtagaatacaagggatgtttcctttatttcaagcaggttggggacgctatagtaacaattttgaaatgtacaaaaattcatatgtacctgaataccaacctggaggcggaggatggtcaatatttcaattatccttaaactcattatatgaacaacaccaacaactaatgaactggtggacaaaatctaataatgattataacttagtaagatatactaaattaaaacttaaattttacagacaacacaacacagactatgtagtatcatatcaaacccaatatccttttgaaataggtaaatttcaccatgctagctcacatccacaaagattactaatgtataatcacaaagtaattgtacccagttattcaaccctccccaactggaaaagagactatataaaaaaaactataagacctccaaagcaatttttaaacaaatggtattttcaaagcaaattttgccgctttccactaataatgattaactcagcagcctgttcattaaaagaatactttatttcagaccgttcagaaagtaacaacattagcctgttttcaattaacacagatgtatttacacacaaaaactttagagatgttaattatgaacaccatcagtttggatacattgccaattcttcctattatatgtatggaacagttaatggaacaacagaaggtcaaaaacctaaacgaggagaattaatttacttaggagacaccacccgtaatatgccaggtgaacccattaataaactaaactttggaggcacaacatacacaaacacaaaatggggaaacccattttggaaagaatacatcaataaaaactcaaaaacctggataagtacagtacaacccctagaagtatttaaaaaagaatcagacagacaatcaatagcagacaatataacagaaatgacaaaagatattataatacactgtagatataaccctaacatagacacaggccaaggtaatgtagcaaaatggcttaatactaatcttttacaaaatggctgggaaacagaagcaggcccagactttactatacaaggctttccgctatggatattattatggggctgggaagactggacaagaaaactaggcagactaaacaatttagacacagagtacgtacttgtaattcacagtccatttattgttccaaaattaaaggcctatgtatttatgtcacaaagttggtgtactggtcaaggaccatacaatcaaccacacgaagaaatatcacaatacaatagacttaattggcaaccttcatggcaataccaaaaagaggctatagaggatctattaatgtgtgggccagctgtacccagaaatcatggacaaatacaagctcatgtacactattcctttttttttaagtggggaggacaaccaaactacaccgaaaaaattgctgatccatgctcaaaacaagactgggccctccccaataacatccttgaagaatctgaaatctcaaatccaaacaatgacccaacaaaagaaatctactcctttgacattagacgaaacctccttacacaggcagctacagagagacttaaacaagactcagaaactgaatattctttgttcacagatggagagcaaacttcaacaacagtaccgctacaaacgcagtacaaaaagaaaaagaaaacacagacaaagaaagaaaagctccaaacattacagctccacatcaagcagctccaacaacaccgccagcagctcagacaccgataccaccaactaaccaaacatcttataaatacaaaatatataagagccgaatcagagtaagcatgtttccaccagaaaaaccaaaaaatagacgctttaacccttatgaattagaagatgaaattgtaacagctaaacactggcatagacctgtaaaatcttatgtatatgatccacctttttacccatggtgtgtaccagaacctgttgtaaattttcacttaaaatacaatgaataaaggcctgcagtaattcactctcggtgtccatttatataagttttaaccttaataaacatccatgtcctccctaatacgcaggcgcacaagggggctccgcccccttacacccccaagggggcaccgcccccttacacccccagggggctccgcccccttacacccccaagggggctctgcccccttaaaccccagggggctccgcccccttacacgg

SEQ ID NO: 4112 - protein, 692 aa, Betatorquevirus sp.; identical to SEQ ID NO: 2288

SEQ ID NO: 4113 - protein, 102 aa, Betatorquevirus sp.; identical to SEQ ID NO: 2289

SEQ ID NO: 4114 - protein, 58 aa, Betatorquevirus sp.; identical to SEQ ID NO: 2290

SEQ ID NO: 4115 - DNA, 2663 bp, Gammatorquevirus sp.
ggggtgcgcgcgctagcgcgcgcaccccaatgctaggggcaactcgggctagggcagtctagcggaacgggcaagaaacttaaaactatttttcttttctagatgtcaacctacttcaaacaatgccgctacaatgcagaaacagttcaaaatatgtggatgtcagtagtaggtgactttcatgattcaatttgcagttgttggcatccttttgctcatatgcttgatttactctttccagaaggccataaagatagagataaaaccataagagaaattattgaaagagattcacaatgccattctggtggagacggagaagaagattttggtggggcaaacccaggtaccagcgccgccgtcgccgtcgctggaccaccagacgcaaacaaagaagacacagaagacctagatatagaagcactcgtcgccgccgcagaggccgcagaaaaaaggtaagaagaaaaagaaaagctatacctattttacaatggcaaccagactctataagaaactgtaaaataaaaggttatggagctttactctatggagctgaaggaacacagtacttgtgctatactaaccaaagatttgaattgccattaccacaatttccttcaggaggaggctttgctgtacaattatatagtctacaatacctgtatgaagaatcattgtttaaaaacaatatctggactgcaagcaatatatttacagacctttgcagatacctaaaatgtaaactttacttatatagacatgaaaaaacagactttgtagtttcatatagtagaatgcctccatggaacttaacaaagtatacatacccgagtgcacacccatacatgttacttcaaagtagacataagaaagtactactaagcaaaactactaatccaaaaggcaaactctggaaaaaaattactattaaaccaccaaaacaaatgataagtaagtggttttttcaaaagcaattttcacatcaaaatttatttcaattatcagcagctgcagcaagttttaaatatccaagattagcttgctgcaatgaaaatagagtgataactatttactatcttaacccacaattttacacacacagcacatgggcccaatctataaataaatactgggaaccatatgctcatgaatctagaactttaactttttactacaaagaaggtaatgctactaaatactaccaacctatattagaatacgataaacttccaacacaatctcaatactatgctagcatacaaaaagacactgggtggttttcaaaaaaaattttaactgctacagttgtaaaggaccgcccagacggtacagctcaagctaatttacctttaaatgcagctagatacaatccagaactagacaatggaaaaggaaataaagtttatttggttagtgtattaacaggatactataacaaaccatcagaagatgatttaatattccaaaatgctcctctctggttaatttttcatggattcttaaactatattattactaaaaaaggaaaaggctttcctgcagcacatatgtttgttattgaaagtccatttataactccacaaccttctgttataaccaaacagtttttcccttttgtagacttaaactttacattaggattaaatccttacaaagcttacatttctagtaaacaagcaacactatggtacccaacagtagagcaccaaatagaaactatcaatgcaatagtagaactaggaccatatatacctaaatattcagatgacagagacagtacatgggaactaccttaccattatattttttattttaagtggggaggacctgaaacacctcaacaagaagttgcagacccaaacaccaaaaacatctatactgtgcccgatacaatcacaggaacagtacagatatcaaacccaatcaaacaaagtactgaatcccttatacacaactgggatatcagaagggggctcattacacaaaaagctcttaaaagaatgtatgagaacctggaaactgactcagatttccaaccagatacagaacaaacaccaacaaaaagaccaagagttacaggagaactatgccatatccaagaaagcaacaaagagatccagagctgcctcgaagccctttgccaagaaacagaggaagaagagacaccacaaacacaggagggaatcatccagctcatcaacaagcagcagcaacagcaacagcagctcaagcgaaacatcttaatgctacttcaagaaataaaacacaaacaacaaatgttacaattaaccactggtctaatacaataaacttatttaaaccaggctttgaaatggaaacagaaaaagaactagctgcagcctttaaaagaccagttagaaaatttaaaacagactccccattttacccttggttaccccccactcctattgtaccccgagtaaactttaacctgaactacactttctaggccgacactgttcacttagcggagtatgtttaataaagtctaacccccaaaaaaatgtaaaaaaataaaaaaaaaaaaaaaaataaaaaaatgtaaaaattcggcgctcgcgcgcgctgcgcgcgcgcgagcgccgtcacgcgtcggcgcttgcgcgccgcgcgtatgtgccaacacaccacgcacctagatt

SEQ ID NO: 4116 - protein, 670 aa, Gammatorquevirus sp.; identical to SEQ ID NO: 3293

SEQ ID NO: 4117 - protein, 118 aa, Gammatorquevirus sp.; identical to SEQ ID NO: 3294

SEQ ID NO: 4118 - protein, 127 aa, Gammatorquevirus sp.; identical to SEQ ID NO: 3295

SEQ ID NO: 4119 - DNA, 2662 bp, Gammatorquevirus sp.
cgggagcccgaggtgagtgaaaccaccgaggtctaggggcaattcgggctagggcagtctagcggaacgggcaagaaacttaatatatacttttttttatagatgcaaaatatttctgctgaagacttttttaaaccaacaaactttaacaatacaactaaaaatcaactatggatgtccataattgctgattcccatgacagtctctgcaactgctggcatccttttgctcatatgcttgctagtctttttcctcctggccatcaagataggaataaaaccattgaacaaatactgcaaagagactttgctgaaacatgccattctggtggagaagaaggagaaagttctggggcggcaggtggaggaaacccagatacaacaaatataaaagaagaagaaaaccaagaagaagatatagacgcacttatggccgccgccgccgccgccacagaaaaagaagatacaaggtaagaagaaaaagaaaagctattgttttaaaacaatggcaacctgacagcattagaaaatgtaaaattaaagtaattgactcttttataataggagcacacggcacacaatttaaatgctatacaaatgaagctaaaaaatatccacagcctaaacaaccagcagggggtggttttgggatggaagtcttttctttagaagacttatatcttagatataaagctcataaaagtatatggacagcaacaaatgactataaagacctagtaagatacacaggctgtacatttactttttatagacatgcaacaacagactttatattaagctttaacacacagcccccatttacattagataaattctcatatacatcaatacatccactaaacatgctacttcagaaacataaaaaaattttatatagcttaaaaacaaaaccatggggtccctccaaagttaaatttaaaattaaacctccaaagcaaatgtctactaaatggtttttccaaaaattttttgctactgcaggcctagttgaaataaaagccactgctgctgactttaacttttcatacatacaaaacacaagtgtaaacaccaacttatccatagtgtatttaaacactgcattttaccaactaagcaactggggtaaattccttggtgcaagtcattacaaaccttatgccacaataaatgaaaaattatactactggttcaaatcaggaaaccaaacaaaacacatacaagttaaacatgaaaactactatgagtcagttaactacgcaacaggctactttcaaacaggagttttaaatgcaataaaaattacacttacagctgacattgctgctcaatctgcacaagcacacttaccagtagcagttgcaagatacaatccacaacttgacacaggagaaaaaaatgaactatgggtagtctcaattttaactgatcactatgacaaacccagagaaccccaactagtatactctggttatcctttatggatgatgttctttggctattataactttattttacaatataaaaatgatcaaacattcttagattcacatatgtttgtaataagatctccagccatattaaaactttcaacaaccactgatcaagactattttccgtttatagacttttcctttttaaatggaaaaatgccatttcaagaatacttagacgaaaacagtaaaaaattttggtacccttctgttaaaaaacaagtagaaacaataaataatattgttacttgtggcccatacataccaaaatattctgacaatagggacagttcatgggatttaaaatataaatctactttttactttaagtttggaggtccacagatttcagaaacaccagttgttgacccacaaaaacaagaagactatgatgtgcccgataagttcaaaagcacaatacaaatatctgatccaatcacacaagcctgtgaaacaatgttccacaactgggactacagaagggggcttattacaccagcagctattaaaagagtgtcaaaacacctcgaaactgattcagatgtctcgtcaacttctacagaaccaccccacaaaaagatcaaaatcacaggagaagtcccctatctcccacaagaaacagaagaagtccaagcgtgtctcctctcactctgcgaagaagataccttccaagaagaagaagaggatctccacaagctcatcaagcagcagcacaaaaagcagcagcagctcaagcagcagctcctcaagctcctagcagaaatgaacaaaaaacaaactatgctacaacttcaaacaggaatcttaggctaactagatttaagcctggctttgaagaagacacagaaaaacaactagcaaaaatattcaaaagacctccaagaacttataaagaagaccctcccttttatccatggctacctataacacccaaagtaatttttgcgcttaattttaaaggctaggccaacaatgtacacttagtaaagcatgtttaataaagttttaccccccaaaaaaaaaaaaaaaaaaaataaataaaaaaaagcaaaaattcggcgctcgcgcgcgctgcgcgcgcgcgagcgccgtcacgcgccgagtttaccccgctagacggtgcagggaccggatcgagcgcagcgaggaggtccccagctgcccgtggg

SEQ ID NO: 4120 - protein, 662 aa, Gammatorquevirus sp.; identical to SEQ ID NO: 3735

SEQ ID NO: 4121 - protein, 123 aa, Gammatorquevirus sp.; identical to SEQ ID NO: 3736

SEQ ID NO: 4122 - protein, 104 aa, Gammatorquevirus sp.; identical to SEQ ID NO: 3737

SEQ ID NO: 4123 - DNA, 2659 bp, Betatorquevirus sp.
accgtgctgaaggtgagtgaaaccaccgaaatcaaggggcaattcgggctaattcagtcttggcgaccgggcaagtaacttaaaattatatttttacagatgagcaaatttatgacagaacctatctactcaccaagaaaactagaacaacaatggattaatggctgtattcatctccatgacctatgctgtggctgcccaaaccctctaaatcaccttaaatttttactaaacaaagattcaacatgcctccatactacagaagaaaaaggtactactacagaagaaactggtggaactacaaccgcagacgaaataaatatagacgccggagacctagaggcacttttcgcaaataccgacgacgatttagggtaagaaaaagaaacttctttaaaaactttaaaagaaaacttaaaaaaattaaaatacaagaatggcaaccaactcatattaaaaaatgtaaaattaaaggatatcttttactttttgaagcgggacatggacgcttcggaaataacttttgtccttataaagaaagctacactccaccacgaactccagggggaggaggatggagtattcaaaaactaaacttgggaaacttgtatattcaaaataattatataatgaacaaatggacacgtagtaatagaagcttaaatatgtgcagatattttggtgttactattactttatatagacaacctaaaattgattatatatttacatactatagagaagaaccaaaacaggcgggaaaatactggtatccctcctttcacccaatgcaaatgatattagataaaaaaagaataatagtacctagcatgcaaacacaaccactaaaaagaaaaaactataaaagaatttttataagaccaccaaaaatgtttaaaacagaatggtattttcaacaacacataagtaactatcctttaatacactttgccgcaacagcttgtagtttacaacatatgtttttaagctcaaaaagtgctaatagtaacatatctatatttactttaaatacaaacttttttcaaagaagtgcctggcaatacccagacgccggattgggttactacccaaaaactggcacatatatgtatggattaagaaatggaacatggggagacctcaaaaacgaatttaaaatgaatgttatttacttaggaaacacacactttaatgacgcaggtgaaccatgtggtaccataaccaaatttcaagaataccacaaagaaaaatggggaaatatattctatcatgaatactttaacctacaaagaactgtttttctttctgtaaacccaaatacattctttaacaatattacttctcaaactaaaattacggatgcaatacaaaaacaagaaccattatattttgaagctagatacaacccatacaaagataaaggtgacggtaacatggcatactggaaatcagtttctgatgccactaacaataactgggaaccccctaaagacgaagacttaattatacaaggttatcccttctggttaatgttatggggatgggaagactacagcaaaaaacttgctaaaattcaaagaatagatgatgaatacatgctagttttaagatctagttatatatccgaaggcctaagggcatatgtaccactaggtgaatcatttgttaacggtagagccccctgggatagagacgcagaagaaatatcgccactagatcaaagaacttggtttccaaaatggaaatttcaaaaagaggcaatagataaaattttaatgtcaggtccaggtgtatgtaaggcagaagaacaacaatctatacaagcttttattaaatatgacttttcttttaagtggggaggagacccagacacaatggaaaaaatctacgaccccaacagtcaacccacctcagatattcccagtgaaatcggtttctcaaatgaaattacaaatccagaaacctcaattgaaaaccttatctacagatgggacgttagacgagaaatgcttacacaaacagctaaaaaaagaattgaacaatgctcaacacctacaaactttatgttcacagatggaatacaaacttcaacagacgtcaacctcaaaacacaaacacaaacatcgaaaacgacccaggaagaaacccaagaaacattactcctccacctccagcagctccaacaattcaactcagaactcaagcagcgattccagcgactccaacaactaaccaaagacctataaactttactttaattaaaaaagcatacctttttgacccacctgttaataaacatagattaattactggtagagattgggaaacagaactacaaatatgtaaatggttaaaaagaccaatgagacgttaccatgatgaccccccaacttatccctggttacccccagaacctcttgttaatcaaccacttgtaaactttgacattgtatctgcttttaataaaggccagcattaattcacttaacaagtctgtttattaaagtaaacttaaataagccaacaccgcctccctcatacgcaggcgcacaaagggggctccgccccctttaaccccccgggggggaaacccccccgaaacccccccaaatttaaatattcataaaggaaaccacaaaattagaattgccgaccacaa

SEQ ID NO: 4124 - protein, 666 aa, Betatorquevirus sp.
MPPYYRRKRYYYRRNWWNYNRRRNKYRRRRPRGTFRKYRRRFRVRKRNFFKNFKRKLKKIKIQEWQPTHIKKCKIKGYLLLFEAGHGRFGNNFCPYKESYTPPRTPGGGGWSIQKLNLGNLYIQNNYIMNKWTRSNRSLNMCRYFGVTITLYRQPKIDYIFTYYREEPKQAGKYWYPSFHPMQMILDKKRIIVPSMQTQPLKRKNYKRIFIRPPKMFKTEWYFQQHISNYPLIHFAATACSLQHMFLSSKSANSNISIFTLNTNFFQRSAWQYPDAGLGYYPKTGTYMYGLRNGTWGDLKNEFKMNVIYLGNTHFNDAGEPCGTITKFQEYHKEKWGNIFYHEYFNLQRTVFLSVNPNTFFNNITSQTKITDAIQKQEPLYFEARYNPYKDKGDGNMAYWKSVSDATNNNWEPPKDEDLIIQGYPFWLMLWGWEDYSKKLAKIQRIDDEYMLVLRSSYISEGLRAYVPLGESFVNGRAPWDRDAEEISPLDQRTWFPKWKFQKEAIDKILMSGPGVCKAEEQQSIQAFIKYDFSFKWGGDPDTMEKIYDPNSQPTSDIPSEIGFSNEITNPETSIENLIYRWDVRREMLTQTAKKRIEQCSTPTNFMFTDGIQTSTDVNLKTQTQTSKTTQEETQETLLLHLQQLQQFNSELKQRFQRLQQLTKDL

SEQ ID NO: 4125 - protein, 92 aa, Betatorquevirus sp.
MSKFMTEPIYSPRKLEQQWINGCIHLHDLCCGCPNPLNHLKFLLNKDSTCLHTTEEKGTTTEETGGTTTADEINIDAGDLEALFANTDDDLG

SEQ ID NO: 4126 - protein, 145 aa, Betatorquevirus sp.
MLNTYKLYVHRWNTNFNRRQPQNTNTNIENDPGRNPRNITPPPPAAPTIQLRTQAAIPATPTTNQRPINFTLIKKAYLFDPPVNKHRLITGRDWETELQICKWLKRPMRRYHDDPPTYPWLPPEPLVNQPLVNFDIVSAFNKGQH

SEQ ID NO: 4127 - DNA, 2658 bp, Betatorquevirus sp.
aaaccgttgaaggtgagtgaaaccaccgaaatcaaggggcaattcgggctaattcagtctaggcgaccgggcaagaaacttaaaataatattattttttacagatgagcaaatttatgagagaaccagtatactctcctaaacaccttgaacaacaatggattaatggctgtattcatcttcatgacctctgctgtggctgccctgaaccattaaaacatctaaaacacctattaaacaaagaagaaaaatgccacctttctaccgccgacgaggctactactaccgccgcaactggtggaactacaaccgaagacgaaataaatatagacgccggagatttagaggcccttttcgccgctacagacgaagacttagggtaagaaacaaaagacgctttaaaaactatagaaagaaactgaaaaaaattaaaatacaagaatggcaaccagctcatataaaaaaatgtaaaattaaaggttatttattactatttgaagcaggacaaggacgttttggtaataacttttgtccatacaaagaaagctacactccagctagaactccaggaggagggggttggagtatacaaaaactaaacttaggaaacctatatatacaaaacagctttattatgaacaaatggactcgtagtaatcgctcgttaaatatgtgcagatattttggtgtatacataactctttatagacaaccagacatagattacatatttacatactatagagaagaacctaaacaagcaggaaaatactggtatcctagcttccatccaatgcaaatgatactagataaacacagagtaattgtaccaagtttaaaaactcaaccattaaaacgtaaaaactacaaaagactttggattagaccacctaaaatgatgaaaacagaatggtattttcaacaacatataagtaattatcctttaatacactttgcagccacagcatgcagcttacaacacatgtttttaagtagtagaagtgctaatagcaatgtaacaataataactctaaatactaacttttttcaaagaagcgcctggcaataccctgatgccggcgtaggatactatcctaagcaaggcacctatatgtatggtcttagaaacggatcttacggtccaatacaaaacgaactaaaaaaaaatgtgatatatttaggtgacacacatttcaatgatggtggagaaccatgtggcgtaataacacactttacagactaccacaaagaaaaatggggaaacatattttttcacgaaaacttaaacttaataagaacagtatttctagcaacaaatccaaatacatttcttgcaaacgtaacctcaaccacacaaataggaagcgtagtacaaaaacaagaacccttactattctatgccagatacaatccctataaagacaagggagacggaaacatggcatattggaaatcagtttcagacgctaccaacaataactgggaacctccaaaagacgaggacttaataatatcaggatacccattttggttaatgctttggggatgggaagattactctaaaaaactagctaaaatacaaaaaattgatgatgaatacatgctagttttaaggtcatcatatatatcagaaggattaagagcatatgtaccactaggagaatcatttgtaaatggcagagctacctgggatagagacccagaagaaattgctcctacagaccaaagaacctggtttccaaaatggaaatttcaaaaagaagcaatagataaaatattaatgtcaggaccaggtgtttgtaaagctgaaggattacaatccatacaagcctttataaaatatgacttttcttttaagtggggaggagatccagacacaatggaaaaaatctacgaccccaacagccaaccaacaacagatatacccagtgagatctctctcacaaatgaaattacaaatccagaaacctcaattgaaaaccttatatacagatgggacgttagacgagaaatgcttacacaaacagctaaaaaaagaattgaaaaatgctcagaacctacaaactttatgttcacagatggaatacaaacttcaacagacatcccgctccagacacaaaaaacacaagagaaaacaacccaggaagaaaaggaaacattactcctccacctccagcagctccaacaattcaacagcgacctgcaacagcgattcaagcgactccaacaactagccaaaacaacataaactttacattaattaaaaaagcttacttatttgacccaccacaaaacaaacatagattaataactggtagagactgggaaactgagttacaactgtgtaaatggttaaaaagacccatgagacgctatcatgacgaccccccaacttatccctggcttccccctgaacctcttgttaatcaaccatatataaactttgacattgtatctgctttcaataaaggccagcattaattcacttaacaagtctgtttattaaagtaaaacttaactaaaccaacaccgcctccctaatacgcaggcgcaaaagggggctccgcccccttaaacccccgggggggaaaccccccctaagcccccccataatttaaatattcataaaggaaaccacaaaattagaattgccgaccac

SEQ ID NO: 4128 - protein, 665 aa, Betatorquevirus sp.; identical to SEQ ID NO: 4108

SEQ ID NO: 4129 - protein, 92 aa, Betatorquevirus sp.; identical to SEQ ID NO: 4109

SEQ ID NO: 4130 - protein, 144 aa, Betatorquevirus sp.; identical to SEQ ID NO: 4110

SEQ ID NO: 4131 - DNA, 2657 bp, Betatorquevirus sp.
cgggtgctgaaggtgagtgaaaccaccgaaatcaaggggcttaatgggcaaagtcagtcttggcagaacgggcaactaacttaaaattatttttagatatgtcctggagcaaacctcaatatggacccagaggccaagacctaaactggctacaaagctgcatgcaaagccacgatgcctactgtggatgcaatgaaccagcaattcattttataaaaatagcactgcgccatggaggagtaatgtcctttaatgaaaacaaacttaaacaactatgcctccctactaccgaagattctacagaacacgatggcgacgataccgcagacccaactactggtcccgaaggagacctcgatttcggagatttagacaaacttttcgaagaaagcgatcctttcgaagaccccgattctgggtaagaaaaaaactttatagacttttaagaaagaaaaaactaaaatatatattactaaaacaatttcaacctaaaaagataagaaaatgtaaaattactggaataatcagcttatttgaatgcggaccacatagactccatagagaatggacaaattttatgaattctttttatccaccacactcggaaggtggaggaggatggtcccaaatgcaatttacattagaaagcttatatgaacaatatgaactgcttagaaacaaatggacacaaagcaatgttttaatgccgcttgtacgctataatggttgtaaacttaaattgtatagaactaacaaagttgattatatatgtaactattctatatgctatccaatgaaaacaacaaaatatcaacacacaaatgcacaacctagtaacatgttactataccctaaaaaaatattagtaccatcattacaacgaaaacctagaggaaaaccatatgtaattaaaagaattagactaccagaacaatttgaaaacaaatggtactttcaaagtgacttatataaaacaccactactattactaacaacatcagcctgtgactttgacagatggtacttaaatcctacatctgtaagcaacaatataactataattacattaaacacagacttaataaagtcacacaatttcagacaatatggactaggaccacagtactggggacctaaagcaaaccactatttatatgctgtacaaaacggagcagccactgacccagtaaaagacttaatctttctaggtcaaacattaagagacaccgcaggacaacccataagtaacacagcatggtcagaatactcaaaaccacaaaaacaaagagacacatttggaaatatatttcacccagactactttaaccaacgaaaaacaatatatatatcacaagtacctccacaaacaatgtttactacttacataaacaaaaatatacaagacgaacaaacaggattaacaatgctaacacaagacatgtacaaaacatgtagatacaatcctgagagagacaaaggcttaaacaaactatggctagtaagcacaacagacacaatagaaggctggcatgaaccagaagatgaagacttaaaatatgaaggatttccactatgggctttactatggggatatgtagactggcaaataaaatataaaaaatttaataaattagaagataactacataatggtaataaaaacaccctatatttggccagaatatgatattatagtacctataaacgaaacatttatagatggttatagcaactggcaagatcaaacacatgatcaacttttaatagataaagaagattggcatgtaaaacttaaatttcaagacagacaaatagaaaatatttgtgaaacaggtccaggcacagcaaaaacaactacacaaagcatagaagctcatatgctatattctttttattttaagtggggaggatgccccaacgaactcgaaaacattacagacccaggaaaacaaatccactaccccgtgcccaatattgagctacaaggacctgagatcgaggatccagaaacagacccaaaaacacaaatctggccttgggacgtcagacgacacatgcttacaaaaaaaggtgcaaaacgaattaaagaaacaaaagaacttaaagtgccttctcttacaggctcaaaactatcagcaacaactgcaactcacgaaaccatccaaaaaatatcaacatggagggaagagacacagaaagaagagaaagagacatcacagcagctccagctcctcaacctccagcacaacaacaacaaactacgacagcgactaaccaaactactttctcaaactgccagtttaaaatattagcaggaaagcagaaacaatacttatttccagaaattgtacctagaaaaaaccgccgctttttaccccatgaaagagagctagaaaatattgttagcaaagtatttcgcagacctcctagacatttcttttatgataatcctacatacccatactgtgtacctgaacctcgtgtaaactttaaattaaactttactgaataaaggccaacaattttcacttaatggtgtcagtttatataagctaaacttaaataaacatccatcaccactatataactaactacacttccgaatggctgagtttatgctgccagacggagacgagaaacttctcggctgactttggg

SEQ ID NO: 4132 - protein, 678 aa, Betatorquevirus sp.
MPPYYRRFYRTRWRRYRRPNYWSRRRPRFRRFRQTFRRKRSFRRPRFWVRKKLYRLLRKKKLKYILLKQFQPKKIRKCKITGIISLFECGPHRLHREWTNFMNSFYPPHSEGGGGWSQMQFTLESLYEQYELLRNKWTQSNVLMPLVRYNGCKLKLYRTNKVDYICNYSICYPMKTTKYQHTNAQPSNMLLYPKKILVPSLQRKPRGKPYVIKRIRLPEQFENKWYFQSDLYKTPLLLLTTSACDFDRWYLNPTSVSNNITIITLNTDLIKSHNFRQYGLGPQYWGPKANHYLYAVQNGAATDPVKDLIFLGQTLRDTAGQPISNTAWSEYSKPQKQRDTFGNIFHPDYFNQRKTIYISQVPPQTMFTTYINKNIQDEQTGLTMLTQDMYKTCRYNPERDKGLNKLWLVSTTDTIEGWHEPEDEDLKYEGFPLWALLWGYVDWQIKYKKFNKLEDNYIMVIKTPYIWPEYDIIVPINETFIDGYSNWQDQTHDQLLIDKEDWHVKLKFQDRQIENICETGPGTAKTTTQSIEAHMLYSFYFKWGGCPNELENITDPGKQIHYPVPNIELQGPEIEDPETDPKTQIWPWDVRRHMLTKKGAKRIKETKELKVPSLTGSKLSATTATHETIQKISTWREETQKEEKETSQQLQLLNLQHNNNKLRQRLTKLLSQTASLKY

SEQ ID NO: 4133 - protein, 120 aa, Betatorquevirus sp.
LAERATNLKLFLDMSWSKPQYGPRGQDLNWLQSCMQSHDAYCGCNEPAIHFIKIALRHGGVMSFNENKLKQLCLPTTEDSTEHDGDDTADPTTGPEGDLDFGDLDKLFEESDPFEDPDSG

SEQ ID NO: 4134 - protein, 111 aa, Betatorquevirus sp.
MEGRDTERRERDITAAPAPQPPAQQQQTTTATNQTTFSNCQFKILAGKQKQYLFPEIVPRKNRRFLPHERELENIVSKVFRRPPRHFFYDNPTYPYCVPEPRVNFKLNFTE

SEQ ID NO: 4135 - DNA, 2656 bp, Betatorquevirus sp.
aagggggcgaaggtgagtgaaaccaccgtagtctaggggcaattcgggctagatcagtctggtggaacgggcaagaaacttaaaaatatttttactttacagatgtcaagcttctttaaagacagccaatacacaaagtttcaaaaagaaactcaatggcttaacaactgcatgggaagccacgacctcatctgtttctgtgaccatccctggcaacatcttcttcagtgcctgttaaacagaggatcctactttgagttaagcaaaaaagatattagaataatacaaaaatgcctccttactaccgccgaaggttctacaactacccaagaagaagaaaagccaactacttcagatacaaaagattcaggtttcgacctcgacgttggagacctagaaaccttattcgcagaagacgacgaaaaacaagggtaagaaaaagatataacttttacaaaagaaaacttaaagccttaccgctaaaacaatggcaacctgaactaattaacaaatgcagtattaaaggactatttactttatttgcttgcaatgaaggaagaggctcaaacaattatccacaatatagagactcctttgtacctatatttcaacctggagggggagggtggggaatatttgtatttaatcttggagcatttttcgatgaatttttaagagtaagaaattattggactgtaactaatgtagacaaacctttatgtagatacttgtattgtaaactaagattttatagagctgaaaattgtgactatgttgtatactatacaagaaactaccccatgacagacaatgaatttagacatgcagacgctagcccaagtagaatgctaatgagaaaacacaaaataatagtacagagcagacaacacacacacaaaaaaccatacattaccagaaaaatttatccaccaaaacaactcataaacaaatggttttttcaaagagattttgtaaatacaaacctattaatgctaacagctacagcatgttctcttaccaactatgacataggcccgaaagacatatcaaacaacataacattaagaacattaaactacataaaatttaaatcactaaactttcaaagacaacatacaacagaaccatatcaaccaacaaatggcacttacttttaccatgtagaaacaacaaaaatacaatggaacgaaccaacaaaaatgttagaaaacataacatacggagacttaacatttttaggtcaggcaacacgaagaatagaaggcattagctttagagacagcaaaaaagacaaatggattgactatgttaaatcagacaacagtgcagaatggggaaatatattttatgaaagtattttacatgacgaagtaacacttttacaaagcaacatacaaccaagtggcttaacccaagctacagaagcaaagtcaaatacaaaaattacagcaactcaatttacaattgttacagaaaacatatttattacagtaaggtacaacccagacaaagacacaggaaaaaacacaaaaatatatttagtccccaactttcaaaactacaatgattggacagaaccagaaaatgaccaactaaaatttcatggctttcctttatggatgttactatggggatggccagactggcaaaaaaaattaggcctagtaaaccaaatagaccaacactacataattataatagaatctgaagctttcgaaccaaaactaaacaaatacatgtttttagatgatgaatttatcacaaacacattagaatttccagaccctgacccacatgcaaccaatcaaaagccactattacacgatgaacaaaactggtacccaaaattctggtaccaacaaaaaagcataaacaaaatatgcatgtcaggaccagcaacacacaaatttaaaaacaatgaaagcatacaagctcacatggaatatatttttcgttttaagtggggcggaacatcttcaaccatggaaacaattgcagacccaagcaaacagccaaaatatcccacaagcgataacatcttatcaacaattcaaatccagaatccagcaacagacccaagagactttatctacccctttgactttagaagacactgcctcacacaaaaagcagctaccagacttacagaaccaagaaatgacgaacctgttccattatttacagacccatggaatccaatcccatactacccacaagaaaaagacatcattcaagcattcatcgaagcacagagcaagaaagaagagaaagcacagaacatccagcagttcatcgtcctccgaaaccagcaacaactactccagcagcgaatcaacagactaattatacaaagtacaaaataataaatacaaactgtacaattgaactttttccaaaaccaaaaaaaaacaggagatttactcctgaagagtttgaacaagaactagaaatatcaaaactgtttaaaagaccgcctagaactttcttttatgataccccattttatccttggttcccccccaacaccacttgttaattttgacttaaaatacaaagaataaaattcaaggccagcattatttcactctcggtgtccatttattaaagtttcaacttaaataaacatccaccactctcccaaatacgcaggcgctgt

SEQ ID NO: 4136 - protein, 690 aa, Betatorquevirus sp.; identical to SEQ ID NO: 1531

SEQ ID NO: 4137 - protein, 110 aa, Betatorquevirus sp.; identical to SEQ ID NO: 1532

SEQ ID NO: 4138 - protein, 115 aa, Betatorquevirus sp.
MESNPILPTRKRHHSSIHRSTEQERRESTEHPAVHRPPKPATTTPAANQQTNYTKYKIINTNCTIELFPKPKKNRRFTPEEFEQELEISKLFKRPPRTFFYDTPFYPWFPPNTTC

SEQ ID NO: 4139 - DNA, 2656 bp, Alphatorquevirus sp.
gtactggctgctcgctatggctttactggggggccggcgccgccaggtggtcctgggccggcgccccaagtgagacccgcgcttccagcgcctgagccggaccccgaaggtcctgagcctcagccatggcgtggagctggtggtggcaacgatggaggcgccgccgctggaaacccaggcgccgccgctggagacgcttacgacggagaagacctagacgccctcttcgccgccgtcgccgaggacgcagagtaaggaggcggaggtggggcaggagacgggggcgacgcagacggtacgccaccagacgaaagagacgtaccaggggtcgcaactttaaaaagaaactagtactgactcagtggcacccctctagcataaggcgctgcttaattaagggcatagtccccctggttatatgcggacacaccaggtggaactggaactacgcccttcatagcgaggactatactgaagagggtcgctacgcctacggggggtccctcagcaccactacgtggtcgcttaaggtgctgtacgacgaatacttaaaacaccacaacttctggggctatcccaacaaccagctagacctggccaggtacaagggggcaaaattcaccttttacagacacaaaaagactgactttatagtattttttaacagaaggcctccctttaagctaaacaaatacagctgcccctcttaccaccctggcatgctcatgcagcaaaaacacaaggtgctaatacccagctacgacactaaaccaaaggggaggccaaaaataactgttagaataaagccccccactctgttagaagacaagtggtacactcagcaagacctgtgcgacgttaacctgttgcaacttgtggttactgcggctgactttcaacatccgttctgctcaccacaaacgaacactgcaaccacaacgttccaagtgttgaaagacatttattacaacactatcagcatctctgagcccccagagtgctacaataatgttaataaccccagtgagtgtaactcatttagccactactcaaacaccctagaaaacatactgtacaatacgggctcctactggaactcttttcactccatggagtaccttaacccaggcataacagatatatacaacaacaaaatatttaacactacgtccacatcactaataaattggctgtcaacaaaaggctcggacaactttcaaactggaaacagcacccagtttggccacaacagctacaaacccactttacaaaatattacgtcagccaggaaagcttactggacggccttaaacaagcctaataacctggctgttaacatagcacaggcaaaggcagagagattcgagtaccacctaggctggtactctcccatactactaagcaaccacagaagcaacttaaactttgccagggcctaccaagacgtcacttacaaccctaactgtgacagaggtgtaaagaacaaaatatgggttcagtctctcactaaacccacaacagagtttgatgaaaaaagatgcaagtgtgtggtagagaacctgcccatgtgggcggccttgtactgctaccacaactttgtagaagaggagctaggcatctcctctgaaatctacaactcctgcatagtagtagtgcagtgtccttatacctttcctcctctttatgacaaaaaactacccaacaaggggtacatattttatgataccctgtttggcaacggcaaaatgcccgacggacgcggacaggtagacgtcttctggcagcagcggtggtacccccgcatggcctgccagactcaagtgatgcatgacatcaccatgacgggccccttctcctaccacgacgagctagtaagcacacaactgactgccaagtacacctttgactttatgtggggcggcaatatgatctccacacagatcatcaagaacccctgcaaagacagtggactggaacccgcctatcccggtagacagcgtcgcgacttacaaattgttgacccacactccatgggcccacaattctcgttccacaactgggactacagacggggcctatttggcaaagacgctatcgacagagtgtcaaaagaaccaacagatgctccagagtatcctaacccatacaaaaggcctagatatcttcctcccacagaccgcgcagaccaagagcaagaaaaagacttcaatttccaggaagaaagcggggcgtcctcgtcagaagagagcgatcaagaagtcctccaagagacgcaagtactccagttccagccagagcagcagcagcaactccacctgcagctcgcgcagcagcagcgactcggagagcaactccgattcctactccaccaaatgttcaaaacccaagccaatctgcacctaaacccatatacatacacccagctataaacaaggtgtttatgtttgaccctgagggtcccaagcccataaacaccagagagggctgggcagatgagtatcacactgcgtcggtgtggggccggcccgtccgttccttttacacggacacccctttttaccccgaggttcccaaggtgccccctcaattttctgtaagttttaaactcggctggaaataaaaatgcaaggcctttcactgttcacttgtcggtgtc

SEQ ID NO: 4140 - protein, 767 aa, Alphatorquevirus sp.
MAWSWWWQRWRRRRWKPRRRRWRRLRRRRPRRPLRRRRRGRRVRRRRWGRRRGRRRRYATRRKRRTRGRNFKKKLVLTQWHPSSIRRCLIKGIVPLVICGHTRWNWNYALHSEDYTEEGRYAYGGSLSTTTWSLKVLYDEYLKHHNFWGYPNNQLDLARYKGAKFTFYRHKKTDFIVFFNRRPPFKLNKYSCPSYHPGMLMQQKHKVLIPSYDTKPKGRPKITVRIKPPTLLEDKWYTQQDLCDVNLLQLVVTAADFQHPFCSPQTNTATTTFQVLKDIYYNTISISEPPECYNNVNNPSECNSFSHYSNTLENILYNTGSYWNSFHSMEYLNPGITDIYNNKIFNTTSTSLINWLSTKGSDNFQTGNSTQFGHNSYKPTLQNITSARKAYWTALNKPNNLAVNIAQAKAERFEYHLGWYSPILLSNHRSNLNFARAYQDVTYNPNCDRGVKNKIWVQSLTKPTTEFDEKRCKCVVENLPMWAALYCYHNFVEEELGISSEIYNSCIVVVQCPYTFPPLYDKKLPNKGYIFYDTLFGNGKMPDGRGQVDVFWQQRWYPRMACQTQVMHDITMTGPFSYHDELVSTQLTAKYTFDFMWGGNMISTQIIKNPCKDSGLEPAYPGRQRRDLQIVDPHSMGPQFSFHNWDYRRGLFGKDAIDRVSKEPTDAPEYPNPYKRPRYLPPTDRADQEQEKDFNFQEESGASSSEESDQEVLQETQVLQFQPEQQQQLHLQLAQQQRLGEQLRFLLHQMFKTQANLHLNPYTYTQL

SEQ ID NO: 4141 - DNA, 2655 bp, Betatorquevirus sp.
ggcaattcgggctagatcagtctggcggaacgggcaagaaacttaaaatattttttattcacagatatgttctcatcatggaagacacccacatcatcaaagagacaacaagaactacagtggattggaataattaactcaactcacgaccaaatttgccactgcgacgacccaactcttcatttgctttactgcctcaacaaattctccggatttcaaaaaccagaaattgatattaataacataaaatgcctccttatcggcaatcctactacttcaaaagaaacttctacaacaatagaagacgccggtttagaagaaggggagttagaaaaccttttcgcagaagatactggagaatacaaagaaaacgaaaacccagatacaaggtaaacaaatttaaattttataaaagaaaagcaaaaaaaataacacttaaacaatttcaaccaagaactattaacaaatgtaaatgtattggatataaatgcttatttcaaggtagtcccttaagagctatgaacaactttgtacaatatgtttattcaattatacccgaaaaacaaccaggaggagggggatggagcattcaagtactcagcttagactcaatatttgaggactatgaacatttacaatgcatatggactaaaggaaacgcaggactgcctcttgttagatacatgggttgcaaatttacattataccaatctgcagaaacagactatgtattttcttatgataactgctggccaatggttgatactatacacacccacgcagactccgcaccatttagaatgctacaaaaaaaaaacaaaattgttgttccctcaatgaatacaaaaaaaagacgcaaaccatacaaaaaagtttttgtaaaaccaccaccacaaatgacaaacaaatggtactttcagaaagacatatgtaaaacacctctagtaatgtttactgccactgcagtatctctcggaaacccatttgcagaccctagagctaaaagcaacaatgtaactatacactgtataaacccatacctttttcaaaacccagactttcaacattggggaacacaaggatactcacctaaaatgacagataatgcaacaccattatacctatatgcatcacaaatcgacaacttaaccttcgaaaccttaaaaaccaataaaaataccattatagcactaacaaatacaaaagaccatacacctggaataccacttataaataatcaaacaaaagacatatcaaaagtagcaggaaacccctttcacgaagactacacatcaggagatatgtttgtttacatttcaaaaataacaccacaagaaatgcaaaattacttaaaagacaacaaaccaccaccagaaacaagccgaagtataactcttgctggtgatattatttatacatttagatacaacccagacaacgacgatggttccactaataaacaatatatagtaagcacagcatcaggaaacaaaataaaaccaccagaaaacgaaaactttatattatcaggctttccattcccatacatgttatggggatggacagactggataaaaaaactaggagaaacaccacaatttgacacaaacaaactacttatactggaaacaaaagcatttgatgataaaactataccactgtttatacctattgacttaacatttattcatggatatgacccatatgaacccatagaagacaaaacacacaacataagtgcatacaatgcaaaaaactggtttccaagatatgaatatcaaaaaaaaaccataaatgacatatgcttagcaggacctgcgtgtccaagaccaccatgggatcactatttacaagctatatgtaaatataccatgtattttaaatgggggggttgtcctaaatctttacaaaaagcttataatccctgtttacagtctaaatggcccactcccgataacctctatggaagacctgcggtgcagaatcctaacatcttcccacaaacagaactgtactcctgggactgggaaaatgattatgttacaaaagcagctattgacagaatccgaagatttacagaaattgatccaaaaatgttctcaattacagaaatcaaaaacaacccaccggcgatccaaaaaaagaaaacaacagaagacgaagaagaggagaagaagctcaagctccagctccacaagctccgattcaacaaagtcctcctgcagctccaactccaacagcaattaaaatcactaaaagcaaaataaaagttaatatgtttgaagacccaaaacccaaaaatcgtagaatgactccctgggaaaaagaacaagaaaagcaagacgctgccatttggaaaagaccacaaagagactttattttagatatacctttttaccctggcattcccccaactccgcttgtaaactttgacttaaaatacaaatatgaataaacaaggccaacaataattcacttagtggtgtccatttatttaagtttaacttatataaacatccaccgcctccctataatttgggcgccaaaattcaaaagggggctccgcccccttacacccccaagggggctccgcccccttatacccccaagggggctccgcccccttacacccccaagggggctccgcccccttac

SEQ ID NO: 4142 - protein, 672 aa, Betatorquevirus sp.
MPPYRQSYYFKRNFYNNRRRRFRRRGVRKPFRRRYWRIQRKRKPRYKVNKFKFYKRKAKKITLKQFQPRTINKCKCIGYKCLFQGSPLRAMNNFVQYVYSIIPEKQPGGGGWSIQVLSLDSIFEDYEHLQCIWTKGNAGLPLVRYMGCKFTLYQSAETDYVFSYDNCWPMVDTIHTHADSAPFRMLQKKNKIVVPSMNTKKRRKPYKKVFVKPPPQMTNKWYFQKDICKTPLVMFTATAVSLGNPFADPRAKSNNVTIHCINPYLFQNPDFQHWGTQGYSPKMTDNATPLYLYASQIDNLTFETLKTNKNTIIALTNTKDHTPGIPLINNQTKDISKVAGNPFHEDYTSGDMFVYISKITPQEMQNYLKDNKPPPETSRSITLAGDIIYTFRYNPDNDDGSTNKQYIVSTASGNKIKPPENENFILSGFPFPYMLWGWTDWIKKLGETPQFDTNKLLILETKAFDDKTIPLFIPIDLTFIHGYDPYEPIEDKTHNISAYNAKNWFPRYEYQKKTINDICLAGPACPRPPWDHYLQAICKYTMYFKWGGCPKSLQKAYNPCLQSKWPTPDNLYGRPAVQNPNIFPQTELYSWDWENDYVTKAAIDRIRRFTEIDPKMFSITEIKNNPPAIQKKKTTEDEEEEKKLKLQLHKLRFNKVLLQLQLQQQLKSLKAK

SEQ ID NO: 4143 - protein, 123 aa, Betatorquevirus sp.; identical to SEQ ID NO: 2017

SEQ ID NO: 4144 - protein, 59 aa, Betatorquevirus sp.; identical to SEQ ID NO: 2018

SEQ ID NO: 4145 - DNA, 2654 bp, Gammatorquevirus sp.
cgggagcccgaggtgagtgcaaccaccgaggtctaggggcaactcgggctagggcagtctagcggaacgggcaagaaacttaaaatatattttattttacagatgcaaaacatctccagcaaagatttttttgtaccaacaccatacaaccaggaaacgaaaacacaaatatggatgtctcaaattgctgactctcacgataatatctgcaattgcagtcatccatttgctcaccttttgtcttccatatttcctcctggccaccaagatagggacctcactattaatcaaatactcgcaagggattaccaggataaatgcctttctggtggaagcgccgccggaggccatggtatggcaaattcaggtaccgaaggcggtttcaaaccaaaagaagaagatacagaagaagatttaccaggagaagaaatagaccaattactcgccgccgccgccgcaggcgaagacaccacaaggtaagaagaaaaaaaactaaaattcctgtactgcagtggcaaccagacagtattagaaaatgccacataaaaggacaaggtactctagtagttggagcagaaggaactcaaatgttctgctacacaaaagacaaatttaaatatgtacctcctaaaactccttatggtggaggctttggagcagaaaaatttactttagcctatctgtacgaagaatattctttccacaataatatatggactgctagtaacatatacaaggacctatgcagatacttatactgcaaatttattttttttagacatccagacacagactttgtaattaactacagcagacaaccaccatgggaactaaataaatacacatacccaagttgtcacccacaacaaatgctactagacaaacacaaagttgttatatttagtcaggctagtaaaccccatggaaaatataagtacacactcaaaataaaaccaccaaaacaactaatcacaaaatggttttttgcaaagcccttttcaaactatggcttactatttctaaaaggctcatccatgaatttaagatacagttacttaagtgcctctaatgaaaatatgctagttaacataagttctttaaatcctagttggtatataaatacagactgggcaagagctaggcaagacacacaagcttacctaccacaaactaatatgaaaagatctgtagcttacaaaaacaaaacaaaaagtggaagtgaaatagtcacagacatgaaacaagctgcatacacttcatatgatgtgagtgtaagctatcaagacggatggtttaataaaaactttcttagagcaatagaattagaatcacccagaggtaccaaactagctcaactacctttaaactatggtagatacaaccccactagagataaaggccaaggtaacaaaatatatattattagtacaatagcagatggctggggaccacctaccacagacaaaaatgtacttatagaagatttaccactttggcttggtttatatggctatgtttcttacttagaaaccattaaaccacctgattggctaaaatcatcagtaatagtactagtatctgatgctatttaccactcgggaacaccagttccttccactaaatgggtacccatagactcagactatatagatggcaataaaccatatgaccaatacataacaactacagaaaaaagcagatggtatccaagttacaaatggcaattaaaaactttaaatgctattgtagaatgtggcccatatgtacaacaatatagtgaagaaaaaaacagtacatgggaactaaaataccattataatttttactttaagtggggtggaccacaagttccaggacaagacattaaaaatccacaagaccttaacacctatgatgtacccgataagttcacaggcagaatacaaattaccaacccagccaaacaagctccagaaacaattttacagccgtgggactacagaaggggacagcttaaagaaacagctcttaaaagaatgctccaacacctcgaaactgattcagagtttgaatattttacagaagagagtccaaaaaagaaaaaacaaagacttggagcagccctcagagatccccaagaagcacagaaagaaacccaagcttgtctcctctcactctgcgaagaaaatacatgccaagacccacaagagaagacactcgagcagctcatccaccagcagcagcaacagcagcagcacctcaaattcaacatcatcaaactcctcctagacctaaaggaacaacagagaatgttacaactacagacaggaatattagagtaaccctaacaagatttaaatcaggatttgaaagagacacagaaaatgaattagctagagcatttttaagaccccctagactatttaaagaagacagcccattctatccctggctaccccaacctgtaccccttgtaaactttcaccttaattacaaattctaggcctacaatgttcacttagtggtgtatgtttaataaagtttacaccccaaaaaaaatataaaaaaaataattttgcagtataagtatctgcataggtccttgtatatgttacccgctagacggtgcagggaccggatcgagcggagcgaggaggtccccggctgcccatggg

SEQ ID NO: 4146 - protein, 667 aa, Gammatorquevirus sp.
MPFWWKRRRRPWYGKFRYRRRFQTKRRRYRRRFTRRRNRPITRRRRRRRRHHKVRRKKTKIPVLQWQPDSIRKCHIKGQGTLVVGAEGTQMFCYTKDKFKYVPPKTPYGGGFGAEKFTLAYLYEEYSFHNNIWTASNIYKDLCRYLYCKFIFFRHPDTDFVINYSRQPPWELNKYTYPSCHPQQMLLDKHKVVIFSQASKPHGKYKYTLKIKPPKQLITKWFFAKPFSNYGLLFLKGSSMNLRYSYLSASNENMLVNISSLNPSWYINTDWARARQDTQAYLPQTNMKRSVAYKNKTKSGSEIVTDMKQAAYTSYDVSVSYQDGWFNKNFLRAIELESPRGTKLAQLPLNYGRYNPTRDKGQGNKIYIISTIADGWGPPTTDKNVLIEDLPLWLGLYGYVSYLETIKPPDWLKSSVIVLVSDAIYHSGTPVPSTKWVPIDSDYIDGNKPYDQYITTTEKSRWYPSYKWQLKTLNAIVECGPYVQQYSEEKNSTWELKYHYNFYFKWGGPQVPGQDIKNPQDLNTYDVPDKFTGRIQITNPAKQAPETILQPWDYRRGQLKETALKRMLQHLETDSEFEYFTEESPKKKKQRLGAALRDPQEAQKETQACLLSLCEENTCQDPQEKTLEQLIHQQQQQQQHLKFNIIKLLLDLKEQQRMLQLQTGILE

SEQ ID NO: 4147 - protein, 125 aa, Gammatorquevirus sp.
MQNISSKDFFVPTPYNQETKTQIWMSQIADSHDNICNCSHPFAHLLSSIFPPGHQDRDLTINQILARDYQDKCLSGGSAAGGHGMANSGTEGGFKPKEEDTEEDLPGEEIDQLLAAAAAGEDTTR

SEQ ID NO: 4148 - protein, 113 aa, Gammatorquevirus sp.
LSPLTLRRKYMPRPTREDTRAAHPPAAATAAAPQIQHHQTPPRPKGTTENVTTTDRNIRVTLTRFKSGFERDTENELARAFLRPPRLFKEDSPFYPWLPQPVPLVNFHLNYKF

SEQ ID NO: 4149 - DNA, 2654 bp, Betatorquevirus sp.
cccccaagggggctccgcccccttacacccccctaggggcaattcgggctagatcagtctggcggaacgggcaagaaacttaaaataaatttattttacagatatgttctcttcatggaagaatcctacatcctcacagagacagaaagaactccaatggattggcatcattaactctacacacgaccaaatttgccactgcgacgacccaacattacacctactttactgcctcaacaaattctctggatttaacaaaccagaattggatataaataatataaaatgcctccttaccggccctactaccaaaactacagaagaaaatacttccgaaaaagaagaaacaggttttatagaaggggagttagagcgacttttcgacgaagacaatggagaagaaaaagaaaatacaagcccaaatacaaggtaaagaaatttaaattttataaaaaaaagaagaaatcaattatactaagacagtttcaaccaactgctattaacaaatgtaaatgcatagggtttaaatgcttactacaaggatctatattaagagctatgaataactttgtacaatatatttactcatttgtacctgaaaagcaaccagggggtggcggatggagtattcaaatactaagtttagactctgtatacgaagactaccaacacttacaatgcatttggactaaaggaaatgcaggcctaccattagtaagatatctaggaacaaaatttacactataccaatcacaagaaacagactacgtattcaaatacgacaactgctggcccatggtagacaccatacacacacacgcagactctgctccatttagaatgctacaaacaaaaaataaagtagtagtacccagcataaacaccaaaaaaaggagaaaaccatataaaaaagtatttgtacgcccaccagcacaaatgacaaacaaatggtactttcaaaaagaaatatgcaaaacaccactcgtaatgtttacaacaactgccgtctcactaacatttccatttgctgatccaaaagctaaaagcaataatgtaacagtactctgtataaacccatacatttttaaaaaccctgactttcaacactacggaactacagggtattcacctaaatccaataatgacggaacgccattatacttatacggcagcaatcaacccaatgttacttatgaaatattaaaatcaagcagccaaaaaccgctgataacagcattagtagacacaaaaaaccacacaccaggaacaccactaaataactcacacaaccaaagtatagataaacttgccggaaacccattccatgaggaatggaccagcggagatcaatacatatacttttcactaatgacacccacagaaatgagaactcttataacacaaaataaagaaccacttgatactaaaagacgatccatcacaaacacgggtgaaattatttacacattcagatataacccagacaaagatgatggatccaccaacaaacaatacattgttagcacatcttcaggacgaataatacaaccaccagacaatgaaaaccacatactatcaggctttccatttccatacatgctatggggatggacagactggataaaaaaactaggagaaacaccatcattcgacacaaacaaactagtagtacttgaatcaaaagcctttaacgataccactattccattatttattccaatagacccacaatttgcacacggctttgacccatactcagacatgaatgaaccaaaccacactatctcaccttacaatgccaaaaactggtttcctagatatgaatatcagaaatatacaataaatgaaatatgtttatctggacctgcgtgtcctagaccaccttggaatcactatttacaagccttatgtaaatatactatgtattttaaatggggaggatgtcctaaaaacctacaaaaagcttataatccttgttcacagtcaatatggcccacgcccgataacaagtatggacgatctgaggtgcagaatcctaacatcttcccacaaacagaactatactcatgggactggcaaaaagactatgttacagaagaagctattaaaagaatcaaaagatatacagacattgatccaacaatattctcagttacaggaccaaagtcaaacccgccaccactcaaaaagatcaagaaacaagacgaagaagaagaggaggagaagaaactccagttccagctccacaagctgcgattccagaaagtcatcctccaactccagctccagcagcaattaaaatctataaatcaaaaataaaagtaaacttatttgaacccacaaaaccaaaaaataggagaatgacaccaagagaaaaagaagaagaaaaactagacgcagcaatatggaaaagaccacaaagagactttatactcgatatacctttctaccctggtataccccctaccccactagtaaactttgacttaaaatacaaatatgaataaacaaggccaacattaattcacttagtggtgtccatttatttaagttcaacttatataaacatccaccgcctccctgaaattcgggcgccaaaatttaaaagggggctccgcccccttcaacccccaagggggctccgcccccttaca

SEQ ID NO: 4150 - protein, 677 aa, Betatorquevirus sp.
MPPYRPYYQNYRRKYFRKRRNRFYRRGVRATFRRRQWRRKRKYKPKYKVKKFKFYKKKKKSIILRQFQPTAINKCKCIGFKCLLQGSILRAMNNFVQYIYSFVPEKQPGGGGWSIQILSLDSVYEDYQHLQCIWTKGNAGLPLVRYLGTKFTLYQSQETDYVFKYDNCWPMVDTIHTHADSAPFRMLQTKNKVVVPSINTKKRRKPYKKVFVRPPAQMTNKWYFQKEICKTPLVMFTTTAVSLTFPFADPKAKSNNVTVLCINPYIFKNPDFQHYGTTGYSPKSNNDGTPLYLYGSNQPNVTYEILKSSSQKPLITALVDTKNHTPGTPLNNSHNQSIDKLAGNPFHEEWTSGDQYIYFSLMTPTEMRTLITQNKEPLDTKRRSITNTGEIIYTFRYNPDKDDGSTNKQYIVSTSSGRIIQPPDNENHILSGFPFPYMLWGWTDWIKKLGETPSFDTNKLVVLESKAFNDTTIPLFIPIDPQFAHGFDPYSDMNEPNHTISPYNAKNWFPRYEYQKYTINEICLSGPACPRPPWNHYLQALCKYTMYFKWGGCPKNLQKAYNPCSQSIWPTPDNKYGRSEVQNPNIFPQTELYSWDWQKDYVTEEAIKRIKRYTDIDPTIFSVTGPKSNPPPLKKIKKQDEEEEEEKKLQFQLHKLRFQKVILQLQLQQQLKSINQK

SEQ ID NO: 4151 - protein, 109 aa, Betatorquevirus sp.; identical to SEQ ID NO: 27

SEQ ID NO: 4152 - DNA, 2654 bp, Gammatorquevirus sp.
cgggagcccgaggtgagtgaaaccaccgaggtctaggggcaattcgggctagggcagtctagcggaacgggcaagaaacttaaaatatattttattttatagatatgcagaacctgtgtgcagcagacttctacaaaccaactccatataacacagatacaaaaaaccaaatatggatgtcacaaattgctgatggacatgacaatttctgtaactgcaatagtccttttagtcacctgcttgcttctatttttcctcctggtcatactgacagggataaaacaattactcaaatacttattagagattacaaagaacaatgccattctggtggagacgcagaaaaaagttctggtatggcaggcgcaggaggagaccattgtataaaagaagaaaaagaagattcagacgccaatatagacgccctgctcgccgccgcggccgccgccgcagaagaagacgaaaggtaagaagaaagaagcaaaaaataactcttaaacaatggcaaccagatagaattgttaaatgtaaaattaaaggactgggttgtttagtagcaggagcagaaggaagacaatatcaatgttacactgatgatatagatgaataccctcctcctaaaacacctggaggaggtggctttggcatagaagtatatactttacaatacctatataagcaatgggtagccagaaaaaacatatggactagatctaatgactacactgatctctgtagatacactggcactaaaataactgttatgagacaccccacaacagactttgtagtagcatacaatagaatgcctccatttcacttacaaaaagacacttaccttttatgccatcctgttaacctattactatcaaaacatcacaaagttatcttaagcaggcaaaaccatcctacaggaaaaaattctgtttcatttaaaattaaacctcccaaacttatgataacaaactggttttttcaaagagaattttgtactaaagaactatttgaacttagagcagcagcatgcaatatgggatattcatactatggtcccaatactcaaagcagacttttaactttttttagcttaaatgtaaacttctttcaaagacataactgggcaaatgcctctgtagagggtggacatggctatataccatatcctggatatccacttacatcaacagtaacttacaaatacaaaaatgctaaaggagaatcccaaacctacgagatggctccacccaaaacttataccgacacagtaaactatacaacaggcttttttaacagcagggtattatctgcatatgaagtatcagtaaaaccaacaggtaaaactcacacaacacctttaacacttgccagatacaatccagatctagacaatggaaaggacacttacatatggctagtcagcactgttgcaaatagcaactggcaaacaccaaaagatgcagaccttgtagtagctggatacccactatggatgggcttttatggcctgtggaattatttagaaagacttaaaaaattagaatacattaccactggcttatttgttgttaaaagcccagcaattaaacttattagtgcccaagagcaaactatatttccaatattagactccaactttgtcaatggtaaaatgaattgggaccaattgctaacagatcaacaaatgaaactatggtaccctacaggcctatttcaacaacaaataattaacagttttatacagtgtggcccatacataccaaaatactccaatttaaaatcaagtacctgggagttaacatataaatatacctcttactttaagtggggaggtccagaacttacagatcaacccgttcaagatccgtcccccaagacagaatatgatatcaccgataacatccaaggcacagtacaaatccaagacccgctcaaacaaaaataccaacaactccttagagcatgggacatcagacgcggcacatttacaaaaacagctcttaaaagaatgtacgaaaacctcgaaactgatgagtctatctgctctcatgaaacagaacctacaaagaaaaagaaaaagacagcaccacagctcaaactcccacaagaagaaaaccaagaaatcaaccaagcactcctctcactctgcgaagaaagtacatgccaagagcaagacctccacaagctcatccagcaccagcaacagcagcagaagcagctcaggagagacctcatcgacatcatcttagacctgaaaaacaaacagagaattctacaacttcaaacaggcctaagttaacacctttcaaaccaggctttgaaactgaaactgaacaacagttagcacaagcatttaaaagacccccaaggctttttaaagaagatacacccttttatccttggctacccagacctgtaccccttgttaactttcaccttaactttaaattctaggcctacaatttacacttagtggagtatgtttatatagtttacaccccaaaaaaattgtaaaataaaaaaaaaaaaaaaaaaataaaaaattgcaaaaattcggcgctcgcgcgcgctgcgggtgacgaatggctgagtttaccccgctagacggtgcagggaccggatcgagcgcagcgaggaggtccccggctgcccgtggg

SEQ ID NO: 4153 - protein, 658 aa, Gammatorquevirus sp.
MPFWWRRRKKFWYGRRRRRPLYKRRKRRFRRQYRRPARRRGRRRRRRRKVRRKKQKITLKQWQPDRIVKCKIKGLGCLVAGAEGRQYQCYTDDIDEYPPPKTPGGGGFGIEVYTLQYLYKQWVARKNIWTRSNDYTDLCRYTGTKITVMRHPTTDFVVAYNRMPPFHLQKDTYLLCHPVNLLLSKHHKVILSRQNHPTGKNSVSFKIKPPKLMITNWFFQREFCTKELFELRAAACNMGYSYYGPNTQSRLLTFFSLNVNFFQRHNWANASVEGGHGYIPYPGYPLTSTVTYKYKNAKGESQTYEMAPPKTYTDTVNYTTGFFNSRVLSAYEVSVKPTGKTHTTPLTLARYNPDLDNGKDTYIWLVSTVANSNWQTPKDADLVVAGYPLWMGFYGLWNYLERLKKLEYITTGLFVVKSPAIKLISAQEQTIFPILDSNFVNGKMNWDQLLTDQQMKLWYPTGLFQQQIINSFIQCGPYIPKYSNLKSSTWELTYKYTSYFKWGGPELTDQPVQDPSPKTEYDITDNIQGTVQIQDPLKQKYQQLLRAWDIRRGTFTKTALKRMYENLETDESICSHETEPTKKKKKTAPQLKLPQEENQEINQALLSLCEESTCQEQDLHKLIQHQQQQQKQLRRDLIDIILDLKNKQRILQLQTGLS

SEQ ID NO: 4154 - protein, 121 aa, Gammatorquevirus sp.
MQNLCAADFYKPTPYNTDTKNQIWMSQIADGHDNFCNCNSPFSHLLASIFPPGHTDRDKTITQILIRDYKEQCHSGGDAEKSSGMAGAGGDHCIKEEKEDSDANIDALLAAAAAAAEEDER

SEQ ID NO: 4155 - protein, 102 aa, Gammatorquevirus sp.
LRRKYMPRARPPQAHPAPATAAEAAQERPHRHHLRPEKQTENSTTSNRPKLTPFKPGFETETEQQLAQAFKRPPRLFKEDTPFYPWLPRPVPLVNFHLNFKF

SEQ ID NO: 4156 - DNA, 2653 bp, Betatorquevirus sp.
caggtaccgaaggtgagtgaaaccaccgtagttaaggggcaatatgggctgaagcagtctggaggaccgggcaagaaacttaaatatatatttaatttacagatatgagcaactttctaacaccagcagtttacagcaaaaatggccttgaaaactgctggttaaactgcatttggaacacacacgaccttatgtgcggatgtaacaacgccattaaacatctttttgacatcttaaaaaaaagaagtgaactaccatgcctcccttcaacttctaccgaagacgctggcgtccaaactggagatggagacgaagaagacgttttacaacaaggagacttagacgccctcttcgcagacgattttggagacgacactgggtaagaagacgctactttactaaaaaaagaaaaagaaagcttaaaaaaattagactacaccaatggcaaccagaccagattaaaaaatgccacattaaaggacaattatgcttactaacctgcggcaaaggaaaaattaataataactttactctaactgctgaaagctatgtacctaccaaagaatcgggagggggagcatggagtataatgcaattaacattaagagctttgtatgatgaatatttacattttagaaactggtggacaacaagtaattgtggcttatctttaattagatatataggagtaactgtaaaattttataaaagtaatgattgtgactatattgtaactgtacaacacacaggaccatttgaagtaactagagacatttatttaagcacacaacccagcagacacatgatgaatcataaaagctttatagtaccaaaactaaatcctaacaaaaaaaaaagaccatacataaaaaaaagattttatccacctgctatgtggcaaaacaaatggtactttcaacaagacatatttaatcacccacttatactctttatagtaagtgcatgcagcctagatcaaatgtactgccccaacgacggagtaagtacaaatataacatttttatcactaaacacagacctttttcaaaacccacattgggaattagatgacgaacaaccttactacccaaaagtaacaggaacagcaaacacaggactatttactttatataatggagaaaattatgaaaccaaactcaattggcaaaaaataatacttttaggaaacacaactcaatttaaaatcatagatcatagacagcaacaaaccataaacacattggcagaatataacaaaaaacaaaactggggaaacccattttcaataacacacatagacggacacgaatctatacaaatatactatggaacaccaccaacaacaaacaattataattcaaagccaaacatactacccataacaggactataccaagaatgcagatataatccatttcgagacaaaggcaaaaacaacaaagtgtacataaaatcaacaaaaacatttcaaggatcctttacttcactaccaacagacgaaagactattagtgcaagacatgccactatggttaatattctggggatggcaatcatggctacaaaaatctacacctgtacatcacttattagaaaactaccaatttgttattcaatcagattacatatacccaccaatgaaaagctatgtaccactagatgcatactttactacacaacaaaaaacaccattaacagaaacagacaaacaacattggcacccaaaagcagaatttcaacaagaagtaatggctgcctttgccgctacaggcccagcagcaccaaaaataaacaaacaaaaccaaatacaaatacactgtttttatgatttttattttaagtggggaggatgcccaacacccatggaaacagtctgtaacccagcagaccaagaaaagttccccacgcccaataacctcatacaagaacctacaatcgagaatccagaaacaccaaaagaattctatttgtacaaattcgacgagcgacagggatttattacagcaccagctgcaaaaagacttaaaacagacattgaaacttcaaaatattttacagaatatggaacaagagacccaatactcgaagtcttcccaccgacggaccaaacacaaaagaaaaagaccacggaagaagaaaaagacccgctacagctccagctccagcagctccagctctaccagcaacacctcagagaacgaatcaacagattaaccaaacgttcaaaattattccctatactgtagatatgtttggacaaactaaaaataaaaaccgtagattaactgcaaaagaaagagcagatgacttagaagatgctataatatggggcagataccctagaacctataaaaatgaaagttactattacaaagatatgaatattgaaccccttgtaaacttttcattaaactttaaattctaagccagcaaatattcacttgtcggtgtccatttatttaagtttaaacttatacaaacatccaccacttctccctaatacgcaggcgcaaagggggctccgcccccttaaacccctagggggggcaaagccccccctaaccccccagggggctacgccccctaacaccccctaattaatattcaacaggaaaaccacctaattagaattgccgaccacggctgcttcaggg

SEQ ID NO: 4157 - protein, 662 aa, Betatorquevirus sp.
MPPFNFYRRRWRPNWRWRRRRRFTTRRLRRPLRRRFWRRHWVRRRYFTKKRKRKLKKIRLHQWQPDQIKKCHIKGQLCLLTCGKGKINNNFTLTAESYVPTKESGGGAWSIMQLTLRALYDEYLHFRNWWTTSNCGLSLIRYIGVTVKFYKSNDCDYIVTVQHTGPFEVTRDIYLSTQPSRHMMNHKSFIVPKLNPNKKKRPYIKKRFYPPAMWQNKWYFQQDIFNHPLILFIVSACSLDQMYCPNDGVSTNITFLSLNTDLFQNPHWELDDEQPYYPKVTGTANTGLFTLYNGENYETKLNWQKIILLGNTTQFKIIDHRQQQTINTLAEYNKKQNWGNPFSITHIDGHESIQIYYGTPPTTNNYNSKPNILPITGLYQECRYNPFRDKGKNNKVYIKSTKTFQGSFTSLPTDERLLVQDMPLWLIFWGWQSWLQKSTPVHHLLENYQFVIQSDYIYPPMKSYVPLDAYFTTQQKTPLTETDKQHWHPKAEFQQEVMAAFAATGPAAPKINKQNQIQIHCFYDFYFKWGGCPTPMETVCNPADQEKFPTPNNLIQEPTIENPETPKEFYLYKFDERQGFITAPAAKRLKTDIETSKYFTEYGTRDPILEVFPPTDQTQKKKTTEEEKDPLQLQLQQLQLYQQHLRERINRLTKRSKLFPIL

SEQ ID NO: 4158 - protein, 92 aa, Betatorquevirus sp.; identical to SEQ ID NO: 3017

SEQ ID NO: 4159 - protein, 58 aa, Betatorquevirus sp.; identical to SEQ ID NO: 3018

SEQ ID NO: 4160 - DNA, 2652 bp, Alphatorquevirus sp.
ggacccccgctcgtgctgacacgcttgcgcgtgtcagaccacttcgggctcgcgggggtcgggaattttgctaaacagactatggcgctggaggccccgccgctggcggcgccgtcgcagacgccgagtaccaagacgacgagctaaacgccctcttcaacgccgtggaagaagagtaaggaggaggcgatgggggaggcggaggtggagacgggggtacagacgcagactgagactgagacgcagacgcagacgcagaaaaaaaatagtactgactcagtggaaccccgccaaggtcagaaaatgtactataaggggcgtcctgcccatgatcctggccggcgcgggtcgctttgctttcaactacggactgcacagcgacgacataactgtccaaaaaccccttaaccagaacccccacgggggcggcatgagcactgtaacttttagcctgcaggtgctgtacgaccagcaccaaagattcctaaaccagtggtcgtaccccaacgaccaactagacctagccagatacaagggctgctcctttagcttttacagacacccagaagtagactttatagctcagtttgacaacgttccccccatgaaaatggacgaactgacagctcccaacactcaccccgctctgctgctacagagtaagaaaaaagttaaaatatatagctggaaaactagaccttggggcaaaaagaaaattactgttagaatagggccccccaagctgtttgaggacaagtggtacagccagcacgagctgtgcaaagtgccccttgtcagttggcggttaaccgcagctgacatgcggtttccgttctgctcaccacaaactgacaacccttgctacaccttccaagtattacatgaacagtactatactgtaataggcacttccgcattagacacccccacaaacagcgactactctgaatttgaaacatggctatatggcaaatgcacccactatcagacctttgccacagacacacgactggcccctcaaactacatctaaatatgcccctaatggcacatcattaggaacatctgacattaaatgggaccaaagtacatttaacacttttaaaacaaaggcagacagcaactatggctactgtacttacaaccccagtcctgatgcagttgcaaaaattaaacagtacagaaaccagagattttcctggctaacaaattacactggaaacaatcacatcaattccacatttgcaaagggcaaatacaaagaatacgagtaccacctaggctggtactcaaacatatttttaggcaacctcagacacaacctagccttcaggcctgcgtacttagatataacctacaaccccatagtagacaaaggccaaggaaacaaagtatggtttcagtacttaacaaaacccaccacagaatttaaaccagaacaggccaaatgtgtcatagaaaaccttccactttactgcgccttttttggctacgaggactacctacaaagaaccctgggaccataccaggacgtagagacagtgggcatagtgtgctttatatgcccctacacggagcccgcctgcgtcaacaaaaacgaaggcaaatctaactggggctacgtgttctacgatgttaactttggaaatggcaaaacaccagagggcctaggacaagtacacccgtactggatgcagagatggagggtgtactctcagtttcaaaaagaaaccatgaacagaatatgcagaaccggaccgttcagttacagagacgaacaccctagcataaccctgaccgccagctacaagttccactttaactgggggggcgactctatatttccacagattatcaaaaacccctgcccaagctcagccgttggccccggtccccgtagacagcctcgcgacgtacaagtcgttagcccgctcacaatgggaccggaattcatattccactcctgggactggcgacggggcttctataattcaaaaactctcaaacgaatgcttgaaaaatcaattgatgatgcagaatatccaacaggcccaaaagtgcctcgatggctacctcccgtcgacaaccaaggccgagaagaaggctacacttcggagagacagagctcggagtcctcggaagaagaagcagatcaagaagccctcaaagagatccaggaggcgccggtccagcagttcctcctccaacagtaccgacagcagcgaaaactcggaaaacagctccagttcgtcatgctacaactcaccaaaacgcagagcaatctgcacgtaaatccccggttccttggccatgcataaataaagtatacatgtttcccccagagaaaccaatgcccatacacgggtaccacgggtgggagacagagtatcaggcctgcaaagcctttaacagaccccctagaaactacctatcagacaaacccatctatccctggctgccccgctcccaacctcagtttaaagtcagttttaagcttggttttcaataaacaaggccgtgggaatttcacttgtcggtgtctacctcttaaagtcactaagcactccgagcgtcagcgaggagtgcgacccttccccctggtgcaacgccctcggcggccgcgcgctacgccttcggctgcgcgcggcacctc

SEQ ID NO: 4161 - protein, 749 aa, Alphatorquevirus sp.
LLNRLWRWRPRRWRRRRRRRVPRRRAKRPLQRRGRRVRRRRWGRRRWRRGYRRRLRLRRRRRRRKKIVLTQWNPAKVRKCTIRGVLPMILAGAGRFAFNYGLHSDDITVQKPLNQNPHGGGMSTVTFSLQVLYDQHQRFLNQWSYPNDQLDLARYKGCSFSFYRHPEVDFIAQFDNVPPMKMDELTAPNTHPALLLQSKKKVKIYSWKTRPWGKKKITVRIGPPKLFEDKWYSQHELCKVPLVSWRLTAADMRFPFCSPQTDNPCYTFQVLHEQYYTVIGTSALDTPTNSDYSEFETWLYGKCTHYQTFATDTRLAPQTTSKYAPNGTSLGTSDIKWDQSTFNTFKTKADSNYGYCTYNPSPDAVAKIKQYRNQRFSWLTNYTGNNHINSTFAKGKYKEYEYHLGWYSNIFLGNLRHNLAFRPAYLDITYNPIVDKGQGNKVWFQYLTKPTTEFKPEQAKCVIENLPLYCAFFGYEDYLQRTLGPYQDVETVGIVCFICPYTEPACVNKNEGKSNWGYVFYDVNFGNGKTPEGLGQVHPYWMQRWRVYSQFQKETMNRICRTGPFSYRDEHPSITLTASYKFHFNWGGDSIFPQIIKNPCPSSAVGPGPRRQPRDVQVVSPLTMGPEFIFHSWDWRRGFYNSKTLKRMLEKSIDDAEYPTGPKVPRWLPPVDNQGREEGYTSERQSSESSEEEADQEALKEIQEAPVQQFLLQQYRQQRKLGKQLQFVMLQLTKTQSNLHVNPRFLGHA

SEQ ID NO: 4162 - DNA, 2652 bp, Gammatorquevirus sp.
cgggagcccgaggtgagtgaaaccaccgaggtctaggggcaattcgggctagggcagtctagcggaacgggcaagaaacttaaattatttttttattacagaatgaacagcttgactcctactgacttttaccaaccaacaaaatacaatcctgaaactttaaatcaaatatggatgtctacactgagtgacacccatgacatttggtgcgactgcaaaggtccttttgctcatctgcttgcttctatttttcctcctggtcatacagaccgtgataaaacaattaatcaaattattaaaagagactacaaagaagcatgcctttctggtggtccaggagaaaaaagccatggtatacaaactacagccggtacagacgcaggtataaaagaagaagatggcctagaaggagacgcagaagaattccttatggccgccgccgccgccgccgcagaagaaaaagaaaggtaagaagaaagagacaaagaattattgttaaacaatggcagccagaatcaatagttaaatgtaaaattaaaggcttgggttgtttagtagctggggcacaaggcagacagccattttgctataccaacagtaaatatgactaccctcaaccaaaagccccgggcggcggtggctttggagcagaactattctcactgcaatatttatatgatgaatgggtagccagaagaaacatatggactaaaagtaatgactataaagacttagtaagatttctaggggctaccttttatttatataaacacccaactacagactttatatttaactacaataatcaacctccatttttacttgagaaagacttttacaatgatttacacccacaaatgttacttcttgctaagcatcacagagtaataccaagcagagagagaaagccactaggcagaccatatattaaagttaaaataaagccacccaaacaaatgttaactaaatggttttttcaacaagactttgccaaacaaggactattttctatacacgcagctgctgcaaatatgcagtgggcatatttcaatccagaccaacaaagcagatgtcttactctgcactcactcaatataaaattttttcaaaatacagactggagtgcaacacacacaggtacacaaatgtattttccatacaatgcatggccccacacctccgggttaactttttggaccattgattcaaaaggcaataaaacacctcatgtaataaaacctcaaacctatcatgaaagtgttaactatttaaaaggatttttttcacaatttgtactacaagcccaaaaaataacaacagcaaaagaagttgacccaaaagaatatgataattatccagcagcaatgtcaacattaccaatagctacttttagatataatcctgaagaagacacaggccaaggcaatgtagtatggttaactagcaccctatccaacacacattgggaaagaccacaactatctgacttagtaattgttggaaaaccattgtggctagcattttatggctttgaaagttttatacaaaaaactaaacatgacaaaggatggctactatcaggaatttatgtatgtaaatgcccctacttaaaaacactgtcagccacaacacaacaaacatatgtatttattgacttagattttatacaaggcaaactaccatatggagaaacaatcacaaatcaaaaaaaagctctttggtaccccaatgtagaaaaccaagtgaacactgtagctaacttagtacaatgtggaccatacataccaaaatatgcttttcaagatcaaagcacatgggaactaacatataaatatattttttattttaagtggggaggtccttacacctcagaccagcctgttcaaaatcccacaacacaaggaaaataccctgtacccgatacaatcccacaagcaatacaaattagcaacccgctcaaacaaacctgtaaagcaatgcttagagactgggattacaggagggggattgttacaacaacagctcttaaaagaatgtcagaacacctccaaactgattcatctatccaatctgatgactcagaaactccaaaaaaaaagaaaaagacaacagcagaaataccctactaccaagaaaagacggaagagatccagagttgtctcctctcactcttcgaagaaagtacatgccaagaaccagaagacctccagcagctcatccttcaccagcagcagcagcagcaaaagctcaagtcaaacatcctcaaactcctaatggatttaaaacatcaacagagaattctacaacatcacacaggcatagaatgactgaatttaaacctggatttgaacaagaaacagaagaacagttagcacaagcatttaaaagaccagtgagaaaatttaaagaagaccccccattttacccctggttaccaattacaccaattgtatactttaaccttaactacaaatgctaggccgacactgttcacttagcggtgtctgtttaataaagtttgcaccccaaaaaaattgtaaaaaaaaaaaaaaaaaaaataaaaaattgcaaaaattcggcgctcgcgcgcgcccgctagacggtgcagggaccggatcgagcacagcgaggaggtccccggctgcccgtggg

SEQ ID NO: 4163 - protein, 669 aa, Gammatorquevirus sp.
MPFWWSRRKKPWYTNYSRYRRRYKRRRWPRRRRRRIPYGRRRRRRRRKRKVRRKRQRIIVKQWQPESIVKCKIKGLGCLVAGAQGRQPFCYTNSKYDYPQPKAPGGGGFGAELFSLQYLYDEWVARRNIWTKSNDYKDLVRFLGATFYLYKHPTTDFIFNYNNQPPFLLEKDFYNDLHPQMLLLAKHHRVIPSRERKPLGRPYIKVKIKPPKQMLTKWFFQQDFAKQGLFSIHAAAANMQWAYFNPDQQSRCLTLHSLNIKFFQNTDWSATHTGTQMYFPYNAWPHTSGLTFWTIDSKGNKTPHVIKPQTYHESVNYLKGFFSQFVLQAQKITTAKEVDPKEYDNYPAAMSTLPIATFRYNPEEDTGQGNVVWLTSTLSNTHWERPQLSDLVIVGKPLWLAFYGFESFIQKTKHDKGWLLSGIYVCKCPYLKTLSATTQQTYVFIDLDFIQGKLPYGETITNQKKALWYPNVENQVNTVANLVQCGPYIPKYAFQDQSTWELTYKYIFYFKWGGPYTSDQPVQNPTTQGKYPVPDTIPQAIQISNPLKQTCKAMLRDWDYRRGIVTTTALKRMSEHLQTDSSIQSDDSETPKKKKKTTAEIPYYQEKTEEIQSCLLSLFEESTCQEPEDLQQLILHQQQQQQKLKSNILKLLMDLKHQQRILQHHTGIE

SEQ ID NO: 4164 - protein, 122 aa, Gammatorquevirus sp.; identical to SEQ ID NO: 3702

SEQ ID NO: 4165 - protein, 107 aa, Gammatorquevirus sp.; identical to SEQ ID NO: 3703

SEQ ID NO: 4166 - DNA, 2652 bp, Betatorquevirus sp.
ggctccgcccccttacaccccaccaccgtagtctaggggcaattcgggctagatcagtctggcggaacgggcaagaaacttaaatagtataattgttttacagatatgttctcatcgtggaagacacctacatgttcaaagagacaacaagaactacaatggataaacattgttaactcctgccacgaccaaatctgctactgtgacaacccaactttccacctgctttactgcttaaacaaattttcaggattccaaaagccagaagaagatattaaaaatatacaatgcctccttaccggccctactattactaccgaaaccgctggagaaaccctagaagacgccggcatactagaaggggagttagaaaaccttttcgccgaagatactggagaagaaaaagaaaatacaaccgaaaattcaaggtaaaaaaacttaaattttctaaaaggaaaaaaaaatctattattatgagacaatttcaaccttatacaattaacaaatgtaaatgcattggatataaatgcttatttcaaggatctcctcttagaactaacaataactttatacaatatatatactcttttatacctgaaaaacaaccagggggaggaggatggagcattcaagtattaagtttagactctatatatgaagactatcaacatttacaatgtatatggactaaaggcaacgctggtttacctttagtaagatatatgggatgcaaatttactttataccaatcagaatcaacagattacatatttaagtatgataactgctggcctatggtagacactgttcacacacacgcagactctgcaccatttagaatgctacaaacaaaacacaaagtagttgttcccagcacttctacaaaaagaagaaagaaaccatataaaaaaatctttgttaaacctccagcacaaatgttaaatagatggtactttcaaaaagaaatatgcaaaactccactagtaatgttcactgctacagctgtttctttaacaaacccctttgcaaaccctagagctacaagcaacaatgtaacaatttactgcataaatccatatatattccaaaaccctgacttccaacactatggtacacaaggatactcaccaaaaaatgcaacagacgacaacatgcctttatatttatacgcaagcacagatgccaacattacatacgacaagttaaaatcagaaagaaacaaaccacaagtaatagcacttatagatacaaaaaatcacacaccaggaacaccacttaacaatctacaagagaacgaaatttccacccacagtggaaatccatttcacgaagactacacagacccagaaagctacacaatatacttctcaaaaatgacacctacagaagtatataacttaataaaacaaaacactgaaccaaaaattcaaaaagtaaaaagcataactgccactggatcaataatatatacatttagatacaacccagataatgacgatggaagtacaaacaaacaatacatagttagcacttcatcaggaaacaaaatcagaccaccagacaatgcaaattttatactagaaggatttccatttccatacatgctatggggatggacagactggataaaaaaacttggagaaacaccatcatttgacacaaacaaattagtagtactagaaacaaaagccttcgatgataaaacaataccatactttataccagtagatccacaatttatacatggatatgatccctatgaaaaaatagaagacaaaacacacactatatcaccatacaacgctaaaaactggtttccaagacatgaataccaaaaactaactataaaccaaatatgtttatcagggccagcctgtcccagaccttcctgggaccattatttacaagcaatatgtaaatacactatgtactttaaatggggaggctgtcctaaaactctacaaaaagcatataatccttgttcacagtccatttggcccacgcccgataacaagtatggaagatctgaagtgcagaatcctaacatcttcccacaaacagaattgtatgcctgggactgggaaaaagactatgttacagagtcagctatccaaagaatacaaagatttacagaaattgatccaacaaacttctcatctacaggaagcaaagcaaatccaccgccactccaaaaaacaacgaaacaaaacgaagaagaagaggaggagaagaaactcaagctccagctccacaagctccgattcaacaaagtcctcctccagctcaaactccagcaacaattaaaatctataaaaacaaagtaaacgttttactttttccaccagacaaaccacaaaaccgaagaatgacaccatgggaacaagaacaagaaaaagaaattgcagctttattttgcagaccccaaagaacttttttgcacgataaaccaacatatcccttttttcctcctgcaccaaaaatacctaaaataaactttgacttaaactacgactttaaataaaaaaggccaacataaattcacttagtggtgtctgtttctttaagtaaaaccttaataaacatccaccgcctccctaaaattcgggcgccaaatttaaaaaagggggctccgcccccttacacccccaaggg

SEQ ID NO: 4167 - protein, 678 aa, Betatorquevirus sp.
MPPYRPYYYYRNRWRNPRRRRHTRRGVRKPFRRRYWRRKRKYNRKFKVKKLKFSKRKKKSIIMRQFQPYTINKCKCIGYKCLFQGSPLRTNNNFIQYIYSFIPEKQPGGGGWSIQVLSLDSIYEDYQHLQCIWTKGNAGLPLVRYMGCKFTLYQSESTDYIFKYDNCWPMVDTVHTHADSAPFRMLQTKHKVVVPSTSTKRRKKPYKKIFVKPPAQMLNRWYFQKEICKTPLVMFTATAVSLTNPFANPRATSNNVTIYCINPYIFQNPDFQHYGTQGYSPKNATDDNMPLYLYASTDANITYDKLKSERNKPQVIALIDTKNHTPGTPLNNLQENEISTHSGNPFHEDYTDPESYTIYFSKMTPTEVYNLIKQNTEPKIQKVKSITATGSIIYTFRYNPDNDDGSTNKQYIVSTSSGNKIRPPDNANFILEGFPFPYMLWGWTDWIKKLGETPSFDTNKLVVLETKAFDDKTIPYFIPVDPQFIHGYDPYEKIEDKTHTISPYNAKNWFPRHEYQKLTINQICLSGPACPRPSWDHYLQAICKYTMYFKWGGCPKTLQKAYNPCSQSIWPTPDNKYGRSEVQNPNIFPQTELYAWDWEKDYVTESAIQRIQRFTEIDPTNFSSTGSKANPPPLQKTTKQNEEEEEEKKLKLQLHKLRFNKVLLQLKLQQQLKSIKTK

SEQ ID NO: 4168 - protein, 108 aa, Betatorquevirus sp.
MFSSWKTPTCSKRQQELQWINIVNSCHDQICYCDNPTFHLLYCLNKFSGFQKPEEDIKNIQCLLTGPTITTETAGETLEDAGILEGELENLFAEDTGEEKENTTENSR

SEQ ID NO: 4169 - protein, 51 aa, Betatorquevirus sp.
MTPWEQEQEKEIAALFCRPQRTFLHDKPTYPFFPPAPKIPKINFDLNYDFK

SEQ ID NO: 4170 - DNA, 2651 bp, Gammatorquevirus sp.
cgggagcccgaggtgagtgcaaccaccgaggtctaggggcaattcgggctagggcagtctagcggaacgggcaagaaacttaaaatatactttttattttagatatccaaaatacaagcaaaagacttctttactccaacaccgtataatcaagataccaagaatcaaatttggatgtctcaaattgctgattctcacgataatatctgcagttgtaaccatccctttgctcatctcattgccaatatctttcctgtgggtcacaaagatcgtgatctcacaattaacaaaattcttttaagagattacagagaaaaatgcctttctggtgggccagaaggcgcaagccatggtatggcagatggaggtaccgccgcaacaagtactacaggcgcagaaaaaagccaagaagaagaagacttcccagaagacgaggtagacgctttgctcgccgccgccatagaagaaggcgcaaggtaagaagaaaacttaaaaaaattaatatacaacaatggcaaccagatagaattaaaaaatgtaagattaaaggatactcctgcctagtactaggcagtgaaggcagacaaatgtactgttatactaatgaagcctctgaatacttacaacctaaagctccaggagggggaggttttggaacagaagttttttctttaaaatggctataccaagaatggttagctcacaacaacatatggacttccagtaatgaaaatactgatctttgcagatatacaggcactaaaatcacagtatacagacacccaactgtagactttattttctcctttgacagaatgccaccatttaatattaataaatttacctacccagaattacaaccacaaaacatgctactccacagacataaaaaaattattttaagcagaagaactaatcctaaaggaaaaattaaacacacatttaaaataggccctccaaagcaaatggtaactaaatggttttttcaaagagactttgcacctgcacatctctttagaatatctgctacagcagccacttttgaataccctagatatggaaggggcaatgccagtaacatactaacagtacctgcattaaacacttttttttttgcaaacagtgactgggcacaaacaaaaaaaggaccatacacaaacatacatacagcccctgaaaaatactattttaaatatagagatagcagaggcaatgaaattagaggcttatatataaaacccaaagatgctaccgaggactcttactacaaatccatagactacagcacaggtattttccaaacaggaatgctacaagcattttacattagtgcaataagttatgacagcacttcacaggcagcattacctgttatttacttaagatacaatccacatgaagatacaggccatggtaatgaagtttatttaacctctgttttcaatgggcaatacaacaagccaggtgcaactgcacctgacttgcaatttaacaatgtccctctttggatggccttttggggatactacaactacctactaataagtacagctaataaaggcctatacttaacacatatgtttatagtaaaaagcccagcactaaaaccattatcacaagctacagaccaatcatactatccaatactagaccaagattttatactaggtaaactaccatggggtgaatacctgtcaaaaaatgaaaaaaaactatggtaccctacagcagaaaaacaaacacaaattataaatcaaatagttagcactggcccttatgttcctaaactgaacaatcagtcagacagcacatgggaattaccttacaaatatatttcttattttaagtggggaggaccacaagttcaagacccaaatgttgaagacccaacaagcagaaacaaatacaatgtccccgatacagtccaacaatcagtacaaatcgctgacccgtcaaaattacacccagaaaccattttccatgactgggactacagaaggggtattattacacaaacagctattaaaagaatgtcagaaaacctcgaaattgattcaattatctcatctgatgactcagaatcgccacccaagaaaagaaaagtcaccaaggaactcccatgcatcaaccaaaaagagaaaaaaatcaaggactgtctcctctcgctctgcgaagagcctaccttccaagaaaccccacaaacacttcagcagcacatcgagcagcagcagcagcagcagcacaagctcagaaaaaacatcttgtacctcctaaccagcttaaagaaaacacagagacacatggagctacaaacaggaatattagactaactagatttaaacctggctttgaagaacaaactgaaaaagaactatctataatttttaaaagaccaccaagaacctacaaagaagacccccctttttacccctggcttccaattgaacccaaagttaactttaacctcaactttaaattctaggccaacaatgtacacttagtaaaacatgtttaataaagtttgcacccaaaaaaaaaaaggggtggagtttttaaaactatataagtaagtggggtggcgaatggctgagccgctagacggtgcagggaccggatcgagcgcagcgaggaggtccacagctgcccatggg

SEQ ID NO: 4171 - protein, 670 aa, Gammatorquevirus sp.
MPFWWARRRKPWYGRWRYRRNKYYRRRKKPRRRRLPRRRGRRFARRRHRRRRKVRRKLKKINIQQWQPDRIKKCKIKGYSCLVLGSEGRQMYCYTNEASEYLQPKAPGGGGFGTEVFSLKWLYQEWLAHNNIWTSSNENTDLCRYTGTKITVYRHPTVDFIFSFDRMPPFNINKFTYPELQPQNMLLHRHKKIILSRRTNPKGKIKHTFKIGPPKQMVTKWFFQRDFAPAHLFRISATAATFEYPRYGRGNASNILTVPALNTFFFANSDWAQTKKGPYTNIHTAPEKYYFKYRDSRGNEIRGLYIKPKDATEDSYYKSIDYSTGIFQTGMLQAFYISAISYDSTSQAALPVIYLRYNPHEDTGHGNEVYLTSVFNGQYNKPGATAPDLQFNNVPLWMAFWGYYNYLLISTANKGLYLTHMFIVKSPALKPLSQATDQSYYPILDQDFILGKLPWGEYLSKNEKKLWYPTAEKQTQIINQIVSTGPYVPKLNNQSDSTWELPYKYISYFKWGGPQVQDPNVEDPTSRNKYNVPDTVQQSVQIADPSKLHPETIFHDWDYRRGIITQTAIKRMSENLEIDSIISSDDSESPPKKRKVTKELPCINQKEKKIKDCLLSLCEEPTFQETPQTLQQHIEQQQQQQHKLRKNILYLLTSLKKTQRHMELQTGILD

SEQ ID NO: 4172 - protein, 101 aa, Gammatorquevirus sp.
MSQIADSHDNICSCNHPFAHLIANIFPVGHKDRDLTINKILLRDYREKCLSGGPEGASHGMADGGTAATSTTGAEKSQEEEDFPEDEVDALLAAAIEEGAR

SEQ ID NO: 4173 - protein, 120 aa, Gammatorquevirus sp.
MHQPKREKNQGLSPLALRRAYLPRNPTNTSAAHRAAAAAAAQAQKKHLVPPNQLKENTETHGATNRNIRLTRFKPGFEEQTEKELSIIFKRPPRTYKEDPPFYPWLPIEPKVNFNLNFKF

SEQ ID NO: 4174 - DNA, 2651 bp, Gammatorquevirus sp.
cgggagcccgaggtgagtgcaaccaccgaggtctaggggcaattcgggctagggcagtctagcggaacgggcaagaaacttaaaatatactttttattttagatgtccaaaatacaagcaaaagacttctttactccaacaccgtataatcaggatacgaagaatcaaatttggatgtctcaaattgctgattctcacgataatatctgcagttgtaaccatccctttgctcatctcattgccaatatctttcctgtgggtcacaaagatcgtgatctcacaattaacaaaattcttttaagagattacagagaaaaatgcctttctggtgggccagaaggcgcaagccatggtatggcagatggaggtaccgccgcaacaagtactacaggcgcagaaaaaagccaagaagaagaagacttcccagaagacgaggtagacgctttactcgccgccgccatagaagaaggcgcaaggtaagaagaaaacttaaaaaaattaatatacaacaatggcaaccagatagaattaaaaaatgtaagattaaaggatactcctgcctagtactaggcagtgaaggcagacaaatgtactgttatactaatgaagcctctgaatacttacaacctaaagctccaggagggggaggttttggaacagaagttttttctttaaaatggctataccaagaatggttagctcacaacaacatatggactgccagtaatgaaaatactgatctttgcagatatacaggcactaaaatcacagtatacagacacccaactgtagactttattttctcctttgacagaatgccaccatttaatattaataaatttacctacccagaattacaaccacaaaacatgctactccacaaacataaaaaaattattttaagcagaagaactaatcctaaaggaaaaattaaacacacatttaaaataggccctccaaagcaaatggtaactaaatggttttttcaaagagactttgcacctgcacatctctttagaatatctgctacagcagccacttttgaataccctagatatggaaagggcaatgccagtaacatactaacagtacctgcattaaacacttttttttttgcaaacagtgactgggcacaaacaaaagcaggaccatacacaaacatacatacagcccctgcaaaatactattttaaatatagagatagcagaggcaatgaaattaaaggcgaatatacaaaacctataaagtctaccatagacggttactaccaatccatagactacagcacaggtattttccaaacaggaatgctacaagcatttttcattagttcacaaagtcatgaagccacttcacaggcagcattacctgttatttacttaagatacaatccacatgaagatacaggccatggtaatgaagtttatttaacctctgttttcaatgggcaatacaacaagccaggtgcaactgcacctgacttgcaatttaacaatgtccctctttggatggccttttggggatactacaactacctactaataagtacagctaataaaggcctatacttaacacatatgtttgtagtaaaaagcccagcactaaaaccattatcacaagctacagaccaatcacactatccaatactagaccaagattttatactaggtaaactaccatggggtgaatacctgtcaaaaaatgaaaaaaaactatggtaccctacagcacaaaaacaaacacaaattataaatcaaatagttagcactggcccttatgttcctaaactaaacaatcagccagacagcacatgggaattaccttacaaatatatttcttattttaagtggggaggaccacaagttcaagacccaaatgttgaagacccaacaagcagaaacaaatacaatgtccccgatacagtccaacaatcagtacaaatcgctgacccgtcaaaattacacccagaaaccattttccatgactgggactacagaaggggtattattacacaaacagctattaaaagaatgtcagaaaacctcgaaattgattcaattatctcatctgatgactcagaatcgccacccaagaaaagaaaagtcaccaaggaactcccatgcatcaaccaaaaagagaaaaaaatcaaggaatgtctcctctcgctctgcgaagagcctacctgccaagaaaccccacaaacacttcagcagcacatcgagcagcagcagcagcagcagcacaagctcagaaaaaacatcttgtacctcctaaccagcttaaagaaaacacagagacacatggagctacaaacaggaatattagactaactagatttaaacctggctttgaagaacaaactgaaaaagaactatctataattttcaaaagaccaccaagaacctacaaagaagacgcccctttttacccctggcttccaattgaacccaaagttaactttaacctcaactataatttctaggccaacaatgtacacttagtaaaacatgtttaataaagtttgcaaaaaaaaaagtgtttaatgcaggtactgttagtatgttactggcattcgaatggctgagtttaccccgctagacggtgcagggaccggatcgagcgcagcgaggaggtccacagctgcccatggg

SEQ ID NO: 4175 - protein, 670 aa, Gammatorquevirus sp.
MPFWWARRRKPWYGRWRYRRNKYYRRRKKPRRRRLPRRRGRRFTRRRHRRRRKVRRKLKKINIQQWQPDRIKKCKIKGYSCLVLGSEGRQMYCYTNEASEYLQPKAPGGGGFGTEVFSLKWLYQEWLAHNNIWTASNENTDLCRYTGTKITVYRHPTVDFIFSFDRMPPFNINKFTYPELQPQNMLLHKHKKIILSRRTNPKGKIKHTFKIGPPKQMVTKWFFQRDFAPAHLFRISATAATFEYPRYGKGNASNILTVPALNTFFFANSDWAQTKAGPYTNIHTAPAKYYFKYRDSRGNEIKGEYTKPIKSTIDGYYQSIDYSTGIFQTGMLQAFFISSQSHEATSQAALPVIYLRYNPHEDTGHGNEVYLTSVFNGQYNKPGATAPDLQFNNVPLWMAFWGYYNYLLISTANKGLYLTHMFVVKSPALKPLSQATDQSHYPILDQDFILGKLPWGEYLSKNEKKLWYPTAQKQTQIINQIVSTGPYVPKLNNQPDSTWELPYKYISYFKWGGPQVQDPNVEDPTSRNKYNVPDTVQQSVQIADPSKLHPETIFHDWDYRRGIITQTAIKRMSENLEIDSIISSDDSESPPKKRKVTKELPCINQKEKKIKECLLSLCEEPTCQETPQTLQQHIEQQQQQQHKLRKNILYLLTSLKKTQRHMELQTGILD

SEQ ID NO: 4176 - protein, 125 aa, Gammatorquevirus sp.; identical to SEQ ID NO: 3524

SEQ ID NO: 4177 - protein, 120 aa, Gammatorquevirus sp.
MHQPKREKNQGMSPLALRRAYLPRNPTNTSAAHRAAAAAAAQAQKKHLVPPNQLKENTETHGATNRNIRLTRFKPGFEEQTEKELSIIFKRPPRTYKEDAPFYPWLPIEPKVNFNLNYNF

SEQ ID NO: 4178 - DNA, 2650 bp, Alphatorquevirus sp.
gccgcgcgctacgccttcggctgcgcgcggcactaggggcaattcgggcacgggtctggccgggctatgggcaagattcttaaaaaacttcctcgctctgttgtccggcaggataccaagtcatgccgtggtctccgccaaaacataacatcagaacgagagaggatttgtggattcaatcagttatttattcacatgacactttttgtggctgtgataatattcttgagcatcttaatagcctcctgggtggcctacaaccagctccacctagagacccagcaccccctgccatacggagcctgccggcactgccgccagctccgccgccccctgaagaaccacggcgtggtggagatacagaaggaggccgtggagaagatggaggagacgccgctggggcttacgaacccgaagacctagaagaacttttcgccgccgccgcacaagacgatatgtgagtagagggcggcgccgccgatacaggcgcagacggagacgggggcgacgcagacggggacgcagacgcagacacagaaaaacactcattctcaggcaatggcaaccagacgttataaaaagatgctttataacagggtggctgcccctaattatctgtggaaacggacacacgcaatttaactttataactcacatggatgacattccacctaagaatgcatcctacgggggcaacttcaccaacttgacctttaaccttgcctgcttttatgacgaattcatgcaccacagaaacaggtggtcagcctccaaccatgacctagaactagtcagatacctcaaaaccaacctaaaactgtacagacacgagtcaatagactatatagtaagcttcaccactacaggccctttcgagacaaatgaaatgtcctacatgctcactcaccctctggccatgctcctaagcaaaaaacacatagttgtgcccagccttaaaacaaaaccacacggtagaaagtacaaaaagataacaatcaagcccccaaaactaatgctaaacaagtggtactttgctgcagacttctgccacataggcctgtttcagctctgggccacaggcctagagctcagaaacccctggctaagatcaggcacaaacagcccagtcataggcttctatgtgcttaaaaaccaggtctatcaaaacagatacagcaacctaaacacacacgaacattaccaagcaagactacaggcataccaagaactaacaaaacaaaaaacttccgataagtggtacaattggcaatatacatacaacaaagtaatgaaacctatttactatgcagctgccaatgaaacaaattctaagtttaagggcaaaacatacaattggaaaaattacaaagaaaactttacagaggtacaagacaagtggacaaaaacctgtaaagaagcctatgagttagtatcagacgaatacagacaaatatacaccactactttaacatatccaccaccatgggatccaacaacttccaacacaggcagacaataccttgaacatgactgtggcatctacagcccatactttctaacaccacaaatatacaccccagaatggcacacagcctggtcttacattagatacaacccccttacagacaaaggcataggcaacagagtctgtgtgcagtattgcagtgaagccagcagtgactataacccagtaaagagcaagtgcatgttacaagacatgcccttgtggatgatgctatatggctacgcagactatgtagtaaagagcacaggcatccagtcagcctggacagacatgagagtagccatcaggagtccctacacagaccccaaactcgtaggctcatcagaaaacacaatgtacatccccataggcctagaattcatgaacggagacatgccagacaagaggccctacctcggaccggcgacgctcttccactcgtgggacctcagacgtggatacattaatacaaaaagtattaaaagaatgtcagaacacctcgacgctaatgagtatttttcaacaggcatcgtgtccaaaaaaccccggttcgacacaccccaccacgggcagctatcaaaccaagaagaagacgccttatctatcctcagacaactccagaaagagcaagaagagagcagcacatcagaagaagaacaagcactccaaaagcaagaagaccaaaaagaaaagctcctacagcagctccgagtccagcgacaccaccagcgagtcctcagacaaggaatcaaacacctcatgggagacgtcctccgactcagacagggagtccactggaacccaatcctgtaatacttccaccagagccaataccagacctgctattccccaatactggtaaaaaaaaaaagttttctcccttcgattggcagtgcgagcaggagcttgcgtgtctaatgaaacggcctatgcgtttctatccctcagacaacccgttctacccgtggctaccccccaagcgagatatcccaactatatgtaaagtaaactttaaaataaacctcagtgattaaaattcgaggccccgggagtttcacttagcggtgtctacctctaaaggtcactaagcactccgagcgccagcgaggagtgcgacccttgggagtgggtgcaacgccctcggcg

SEQ ID NO: 4179 - protein, 571 aa, Alphatorquevirus sp.
LPLIICGNGHTQFNFITHMDDIPPKNASYGGNFTNLTFNLACFYDEFMHHRNRWSASNHDLELVRYLKTNLKLYRHESIDYIVSFTTTGPFETNEMSYMLTHPLAMLLSKKHIVVPSLKTKPHGRKYKKITIKPPKLMLNKWYFAADFCHIGLFQLWATGLELRNPWLRSGTNSPVIGFYVLKNQVYQNRYSNLNTHEHYQARLQAYQELTKQKTSDKWYNWQYTYNKVMKPIYYAAANETNSKFKGKTYNWKNYKENFTEVQDKWTKTCKEAYELVSDEYRQIYTTTLTYPPPWDPTTSNTGRQYLEHDCGIYSPYFLTPQIYTPEWHTAWSYIRYNPLTDKGIGNRVCVQYCSEASSDYNPVKSKCMLQDMPLWMMLYGYADYVVKSTGIQSAWTDMRVAIRSPYTDPKLVGSSENTMYIPIGLEFMNGDMPDKRPYLGPATLFHSWDLRRGYINTKSIKRMSEHLDANEYFSTGIVSKKPRFDTPHHGQLSNQEEDALSILRQLQKEQEESSTSEEEQALQKQEDQKEKLLQQLRVQRHHQRVLRQGIKHLMGDVLRLRQGVHWNPIL

SEQ ID NO: 4180 - DNA, 2650 bp, Betatorquevirus sp.
gctcagccgaaggtgagtgaaaccaccgtagtctaggggcaattcgggctagttcagtatggcggaacgggcaagaaaataaaaatatatttattttacagatatgttctcatcctggaagacacctacatcgtccaagagacaacaagaattgaaatggcttaatattacttatgaagcccacgatttcttttgccactgcgataatccaacatttcacctaatttactgcatcaacaaattttcctcagctccaaaaccagaaattgatttaaagaatatacaatgcctccttaccggagatactactacaacagaagataccaaaccaaccgaagaagacactggtttcctagaaggagaactagaaaaactcttcgacgaagatggagaaacaaaagaaaattcaaacccagatacaaggtaaaaaaacatagacattataaaaagaaaaagaaaactatttctataaaaatgtttcaacctaatactattaattcttgtaaaataataggttataaatgtttgttacaaggttcaattttaagatgtaataataactttgtacaatatatatatagttttatacctgataagcaaccgggaggaggcggttggagtattcaagtaatgtctttagatagcttatatgaagaatatttacatttacaaaatatatggacaaaaggaaatgctggactaccactagtaagataccttggtactcaatttaaactgtatcaatctaaagaaacagactatgtttttatgtatgataactgctggcctatggtagacaccatacacacacatgcagatagtgcaccatttcgaatgctacaacacaaaaacaaaattgttgttcctagcagaaacacacaaaatagaaaaaaaccatacaaaaaagttttcatacgcccaccatcacaaatgacgaataaatggtactttcaaaaagacatttgtaaaacacctttattaatgtttagagcaactgcagtatctctaactcacccttttgcagatccaactgcaaaaagcaataatattacaataaaatgtttaaatccatatctgtttaaaaacccagactttcagcactatggaacacaaggatactcacctaaaatggcagattcaaacacaccactatacctatacggaagtaacatacacaacctaacatacgaaaccctaaccaagccagacaacaaagacaccattatagcactaacaaatactaaattacacacaccaggacaagcacttacaagtaacgctagcacaagcctaactgctggaaatccatttcacgaagattacacttcaggcaaccaatatgtatacatttctaaaatgactccaacagaaatgtataagtacttaacaaccaaccaagcaccagacagcagcaaacaaagcataactaacgcaggcgaactaatatacacctttagatataatcctgataatgattcaggagctacaaacaaagcatacattgttagcacagcctcaggaacagaaattaaaccaccacaaaatgaaaactttatactagaaggctttccactacatacactattttggggatggacagactggattaaaaaactaggagaaacaccacaatttgataccaacaaactagtagtatttgaatcaaaagctttaaatgataccactataccattatttataccactagatgagcaatttttacatggatataacccatacgaaccaatccaagacgaaacacacgaactaacatactataattctaaaaactggtatcccagacatgaataccaaaagcaaactattaataatatatgcctatctggacctgcatgcccaagacctccatggaatcactatttacaatgtatgtgtaaatatactgtctttttaaaatggggaggatgtccaaaaacacttgaaaaagcatacaatccttgttcacagtcaaaatggcccacgcccgataaccagtatggaagatctgaaatccagaatcctaacatcttcccacaaactgaactgtacaaatgggactgggaagaagactacattacaaaaagcgctatacaaagaattgcaagatacacagacattgatccaaaaatgttctcaattacagccttcaaaggacagccaccggcactccaaaaaaggccgccgcaaagcgaagaagaggaggaggaaaagaagctcgtcctccagctccacaagctccgattcaacaaggtcctcctccagttgcagctccaacaacaattaaaatctataaaggcaaaacaacggtaaacttatttgaacccactaaaataaaaaatagaagaatgacaccatgggaaaagaaagaagaagcagaagacgcggccatttggaaaagacctcaaagagactttatttttgatatacccttttatcccggtctacccccaacaccattagtaaactttgacttaaaatacaagtatgaataaacaaggccaacaatgttcacttagtggtgtccatttatttaagtttaaacttatataaacatccaccgcctccctacattagggcgccaaaatttaaaaagggggccacgcccccttacacccccaagggggctccgcccccttacacccccaagggg

SEQ ID NO: 4181 - protein, 674 aa, Betatorquevirus sp.
MPPYRRYYYNRRYQTNRRRHWFPRRRTRKTLRRRWRNKRKFKPRYKVKKHRHYKKKKKTISIKMFQPNTINSCKIIGYKCLLQGSILRCNNNFVQYIYSFIPDKQPGGGGWSIQVMSLDSLYEEYLHLQNIWTKGNAGLPLVRYLGTQFKLYQSKETDYVFMYDNCWPMVDTIHTHADSAPFRMLQHKNKIVVPSRNTQNRKKPYKKVFIRPPSQMTNKWYFQKDICKTPLLMFRATAVSLTHPFADPTAKSNNITIKCLNPYLFKNPDFQHYGTQGYSPKMADSNTPLYLYGSNIHNLTYETLTKPDNKDTIIALTNTKLHTPGQALTSNASTSLTAGNPFHEDYTSGNQYVYISKMTPTEMYKYLTTNQAPDSSKQSITNAGELIYTFRYNPDNDSGATNKAYIVSTASGTEIKPPQNENFILEGFPLHTLFWGWTDWIKKLGETPQFDTNKLVVFESKALNDTTIPLFIPLDEQFLHGYNPYEPIQDETHELTYYNSKNWYPRHEYQKQTINNICLSGPACPRPPWNHYLQCMCKYTVFLKWGGCPKTLEKAYNPCSQSKWPTPDNQYGRSEIQNPNIFPQTELYKWDWEEDYITKSAIQRIARYTDIDPKMFSITAFKGQPPALQKRPPQSEEEEEEKKLVLQLHKLRFNKVLLQLQLQQQLKSIKAKQR

SEQ ID NO: 4182 - protein, 107 aa, Betatorquevirus sp.
MFSSWKTPTSSKRQQELKWLNITYEAHDFFCHCDNPTFHLIYCINKFSSAPKPEIDLKNIQCLLTGDTTTTEDTKPTEEDTGFLEGELEKLFDEDGETKENSNPDTR

SEQ ID NO: 4183 - DNA, 2650 bp, Betatorquevirus sp.
gctcagccgaaggtgagtgaaaccaccgtagtctaggggcaattcgggctagttcagtatggcggaacgggcaagaaaataaaaatatatttattttacagatatgttctcatcctggaagacacctacatcgtccaagagacaacaagaattgaaatggcttaatattacttatgaagcccacgatttcttttgccactgcgataatccaacatttcacctaatttactgcatcaacaaattttcctcagctccaaaaccagaaattgatttaaagaatatacaatgcctccttaccggagatactactacaaaagaagataccaaaccaaccgaagaagacactggtttcctagaaggagaactagaaaaactcttcgacgaagatggagaaacaaaagaaaattcaaacccagatacaaggtaaaaaaacatagacattataaaaagaaaaagaaaactatttctataaaaatgttccaacctaatactattaattcttgtaaaataataggttataaatgtttgttacaaggttcaattttaagatgtaataataactttgtacaatatatatatagttttatacctgataagcaaccgggaggaggcggttggagtattcaagtaatgtctttagatagcttatatgaagaatatttacatttacaaaatatatggacaaaaggaaatgctggactaccactagtaagataccttggtactcaatttaaactgtatcaatctaaagaaacagactatgtttttatgtatgataactgctggcctatggtagacaccatacacacacatgcagatagtgcaccatttcgaatgctacaacacaaaaacaaaattgttgttcctagcagaaacacacaaaatagaaaaaaaccatacaaaaaagttttcatacgcccaccatcacaaatgacgaataaatggtactttcaaaaagacatttgtaaaacacctttattaatgtttagagcaactgcagtatctctaactcacccttttgcagatccaactgcaaaaagcaataatattacaataaaatgtttaaatccatatctgtttaaaaacccagactttcagcactatggaacacaaggatactcacctaaaatggcagattcaaacacaccactatacctatacggaagtaacatacacaacctaacatacgaaaccctaaccaagtcagacaacaaagacaccattatagcactaacaaatactaaattacacacaccaggacaagcacttacaagtaacactagcacaagcctaactgctggaaatccatttcacgaagattacacttcaggcaaccaatatgtatacatttctaaaatgactccaacagaaatgtataagtacttaacaaccaaccaagcaccagacagcagcaaacaaagcataactaacgcaggcgaactaatatacacctttagatataatcctgataatgattcaggagctacaaacaaagcatacattgttagcacagcctcaggaacagaaattaaaccaccacaaaatgaaaactttatactagaaggctttccactacatacactattttggggatggacagactggattaaaaaactaggagaaacaccacaatttgataccaacaaactagtagtatttgaatcaaaagctttaaatgataccactataccattatttataccactagatgagcaatttttacatggatataacccatacgaaccaatccaagacgaaacacacgaactaacatactataattccaaaaactggtatcccagacatgaataccaaaagcaaactattaataatatatgcctatctggacctgcatgcccaagacctccatggaatcactatttacaatgtatgtgtaaatatactgtctttttaaaatggggaggatgtccaaaaacacttgaaaaagcatacaatccttgttcacagtcaaaatggcccacgcccgataaccagtatggaagatctgaaatccagaatcctaacatcttcccacaaactgaactgtacaaatgggactgggaagaagactacattacaaaaagcgctatacaaagaattgcaagatacacagacattgatccaaaaatgttctcaattacagccttcaaaggacagccaccggcactccaaaaaaggccgccgcaaagcgaagaagaggaggaggaaaagaagctcgtcctccagctccacaagctccgattcaacaaggtcctcctccagttgcagctccaacaacaattaaaatctataaaggcaaaacaacggtaaacttatttgaacccactaaaataaaaaatagaagaatgacaccatgggaaaagaaagaagaagcagaagacgcggccatttggaaaagacctcaaagagactttatttttgatatacccttttatcccggtctacccccaacaccattagtaaactttgacttaaaatacaagtatgaataaacaaggccaacaatgttcacttagtggtgtccatttatttaagtttaaacttatataaacatccaccgcctccctacattagggcgccaaaatttaaaaagggggccacgcccccttacacccccaagggggctccgcccccttacacccccaagggg

SEQ ID NO: 4184 - protein, 674 aa, Betatorquevirus sp.
MPPYRRYYYKRRYQTNRRRHWFPRRRTRKTLRRRWRNKRKFKPRYKVKKHRHYKKKKKTISIKMFQPNTINSCKIIGYKCLLQGSILRCNNNFVQYIYSFIPDKQPGGGGWSIQVMSLDSLYEEYLHLQNIWTKGNAGLPLVRYLGTQFKLYQSKETDYVFMYDNCWPMVDTIHTHADSAPFRMLQHKNKIVVPSRNTQNRKKPYKKVFIRPPSQMTNKWYFQKDICKTPLLMFRATAVSLTHPFADPTAKSNNITIKCLNPYLFKNPDFQHYGTQGYSPKMADSNTPLYLYGSNIHNLTYETLTKSDNKDTIIALTNTKLHTPGQALTSNTSTSLTAGNPFHEDYTSGNQYVYISKMTPTEMYKYLTTNQAPDSSKQSITNAGELIYTFRYNPDNDSGATNKAYIVSTASGTEIKPPQNENFILEGFPLHTLFWGWTDWIKKLGETPQFDTNKLVVFESKALNDTTIPLFIPLDEQFLHGYNPYEPIQDETHELTYYNSKNWYPRHEYQKQTINNICLSGPACPRPPWNHYLQCMCKYTVFLKWGGCPKTLEKAYNPCSQSKWPTPDNQYGRSEIQNPNIFPQTELYKWDWEEDYITKSAIQRIARYTDIDPKMFSITAFKGQPPALQKRPPQSEEEEEEKKLVLQLHKLRFNKVLLQLQLQQQLKSIKAKQR

SEQ ID NO: 4185 - protein, 107 aa, Betatorquevirus sp.
MFSSWKTPTSSKRQQELKWLNITYEAHDFFCHCDNPTFHLIYCINKFSSAPKPEIDLKNIQCLLTGDTTTKEDTKPTEEDTGFLEGELEKLFDEDGETKENSNPDTR

SEQ ID NO: 4186 - DNA, 2647 bp, Betatorquevirus sp.
taggggcaattcgggctagatcagtctggcggaacgggcaagaaacttaaaataaatttattttacagatatgttctcttcatggaagaatcctacatcctcacagagacagaaagaactccaatggattggcatcattaactctacacacgaccaaatttgccactgcgacgacccaacattacacctactttactgcctcaacaaattctctggatttaacaaaccagaattggatataaataatataaaatgcctccttaccggccctactaccaaaactacagaagaaaatacttccgaaaaagaagaaacaggttttatagaaggggagttagagcgacttttcgacgaagacaatggagaagaaaaagaaaatacaagcccaaatacaaggtaaagaaatttaaattttataaaaaaaagaagaaatcaattatactaagacagtttcaaccaactgctattaacaaatgtaaatgcatagggtttaaatgcttactacaaggatctatattaagagctatgaataactttgtacaatatatttactcatttgtacctgaaaagcaaccagggggtggcggatggagtattcaaatactaagtttagactctgtatacgaagactaccaacacttacaatgcatttggactaaaggaaatgcaggcctaccattagtaagatatctaggaacaaaatttacactataccaatcacaagaaacagactacgtattcaaatacgacaactgctggcccatggtagacaccatacacacacacgcagactctgctccatttagaatgctacaaacaaaaaataaagtagtagtacccagcataaacaccaaaaaaaggagaaaaccatataaaaaagtatttgtacgcccaccagcacaaatgacaaacaaatggtactttcaaaaagaaatatgcaaaacaccactcgtaatgtttacaacaactgccgtctcactaacatttccatttgctgatccaaaagctaaaagcaataatgtaacagtactctgtataaacccatacatttttaaaaaccctgactttcaacactacggaactacagggtattcacctaaatccactaatgacggaacgccattatacttatacggcagcaatcaaccaaatgttacttatgaaaaattaaaatcaagcaaccacaaaccgctgataacagcattagtagacacaaaaaaccacacaccaggaacaccactaaataactcacagaaccaaagtatagataaaattgccggaaacccattccatgagcaatggaccagcggagatcaatacatatacttttcactaatgacacccacagaaatggaagctcttataacaaaaaatcaagagccaactgatactaaaaaaaaatccatcacaaacacgggtgaaattatttacacattcagatataacccagacaaagatgatggatccaccaacaaacaatacattgttagcacatcttcaggacgaataatacaaccaccagacaatgaaaaccacatactatcaggctttccatttccatacatgctatggggatggacagactggataaaaaaactaggagaaacaccatcattcgacacaaacaaactagtagtacttgaatcaaaagcctttaacgataccactattccattatttattccaatagacccacaatttgcacacggctttgacccatactcagacatgaatgaaccaaaccacactatctcaccttacaatgccaaaaactggtttcctagatatgaatatcagaaatatacaataaatgaaatatgtttatctggacctgcgtgtcctagaccaccttggaatcactatttacaagccttatgtaaatatactatgtattttaaatggggaggatgtcctaaaaacctacaaaaagcttataatccttgttcacagtcaatatggcccacgcccgataacaagtatggacgatctgaggtgcagaatcctaacatcttcccacaaacagaactatactcatgggactggcaaaaagactatgttacagaagaagctattaaaagaatcaaaagatatacagacattgatccaacaatattctcagttacaggaccaaagtcaaacccgccaccactcaaaaagatcaagaaacaagacgaagaagaagaggaggagaagaaactccagttccagctccacaagctgcgattccagaaagtcatcctccaactccagctccagcagcaattaaaatctataaatcaaaaataaaagtaaacttatttgaacccacaaaaccaaaaaataggagaatgacaccaagagaaaaagaagaagaaaaactagacgcagcaatatggaaaagaccacaaagagactttatactcgatatacctttctaccctggtataccccctaccccactagtaaactttgacttaaaatacaaatatgaataaacaaggccaacattaattcacttagtggtgtccatttatttaagttcaacttatataaacatccaccgcctccctgaaattcgggcgccaaaatttaaaagggggctccgcccccttcaacccccaagggggctccgcccccttacacccccaagggggctccgcccccttac

SEQ ID NO: 4187 - protein, 677 aa, Betatorquevirus sp.; identical to SEQ ID NO: 3613

SEQ ID NO: 4188 - protein, 109 aa, Betatorquevirus sp.; identical to SEQ ID NO: 27

SEQ ID NO: 4189 - DNA, 2647 bp, Betatorquevirus sp.
taggggcaattcgggctagatcagtctggcggaacgggcaagaaacttaaaataaatttattttacagatatgttctcttcatggaagaatcctacatcctcacagagacagaaagaactccaatggattggcatcattaactctacacacgaccaaatttgccactgcgacgacccaacattacacctactttactgcctcaacaaattctctggatttaacaaaccagaattggatataaataatataaaatgcctccttaccggccctactaccaaaactacagaagaaaatacttccgaaaaagaagaaacaggttttatagaaggggagttagagcgacttttcgacgaagacaatggagaagaaaaagaaaatacaagcccaaatacaaggtaaagaaatttaaattttataaaaaaaagaagaaatcaattatactaagacagtttcaaccaactgctattaacaaatgtaaatgcatagggtttaaatgcttactacaaggatctatattaagagctatgaataactttgtacaatatatttactcatttgtacctgaaaagcaaccagggggtggcggatggagtattcaaatactaagtttagactctgtatacgaagactaccaacacttacaatgcatttggactaaaggaaatgcaggcctaccattagtaagatatctaggaacaaaatttacactataccaatcacaagaaacagactacgtattcaaatacgacaactgctggcccatggtagacaccatacacacacacgcagactctgctccatttagaatgctacaaacaaaaaataaagtagtagtacccagcataaacaccaaaaaaaggagaaaaccatataaaaaagtatttgtacgcccaccagcacaaatgacaaacaaatggtactttcaaaaagatatatgcaaaacaccactcgtaatgtttacaacaactgccgtctcactaacatttccatttgctgatccaaaagctaaaagcaataatgtaacagtactctgtataaacccatacatttttaaaaaccctgactttcaacactacggaactacagggtattcacctaaatccaataatgacggaacgccattatacttatacggcagcaatcaacccaatgttacttatcaaatattaaaatcaagcagccaaaaaccgctgataacagcattagtagacacaaaaaaccacacaccaggaacaccactaaataactcacacaaagaaagtatagataaagttgccggaaacccattccatgaggaatggaccagcggagatcaatacatatacttttcactaatgacacccacagaaatgagaactcttataacagaaagtaaagaaccagctgatactaaaagacgatccatcacaaacacgggtgaaattatttacacattcagatataacccagacaaagatgatggatccaccaacaaacaatacattgttagcacatcttcaggacgaataatacaaccaccagacaatgaaaaccacatactatcaggctttccatttccatacatgctatggggatggacagactggataaaaaaactaggagaaacaccatcattcgacacaaacaaactagtagtacttgaatcaaaagcctttaacgataccactattccattatttattccaatagacccacaatttgcacacggctttgacccatattcagacatgaatgaacaaaaccacactatctcaccttacaatgccaaaaactggtttcctagatatgaatatcagaaatatacaataaatgaaatatgtttatctggacctgcgtgtcctagaccaccttggaatcactatttacaagccttatgtaaatatactatgtattttaaatggggaggatgtcctaaaaacctacaaaaagcttataatccttgttcacagtcaatatggcccacgcccgataacaagtatggacgatctgaggtgcagaatcctaacatcttcccacaaacagaactatactcatgggactggcaaaaagactatgttacagaagaagctattaaaagaatcaaaagatatacagacattgatccaacaatattctcagttacaggaccaaagtcaaacccgccaccactcaaaaagatcaagaaacaagacgaagaagaagaggaggagaagaaactccagttccagctccacaagctgcgattccagaaagtcatcctccaactccagctccagcagcaattaaaatctataaatcaaaaataaaagtaaacttatttgaacccacaaaaccaaaaaataggagaatgacaccaagagaaaaagaagaagaaaaactagacgcagcaatatggaaaagaccacaaagagactttatactcgatatacctttctaccctggtataccccctaccccactagtaaactttgacttaaaatacaaatatgaataaacaaggccaacattaattcacttagtggtgtccatttatttaagttcaacttatataaacatccaccgcctcccttaaattcgggcgccaaaatttaaaagggggctccgcccccttcaacccccaagggggctccgcccccttacacccccaagggggctccgcccccttac

SEQ ID NO: 4190 - protein, 677 aa, Betatorquevirus sp.
MPPYRPYYQNYRRKYFRKRRNRFYRRGVRATFRRRQWRRKRKYKPKYKVKKFKFYKKKKKSIILRQFQPTAINKCKCIGFKCLLQGSILRAMNNFVQYIYSFVPEKQPGGGGWSIQILSLDSVYEDYQHLQCIWTKGNAGLPLVRYLGTKFTLYQSQETDYVFKYDNCWPMVDTIHTHADSAPFRMLQTKNKVVVPSINTKKRRKPYKKVFVRPPAQMTNKWYFQKDICKTPLVMFTTTAVSLTFPFADPKAKSNNVTVLCINPYIFKNPDFQHYGTTGYSPKSNNDGTPLYLYGSNQPNVTYQILKSSSQKPLITALVDTKNHTPGTPLNNSHKESIDKVAGNPFHEEWTSGDQYIYFSLMTPTEMRTLITESKEPADTKRRSITNTGEIIYTFRYNPDKDDGSTNKQYIVSTSSGRIIQPPDNENHILSGFPFPYMLWGWTDWIKKLGETPSFDTNKLVVLESKAFNDTTIPLFIPIDPQFAHGFDPYSDMNEQNHTISPYNAKNWFPRYEYQKYTINEICLSGPACPRPPWNHYLQALCKYTMYFKWGGCPKNLQKAYNPCSQSIWPTPDNKYGRSEVQNPNIFPQTELYSWDWQKDYVTEEAIKRIKRYTDIDPTIFSVTGPKSNPPPLKKIKKQDEEEEEEKKLQFQLHKLRFQKVILQLQLQQQLKSINQK

SEQ ID NO: 4191 - protein, 109 aa, Betatorquevirus sp.; identical to SEQ ID NO: 27

SEQ ID NO: 4192 - DNA, 2646 bp, Gammatorquevirus sp.
cgggagcccgaggtgagtgaaaccaccgaggtctaggggcaattcgggctagggcagtctagcggaatgggcaagaaacttaaaacaatactttgttttacagatgagcaactactctgcctctcattttttcaaaccaacaccttacaacaatgacaccaaaaatcaaatgtggatgtccatgatagcggatgggcacgactgtatctgtaactgccatagtccttttggccatttgcttgcttctatttttcctcctggtcatcaagacaggtttcttacaattgaagaaattattaacagagatattaaagaatgcctttctggtggaggcgcagacggaggccatggttcggcagatggaggagatataaaaagagatatcccagaagaagaaggcgcccactttataaaagacgaagaactagacgaactaatcgccgcaggagaagacgccggtggaaggtaagaagaaaaaagaagagaataaatgttactcagtggcagcctgaatctattagaaaatgtaaaattataggcattgagccgctttgtgtaggagctgaaggatctcagatagactgttacactgtaacaaaaacagactatgtgccacctaaagtaccttggggtggagggtttgggttagaaaactttaccttaaaatacttatactcagaatatcaatatcacaacaacatatggacaagtagcaattcacaaaaagacttatgtagatatactggaggaaaatttattgtgtttagacatccaactcaagactttgttctcagctatgacatacaaccaccacacacacttaacaaatttacatttccaagttgtcatccacatcaacagctactatcaaaacaccacaaaattatacttagtcaggctagcaaaccaaatggaaagtactataaaaaaataaaatttaaaccaccaaaacaaatgctcacaaaatggttttttacaaagacattctcaccagctagtcttatagttgttaaagctgcagcagctaactttcagcatgtcaacttaagtggtaaaaatacaaacatgctagttacattgtactctcttaacctttcattttataaaaatccagcctggggtcttaaacctactacagggggctactggccccaagcaaaagcacagtctaactatccatatgttataaaaaacaaacaaggtgtggaagaaaacaaaagaatgagcattacaactacaagtgactattcagaaacaataaactatagtactggatggtttaaagctgaatttttgcaagcagtaaaactgggtacaaaagaaagtcctactgccctacaccaagttgtagcaggtagatacaaccctaacatagatgatggcacaggtaatgaaatttactgtgccaccattgtaggtacctcctggctaccacctacacaagacaaacaacttttaattacagacatgccactatggctaggtctatatggctattactcatatataagagaaacaaaatctaaagacttttggaaattacatgtcattgtacttaaatccaaagccatacactgttatccagaaataggaagctgtgatagatatgtttttatagactgggattacatacaaggcaaaaaaccatatgatcaatcaataacagaaagagaaaaagcattctggtttcctgacatgtcctggcaaagaaaatctatgaatgccatagttgaatcaggtccctttatacctaaactgtctgaagaaacttacagtacatgggaactaaacatgagatattatttttattttaagtggggaggtgcaaacacaggagaagcacaagttgaaaatccagaaatgctgcccacctatgatgtacccgattcaatgccaaaaacaatacaaattgttaacccagaaaaacaagctccagaaaccatcctgcacccctgggactaccgcaggggatttattaaagaaacagctcttaaaagaatgtgctcaaacatcgaaactgatacagaatttcaataccctacagaacaaacaccaaagaaaaaaagaagagtacaagcaactcttccaaatccccaagaagaaaaccaggaaatcaagacatgtctcctctcgctctgcgaacaaagtacatcgcaagaggaggaagagcaagacctccacaagctcatcctcaagcagcagcacaagcaagaaaagctcaagtacaacatgttcaagctcctcttagacctcaaagaaaaacagagaataatccaacaccacacaggactcctagaatgactccctttaaaaaagggtttgaaatggacactgaaagagaactagcacacgcattctgtagaccccctagaatgtttaaagaagacccccccttttatccatggttacccaaactaacacccattgttaactttcaccttaattacaaattctaggcctacaactttcacttagtggtgtatgtttatataagtcacacccccaaaaaaaattgtaaaataaaaaaaaaataaaaaaaaataaaaaattgcaaaaattcggcgctcgcgcgcgctgcgcgcgcgcccgctagacggtgcagggaccggatcgagcgcagcgaggaggtccccggctgcccatggg

SEQ ID NO: 4193 - protein, 661 aa, Gammatorquevirus sp.
MPFWWRRRRRPWFGRWRRYKKRYPRRRRRPLYKRRRTRRTNRRRRRRRWKVRRKKKRINVTQWQPESIRKCKIIGIEPLCVGAEGSQIDCYTVTKTDYVPPKVPWGGGFGLENFTLKYLYSEYQYHNNIWTSSNSQKDLCRYTGGKFIVFRHPTQDFVLSYDIQPPHTLNKFTFPSCHPHQQLLSKHHKIILSQASKPNGKYYKKIKFKPPKQMLTKWFFTKTFSPASLIVVKAAAANFQHVNLSGKNTNMLVTLYSLNLSFYKNPAWGLKPTTGGYWPQAKAQSNYPYVIKNKQGVEENKRMSITTTSDYSETINYSTGWFKAEFLQAVKLGTKESPTALHQVVAGRYNPNIDDGTGNEIYCATIVGTSWLPPTQDKQLLITDMPLWLGLYGYYSYIRETKSKDFWKLHVIVLKSKAIHCYPEIGSCDRYVFIDWDYIQGKKPYDQSITEREKAFWFPDMSWQRKSMNAIVESGPFIPKLSEETYSTWELNMRYYFYFKWGGANTGEAQVENPEMLPTYDVPDSMPKTIQIVNPEKQAPETILHPWDYRRGFIKETALKRMCSNIETDTEFQYPTEQTPKKKRRVQATLPNPQEENQEIKTCLLSLCEQSTSQEEEEQDLHKLILKQQHKQEKLKYNMFKLLLDLKEKQRIIQHHTGLLE

SEQ ID NO: 4194 - protein, 121 aa, Gammatorquevirus sp.
MSNYSASHFFKPTPYNNDTKNQMWMSMIADGHDCICNCHSPFGHLLASIFPPGHQDRFLTIEEIINRDIKECLSGGGADGGHGSADGGDIKRDIPEEEGAHFIKDEELDELIAAGEDAGGR

SEQ ID NO: 4195 - protein, 111 aa, Gammatorquevirus sp.
MSPLALRTKYIARGGRARPPQAHPQAAAQARKAQVQHVQAPLRPQRKTENNPTPHRTPRMTPFKKGFEMDTERELAHAFCRPPRMFKEDPPFYPWLPKLTPIVNFHLNYKF

SEQ ID NO: 4196 - DNA, 2645 bp, Betatorquevirus sp.
cgggtgccgaaggtgagtgcaaccaccgtagtcaaggggcaattcgggcttgatcagtctagcggaacgggcaagaaacttaaaaatatatttgttttacagatgagcaaacaattatgtccaccagcatacagtggaaaacatctagaatcccaatggcttaaccacttttactcctcacacgacctttgctgtggctgtaaagatcctgttcttcactttttaattgctgtaaataaacgaggcaacgcacccaaacctgaagacgacattaaaaacataaaatgccttattactggagaagaagaagatggcgacgacccttttggtcctggagaactagaagagcttttcaaggaaaaagacggagatggagacgcagacgacccatctactacggggtaagaaagtacatttttaaaaagaaacttaaaagaattagacttacacaatggcaaccaaaaactatcagaaaatgtactattattggaaacattgtactgtttcaaggatctccagaaagagcaaacaataactatattcaaactatttatagctatgtacctcctgacgaaccaggaggaggaggatggactctaataactgaaagcttaagcagcttgtgggaagactgggaacacttaaaaaatatctggacaagcagtaatgcagcattacctttagtaagatatatgggtgtagacttaattttttggcaatctccttacacagactatattgttgaagttactaactgtttaccaatgaaagataccaaactaaaacatgcagacagtgcgccaaatagaatgttattaaaaagaaatgttgtaaaagtacccagtttagaaactagaaaaaaaaagaaaccttttaaaagaattcatgtacctccgccgcctcaaatggaaaacaaatggtattttcaaaaagatatttgtgaaattcctcttgtaatgataacagctgtagcagttgatttcagatatcctttttgtgctagtaactgtagatcaaacaacctcactcttagatgcttaaatatctccttttttcaataccacaactttgacaaatatgcagacacaacaggatatgtacctaaatcaggtacttacatgtattcacactcaggtagacttgaccaaaaaccaacaaaaaatacacttatatacttaggtaacacaaaaacaaatacaccaggtaaagctccaaccaatatgaaagactatacaaaaccagaaaactggggaaacccattttggcaccagtacattaatggagaactaccagtatatacatcacaatatcatcccactgctttaaaatcagacattagtcaagaagagtccaaaatatcagctatgacacttatggcagatgtatactttgaaacctttagatacaatccagaaagagacaaaggcacatcaaacagaatatatttagtcgaaaattaccaaaacacaggatggggacccccaacaaatgtaaacctaattttagaaggctttcctttatatgacatatgctggggttacacagactggatagaaaaactacatgaaatacaagatataggacaacattacatatttgtgatacaaacagacacttttaatgaacatagacaagcttatgtacctttagatatgttttttttaacaggacacggtccatatgataccaacataaataactatgactataatcactggcaaccaaaacttagatttcaaacaaagagcataaatgatatttgcttaactggaccaggttgtgctagatctccttttggaaattatatgcaagctaaaatgacatataaatttagagtaaaatttggtggctgtccaaaaacattagaacaaccttatgatccttgttcacagccaaactggactatacccagtaacttcactgaaggacttcaaatccagaatccaaacaccaacccccaaaccgaactgcaagaatgggactggagaagggactacattacaccaaaagctttgcgtcgaatcaaaaaatttccaaaaactgacgaaactttacaactctctacaggatccaagcacaaccctgcaatactacaccaaacactccaggaaacaacggactcgagctcggaaacggaagaagaccaaacatcgatccaagaacaaatactcaagctcaagcgacagcagcgactactcaagcagcggatcagacaccgactaatgcaacaaccattaccttaaataactgtaaaaacaaagtgtacttattcccagaacgcaaaccctttaaaaatcgtagattttctgtatatgaaagagaactagaaaaatatgtagctactgcttttaaaagaccacaaagaacatttttttatgaccccccaatatacccgtggcttccaccagaacctcttgtaaattttgacttaaaatttgaataaacaaggccaacaaatttcacttagtggtgtccatttatataagttaaactttaataaacagactccgcctcccaatcaagtaattagcatcacttcctaggaggagctaaattactataaaactaactacacagacgaatggctgagtttatgccgctagacggaggacgcatcactacagtgactgcggactgatcacggg

SEQ ID NO: 4197 - protein, 652 aa, Betatorquevirus sp.; identical to SEQ ID NO: 3874

SEQ ID NO: 4198 - protein, 100 aa, Betatorquevirus sp.; identical to SEQ ID NO: 3875

SEQ ID NO: 4199 - DNA, 2642 bp, Betatorquevirus sp.
cgggagccgaaggtgagtgaaaccaccgaagtctaggggcaattcgggctagttcagtctagcggaacgggcaagaaacttaaaattacatattttttacagatgagcaaattccaaaagccagcagtatattctcctagacaactagatcttcaatggatgaataccattgttaatagccacgacctcttttgcggatgcttagaaccaactaaacaccttattgatcttctaaaaaccttcaacgcacaacaatggcttactactacaaaagaaattactacaacccatacttcaaatggagaagacgccgtagacggccttaccggagacgaactagaaaaactattcgcagaagacgacgaagacgaagggtaagaagaaagtacttttttaaaagaaaacttagagctattaaactaaaacaatggcaacctaagactgtaagaaaatgtactgttagaggaataatgtgtctttaccaagcagctcacggacgctttagctttaactggggacaatatcaaaccagctttgtacctcaataccaaccgggaggggggggatggagcttgcttgtatttaacctaggtgctttgtatcaagaatgggaacatttaagaaatgcttggagcaaatctaacttaggccttaatttagtaagatatttgtatagtgattttaaattttacagacacgacacagtagactatgtagtaactgctcaaacatgctaccctatgctagataacaaatacatgcatgcaaactgccatccatctagaatgcttttagctaaaagaaaaataatagttccaagtaaaaaaacaaacccaaacggcagaccatacaaaagaaaaagattttacccaccagaacaaatgctaaacaaatggttctttcaaaaagaaatgtgtaacacaaatttattaatgctagcaacaacagcatgtgacttgatgcattactatgtacctagtacagcagaaagtaacaacataaccttatacagcataaatactaaaatattccaaaataaaaactttcaacacacagaacaaggaacagtaccatggtcaccaaaagccagttactacatgtatggacaacataacggttcaacctcacaacccacaaaagcctctgacttaatatacttaggaaacacatatgacaacacagggggccaaacttcagatggtacatttaatgcagctatgaaaaaagaaaacatgggaaacccattttttcacgaatatatatcaggagacagacaaatatgggttggaaacatacaaccatcagcaatatttaaaactaacatttcatcaccagaacaaacagcaaacttaaaaaaactacacctaatgcaagaacccataatagtaacatgcagatacaatccaaacagagacacaggagaaggaaacagagtatacatgctttcaaacataagacaagacaatggatataacccgccaaatgacccaaacttaactatagacggctttccactatggctaagcatgtggggatgggcagactggcaaaaaaaattatcacttatacaacaaatagacataaattactttatagcctgcaactgttcatttatagatccacctttaccatgctatgtatttctaagcaaaagctttatagatggtgaaggaccttatcagttaccaagagcagaaatatcagcatcagacaaccaacactggtatccaaaatacaaatttcaaaaagaaggaatagaaaatataaatatgtcaggtccagcagtagcaaaatcagaatatacaaaaaatatagaagcccattgtgaatacaaatttaaatttaaatggggaggatgtcctgctgacattgaaactccatatgatccttgtgaacagccacaatataatgttcccgataaacagctattggcaactacgttacaggatccaacattatcaccagacagaatcttccacgactttgacatcagacggggcgaaattacacaaacagctcttgaaagagtctgcaaatacaaaaaaactgacaaacctctgtttacagatggaacaacaccttgcgaagaaaaaagcctgttcgatcccccaatccaaccacaagaaaccctccaaacactcctacaagaactccaccaaacatcgagttcggaagaagacgaagagacaccgatcccccagcagctccagcgacacaaactcaagcagcagcgactcaagcacaagctcctcaaattaataaaaaaagcaacagcattagaataactaacagtaaaatttgtgttaacttgtttggaacacctcctaaaaagaataggagattaacacctaaagaacttgaaactgaaaaagaaatatgtagaattttcaaacgtgtacctagaacatatatacatgatcgcccattttacccatgggtacccattgatccaaaaaacaattgctaccctgtaaactttgacttaaactataaataaaggccaacattatttcaccctcggtgtccgtttatttaagtatgaaactaatataaacatccaccacctcccaatcactaaggcctagaaagggggctccgcccccttaaacccccggggggggggggggggggggggggggggg

SEQ ID NO: 4200 - protein, 676 aa, Betatorquevirus sp.
MAYYYKRNYYNPYFKWRRRRRRPYRRRTRKTIRRRRRRRRVRRKYFFKRKLRAIKLKQWQPKTVRKCTVRGIMCLYQAAHGRFSFNWGQYQTSFVPQYQPGGGGWSLLVFNLGALYQEWEHLRNAWSKSNLGLNLVRYLYSDFKFYRHDTVDYVVTAQTCYPMLDNKYMHANCHPSRMLLAKRKIIVPSKKTNPNGRPYKRKRFYPPEQMLNKWFFQKEMCNTNLLMLATTACDLMHYYVPSTAESNNITLYSINTKIFQNKNFQHTEQGTVPWSPKASYYMYGQHNGSTSQPTKASDLIYLGNTYDNTGGQTSDGTFNAAMKKENMGNPFFHEYISGDRQIWVGNIQPSAIFKTNISSPEQTANLKKLHLMQEPIIVTCRYNPNRDTGEGNRVYMLSNIRQDNGYNPPNDPNLTIDGFPLWLSMWGWADWQKKLSLIQQIDINYFIACNCSFIDPPLPCYVFLSKSFIDGEGPYQLPRAEISASDNQHWYPKYKFQKEGIENINMSGPAVAKSEYTKNIEAHCEYKFKFKWGGCPADIETPYDPCEQPQYNVPDKQLLATTLQDPTLSPDRIFHDFDIRRGEITQTALERVCKYKKTDKPLFTDGTTPCEEKSLFDPPIQPQETLQTLLQELHQTSSSEEDEETPIPQQLQRHKLKQQRLKHKLLKLIKKATALE

SEQ ID NO: 4201 - protein, 91 aa, Betatorquevirus sp.
MSKFQKPAVYSPRQLDLQWMNTIVNSHDLFCGCLEPTKHLIDLLKTFNAQQWLTTTKEITTTHTSNGEDAVDGLTGDELEKLFAEDDEDEG

SEQ ID NO: 4202 - protein, 138 aa, Betatorquevirus sp.
LRRKKPVRSPNPTTRNPPNTPTRTPPNIEFGRRRRDTDPPAAPATQTQAAATQAQAPQINKKSNSIRITNSKICVNLFGTPPKKNRRLTPKELETEKEICRIFKRVPRTYIHDRPFYPWVPIDPKNNCYPVNFDLNYK

SEQ ID NO: 4203 - DNA, 2641 bp, Gammatorquevirus sp.
cgggagcccgaggtgagtgaaaccaccgaggtctaggggcaactcgggctagggcagtctagcggaatgggcaagaaacttaaaaaactttattgttttaaatacagatgcagaatatcagctcacaagacttttaccaagaaacccattttaatcccgaaacaaagaatcaaatatggatgtctcaaattgctgactctcatgataatatctgcaattgcaatcatccatttgctcaccttcttgcttccatatttcctcctggccaccgagatcgcgattataccattaatcagatacttttcagagactaccaagaaaaatgccattctggtggggtagaagaaagaaaccttggtttggcaggtggcgataccgccgccgccgctggaacatcaggagaaaaaagaaaagaagaagaagactacccagaagaagaactagacgctatgctcgccgccgctatggaagaaaacgcaaggtaagaagaaaacttagaaaaattaagatacaacaatggcaaccagactctattaaaaaatgtaaaattaaaggctactctattatgatactaggtggtgaaggaactcaaatgttctgttatactaatacagctaaagactacccacaaccgaaagcccctggcggaggaggctttggttatgaagttataagtttaaaatggctatatcaagaatttttaaagcacaacaatatatggacaagatcaaatgaatatacagaccttgttagatatacaggaggcaaaattactttttttgcacatccatatattgactttataatagcatatgacctacaacctccttttgaccttaacaaattttcatatccagaaattcaaccacaaaatatgctacttagaaaacataaaagagttttactaagcagacaatctaacccaaaaggaagacataaagttacaattaagtttcatcctcctaaacaaatgacaaccaaatggttttttcaaaaagacttttgcccatatggcctaattaaaatttctgcagctgcagcagacttttcatacccaataataggacctaaatcacaaagcactattttaaccatatatgcacttaatacaaacttttaccaagttagtgactgggcacaaacaaaaactagcgacccctatatgaacattccaacacaaaccttaccactatacttttggtataaagaaaaaggacaagaaaaatcttacaaatatgacccaggtgatcaaacaccagcaaacaaatactattactctatagcatgggacacaggcctattttgcagtaaagtactactagcttataaaatttccacagatacccaaggtagatcactaattgcaggcacacccattatacctctaagatataacccacaagaagatgatggttttggcaatgaagtatatctaactagcattctaagtggcagatataacaaaccatcatatacaacagactatcaatttaacaatgtacctttatatattgcattttatggctattacagctacttaaaaatttacagcaacgacaaaaacataatgaaatcatatatgtttgttgttaaatgcaaagctattaaaccactaactcaaacaacagcacaaaactattaccctatcttagatgcagactttgtttttggtaaactaccatgggatgaatacctttccactgaaataaaaaagttttggtatcccacagcagaaaaacaagagggtattataaatgctatagtagaatcaggaccatatgtaccaaaactttccaacatgacatatagtacatggtcactaatgtacaactataaatttttttttaagtggggtggaccacatgttacagatccaaaagttgaagacccctgcacccgaaacaaataccctgtacccgatacaatgcaaccaacagtacaaattgtcaacccagaaaaaaataaagttgaatccatattacatgactgggactttagaagggggttcattacaaacacagctcttaaaagaatgtcagaaaacctcccatctgaaacatctctctcatctgatgattcagaatcacctgcaaaaaagaggaaaattacaaaggaagtcccatgccaccaagaaagccaagaaaaaatccagaactgtctcctctcactctgcgaagaaaatacctgccaagaaacaccagaaaacctccagcagctcatcaagcagcagcagcaggagcagcacaagctcaagagaaacatcctcaagctcctcacacacctgaaaaaagggcagagatgtgtagaactacaaacaggccttttagagtagagcccttcaaacctggatttgaagaagaaactgagagagaactagctattgcctttaaaagaccccctagaaaatataagaatgaccctccattttacccatggctacctttaactcccaaagttatttttaaccttaactttcaagactaggccaacactgtacacttagtaaagcatgtttaataaagttttacccccaaaaaaaaaaaaaataaaaaattgcaaaaattcggcgctcgcgcgcgctccgctagacggtgcagggaccggatcgagcgcagcgaggaggtccccggctgcccttggg

SEQ ID NO: 4204 - protein, 669 aa, Gammatorquevirus sp.
MPFWWGRRKKPWFGRWRYRRRRWNIRRKKKRRRRLPRRRTRRYARRRYGRKRKVRRKLRKIKIQQWQPDSIKKCKIKGYSIMILGGEGTQMFCYTNTAKDYPQPKAPGGGGFGYEVISLKWLYQEFLKHNNIWTRSNEYTDLVRYTGGKITFFAHPYIDFIIAYDLQPPFDLNKFSYPEIQPQNMLLRKHKRVLLSRQSNPKGRHKVTIKFHPPKQMTTKWFFQKDFCPYGLIKISAAAADFSYPIIGPKSQSTILTIYALNTNFYQVSDWAQTKTSDPYMNIPTQTLPLYFWYKEKGQEKSYKYDPGDQTPANKYYYSIAWDTGLFCSKVLLAYKISTDTQGRSLIAGTPIIPLRYNPQEDDGFGNEVYLTSILSGRYNKPSYTTDYQFNNVPLYIAFYGYYSYLKIYSNDKNIMKSYMFVVKCKAIKPLTQTTAQNYYPILDADFVFGKLPWDEYLSTEIKKFWYPTAEKQEGIINAIVESGPYVPKLSNMTYSTWSLMYNYKFFFKWGGPHVTDPKVEDPCTRNKYPVPDTMQPTVQIVNPEKNKVESILHDWDFRRGFITNTALKRMSENLPSETSLSSDDSESPAKKRKITKEVPCHQESQEKIQNCLLSLCEENTCQETPENLQQLIKQQQQEQHKLKRNILKLLTHLKKGQRCVELQTGLLE

SEQ ID NO: 4205 - protein, 125 aa, Gammatorquevirus sp.
MQNISSQDFYQETHFNPETKNQIWMSQIADSHDNICNCNHPFAHLLASIFPPGHRDRDYTINQILFRDYQEKCHSGGVEERNLGLAGGDTAAAAGTSGEKRKEEEDYPEEELDAMLAAAMEENAR

SEQ ID NO: 4206 - protein, 120 aa, Gammatorquevirus sp.
MPPRKPRKNPELSPLTLRRKYLPRNTRKPPAAHQAAAAGAAQAQEKHPQAPHTPEKRAEMCRTTNRPFRVEPFKPGFEEETERELAIAFKRPPRKYKNDPPFYPWLPLTPKVIFNLNFQD

SEQ ID NO: 4207 - DNA, 2641 bp, Betatorquevirus sp.
acccccaagggggctccgcccccttacaccccctaggggcaattcgggctagatcagtctggcggaacgggcaagaaacttaaatagtataattgttttacagatatgttctcatcgtggaagacacctacatgttcaaagagacaacaagaactacaatggataaacattgttaactcctgccacgaccaaatctgctattgtgacaacccaactttccacctgctttactgcttaaacaaattttcaggattccaaaagccagaagaagatattaaaaatatacaatgcctccttaccggccctactattactaccgaaaccgctggagaaaccctagaagacgccggcatactagaaggggagttagaaaaccttttcgccgaagatactggagaagaaaaagaaaatacaaccgaaaattcaaggtaaaaaaacttaaattttctaaaaggaaaaaaaaatctattattatgagacaatttcaaccttatacaattaacaaatgtaaatgcattggatataaatgcttatttcaaggatctcctcttagaactaacaataactttgtacaatatatatactcttttatacctgaaaaacaaccagggggaggaggatggagcattcaagtattaagtttagactctatatatgaagactatcaacatttacaatgtatatggactaaaggcaacgctggtttacctttagtaagatatatgggatgcaaatttactttataccaatcagaatcaacagattacatatttaaatatgataactgctggcctatggtagacactgttcacacacacgcagactctgcaccatttagaatgctacaaacaaaacacaaagtagttgttcccagcacttctacaaaaagaagaaagaaaccatataaaaaaatctttgttaaacctccagcacaaatgttaaatagatggtactttcaaaaagaaatatgcaaaactccactagtaatgttcactgctacagctgtttctttaacaaacccctttgcaaaccctagagctacaagcaacaatgtaacaattcactgcataaatccatatatattccaaaaccctgacttccaacactatggtacacaaggatactcaccaaaaaatgcaacagacgacaacatgcctttatatttatacgcaagcacagatgacaacgttacatacgacaggttaataacaggcccaagcaaaccacaagtaacagcacttatagatacaaaaaatcacacaccaggaagaccacttaacactctattagaaagccaaatttccacccacagtggaaatccatttcacgaagactacacagacccagaaaaccacacaatatatttctcaaaaatgacacctacagagttatataacttaataaaaaatggcactcaaccaaaaaatgaaaaagtaagaagcataactgccactggatcaataatatatacatttagatacaacccagataatgacgatggaagtacaaacaaacaatacatagttagcacttcatcaggaaacaaaatcagaccaccagacaatccaaattttatactagaaggatttccatttccatacatgctatggggatggacagactggataaaaaaacttggagaaacaccatcatttgacacaaacaaattagtagtactagaaacaaaagccttcgatgataaaacaataccatactttataccagtagatccacaatttatacatggatatgatccctatgaaaaaatagaagacaaaacacacactatatcaccatacaacgctaaaaactggtttccaagacatgaataccaaaaactaactataaaccaaatatgtttatcagggccagcctgtcccagaccttcctgggaccattatttacaagcaatatgtaaatacactatgtactttaaatggggaggctgtcctaaaactctacaaaaagcatataatccttgttcacagtccatttggcccacgcccgataacaagtatggaagatctgaagtgcagaatcctaacatcttcccacaaacagaattgtatgcctgggactgggaaaaagactatgttacagagtcagctatccaaagaatacaaagatttacagaaattgatccaaaaaacttctcatctacaggaagcaaagcaaatccaccgccactccaaaaaacaacgaaacaaaacgaagaagaagaggaggagaagaaactcaagctccagctccacaagctccgattcaacaaagtcctcctccagctcaaactccagcaacaattaaaatctataaaaataaagtaaacgttttactttttccaccagacaaaccacaaaaccgaagaatgacaccatgggaacaagaacaagaaaaagaaattgcagctttattttgcagaccccaaagaacttttttgcacgataaaccaacatatcccttttttcctcctgcaccaaaaatacctaaaataaactttgacttaaactacgactttaaataaaaaaggccaacataaattcacttagtggtgtctgtttctttaagtaaaaccttaataaacatccaccgcctccctaaaattcgggcgccaaatttaaaaaagggggctccgcccccttac

SEQ ID NO: 4208 - protein, 678 aa, Betatorquevirus sp.
MPPYRPYYYYRNRWRNPRRRRHTRRGVRKPFRRRYWRRKRKYNRKFKVKKLKFSKRKKKSIIMRQFQPYTINKCKCIGYKCLFQGSPLRTNNNFVQYIYSFIPEKQPGGGGWSIQVLSLDSIYEDYQHLQCIWTKGNAGLPLVRYMGCKFTLYQSESTDYIFKYDNCWPMVDTVHTHADSAPFRMLQTKHKVVVPSTSTKRRKKPYKKIFVKPPAQMLNRWYFQKEICKTPLVMFTATAVSLTNPFANPRATSNNVTIHCINPYIFQNPDFQHYGTQGYSPKNATDDNMPLYLYASTDDNVTYDRLITGPSKPQVTALIDTKNHTPGRPLNTLLESQISTHSGNPFHEDYTDPENHTIYFSKMTPTELYNLIKNGTQPKNEKVRSITATGSIIYTFRYNPDNDDGSTNKQYIVSTSSGNKIRPPDNPNFILEGFPFPYMLWGWTDWIKKLGETPSFDTNKLVVLETKAFDDKTIPYFIPVDPQFIHGYDPYEKIEDKTHTISPYNAKNWFPRHEYQKLTINQICLSGPACPRPSWDHYLQAICKYTMYFKWGGCPKTLQKAYNPCSQSIWPTPDNKYGRSEVQNPNIFPQTELYAWDWEKDYVTESAIQRIQRFTEIDPKNFSSTGSKANPPPLQKTTKQNEEEEEEKKLKLQLHKLRFNKVLLQLKLQQQLKSIKIK

SEQ ID NO: 4209 - protein, 108 aa, Betatorquevirus sp.; identical to SEQ ID NO: 4168

SEQ ID NO: 4210 - protein, 51 aa, Betatorquevirus sp.; identical to SEQ ID NO: 4169

SEQ ID NO: 4211 - DNA, 2641 bp, Betatorquevirus sp.; identical to SEQ ID NO: 4207

SEQ ID NO: 4212 - protein, 678 aa, Betatorquevirus sp.; identical to SEQ ID NO: 4208

SEQ ID NO: 4213 - protein, 108 aa, Betatorquevirus sp.; identical to SEQ ID NO: 4168

SEQ ID NO: 4214 - protein, 51 aa, Betatorquevirus sp.; identical to SEQ ID NO: 4169

SEQ ID NO: 4215 - DNA, 2641 bp, Betatorquevirus sp.
aacgggcaagaaacttaaaatattatattttacagatatgtcatctgtatggaagaaacctaccagctcaccgagatatcaagaacaacaatggatgagcgccgtgtttcatttccatgatattttctgccactgcgaagatccacaacttcatttctgcattttaattaacaaacaatcaccgtgcccaaaaccagaatctgacataaggaatataaaatgcctccttactggacgtaccgacgcagacgatggacaagaacaaaaagaagacgaccccattttcgaacctggagagctcgacagacttttcgacgaaacaaatacaaaagaagatggagaagacaccgaaaggtaaaaagacgccgctttaaaaaaaagcttactaaaataactataaaacaatttcagcctaaatgtgtaaagaaatgtaaaattaaaggaactaaatgcttatttcaaggaagccctttaagatctaataataactttatacaatatatatattcattcactcctgaacatcaaccaggaggaggaggatggaccttaataatacacagtctagaaactctatatgaagactggctacatttagaaaatatatggacagaaacaaatataggactgcctttagttcgctacctaggatgctcttttaaattttaccaatcacaagaaacagactatgtagtagtatatgataactgctggcctatggtagacacagaactatcacacgcagacgcagcaccacaaagaatgctacaaaaacaacacaaaattataatacctagcttaaacacaagaaaaaaaagaaaaccatataaaaaagtatgggtaaaaccaccctcacaaatgcacaaccactggtacttttcaagagacatttgcaaaactcctttagtaatgctaaccgcaacagccgttgacttaagaaacccatttgcaagacctgaagcaataagcaataacatttcattactatgcttaaacgttagattatttcaaaacacaaacttccaacacccaccagaaacatcttattactctccaaaaatgctaacagccacagacaaaatgtacctatatggaacattttccgaacatgagacagcaaaagttcaagacctatttcccttaggaaactcaaagcaattacaactaggaaaaacatacagagaattaaataatactactgacattaagctatcaaacctaggaaacccattccataatcaagcaaacaatcaacaagaatttacaatatactattccaaaaaaccatttacagacacatattggttcggcaacaaaaccgcaaatttaaaaaacaatactaacatacaaatactagattctccttactacattacagtaagatacaacccagacaaagacacaggagcaaaaaacaaaatatacctagtacgaaactttgaagaaacaaactggaaagaaccaagcaatacaaacttaattttagaaggattacccctttattacatgttatggggatggttagattggcaaaaaaaactaaaagaagcagtaagaatattcaatgactacactctagtaattataacagaccaatttgatgtagaactaccatactatgtactaattgatgatgattttcgtgacggttttgaaccttatggagaactaacaaccccacacgtacaaccatcacaatatactactcaaaactggtttccaaaaactacatttcaagaacaatctatacaacacatatgtgacacaggtccatttacacctaaaccaccatggaaacattacttacaagctagatacagttatcaatttcactttaaactaggaggatgtccaaaacttctaaaaaagccatctgatccttgtttacagtcaaggtggaccactcccgataacatcgcaagaccaactcaaatcacgaatccttcactaccaccagaaacagaactatactcatgggactgggaagaagactacattaaaagaaaagctattaaaagaattaaacaatacacaccagttgataaaaacatactctcaattacagagtccacgagagagccaccaccactcaagaaaagaaaaacaacaacgacatcggagacggaggaagaggaggagaacaacctcctccagcagctcctcaagctcagacaacagcgacaacaactccaacagctcctccaactagaaggtataccataaaaaactgtaaaataaaagttaagctctttcctacaaattcacctataaaaaacagaccttttaaaccacatgaatatgaaaccgaaaaacaactttgcagtatctttagaagaccccctagacactttttctacgaccacccttattacccttacctacctcccgaacctaaagtaccaaaaataaactttgaccttggttacaaattgtaaacaataaaaacttcaaggccaactaatttcacttgtcggtgtccatttatttaagttaaacttatataaacatccaccactctcccaacattgttggcgccaaaagggggctccgcccccttacacccccaagggggctccgccccctcacacccccaagggggctccgcccccttacacccccaagggggctctgcccccttaca

SEQ ID NO: 4216 - protein, 667 aa, Betatorquevirus sp.
MPPYWTYRRRRWTRTKRRRPHFRTWRARQTFRRNKYKRRWRRHRKVKRRRFKKKLTKITIKQFQPKCVKKCKIKGTKCLFQGSPLRSNNNFIQYIYSFTPEHQPGGGGWTLIIHSLETLYEDWLHLENIWTETNIGLPLVRYLGCSFKFYQSQETDYVVVYDNCWPMVDTELSHADAAPQRMLQKQHKIIIPSLNTRKKRKPYKKVWVKPPSQMHNHWYFSRDICKTPLVMLTATAVDLRNPFARPEAISNNISLLCLNVRLFQNTNFQHPPETSYYSPKMLTATDKMYLYGTFSEHETAKVQDLFPLGNSKQLQLGKTYRELNNTTDIKLSNLGNPFHNQANNQQEFTIYYSKKPFTDTYWFGNKTANLKNNTNIQILDSPYYITVRYNPDKDTGAKNKIYLVRNFEETNWKEPSNTNLILEGLPLYYMLWGWLDWQKKLKEAVRIFNDYTLVIITDQFDVELPYYVLIDDDFRDGFEPYGELTTPHVQPSQYTTQNWFPKTTFQEQSIQHICDTGPFTPKPPWKHYLQARYSYQFHFKLGGCPKLLKKPSDPCLQSRWTTPDNIARPTQITNPSLPPETELYSWDWEEDYIKRKAIKRIKQYTPVDKNILSITESTREPPPLKKRKTTTTSETEEEEENNLLQQLLKLRQQRQQLQQLLQLEGIP

SEQ ID NO: 4217 - protein, 106 aa, Betatorquevirus sp.
MSSVWKKPTSSPRYQEQQWMSAVFHFHDIFCHCEDPQLHFCILINKQSPCPKPESDIRNIKCLLTGRTDADDGQEQKEDDPIFEPGELDRLFDETNTKEDGEDTER

SEQ ID NO: 4218 - DNA, 2640 bp, Betatorquevirus sp.
caggtactggaggtgagtgaaaccaccgaaattaaggggcttaatgggcttaagcagtcttggcggaacgggcaactaacttaatcactttattacagatgtccaaatttatgaaaccatgcctgtactcacaaaaaggagtagaaggacaatggctaaataatatttgcggatctcacgacctattctgtggatgctgtaacccctttgaccacctaaaagacatcttgaaaagacaaacatggcaccctaccagagatattggaacttctacagaaaatggagacgacccagatttccctactatcgacgccggagacttagaaaaccttttccgaaccgccgacgaagaaaacgaacggtaagaagacgccgccattttaaaacttataaaaagaaactaaaaagaattaaaatacaacagtggcaaccatctactattaaaaaatgccacattaaaggatatttatgcctttttcaggcgggacaaggtagagaatccaacaactacactttattcaaagaaagctacaccccggaacatgaaccgggcggtggcggttggtctctacaacaactatcacttggaaatttattccaacaaaacaatgacttaatgaactactggactaaaagcaattatagactaaatatgtgtagatactatggagtaacattctacctatttagacaacaatttactaactatgtattttcatacttctgggacgcccctaaaaatgtaaccaaatattactatgcaagctaccacccaatgaaaatgttagaatatcatagaaaagtagtagttccaagctttgcatcacaaccacacaaaagaaaaccatacaaaaaaattaaaataaaaccaccaaaactaatgaaaacccaatggttctttcaacaacacttatcagactacccactaatatacttttcagcaacagcttgctcactagacaacatgtttggttcagacaaagcagaaaacagtaatgcctctatatacatgctaaatacaggcttttttaaacatccctgtttccaattcaaatcaccagtagaacccacatatggatacacaccaaactcagaaaactacctatggggaatacaaaatgaatatgaaatttttaaacaaaacaaaagatcccaagctatatacctaggacaatcaatgctaaatgaacccggcacagctatgggacaatatgccgcatccaaaaaaggcacctggggcaacccatttcactggcaatacttaacaggttcacataaaacctttataacattagcaacacaaacaccaagcgaattcctacaatcaacttcagacctacaaaaaaatttagaagacacacaagaaagacacttaccatcagtactaacagtaagatataacccatacaaagacaaaggaaaaggaaataaagtatattttatacctacatacaacagttctcataataattgggaaccaacatcagacccagacttaatgctcactgattatccactatggatactattatggggcttagaagacataatgaaaaaaatgggaaaatgcccaaatatagacaatgactggatactagtaatacaaactagctatttttcagactcagaaaaatactacgtaccactttcatgggactttgtacatggacagggcccctacggaaaaccacacgaagaaataaacccacacgacaatacatactggtttccaaaattcagatttcaaagacaagctttaaatgacattatacaaacaggaccagctgtagttagatttgaccacacaaaaaatatacaagccttatgtaaatatgatttttcttttaagtggggaggcaacccatcaccaatggaaaacgtctacgacccaaacagtcaacccattacccccacccccggtggattcggcctacaaaatgaaatcactaatccagcaacagggatcgaaacattcctatatcccttcgacattagacgcgacttccttacgcagtcagctacaaaaagaattacagaaagcacaactgatgaaagatgtttgttcacagatggaacagaaaatccaacagacgtcaaactcttcccgcaagaaacacaaacgaaaaagaccccggaaacacaagaggagacactactccagcagctcgagcacctcagacaattcaacctacaactccaacagcgattcaacaacctaaaacaatcgtttttacaaatgtaaaaaaagcatacttatttccaccagaaaaacctaaaaaaccccgtagatttaccccatacgaatgggaaacagaaaaacaaatagcatcatggctaaaaaggccaatgagatactttgccacagatgaccccttttacccatgggtacccccagaacctctcgttaactttgatattgtaactaagtactcaaataaaggccagcattaattcacttagtggtgtctgtttcttttattataaacttaaataaacatccaccgcctccctaatacgcaggcgcaaagggggctccgcccccttaaacccccaggggggactatataactaactacacttccgaatggctgagtttatgccgccagacggagacaagaaaacttcttggctgcttaaggg

SEQ ID NO: 4219 - protein, 666 aa, Betatorquevirus sp.
MAPYQRYWNFYRKWRRPRFPYYRRRRLRKPFPNRRRRKRTVRRRRHFKTYKKKLKRIKIQQWQPSTIKKCHIKGYLCLFQAGQGRESNNYTLFKESYTPEHEPGGGGWSLQQLSLGNLFQQNNDLMNYWTKSNYRLNMCRYYGVTFYLFRQQFTNYVFSYFWDAPKNVTKYYYASYHPMKMLEYHRKVVVPSFASQPHKRKPYKKIKIKPPKLMKTQWFFQQHLSDYPLIYFSATACSLDNMFGSDKAENSNASIYMLNTGFFKHPCFQFKSPVEPTYGYTPNSENYLWGIQNEYEIFKQNKRSQAIYLGQSMLNEPGTAMGQYAASKKGTWGNPFHWQYLTGSHKTFITLATQTPSEFLQSTSDLQKNLEDTQERHLPSVLTVRYNPYKDKGKGNKVYFIPTYNSSHNNWEPTSDPDLMLTDYPLWILLWGLEDIMKKMGKCPNIDNDWILVIQTSYFSDSEKYYVPLSWDFVHGQGPYGKPHEEINPHDNTYWFPKFRFQRQALNDIIQTGPAVVRFDHTKNIQALCKYDFSFKWGGNPSPMENVYDPNSQPITPTPGGFGLQNEITNPATGIETFLYPFDIRRDFLTQSATKRITESTTDERCLFTDGTENPTDVKLFPQETQTKKTPETQEETLLQQLEHLRQFNLQLQQRFNNLKQSFLQM

SEQ ID NO: 4220 - protein, 101 aa, Betatorquevirus sp.; identical to SEQ ID NO: 3277

SEQ ID NO: 4221 - protein, 131 aa, Betatorquevirus sp.; identical to SEQ ID NO: 3725

SEQ ID NO: 4222 - DNA, 2640 bp, Gammatorquevirus sp.
ccacgcccccgccgccatcttgggtgcggcagggcggggcaattcgggctagggcagtctagcggaacgggcaagaaacttaaaactatttgtttttagatgtacagattctacaaacaaactacctacaatggagacaccttaaaccaaatgtggatgtccctcattgctgattctcatgatattcactgcaaatgtgaagccccctttgctcaccttcttcaaagcatctttccacctggacacagagacagacaactaacaattgaacaaataactacaagagactttttacaatgccattctggtggaacagaagaagaaagccatggtttacaacttggagaaagcgccgctactttaaaacaagaagaaaaagaaaaccaagacccagaagaagatatagacgaccttatcctcgccgccgccgccgccgcagaagaaggtacaaggtaagaaaaaaactacaaaaaataactgttaaacagtggcagccagactctatagttaaatgtaaaattaagggacttggatgtttagtagcaggagcacaaggcagacaaccctactactacaccaccagtaaataccaataccctcaaccaaaagctccaggcggcggtggttttggagctgaactttttactttacaatacttatatgaagaatgggtggctagaagaaacatatggactagatctaatgactacaaagatttagttagatttactggatgtacattttacctatttagacacagaactacagactttatttttaactataacagacagccaccatttatattagaaaaagactattttaatgacttgcaacccatgtcaatgttactcagcagacatcatagaacaatacccagcctagccagaaaaccactaggaaaaccatatgtaaaagttagaattaaaccacccaaacaaatgctaacaaaatggttttttcaagaagactttgctacacaaggtctatttacaatatcagcctcagcagcaaacttatcatgggcatactataatcctgacacacaaagcagatgcttaacattacactctttaaacaccacattctatgctaatgcagactatggagctgcagcaacactaccatggtatccatacaactcatggccacattcaactggacttaaattttgtagaaaagtaaacaataaatgggtgtccacaagagtaaatcctaccacctatacagactcagtatcatacaatactggcttctttcagccaggtgtgctacaagcaactaaaatagtagatgcatccacacaagatacagaaatagaaaaggcagcggtagcaatgtcatctttacccatagctacatttagatacaacccagaagaagacacaggacaaggaaatgtagtatggctaacaagcacacttactaactcacactgggagcaaccacacctaacagaccttattatagtgggcaaaccactatggcaagcattctatggctttcaaagctacatagaaaaaacaaaaaaatacaaagactggctaatttcaggaatctttgtatgcaaatgcccttcactaaaaaggctatcaacaacaactcaaacaacatttgtatttgtagaccttgattttatacaaggtaaactaccctatgaagagaccataacagataacaggaaaaaattttggtacccagttactgaaaaccaacaaaccagtatagctgccctagtacaatgtggaccatatgtcccaaaatatgcttaccaagatgaaagtacctgggaactaacatacaaatatatttttcattttaagtggggaggcccatatgtctcagaagaacttgtacaaaacccaaaaaaccaagggaaataccccgttcccgatactatctcacaagcaatacaagttgctaacccactcaaacaaaccattaaaacaatgcttagagactgggactacagaagggggattgttacaacaacagctcttaaaagaatgtcaaaacacctcgaaactgattcatctctccaatctgatgactcagaaactccaaagaaaaagaaaaaaatcacagcagaaataccatgccacgaagagaaaacacaagagatccaacaatgtctcctctctctcttcgaagaaagtacctgccaagaaacggaggacctcaagcagctcatccagcaccagcagcagcagcaacaaaagctcaagctcaacctcatcaagctcctaatggacttaaaacatcaacaaagaattctacaacatcaaacaggcatagattaactacttttaaacctggctttgaacaagacacagaaactcagttagcacaagcatttaaaagacctgttagaaaatttaaagaagacccccctttttatccctggttaccaacaacacctattgtaaactttcaccttagatttaaagactaggccgacactgttcacttagcggtgtttgtttaataaagtttgcaccccaaaaaaattgtaaaataaaaaaaaaaaaaaaaaaaataaaaaattgcaaagtaaaaaggggaagtgggggggccaagccccccccacaccccccgcgggggggggcagagccccccccgcacccccccctacgtcacaaa

SEQ ID NO: 4223 - protein, 667 aa, Gammatorquevirus sp.
MPFWWNRRRKPWFTTWRKRRYFKTRRKRKPRPRRRYRRPYPRRRRRRRRRYKVRKKLQKITVKQWQPDSIVKCKIKGLGCLVAGAQGRQPYYYTTSKYQYPQPKAPGGGGFGAELFTLQYLYEEWVARRNIWTRSNDYKDLVRFTGCTFYLFRHRTTDFIFNYNRQPPFILEKDYFNDLQPMSMLLSRHHRTIPSLARKPLGKPYVKVRIKPPKQMLTKWFFQEDFATQGLFTISASAANLSWAYYNPDTQSRCLTLHSLNTTFYANADYGAAATLPWYPYNSWPHSTGLKFCRKVNNKWVSTRVNPTTYTDSVSYNTGFFQPGVLQATKIVDASTQDTEIEKAAVAMSSLPIATFRYNPEEDTGQGNVVWLTSTLTNSHWEQPHLTDLIIVGKPLWQAFYGFQSYIEKTKKYKDWLISGIFVCKCPSLKRLSTTTQTTFVFVDLDFIQGKLPYEETITDNRKKFWYPVTENQQTSIAALVQCGPYVPKYAYQDESTWELTYKYIFHFKWGGPYVSEELVQNPKNQGKYPVPDTISQAIQVANPLKQTIKTMLRDWDYRRGIVTTTALKRMSKHLETDSSLQSDDSETPKKKKKITAEIPCHEEKTQEIQQCLLSLFEESTCQETEDLKQLIQHQQQQQQKLKLNLIKLLMDLKHQQRILQHQTGID

SEQ ID NO: 4224 - protein, 118 aa, Gammatorquevirus sp.
MYRFYKQTTYNGDTLNQMWMSLIADSHDIHCKCEAPFAHLLQSIFPPGHRDRQLTIEQITTRDFLQCHSGGTEEESHGLQLGESAATLKQEEKENQDPEEDIDDLILAAAAAAEEGTR

SEQ ID NO: 4225 - protein, 118 aa, Gammatorquevirus sp.
MPRRENTRDPTMSPLSLRRKYLPRNGGPQAAHPAPAAAATKAQAQPHQAPNGLKTSTKNSTTSNRHRLTTFKPGFEQDTETQLAQAFKRPVRKFKEDPPFYPWLPTTPIVNFHLRFKD

SEQ ID NO: 4226 - DNA, 2639 bp, Gammatorquevirus sp.
cgggagcccgaggtgagtgaaaccaccgaggtctaggggcaattcgggctagggcagtctagcggaacgggcaagaaacttaaaatatactttattttacagatgagcaagtctacattttttaaaccaccacaatacaattcttatggaagagaacaactctggatagatgtattcactttgtcacacgatacttggtgtggttgtaatcatcctttggctcatcttattgaccgtgttctgcctcctggtcataaagatagagaccttactatttcagagatcttgtcccgggacctaaaccaagcatgccattctggtggcctagaagaaatcgctggtggtcccgcaccagatttagatacagaagaaggccctacaaacgaagaactagaaaaactattttcagaagacgccataaacgagctcctagacgccgccgcaagagacgaaggaccaaggtaagaagaaaaaagaaattcttaaaactaattcaatggcaaccaccattcattagaaaatgtaaaattataggatatgaaactgttatactaggagctaatggaagacaatttagagactatacttcaacaatgaatgaatgggtacctccaactgtaccagggggtggaggattttccatttctcattatacattagaatacctttatgaacaatatgaactgcacaataacatatggacatgcacaaatactccatatgatctttgcagatttacaggcacaacacttatattttacagacacccacacacagattttatagttcagtaccacaaatactaccctatgacagaaacctcacacacaccaatgcacacacatccactactaatgctactctctaaacacaagataattataccctcaatgttaacaaagccacatggaaaaagaacagttaaaaagaaaattagacctcctagtcaaatgtcaaacaaatggttctttactcaagatttttctaaacaaccatttttactcctaaaagccactgcctgtgacttaaactatgttaaaataggaaaatacagtgagaataacttaacaaacctatggagcctttcacacaaattttttgacaatggacaatttggccaaggcacaactacaagtacattatacaaacccatacacacatggatatacaatactaactgggtatcaggcaaatatttaaaaagcacaccggaaagactagtaaacatgagtgacaattacctttccagtataaactatgatactgggtggtttaattataaaatattaaatgcacaagaactaacacaaccatctagcaaaactaaaccagcctttttaaccagatacaatccatccacagacacaggaaaaggcaacaaagtctggcttaaatctatttttaaacaagactggcaaccaccacaaacagaatcatatttaatatttgcagatgaacccctttggcttatattctttggatggctagactacattaacatactaaaaccagactatgatatattttacaagtacacagtagttatagagtcaccttatataaaaaagccaacagacattagatacattataccaatagatgacagttttatgaatggcaaaagtccatacaatgccacagttacagacacagaaaaacaaaaatggatacctacacttagacaccaacaacaaactctaaacaacatagtactatgtggaccatttattactaggccagaaggtaaattatctaactgggaactacatctaaaatacaaatttttttttaagtggggaggaacccagcaagcagaaaacaccatactcgatccaacaacagcaagtaaatttcccgtgccagataagttcttcaaaacaatacaaattactgacccaacaaaacaaatcccacaaacaatcctacacacctgggactacagaagagacattgttacacaaaaagctcttaagagaatgcttgaacacttaccagatgaacaatctgtatcaacagattcagaataccacaaacaccacaaaaggccaaaaatgtctgccagacaagtatactaccaaaaagaaaaagaagacacaatcaactgtctccaacagctctacggagaaagtacctgccaagaagaagagaagacagaagaaaaaacactgcaagagctcatccagcagcagcagcagcagcagcacatcaagcacaacctcctcaaattaatcaattctatgaagagaacccaagtacaaatgcaactgcaaacaggaatactgtaaccctaaaaagatttaaaccaggctttgaagaagaaacagaaaaacagcttgcagcagcttttaagagaccccctagaacatatacatgtgaccctcctttttatccatggttaccaataacacccaaagtgtgctttaagcttaactttaaaggctaggccaacactgtacacttagtaaagcatgtttaataaagtttaaccccaaaaaaaaaaaaatttgtattttagatgtagttcccagttagataatttaccttctgaactaagtgaggtgacgaatggctgagtttaccccgctagacggtgcagggaccgatcgagcacagcgaggaggtccccagctgcccaaggg

SEQ ID NO: 4227 - protein, 658 aa, Gammatorquevirus sp.
MPFWWPRRNRWWSRTRFRYRRRPYKRRTRKTIFRRRHKRAPRRRRKRRRTKVRRKKKFLKLIQWQPPFIRKCKIIGYETVILGANGRQFRDYTSTMNEWVPPTVPGGGGFSISHYTLEYLYEQYELHNNIWTCTNTPYDLCRFTGTTLIFYRHPHTDFIVQYHKYYPMTETSHTPMHTHPLLMLLSKHKIIIPSMLTKPHGKRTVKKKIRPPSQMSNKWFFTQDFSKQPFLLLKATACDLNYVKIGKYSENNLTNLWSLSHKFFDNGQFGQGTTTSTLYKPIHTWIYNTNWVSGKYLKSTPERLVNMSDNYLSSINYDTGWFNYKILNAQELTQPSSKTKPAFLTRYNPSTDTGKGNKVWLKSIFKQDWQPPQTESYLIFADEPLWLIFFGWLDYINILKPDYDIFYKYTVVIESPYIKKPTDIRYIIPIDDSFMNGKSPYNATVTDTEKQKWIPTLRHQQQTLNNIVLCGPFITRPEGKLSNWELHLKYKFFFKWGGTQQAENTILDPTTASKFPVPDKFFKTIQITDPTKQIPQTILHTWDYRRDIVTQKALKRMLEHLPDEQSVSTDSEYHKHHKRPKMSARQVYYQKEKEDTINCLQQLYGESTCQEEEKTEEKTLQELIQQQQQQQHIKHNLLKLINSMKRTQVQMQLQTGIL

SEQ ID NO: 4228 - protein, 120 aa, Gammatorquevirus sp.
MSKSTFFKPPQYNSYGREQLWIDVFTLSHDTWCGCNHPLAHLIDRVLPPGHKDRDLTISEILSRDLNQACHSGGLEEIAGGPAPDLDTEEGPTNEELEKLFSEDAINELLDAAARDEGPR

SEQ ID NO: 4229 - protein, 113 aa, Gammatorquevirus sp.
LSPTALRRKYLPRRREDRRKNTARAHPAAAAAAAHQAQPPQINQFYEENPSTNATANRNTVTLKRFKPGFEEETEKQLAAAFKRPPRTYTCDPPFYPWLPITPKVCFKLNFKG

SEQ ID NO: 4230 - DNA, 2637 bp, Gammatorquevirus sp.
cgggagcccgaggtgagtgaaaccaccgaggtctaggggcaattcgggctagggcagtctagcggaacgggcaagaaacttaaaataacttttgttttacagatgagccgcttttttaagccaactaaatacaacaatgaaaccaaaaaccaactatggatgagtatgatagctgactctcatgatatttgctgtgactgccctactccatttgctcacctactagattctatttttccagaaggacacagagacagaaacaattcaattgactacattattaaaagagattggaaagaatgccattctggtggagaagaagacgaaagccatggtggggccgctggagaagaaaaagatataccacccgtcaaaagagaagaagaagatataccaacagaagattcaaacgtagaagaactactcgccgccgtcgccgccgccgaggcaaggtaagaaaaaaaaaacaaaaacttaccttgcaacaatggcagccagacagaattgtgctatgcaaaattaaaggctttggagaacttatactaggtgctgaaggaactcaatttcaatgttatactaatgaaaaatactcagtacctttaccactatgcccagggggaggtggatttggagcagaaagatttacccttgaatggctatataaacaacacatctttagaaacaacatatggactaaaagtaactactggacagacctttgtagatacataaaagttattttttacttttacagacaccctacacaaagttttataatacagtacagcagacagcctccatttaacatagacaagacaacttacccatcataccacccattggtactattactaacaaaacatcataaaatggttcctagcctacaaagaaaaccaaagggcaagccatatgtaaaagtaacaataaaaccaccaaaacaaatgttaactaaatggttttttcaaaaagaatttgcagaatatgacttatgtcaaatagtaggttctgttatttcattagactacccaagaatgggttgttgtaatgaaaacagaataataacaatatggtatttaaatccaaacttttaccaaaactctgactgggcacaaacaaaaaatgtgccatatgaaccaatcactggtatacaagaaaatagatacacattttattatcctaaaggccctgctgctggctatacaccaaacttccaaacaggacaaaaaacagaacatgcatattactataacagcattaactgggatggtggttggttttcaaacaaaatattacaagctactaaagtaaaaaaagatggacaagatcacctacctttaccattagctgctgctagatataatccagcagaagatgatggcaaaggaaatcaaatttggctaacatctgtagctacaggacaatatgctagacctcaagaagatatattactttttgataatacacctctttggcttgccttttggggatttacaaactttttacaaagaattaaaaacaaatcatttttttcattatacatgtttgtaattaaaagctcatacataagacctggtccaacagctcaaacaaaagcattctttccctttgtagatgctaagtttacagagggaaaaaatccatatgacagctacttaacatacacagacaaaaaactatggtaccctactgtatggagacaactacaaacaataaatgctatttgtgagacaggcccatatgtacctaaattagcagcagacagacaaagcacatgggagttggcttacaaatacattttttcttttaagtggggaggacccctcatcaatgatcaacaagtgtcagatccaaaatcaaaagacaagtatcctgtacccgatacaatgcaagaggcaatacaaatctgcaacccaaaacaccaagacccccaaacaattttccatgagtgggattatagaagggggttcattacaaacccagctattaaaagaatgtcagaaaacctcatcattgattcagatgtctcatcagatacagaggcttcacaaaaaaagagaaagagagttactacagagctcagatatcccgaagaaaagaacaaaaaaatcaagaaatgtctcctctcactctgcgaaaaaagtacatgccaagaggaggaagaggtctcggacatccaccagctcatcatcaagcagcaccagcagcagcagcagctcaagcacaacatcttaaccttactaaaagacatgaaagccaaacagaaactactacaacttcaaacaggagttttagaataaaattaactccttttaaacccggctttgaaagagaaacagaagatgagctagctaaagctttctttagaccctctagactgtttaaagaagatactcctttttacccatggctacccaaatttaccccccttgtaaactttcaccttaactttaaaggctaggcatgcactgttcacttagtaaaggatgtttaataaagtttgcaccccaaaaaaactgtaaaattaaaaaaaaaaaaaaaaataaaaaattgcaaaaattcggcgctcgcgcgcgctgcccgctagacggtgcagggaccggatcgagcggagcgaggaggtccccggctgcccgtggg

SEQ ID NO: 4231 - protein, 668 aa, Gammatorquevirus sp.
LERMPFWWRRRRKPWWGRWRRKRYTTRQKRRRRYTNRRFKRRRTTRRRRRRRGKVRKKKQKLTLQQWQPDRIVLCKIKGFGELILGAEGTQFQCYTNEKYSVPLPLCPGGGGFGAERFTLEWLYKQHIFRNNIWTKSNYWTDLCRYIKVIFYFYRHPTQSFIIQYSRQPPFNIDKTTYPSYHPLVLLLTKHHKMVPSLQRKPKGKPYVKVTIKPPKQMLTKWFFQKEFAEYDLCQIVGSVISLDYPRMGCCNENRIITIWYLNPNFYQNSDWAQTKNVPYEPITGIQENRYTFYYPKGPAAGYTPNFQTGQKTEHAYYYNSINWDGGWFSNKILQATKVKKDGQDHLPLPLAAARYNPAEDDGKGNQIWLTSVATGQYARPQEDILLFDNTPLWLAFWGFTNFLQRIKNKSFFSLYMFVIKSSYIRPGPTAQTKAFFPFVDAKFTEGKNPYDSYLTYTDKKLWYPTVWRQLQTINAICETGPYVPKLAADRQSTWELAYKYIFSFKWGGPLINDQQVSDPKSKDKYPVPDTMQEAIQICNPKHQDPQTIFHEWDYRRGFITNPAIKRMSENLIIDSDVSSDTEASQKKRKRVTTELRYPEEKNKKIKKCLLSLCEKSTCQEEEEVSDIHQLIIKQHQQQQQLKHNILTLLKDMKAKQKLLQLQTGVLE

SEQ ID NO: 4232 - protein, 117 aa, Gammatorquevirus sp.
MSRFFKPTKYNNETKNQLWMSMIADSHDICCDCPTPFAHLLDSIFPEGHRDRNNSIDYIIKRDWKECHSGGEEDESHGGAAGEEKDIPPVKREEEDIPTEDSNVEELLAAVAAAEAR

SEQ ID NO: 4233 - protein, 114 aa, Gammatorquevirus sp.
MSPLTLRKKYMPRGGRGLGHPPAHHQAAPAAAAAQAQHLNLTKRHESQTETTTTSNRSFRIKLTPFKPGFERETEDELAKAFFRPSRLFKEDTPFYPWLPKFTPLVNFHLNFKG

SEQ ID NO: 4234 - DNA, 2636 bp, Gammatorquevirus sp.
cgggagcccgaggtgagtgcaaccaccgaggtctaggggcaattcgggctagggcagtctagcggaacgggcaagaaacttaaaatatactttttattttagatgtccaaaatacaagcaaaagacttctttactccaacaccgtataatcaggatacgaagaatcaaatttggatgtctcaaattgctgattctcacgataatatctgcagttgtaaccatccctttgctcatctcattgccaatatctttcctgtgggtcacaaagatcgtgatctcacaattaacaaaattcttttaagagattacagagaaaaatgcctttctggtgggccagaaggcgcaagccatggtatggcagatggaggtaccgccgcaacaagtactacaggcgcagaaaaaagccaagaagaagaagacttcccagaagacgaggtagacgctttactcgccgccgccatagaagaaggcgcaaggtaagaagaaaacttaaaaaaattaatatacaacaatggcaaccagatagaattaaaaaatgtaagattaaaggatactcctgcctagtactaggcagtgaaggcagacaaatgtactgttatactaatgaagcctctgaatacttacaacctaaagctccaggagggggaggttttggaacagaagttttttctttaaaatggctataccaagaatggttagctcacaacaacatatggactgccagtaatgaaaatactgatctttgcagatatacaggcactaaaatcacagtatacagacacccaactgtagactttattttctcctttgacagaatgccaccatttaatattaataaatttacctacccagaattacaaccacaaaacatgctactccacaaacataaaaaaattattttaagcagaagaactaatcctaaaggaaaaattaaacacacatttaaaataggccctccaaagcaaatggtaactaaatggttttttcaaagagactttgcacctgcacatctctttagaatatctgctacagcagccacttttgaataccctagatatggaaagggcaatgccagtaacatactaacagtacctgcattaaacacttttttttttgcaaacagtgactgggcacaaacaaaagcaggaccatacacaaacatacatacagcccctgcaaaatactattttaaatatagagatagcagaggcaatgaaattaaaggcgaatatacaaaacctataaagtctaccatagacggttactaccaatccatagactacagcacaggtattttccaaacaggaatgctacaagcatttttcattagttcacaaagtcatgaagccacttcacaggcagcattacctgttatttacttaagatacaatccacatgaagatacaggccatggtaatgaagtttatttaacctctgttttcaatgggcaatacaacaagccaggtgcaactgcacctgacttgcaatttaacaatgtccctctttggatggccttttggggatactacaactacctactaataagtacagctaataaaggcctatacttaacacatatgtttgtagtaaaaagcccagcactaaaaccattatcacaagctacagaccaatcacactatccaatactagaccaagattttatactaggtaaactaccatggggtgaatacctgtcaaaaaatgaaaaaaaactatggtaccctacagcacaaaaacaaacacaaattataaatcaaatagttagcactggcccttatgttcctaaactaaacaatcagccagacagcacatgggaattaccttacaaatatatttcttattttaagtggggaggaccacaagttcaagacccaaatgttgaagacccaacaagcagaaacaaatacaatgtccccgatacagtccaacaatcagtacaaatcgctgacccgtcaaaattacacccagaaaccattttccatgactgggactacagaaggggtattattacacaaacagctattaaaagaatgtcagaaaacctcgaaattgattcaattatctcatctgatgactcagaatcgccacccaagaaaagaaaagtcaccaaggaactcccatgcatcaaccaaaaagagaaaaaaatcaaggaatgtctcctctcgctctgcgaagagcctacctgccaagaaaccccacaaacacttcagcagcacatcgagcagcagcagcagcagcagcacaagctcagaaaaaacatcttgtacctcctaaccagcttaaagaaaacacagagacacatggagctacaaacaggaatattagactaactagatttaaacctggctttgaagaacaaactgaaaaagaactatctataattttcaaaagaccaccaagaacctacaaagaagacgcccctttttacccctggcttccaattgaacccaaagttaactttaacctcaactataatttctaggccaacaatgtacacttagtaaaacatgtttaataaagtttgcacccaaaaaaaaaaaaaaaaaaaaataaaaaattgcaaaaattagtttaccccgctagacggtgcagggaccggatcgagcgcagcgaggaggtccacagctgcccatggg

SEQ ID NO: 4235 - protein, 670 aa, Gammatorquevirus sp.; identical to SEQ ID NO: 4175

SEQ ID NO: 4236 - protein, 125 aa, Gammatorquevirus sp.; identical to SEQ ID NO: 3524

SEQ ID NO: 4237 - protein, 120 aa, Gammatorquevirus sp.; identical to SEQ ID NO: 4177

SEQ ID NO: 4238 - DNA, 2635 bp, Betatorquevirus sp.
ttacacccccaagggggctccgcccccttacacccggggcaattcgggctagatcagtctggcggaacgggcaagaaacttaaaatatatattaattttacagatatgagctctatgtggaagaaaccatggtactcacccagacaacaagaacaaaattggcttaatggtatttggcaaacccacgacaatttttgcagctgcggagacacttggcttcatcttttatactgcattaacaaagattctccattcagaaagcccctaaaggatattaaaaatatacaatgcctacttattggaaaagaagacgtgccaactacttcaaaagaagaagacgaccctggttttctacctggagagctagacgcacttttcgacgaaagttctacaaaaagagataccgaagacgccgatacaaggtaaaaaaaaagaaacattatcgtaaaagacaaaaaataattataaaacaatttaatcctaaatgtatgagaaaatgcaaaataattggaactaaatgcactattcaaggtagccctttaagatgccaccacaactttatacaatactataacagtaaagtacctgaaaaatatccaggaggaggtggatggagtcaactaatatttacactagattctttatatgatgactttgaaaaaatgcaaaatatatggactgcttcaaactgtactttacctcttgctaaatataaaggttgtactatgaaattttatcaaacaaattatattgattacattgttatatatgatacttgttggcctatggtagacacatacttatcacacccagatgccgcaccatctatgatgcacttaaaaaaaaataaaatatgtatacctagcagacaaacacaactaagaaaaaaaccatacaaaaaggtttttatacaacctccttcacaaatgtacaataaatggtattttcaaaaagaaatatgtaaaacaccattactaatgattacaacaacagcaacatcatttacatttccatactgctcaccaaaagcagaaaacaataacatatccattcactttatagacccaacaacctttagaaacttaaactttcaaaactacccaataacacaaggctattggtgtaaacaagcaaaacttgaacatgaagacagagaattacctatgtacttatatgccataagaaacccaaacagcctaatacaacagtcaaaaataaaccaaaacaatgtagacaaattaggcataataccactatgtaacagtaacacatttcaactaggacaagaagtaaaattaggaaccacacaaaacaatccagaacattggggaaacccattctatcactcaattattgatgaagacagttatactatatatatctcattaatgactccagcagaacttcacaatctaaatgcaacaccatcaaaagaatactatgtaacaaagctaacacaaccactagtacatacattaagatataaccctgaaacagacaaaggattaaaaaacaaagcatggatattaaaaacaaatgactacaataacacaaatgaaccagaaaacataaatttacaaatagaaggctttccactatatgtactcttttggggatggacagactgggttaaaaaaacaggtttaattaataatcttgatgataatggaattgttgtatttcaaacagaccaatttaatgaacagttaccactgtatattccaatagactttgactttttacatggctatgacccttatgttgaacatagttatgacggacaaccagcattaccttctagttacagtcaaaaacattggtaccctaaactaaaatttcaagaccaaagcatagaaaaaatttgtatgtccggtcctggttgtcctagactactaaataaagaatatatgcaagcatttgtaaaatacaaatttcactttacttggggaggctgtcctaaacaattagaaaaagcatgtaatccttgttcacagccaacatggaccacgcccgataacttccatggacgacttgaaatccagaacccaaacaccaatccacttacagaacttttcagctgggactgggacggtgactatgttacaacagaggctatcgaaagaatccagacatacacaaaaactgataaatcatcttttatctcaacagcaaacaaaaacaacaccaaagcagcaatacagaaggaacaaaaagcgacacaagaggaggaggagaagaaactcctcaaccagctccagctcctccaacaacagcgacaacaactccacagcctcctgctcaacagaataattacaaactaaaaggctgtaaaataaaagcatacctatttcctcctaaaaaaccaaaagttagaaaactaacacccagagaacaagaagaagaaaacctaatagccgctatatttcacagacctcctagaaaattttttggagatactcccatatatccatggttaccccctgaaccttatgtaaactttgaattaaactacaaaaaataaacaaggccaacaatattcacttagtggtgtcagtttatttaagtttaacttatataaacatccaccgcctccctaaaattcaggcgccaaaattcaaaagggggctccgccccc

SEQ ID NO: 4239 - protein, 677 aa, Betatorquevirus sp.
MPTYWKRRRANYFKRRRRPWFSTWRARRTFRRKFYKKRYRRRRYKVKKKKHYRKRQKIIIKQFNPKCMRKCKIIGTKCTIQGSPLRCHHNFIQYYNSKVPEKYPGGGGWSQLIFTLDSLYDDFEKMQNIWTASNCTLPLAKYKGCTMKFYQTNYIDYIVIYDTCWPMVDTYLSHPDAAPSMMHLKKNKICIPSRQTQLRKKPYKKVFIQPPSQMYNKWYFQKEICKTPLLMITTTATSFTFPYCSPKAENNNISIHFIDPTTFRNLNFQNYPITQGYWCKQAKLEHEDRELPMYLYAIRNPNSLIQQSKINQNNVDKLGIIPLCNSNTFQLGQEVKLGTTQNNPEHWGNPFYHSIIDEDSYTIYISLMTPAELHNLNATPSKEYYVTKLTQPLVHTLRYNPETDKGLKNKAWILKTNDYNNTNEPENINLQIEGFPLYVLFWGWTDWVKKTGLINNLDDNGIVVFQTDQFNEQLPLYIPIDFDFLHGYDPYVEHSYDGQPALPSSYSQKHWYPKLKFQDQSIEKICMSGPGCPRLLNKEYMQAFVKYKFHFTWGGCPKQLEKACNPCSQPTWTTPDNFHGRLEIQNPNTNPLTELFSWDWDGDYVTTEAIERIQTYTKTDKSSFISTANKNNTKAAIQKEQKATQEEEEKKLLNQLQLLQQQRQQLHSLLLNRIITN

SEQ ID NO: 4240 - protein, 106 aa, Betatorquevirus sp.; identical to SEQ ID NO: 2647

SEQ ID NO: 4241 - DNA, 2635 bp, Betatorquevirus sp.
caagggggctccgcccccttacacccccaagtctaggggcaattcgggctagatcagtctggcggaacgggcaagaaaattaatatactttattttacagatatgacatctatattgaagaatcctactctatcaccgagacaactcgaaaactcctggattaacataatttttcaatctcacgaccaaatatgtagctgtgatgacccctggctgcacctccttgatgtattaaacaaaaacggcaacgcacgcaaaccaagaaaagatattgaaaacataaaatggctccttattggcaaaccaaatattggagaaggcccttcaggtatcgaagaagacgaaactggttttacaagtggagacctagaaaaacttttcgcagaagaccctacacaagaagaagaagaacaagacgttacaaggtaaaaagacttagacttaaaaaacgaaagtttttaaaacttaaacaatggcaacctaaaactattataaaatgtaaaattgttggacttaaatgtttatttcaaggaagtggatatagagcacagcataattatatagaatatatgtactctactgtacctataaaccaaccagggggaggaggttggggattactagttttttcactaggaagcttatatgaagactatgatcacctacataacatatggacaaaaagtaatgcaggtttacctttagtaagatacacaggatctacattttggttttatcaaacatatgacacagactatattgttacatatgacacctgctggcctatggtagacacacctcacacacacgcagacagctcaccttacagaatgattcaaaaaagacataaaattgtcattccaagcaaagtaacaaaaaatagaaaaaagccttataaaaaagtacatattaaaccaccaacacaactaactaacaaatggtactttcaaaaagacatttgcgacacacctttagtaatgataaccgcaacagccgttaacctaaccacaccatttgctaacaccaacagcttgtctaactctattaaattttacagcttaaatacatttatttttcaaaaccctaattttgaacatccacctgaaactacaggatactcccacaaaatattaaatcaatatagtatgtatctatacgcaacaacaaccaaaaaaccatcagacgcagataccaatgagagaggattcaaagactggcttaaaactttaatttttttgggcaacccaagaacaaattttgaaggcagatcatttggagacagagacacttacactaaacaagactggggaaaccctttttatcacagatacttagaaattggtgacgaagatgatacttcatacactatctacacatccaaagcaacacatataaatataagacaaactataaacacacaggcaaaagaatgcacatcaacagattttcaaacaataacaggccccataatatatacattaacatacaacccagacaaagacactggacttaacaaaatatacttactaaaaacatggggtccagcaacactagatgaacctgaagattcagacttaatttttgaaggtttcccactaccacaacttacatggggatggacagactttattaaaaaattaaaaaaaataaatgacttagacagacactcactattactaattaaaactcaaaactttagcgacaacacattgaaagtatttttaccaatagacctagactttattgaaggtcacgacccataccaacataacaaactaaacaactatcaaactgattactacaacagtgaaaactggtttcctaaagttcaatttcaagaccaaacaattaacttaatagcaacatctcaaagaaacagtcccaaaacaaattcttatttacaagctggctgtaaatataaattttattttaaatggggaggctgcccaaaaactttacaaaaagcatatgatccttgtttacagtcaaaatggcccacacccgataacatcacaggacgacttacaatccagaatcctaacacacctccacaaacagaattattctcctgggactgggaaagtgactatgttaaaaaagaagctatccaaagaatacaatcgtatactacagctcatgaacttatcctcccatctacagaatcaaaatttcaaccaaaagccctcaaaaagcaagaaaaagacacagcgccacaagaggaagagaacctattcctccagctccacaaactccgaaaagagcgactccacctcgagctccagtgcagaatgaaaataatggaattaaaatcaaaaaatgcaaagtaattgtaaaactgtttccagatgaaaaacccaaaaacagacgtctaactcctaaagaaatggaagacgaaaaaatagtagctgcaatttttaaaagacctttaagaacatatataaatgatatacctacctacccatattgtgtacctgaacctaaagttaactttgatttaaattaccattaataaaatttcaaggccaacatacttcacttagtggtgtccatttattaaagtttaacttaaataaacagactccgcctcccaatcaataaggcctagaacctagggggctccgcccccttacacccc

SEQ ID NO: 4242 - protein, 680 aa, Betatorquevirus sp.
MAPYWQTKYWRRPFRYRRRRNWFYKWRPRKTFRRRPYTRRRRTRRYKVKRLRLKKRKFLKLKQWQPKTIIKCKIVGLKCLFQGSGYRAQHNYIEYMYSTVPINQPGGGGWGLLVFSLGSLYEDYDHLHNIWTKSNAGLPLVRYTGSTFWFYQTYDTDYIVTYDTCWPMVDTPHTHADSSPYRMIQKRHKIVIPSKVTKNRKKPYKKVHIKPPTQLTNKWYFQKDICDTPLVMITATAVNLTTPFANTNSLSNSIKFYSLNTFIFQNPNFEHPPETTGYSHKILNQYSMYLYATTTKKPSDADTNERGFKDWLKTLIFLGNPRTNFEGRSFGDRDTYTKQDWGNPFYHRYLEIGDEDDTSYTIYTSKATHINIRQTINTQAKECTSTDFQTITGPIIYTLTYNPDKDTGLNKIYLLKTWGPATLDEPEDSDLIFEGFPLPQLTWGWTDFIKKLKKINDLDRHSLLLIKTQNFSDNTLKVFLPIDLDFIEGHDPYQHNKLNNYQTDYYNSENWFPKVQFQDQTINLIATSQRNSPKTNSYLQAGCKYKFYFKWGGCPKTLQKAYDPCLQSKWPTPDNITGRLTIQNPNTPPQTELFSWDWESDYVKKEAIQRIQSYTTAHELILPSTESKFQPKALKKQEKDTAPQEEENLFLQLHKLRKERLHLELQCRMKIMELKSKNAK

SEQ ID NO: 4243 - protein, 108 aa, Betatorquevirus sp.
MTSILKNPTLSPRQLENSWINIIFQSHDQICSCDDPWLHLLDVLNKNGNARKPRKDIENIKWLLIGKPNIGEGPSGIEEDETGFTSGDLEKLFAEDPTQEEEEQDVTR

SEQ ID NO: 4244 - protein, 57 aa, Betatorquevirus sp.
LFPDEKPKNRRLTPKEMEDEKIVAAIFKRPLRTYINDIPTYPYCVPEPKVNFDLNYH

SEQ ID NO: 4245 - DNA, 2635 bp, Betatorquevirus sp.
caagggggctccgcccccttacacccccaagtctaggggcaattcgggctagatcagtctggcggaacgggcaagaaaattaatatactttattttacagatatgacatctatattgaagaatcctactctatcaccgagacaactcgaaaactcctggattaacataatttttcaatctcacgaccaaatatgtagctgtgatgacccctggctgcacctccttgatgtattaaacaaaaacggcaacgcacgcaaaccaagaaaagatattgaaaacataaaatggctccttattggcaaaccaaatattggagaaggcccttcaggtatcgaagaagacgaaactggttttacaagtggagacctagaaaaacttttcgcagaagaccctacacaagaagaagaagaacaagacgttacaaggtaaaaagacttagacttaaaaaacgaaagtttttaaaacttaaacaatggcaacctaaaactattataaaatgtaaaattgttggacttaaatgtttatttcaaggaagtggatatagagcacagcataattatatagaatatatgtactctactgtacctataaaccaaccagggggaggaggttggggattactagttttttcactaggaagcttatatgaagactatgatcacctacataacatatggacaaaaagtaatgcaggtttacctttagtaagatacacaggatctacattttggttttatcaaacatatgacacagactatattgttacatatgacacctgctggcctatggtagacacacctcacacacacgcagacagctcaccttacagaatgattcaaaaaagacataaaattgtcattccaagcaaagtaacaaaaaatagaaaaaagccttataaaaaagtacatattaaaccaccaacacaactaactaacaaatggtactttcaaaaagacatttgcgacacacctttagtaatgataaccgcaacagccgttaacctaaccacaccatttgctaacaccaacagcttgtctaactctattaaattttacagcttaaatacatttatttttcaaaaccctaattttgaacatccacctgaaactacaggatactcccacaaaatattaaatcaatatagtatgtatctatacgcaacaacaaccaaaaaaccatcagacgcagataccaatgagaaaggattcaaagactggcttaaaactttaatttttttaggcaacccaagaacaaattttgaaggcagatcatttggagacagacccacttacactaaacaagactggggaaaccctttttatcacagatacttagaaattggtgacgaagatgatacttcatacactatctacacatccaaagcaacacatataaatataagacaaactataaacacacaggcaaaagaatgcacatcaacagattttcaaacaataacaggccccataatatatacattaacatacaacccagacaaagacactggacttaacaaaatatacttactaaaaacatggggtccagcaacactagatgaacctgaagattcagacttaatttttgaaggtttcccactaccacaacttacatggggatggacagactttattaaaaaattaaaaaaaataaatgacttagacagacactcactattactaattaaaactcaaaactttagcgacaacacattgaaagtatttttaccaatagacctagactttattgaaggtcacgacccataccaacatgacaaactaaacaactatcaaactgattactacaacagtgaaaactggtttcctaaagttcaatttcaagaccaaacaattaacttaatagcaacatctcaaagaaacagtcccaaaacaaattcttatttacaagctggctgtaaatataaattttattttaaatggggaggctgcccaaaaactttacaaaaagcatatgatccttgtttacagtcaaaatggcccacacccgataacatcacaggacgacttacaatccagaatcctaacacacctccacaaacagaattattctcctgggactgggaaagtgactatgttaaaaaagaagctatccaaagaatacaatcgtatactacagctcatgaacttatcctcccatctacagaatcaaaatttcaaccaaaagccctcaaaaagcaagaaaaagacacagcgccacaagaggaagagaacctattcctccagctccacaaactccgaaaagagcgactccacctcgagctccagtgcagaatgaaaataatggaattaaaatcaaaaaatgcaaagtaattgtaaaactgtttccagatgaaaaacccaaaaacagacgtctaactcctaaagaaatggaagacgaaaaaatagtagctgcaatttttaaaagacctttaagaacatatataaatgatatacctacctacccatattgtgtacctgaacctaaagttaactttgatttaaattaccattaataaaatttcaaggccaacatacttcacttagtggtgtccatttattaaagtttaacttaaataaacagactccgcctcccaatcaataaggcctagaacctagggggctccgcccccttacacccc

SEQ ID NO: 4246 - protein, 680 aa, Betatorquevirus sp.
MAPYWQTKYWRRPFRYRRRRNWFYKWRPRKTFRRRPYTRRRRTRRYKVKRLRLKKRKFLKLKQWQPKTIIKCKIVGLKCLFQGSGYRAQHNYIEYMYSTVPINQPGGGGWGLLVFSLGSLYEDYDHLHNIWTKSNAGLPLVRYTGSTFWFYQTYDTDYIVTYDTCWPMVDTPHTHADSSPYRMIQKRHKIVIPSKVTKNRKKPYKKVHIKPPTQLTNKWYFQKDICDTPLVMITATAVNLTTPFANTNSLSNSIKFYSLNTFIFQNPNFEHPPETTGYSHKILNQYSMYLYATTTKKPSDADTNEKGFKDWLKTLIFLGNPRTNFEGRSFGDRPTYTKQDWGNPFYHRYLEIGDEDDTSYTIYTSKATHINIRQTINTQAKECTSTDFQTITGPIIYTLTYNPDKDTGLNKIYLLKTWGPATLDEPEDSDLIFEGFPLPQLTWGWTDFIKKLKKINDLDRHSLLLIKTQNFSDNTLKVFLPIDLDFIEGHDPYQHDKLNNYQTDYYNSENWFPKVQFQDQTINLIATSQRNSPKTNSYLQAGCKYKFYFKWGGCPKTLQKAYDPCLQSKWPTPDNITGRLTIQNPNTPPQTELFSWDWESDYVKKEAIQRIQSYTTAHELILPSTESKFQPKALKKQEKDTAPQEEENLFLQLHKLRKERLHLELQCRMKIMELKSKNAK

SEQ ID NO: 4247 - protein, 108 aa, Betatorquevirus sp.; identical to SEQ ID NO: 4243

SEQ ID NO: 4248 - protein, 57 aa, Betatorquevirus sp.; identical to SEQ ID NO: 4244

SEQ ID NO: 4249 - DNA, 2632 bp, Gammatorquevirus sp.
cgggagcccgaggtgagtgaaaccaccgaggtctaggggcaattcgggctagggcagtctagcggaacgggcaagaaacttaaaatactttatttttcagatgtcagaaatatgtttcaaagacttctactgtccaacaccttacaataaggaaactaaaaatcaaatttggatgtcccaaattgctgattctcatgacaatatctgcgactgcaagtatcctttttgccatttgcttgcttctatttttcctcctggccatcaagaccgcaatctctcaattaaccagatactgctcagagattacacagaaaaatgcctttctggtggagacgcagacaaaagagatggtatggcaggtttagatggaaaagaagaccttataaaacaagaagaagaagatatcgaagaaagaaaactagatggcctgctcgccgccgccgcagacgccgcagaaggcacaaggtaagaaaaaagaaacaaaaaattactctaaaacaatggcaaccagactctattaaaaaatgtaagattaaagccatatctactctagttatgggagcagatggatcccaatataaatgctacacaaacgaagcagcatcctaccctccacctaaagagccttctggaggaggttttggagtagaaatttttactctacaacacatgtacaatttatataaagctcacaaatgcatatggactacttccaatgaatatatggacttagccagatacactggctccaaatttattttctacagacatagaactacagactttattatttcctatgacctgcagcctccatttactatagacaaatatacatatccacaagcacacccacttaatcaatttttacaaaggaaaaaaagaatactatatagtcttaaaactaaaccctggggcccatctaaagttattctaaaaattaaacctactaaaatgttatcaacaaaatggttttttcaaagagaacttgctaaaataccacttctaaaaattcaagcagctgcttgtgatctaagctatgcaaacatgggaaaaacatggcaaagtaacatgttatcaatctattttttaaacacagcattttatcaggaaagcaattggggtaactcagcccttggccattacctaccatttaaaaaaattgatactgccttatattactggtataaagacagcagaggatctaaaaataaaatacaagtaaatacaactaattactataccacagttaactacgatacagggtattttaataccaaagttttaaatgcttatgctataacaacttcatcccaaaccgacaccccagtagctatggctctaacccctgtttctgtaggcagatacaatccactaacagacacaggagaaggcaatgagctatgggctgtttccagcctcactgaacactatgaccatccagctacagacaaagttttaatttttaaaaactatccactatggttaatgttctatggctttaaaaactacatagaacaagaaaaaggagataaaagatttctagactcctacttttttgtttttagatgtccaagcatgcaaatactacaatctgtagtaaaacaagactattttccatttatagaccaatcttttctaaatggcaatatgccatatggtgaatacttagatgaaaacaaaaaaaaattttggtatccaacaataaaaaaacaactagaaacaattaacacaattgttaccttagggccatttataccaaagtttaaagatgatagagacagtacatgggaattaaactataaatgttcattttattttaagtggggaggacaacagattacagaaaaacttgcaatggatcccagcaaacaagaccaatttgataacccctataacatgcagcagggaatacagatatccaacccacaaacacaaacatgggaaacaacactgcaccactgggactacaggagagacatacttacaaagacagctattaaaagaatgcgagaaaacctcgacactgatacagatgtcacaacaattattacaggcaaaccaccaaaacagagaaagatcacaggagaaatacaagcactccaacaagaaaacaaagagatccaagcatgtctccactcactcttcgaagaagataccttccaagaagaggagagtctccgagagctcatcaagcagcaacacaacaagcaacaccagctcaagcaaaacctcctacacctcatctcagacctaaagaaacaacaacaacaccttcaaatgcaaacaggaatcctacattaaccagatttaaaccaggttttgaacaaacaacagaaagagaacttgcaattgcttttaaaagacctataagaacttttaaagaagaccctccattttacccatggctaccccctgctccccttgttgtaaactttaacctcaactttaaatactaggccaacactgtacacttagtagtgtttgtttaataaagtttgctccccaaaaaaatgtaaaaaaaaaaacaactagaaacaattaacacaattgttaccttaggaccatttataccccgctagacggtgcagggaccggatcgagcgcagcgaggaggtccccggctgcccatggg

SEQ ID NO: 4250 - protein, 661 aa, Gammatorquevirus sp.; identical to SEQ ID NO: 3808

SEQ ID NO: 4251 - protein, 122 aa, Gammatorquevirus sp.; identical to SEQ ID NO: 964

SEQ ID NO: 4252 - protein, 109 aa, Gammatorquevirus sp.; identical to SEQ ID NO: 3810

SEQ ID NO: 4253 - DNA, 2629 bp, Betatorquevirus sp.
ccttacacccccaagggggctccgcccccttacacggggcaattcgggctagatcagtctggcggaacgggcaagaaacttaaaatatatatatttttcaggtatgttttcattatggaagacaccaacatcatcaaagagacaacaagaactacaatggatgaatattgttaacagctgtcacgaccaattctgccactgcgaaaaaccaactcttcacctactttactgcatcaacaaattttcttctgcacaaaaaccagaaacagatttaagaaacatagaatgcctgcttactggcgtccgtaccactactggagaagacaaaaaagaagacgaaggtggattcctagaaggagaactagaagatcttttcaaagaaaacgaacccgatactccagaaaaagatactggagaaaaaaggtaaagaaatttaaatttcctaaaaaacgtaaagctaaaactgttaaggaatttgaaccaacaaaagttaatcgctgtaaaattgtgggatttaaatgtttaattgaaggaaacaaagacagactaagcagaaactatattcaatatatttactctatagcccctaaacactggccttccggaggaggatggtcactacttgtttttagcttaacaagtttatgggaagattatgaacatttacaaaatgtatggacaagtagcaatgttggtttaccactagtaaaatatagaggtgtgaaatttaaattctatcaaagccactttacagactatgttgtatggtatgatacatgctggccaatggtagacacagaactacaacatgcagatttagcaccttcaagaatgatagccagaagacacaaaattataatacctgctacaaccacaagaaaaaaaagaaagccatacaaaacagtctacatacgaccaccagcacaaatgcaaacacactggtactttcaaagagatatttgcaaaacaccactagtaatgctaggagtaactgctgtagacttaaagtttccatttaattatccagactcaagaaacaataccactagaatacaatgccttagcacactagtttttcaaaatcccaactttggagaatatccacaaagcacaggatactctccgaaaaaaaatgaacaaaatgaaaatctatatttatatgcaacacacagaaacattccaaatgaatggaaaaaagatgacataggtgacttatacccactaactaacacaaaagactttcaaatgggtaaaccaataaaagacataactacaaataattcctcaagctggggaaatccattttattttcactttttaaccgacacatctactgaaaacaactttacaattgtcataactaaatcatcaccagtagatatgataaatgaatacaacacaatgaccaacaccaaattttctaaatcaataacagctgtatcaggtcccctactttatgaatgctcatacaatccagcaaaagacacaggttctactaatcaagcttacatagtaagtaaccacttagtaactacatgggaaccaccttcaaatgaaaatcacataatagaaggccttcccctacctgttttactatggggatggacagactggataattaaaataaaacaaacagtatctcctgaaaaataccaaataatagtaattaaaaccaaacaatttgacccagaactaccatactatgtacctatagactttgactttacacaaggttatgacccatacactcctaaaacatacgatacacctcatgaaattaacacatttaacaaatcacactggtatccaaaaataatatttcaacaacaacaaatagaaaagctatgtcaatcaggtaacaatgtacctagaccaatagacaatgtatacattcaagctttttgtcaatacaaattttactttacatggggaggttgtccaaaacaactagaaaaagcttatgatccatgtttacagcctgtatggcccacagccgataaactcactggaagagttgaaatcacgaatcctacaacctacccacaaacagaattatatgactgggactgggaagaagactatgttacagaaagagctatacaaagaattaaactgtacacaacaacttatgcaccaactctctcatctgcagccaacaaaaaccagccgaaagccctcaaaaaagtccaagaaaaagaaccatcggaagagacggaggagacaaagctcttccagcagctccacaacctcagaatgcagcgaaaactcctggagcagcaagtccagcaaagaagactaaaataataataaaagacagtacaattagagttaagctatttccagaaacccgtactaaaaatcgcagacttacttcaaaagaactagaaactgaaaaagagcttgctagactgtttaaaagacccatgcgtacatatattcatgataaacctttctatccatggtgtgtacctgaaccagttgtaaactttgaccttaactataaatacaaataaaattcaaggccttcagtaattcacagagtggagtccatttatataagttaaaccttaataaacagacaccgcctccctatcaatagggcgccaaaacttaaaagggggctccgccc

SEQ ID NO: 4254 - protein, 708 aa, Betatorquevirus sp.
LSRPILPLRKTNSSPTLLHQQIFFCTKTRNRFKKHRMPAYWRPYHYWRRQKRRRRWIPRRRTRRSFQRKRTRYSRKRYWRKKVKKFKFPKKRKAKTVKEFEPTKVNRCKIVGFKCLIEGNKDRLSRNYIQYIYSIAPKHWPSGGGWSLLVFSLTSLWEDYEHLQNVWTSSNVGLPLVKYRGVKFKFYQSHFTDYVVWYDTCWPMVDTELQHADLAPSRMIARRHKIIIPATTTRKKRKPYKTVYIRPPAQMQTHWYFQRDICKTPLVMLGVTAVDLKFPFNYPDSRNNTTRIQCLSTLVFQNPNFGEYPQSTGYSPKKNEQNENLYLYATHRNIPNEWKKDDIGDLYPLTNTKDFQMGKPIKDITTNNSSSWGNPFYFHFLTDTSTENNFTIVITKSSPVDMINEYNTMTNTKFSKSITAVSGPLLYECSYNPAKDTGSTNQAYIVSNHLVTTWEPPSNENHIIEGLPLPVLLWGWTDWIIKIKQTVSPEKYQIIVIKTKQFDPELPYYVPIDFDFTQGYDPYTPKTYDTPHEINTFNKSHWYPKIIFQQQQIEKLCQSGNNVPRPIDNVYIQAFCQYKFYFTWGGCPKQLEKAYDPCLQPVWPTADKLTGRVEITNPTTYPQTELYDWDWEEDYVTERAIQRIKLYTTTYAPTLSSAANKNQPKALKKVQEKEPSEETEETKLFQQLHNLRMQRKLLEQQVQQRRLK

SEQ ID NO: 4255 - protein, 122 aa, Betatorquevirus sp.; identical to SEQ ID NO: 1040

SEQ ID NO: 4256 - DNA, 2629 bp, Betatorquevirus sp.
ccttacacccccaagggggctccgcccccttacacggggcaattcgggctagatcagtctggcggaacgggcaagaaacttaaaatatatatatttttcaggtatgttttcattatggaagacaccaacatcatcaaagagacaacaagaactacaatggatgaatattgttaacagctgtcacgaccaattctgccactgcgaaaaaccaactcttcacctactttactgcatcaacaaattttcttctgctcaaaaaccagaaacagatttaagaaacatagaatgcctgcttactggcgtccgtaccactactggagaagacaaaaaagaagacgaaggtggattcctagaaggagaactagaagatcttttcaaagaaaacgaacccgatactccagaaaaagatactggagaaaaaaggtaaagaaatttaaatttcctaaaaaacgtaaagctaaaactgttaaggaatttgaaccaacaaaagttaatcgctgtaaaattgtgggatttaaatgtttaattgaaggaaacaaagacagactaagcagaaactatattcaatatatttactctatagcccctaaacactggccttccggaggaggatggtcactacttgtttttagcttaacaagtttatgggaagattatgaacatttacaaaatgtatggacaagtagcaatgttggtttaccactagtaaaatatagaggtgtgaaatttaaattctatcaaagccactttacagactatgttgtatggtatgatacatgctggccaatggtagacacagaactacaacatgcagatttagcaccttcaagaatgatagccagaagacacaaaattataatacctgctacaaccacaagaaaaaaaagaaagccatacaaaacagtctacatacgaccaccagcacaaatgcaaacacactggtactttcaaagagatatttgcaaaacaccactagtaatgctaggagtaactgctgtagacttaaagtttccatttaattatccagactcaagaaacaataccactagaatacaatgccttagcacactagtttttcaaaatcccaactttggagaatatccacaaagcacaggatactctccgaaaaaaaatgaacaaaatgaaaatctatatttatatgcaacacacagaaacattccaaatgaatggaaaaaagatgacataggtgacttatacccactaactaacacaaaagactttcaaatgggtaaaccaataaaagacataactacaaataattcctcaagctggggaaatccattttattttcactttttaaccgacacatctactgaaaacaactttacaattgtcataactaaatcatcaccagtagatatgataaatgaatacaacacaatgaccaacaccaaattttctaaatcaataacagctgtatcaggtcccctactttatgaatgctcatacaatccagcaaaagacacaggttctactaatcaagcttacatagtaagtaaccacttagtaactacatgggaaccaccttcaaatgaaaatcacataatagaaggccttcccctacctgttttactatggggatggacagactggataattaaaataaaacaaacagtatctcctgaaaaataccaaataatagtaattaaaaccaaacaatttgacccagaactaccatactatgtacctatagactttgactttacacaaggttatgacccatacactcctaaaacatacgatacacctcatgaaattaacacatttaacaaatcacactggtatccaaaaataatatttcaacaacaacaaatagaaaagctatgtcaatcaggtaacaatgtacctagaccaatagacaatgtatacattcaagctttttgtcaatacaaattttactttacatggggaggttgtccaaaacaactagaaaaagcttatgatccatgtttacagcctgtatggcccacagccgataaactcactggaagagttgaaatcacgaatcctacaacctacccacaaacagaattatatgactgggactgggaagaagactatgttacagaaagagctatacaaagaattaaactgtacacaacaacttatgcaccaactctctcatctgcagccaacaaaaaccagccgaaagccctcaaaaaagtccaagaaaaagaaccatcggaagagacggaggagacaaagctcttccagcagctccacaacctcagaatgcagcgaaaactcctggagcagcaagtccagcaaagaagactaaaataataataaaagacagtacaattagagttaagctatttccagaaacccgtactaaaaatcgcagacttacttcaaaagaactagaaactgaaaaagagcttgctagactgtttaaaagacccatgcgtacatatattcatgataaacctttctatccatggtgtgtacctgaaccagttgtaaactttgaccttaactataaatacaaataaaattcaaggccttcagtaattcacagagtggagtccatttatataagttaaaccttaataaacagacaccgcctccctatcaatagggcgccaaaacttaaaagggggctccgccc

SEQ ID NO: 4257 - protein, 708 aa, Betatorquevirus sp.
LSRPILPLRKTNSSPTLLHQQIFFCSKTRNRFKKHRMPAYWRPYHYWRRQKRRRRWIPRRRTRRSFQRKRTRYSRKRYWRKKVKKFKFPKKRKAKTVKEFEPTKVNRCKIVGFKCLIEGNKDRLSRNYIQYIYSIAPKHWPSGGGWSLLVFSLTSLWEDYEHLQNVWTSSNVGLPLVKYRGVKFKFYQSHFTDYVVWYDTCWPMVDTELQHADLAPSRMIARRHKIIIPATTTRKKRKPYKTVYIRPPAQMQTHWYFQRDICKTPLVMLGVTAVDLKFPFNYPDSRNNTTRIQCLSTLVFQNPNFGEYPQSTGYSPKKNEQNENLYLYATHRNIPNEWKKDDIGDLYPLTNTKDFQMGKPIKDITTNNSSSWGNPFYFHFLTDTSTENNFTIVITKSSPVDMINEYNTMTNTKFSKSITAVSGPLLYECSYNPAKDTGSTNQAYIVSNHLVTTWEPPSNENHIIEGLPLPVLLWGWTDWIIKIKQTVSPEKYQIIVIKTKQFDPELPYYVPIDFDFTQGYDPYTPKTYDTPHEINTFNKSHWYPKIIFQQQQIEKLCQSGNNVPRPIDNVYIQAFCQYKFYFTWGGCPKQLEKAYDPCLQPVWPTADKLTGRVEITNPTTYPQTELYDWDWEEDYVTERAIQRIKLYTTTYAPTLSSAANKNQPKALKKVQEKEPSEETEETKLFQQLHNLRMQRKLLEQQVQQRRLK

SEQ ID NO: 4258 - protein, 122 aa, Betatorquevirus sp.; identical to SEQ ID NO: 1040

SEQ ID NO: 4259 - DNA, 2628 bp, Betatorquevirus sp.
caggtaccgaaggtgagtgaaaccaccgaagttaaggggcaatatgggctgtagcagtctggaggaacgggcaagaaacttaaaaaaatattatattttacagatatgagctcttttttatcaccctgcatttactcaaaaaaaggattagaaaaccaatgggtaaactgcatttggaacacccatgaaatgttctgcggctgcaacaaaccttggaaacatttagaagacatactaaaaagacaaggagcacaactatgcctcccttctactaccgtagacgttggaaccgctacagaaccagacgttacagaagacgaccatggattagagcctggagacctagacaaacttttctcagaagatttcaccgaagaagacgggtaagaaaaagacgttttattactaagagaaaaagaaaactaaaaaaaataactgtaagacaatggcaaccttctcatataagaaaatgccacattaaaggacaactatgcttgctaacatgtggtataaatagaattaacaataattatacattaacttctgaaagctatgtaccagtgtctgaaccgggaggtgggggatggagtataatgcaattaactttaagagccttatatgacgaatacgaacactatagaaactggtggacaaacagtaactgtggactacctttagtaagatacaacggatgtaaatttaaattttataatagtaatgactgtgactatatagtaactccacaacacacaggaccgtttgaagtaacaagagacacatacttaaacacacaacccagtagacacatgatgaaccaccttagctttatagtaccaaaactaaaccctaataaaaaaaaaagaccatatataacaaagcgatttccaccaccagcactatttcaaagcaaatggtactttcaacaagacatactaaacacaccactaatactattaacagtatcatcatgctcactagaccaaatgtacgcaccaaacgatcaaataagcactaacataacatttaattctttaaacacaaccatgtttcaaaacccatactgggaaacacaagaaccatactattgtaaagtaacaggcacaatacaaacaggactatatacatatggaaatggaaacgaaaacgaagcaaaaaacaattggaaatatttacaaccactagcaaacacaactagatttattccaccaaactacaccacagcaaaacaaatagacacctatacaaagtttacagagaatacaaattttgcaaacccttttgctaccttggacgaagacacaccacatacagacataaaaatattttacggacagcaaccaaaagaacaagaataccagaaaccagctaccattttagaaacaactttatttcaacaatgcagatataacccatttaaagacaaaggaataggtaacaaagtatacttaaaatgcacaaaaacacaacaaggaagctttgtctccataccaacagaccccagactaaccattacagactttccactatggctaatattttggggctggccctcctggctagaaaaatcaaaaccagtacaccacatagcagaagactatcaatttgtaatacaatcaccatatatatacccaccaatgccatgctacgtaccactagacaactactttacacatccaaaacacacaatactaaatgaaacagacaaacaacactggcacccaaaagcagcataccaaacagaagtactagcaaaatttgcagaaacaggaccagcagctacaaaaataaacaaacaaaaacaaattcaaatacacgcattttataacttttattttaagtggggaggatgcccagcaccaatggaaacaatatgcaatccagcagaccaagaaaaattccccatgcccaatcacatcttacaagaacttacgctcgagaatccagaaacacacaaagaacactacatatacagatttgacgaacgagacggacagcttacagagccagctgcaaaaagacttaaaaaagactatgaatctccaaaatattttacagaatttggaacaaaagacccaatactacaaatcttcccaccgatacaagaaacacaagagaaaacaaccccgaaaaaaacggaagaactacagcagcagctccagctcctccgagaccaccaacaccaactcagagagcgaatcaacagactaaaaaaaagatcaaaatattaccctataacatagatatgtttggtgaaagaaaaattaaaaaccgtagatttaatgcaaaagagtatgaacaagaattacaggaaagcaaaatatggaaacgtagacctagacagtatatttttgatccccctgattatgaccccctataaccccctaattaatattcaacaggaaaaccacataattagaattgccgaccacaaactgtcaaccgttacatttacttcctcatttttactactacttcccattttctagaccactcccacctacttcattaataatcagacgtatatcctgggaggagcaacaccactatataactaactacactgacgaatggctgagtttaccccgccagacggagacgagacaggacactgactcggctgctacaggg

SEQ ID NO: 4260 - protein, 681 aa, Betatorquevirus sp.
LRLQQTLETFRRHTKKTRSTTMPPFYYRRRWNRYRTRRYRRRPWIRAWRPRQTFLRRFHRRRRVRKRRFITKRKRKLKKITVRQWQPSHIRKCHIKGQLCLLTCGINRINNNYTLTSESYVPVSEPGGGGWSIMQLTLRALYDEYEHYRNWWTNSNCGLPLVRYNGCKFKFYNSNDCDYIVTPQHTGPFEVTRDTYLNTQPSRHMMNHLSFIVPKLNPNKKKRPYITKRFPPPALFQSKWYFQQDILNTPLILLTVSSCSLDQMYAPNDQISTNITFNSLNTTMFQNPYWETQEPYYCKVTGTIQTGLYTYGNGNENEAKNNWKYLQPLANTTRFIPPNYTTAKQIDTYTKFTENTNFANPFATLDEDTPHTDIKIFYGQQPKEQEYQKPATILETTLFQQCRYNPFKDKGIGNKVYLKCTKTQQGSFVSIPTDPRLTITDFPLWLIFWGWPSWLEKSKPVHHIAEDYQFVIQSPYIYPPMPCYVPLDNYFTHPKHTILNETDKQHWHPKAAYQTEVLAKFAETGPAATKINKQKQIQIHAFYNFYFKWGGCPAPMETICNPADQEKFPMPNHILQELTLENPETHKEHYIYRFDERDGQLTEPAAKRLKKDYESPKYFTEFGTKDPILQIFPPIQETQEKTTPKKTEELQQQLQLLRDHQHQLRERINRLKKRSKYYPIT

SEQ ID NO: 4261 - protein, 93 aa, Betatorquevirus sp.; identical to SEQ ID NO: 3145

SEQ ID NO: 4262 - DNA, 2627 bp, Gammatorquevirus sp.
cgggagcccgaggtgagtgaaaccaccgaggtctaggggcaactcgggctagggcagtctagcggaatgggcaagaaacttaaaaaactttattgttttaaatacagatgcagaatatcagctcacaagacttttaccaagaaacccattttaatcccgaaacaaagaatcaaatatggatgtctcaaattgctgactctcatgataatatctgcaattgcaatcatccatttgctcaccttcttgcttccatatttcctcctggccaccgagatcgcgattataccattaatcagatacttttcagagactaccaagaaaaatgccattctggtggggtagaagaaagaaaccttggtttggcaggtggcgataccgccgccgccgctggaacatcaggagaaaaaagaaaagaagaagaagactacccagaagaagaactagacgctatgctcgccgccgctatggaagaaaacgcaaggtaagaagaaaacttagaaaaattaagatacaacaatggcaaccagactctattaaaaaatgtaaaattaaaggctactctattatgatactaggtggtgaaggaactcaaatgttctgttatactaatacagctaaagactacccacaaccgaaagcccctggcggaggaggctttggttatgaagttataagtttaaaatggctatatcaagaatttttaaagcacaacaatatatggacaagatcaaatgaatatacagaccttgttagatatacaggaggcaaaattactttttttgcacatccatatattgactttataatagcatatgacctacaacctccttttgaccttaacaaattttcatatccagaaattcaaccacaaaatatgctacttagaaaacataaaagagttttactaagcagacaatctaacccaaaaggaagacataaagttacaattaagtttcatcctcctaaacaaatgacaaccaaatggttttttcaaaaagacttttgcccatatggcctaattaaaatttctgcagctgcagcagacttttcatacccaataataggacctaaatcacaaagcactattttaaccatatatgcacttaatacaaacttttaccaagttagtgactgggcacaaacaaaaactagcgacccctatatgaacattccaacacaaaccttaccactatacttttggtataaagaaaaaggacaagaaaaatcttacaaatatgacccacgtgatcaaacaccagcaaacaaatactattactctatagcatgggacacaggcctattttgcagtaaagtactactagcttataaaatttccacagatacccaaggtagatcactaattgcaggcacacccattatacctctaagatataacccacaagaagatgatggttttggcaatgaagtatatctaactagcattctaagtggcagatataacaaaccatcatatacaacagactatcaatttaacaatgtacctttatatattgcattttatggctattacagctacttaaaaatttacagcaacgacaaaaacataatgaaatcatatatgtttgttgttaaatgcaaagctattaaaccactaactcaaacaacagcacaaaactattaccctatcttagatgcagactttgtttttggtaaactaccatgggatgaatacctttccactgaaataaaaaagttttggtatcccacagcagaaaaacaagagggtattataaatgctatagtagaatcaggaccatatgtaccaaaactttccaacatgacatatagtacatggtcactaatgtacaactataaatttttttttaagtggggtggaccacatgttacagatccaaaagttgaagacccctgcacccgaaacaaataccctgtacccgatacaatgcaaccaacagtacaaattgtcaacccagaaaaaaataaagttgaatccatattacatgactgggactttagaagggggttcattacaaacacagctcttaaaagaatgtcagaaaacctcccatctgaaacatctctctcatctgatgattcagaatcacctgcaaaaaagaggaaaattacaaaggaagtcccatgccaccaagaaagccaagaaaaaatccagaactgtctcctctcactctgcgaagaaaatacctgccaagaaacaccagaaaacctccagcagctcatcaagcagcagcagcaggagcagcacaagctcaagagaaacatcctcaagctcctcacacacctgaaaaaagggcagagatgtgtagaactacaaacaggccttttagagtagagcccttcaaacctggatttgaagaagaaactgagagagaactagctattgcctttaaaagaccccctagaaaatataagaatgaccctccattttacccatggctacctttaactcccaaagttatttttaaccttaactttcaagactaggccaacactgtacacttagtaaagcatgtttaataaagttttttaagtttcttgcccattccgctagactgccctagcccgagtcgctagacggtgcagggaccggatcgagcgcagcgaggaggtccccggctgcccatggg

SEQ ID NO: 4263 - protein, 669 aa, Gammatorquevirus sp.
MPFWWGRRKKPWFGRWRYRRRRWNIRRKKKRRRRLPRRRTRRYARRRYGRKRKVRRKLRKIKIQQWQPDSIKKCKIKGYSIMILGGEGTQMFCYTNTAKDYPQPKAPGGGGFGYEVISLKWLYQEFLKHNNIWTRSNEYTDLVRYTGGKITFFAHPYIDFIIAYDLQPPFDLNKFSYPEIQPQNMLLRKHKRVLLSRQSNPKGRHKVTIKFHPPKQMTTKWFFQKDFCPYGLIKISAAAADFSYPIIGPKSQSTILTIYALNTNFYQVSDWAQTKTSDPYMNIPTQTLPLYFWYKEKGQEKSYKYDPRDQTPANKYYYSIAWDTGLFCSKVLLAYKISTDTQGRSLIAGTPIIPLRYNPQEDDGFGNEVYLTSILSGRYNKPSYTTDYQFNNVPLYIAFYGYYSYLKIYSNDKNIMKSYMFVVKCKAIKPLTQTTAQNYYPILDADFVFGKLPWDEYLSTEIKKFWYPTAEKQEGIINAIVESGPYVPKLSNMTYSTWSLMYNYKFFFKWGGPHVTDPKVEDPCTRNKYPVPDTMQPTVQIVNPEKNKVESILHDWDFRRGFITNTALKRMSENLPSETSLSSDDSESPAKKRKITKEVPCHQESQEKIQNCLLSLCEENTCQETPENLQQLIKQQQQEQHKLKRNILKLLTHLKKGQRCVELQTGLLE

SEQ ID NO: 4264 - protein, 125 aa, Gammatorquevirus sp.; identical to SEQ ID NO: 4205

SEQ ID NO: 4265 - protein, 120 aa, Gammatorquevirus sp.; identical to SEQ ID NO: 4206

SEQ ID NO: 4266 - DNA, 2627 bp, Betatorquevirus sp.
ccgcccccttacacccccaagggggctccggtcaaggggcaattcgggctagatcagtctggcggaacgggcaagaaacttaaaatatatattaattttacagatatgagctctatgtggaagaaaccatggtactcacccagacaacaagaacaaaattggcttaatggtatttggcaaacccacgacaatttttgcagctgcggagacacttggcttcatcttttatactgcattaacaaagattctccattcagaaagcccctaaaggatattaaaaatatacaatgcctacttattggaaaagaagacgtgccaactacttcaaaagaagaagacgaccctggttttctacctggagagctagacgcacttttcgacgaaagttctacaaaaagagataccgaagacgccgatacaaggtaaaaaaaaagaaacattatcgtaaaagacaaaaaataattataaaacaatttaatcctaaatgtatgagaaaatgcaaaataattggaactaaatgcactattcaaggtagccctttaagatgccaccacaactttatacaatactataacagtaaagtacctgaaaaatatccaggaggaggtggatggagtcaactaatatttacactagattctttatatgatgactttgaaaaaatgcaaaatatatggactgcttcaaactgtactttacctcttgctaaatataaaggttgtactatgaaattttatcaaacaaattatattgattacattgttatatatgatacttgttggcctatggtagacacatacttatcacacccagatgccgcaccatctatgatgcacttaaaaaaaaataaaatatgtatacctagcagacaaacacaactaagaaaaaaaccatacaaaaaggtttttatacaacctccttcacaaatgtacaataaatggtattttcaaaaagaaatatgtaaaacaccattactaatgattacaacaacagcaacatcatttacatttccatactgctcaccaaaagcagaaaacaataacatatccattcactttatagacccaacaacctttagaaacttaaactttcaaaactacccaataacacaaggctattggtgtaaacaagcaaaacttgaacatgaagacagagaattacctatgtacttatatgccataagaaacccagaaagcctaatacaacagtcaaaaataaacaaaaacaatgtagacaaattaggcataataccactatgtaacagtaacacatttcaactaggacaagaagtaatattaggaaccacacaaaacaatccacaacattggggaaacccattctatcactcaattattgatgaagacagttatactatatatatctcattaatgactccagcagaacttcacaatctagatgcaacaccatcaaaagaatactatgtaacaaagctaacacaaccactagtacatacattaagatataaccctgaaacagacaaaggattaaaaaacaaagcatggatattaaaaacaaatgagtacaataacacaaatgaaccagaaaacataaatttacaaatagaaggctttccactatatgtactcttttggggatggacagactgggttaaaaaaacaggtttaattaataatcttgatgataatggaattgttgtatttcaaacagaccaatttaatgaacagttaccactgtatattccaatagactttgactttttacatggctatgacccttatgttgaacatagttatgacggacaaccagcattaccttctagttacagtcaaaaacattggtaccctaaactaaaatttcaagaccaaagcatagaaaaaatttgtatgtccggtcctggttgtcctagactactaaataaagaatatatgcaagcatttgtaaaatacaaatttcactttacttggggaggctgtcctaaacaattagaaaaagcatgtaatccttgttcacagccaacatggaccacgcccgataacttccatggacgacttgaaatccagaacccaaacaccaatccacttacagaacttttcagctgggactgggacggtgactatgttacaacagaggctatcgaaagaatccagacatacacaaaaactgataaatcatcttttatctcaacagcaaacaaaaacaacaccaaagcagcaatacagaaggaacaaaaagcgacacaagaggaggaggagaagaaactcctcaaccagctccagctcctccaacaacagcgacaacaactccacagcctcctgctcaacagaataattacaaactaaaaggctgtaaaataaaagcatacctatttcctcctaaaaaaccaaaagttagaaaactaacacccagagaacaagaagaagaaaacctaatagccgctatatttcacagacctcctagaaaattttttggagatactcccatatatccatggttaccccctgaaccttatgtaaactttgaattaaactacaaaaaataaacaaggccaacaatattcacttagtggtgtcagtttatttaagtttaacttatataaacatccaccgcctccctaaaattcaggcgccaaaattcaaaagggggct

SEQ ID NO: 4267 - protein, 677 aa, Betatorquevirus sp.
MPTYWKRRRANYFKRRRRPWFSTWRARRTFRRKFYKKRYRRRRYKVKKKKHYRKRQKIIIKQFNPKCMRKCKIIGTKCTIQGSPLRCHHNFIQYYNSKVPEKYPGGGGWSQLIFTLDSLYDDFEKMQNIWTASNCTLPLAKYKGCTMKFYQTNYIDYIVIYDTCWPMVDTYLSHPDAAPSMMHLKKNKICIPSRQTQLRKKPYKKVFIQPPSQMYNKWYFQKEICKTPLLMITTTATSFTFPYCSPKAENNNISIHFIDPTTFRNLNFQNYPITQGYWCKQAKLEHEDRELPMYLYAIRNPESLIQQSKINKNNVDKLGIIPLCNSNTFQLGQEVILGTTQNNPQHWGNPFYHSIIDEDSYTIYISLMTPAELHNLDATPSKEYYVTKLTQPLVHTLRYNPETDKGLKNKAWILKTNEYNNTNEPENINLQIEGFPLYVLFWGWTDWVKKTGLINNLDDNGIVVFQTDQFNEQLPLYIPIDFDFLHGYDPYVEHSYDGQPALPSSYSQKHWYPKLKFQDQSIEKICMSGPGCPRLLNKEYMQAFVKYKFHFTWGGCPKQLEKACNPCSQPTWTTPDNFHGRLEIQNPNTNPLTELFSWDWDGDYVTTEAIERIQTYTKTDKSSFISTANKNNTKAAIQKEQKATQEEEEKKLLNQLQLLQQQRQQLHSLLLNRIITN

SEQ ID NO: 4268 - protein, 106 aa, Betatorquevirus sp.; identical to SEQ ID NO: 2647

SEQ ID NO: 4269 - DNA, 2623 bp, Betatorquevirus sp.
ggggcaattcgggctagatcagtctggcggaacgggcaagaaacttaaaatatatattaattttacagatatgagctctatgtggaagaaaccatggtactcacccagacaacaagaacaaaattggcttaatggtatttggcaaacccacgacaatttttgcagctgcggagacacttggcttcatcttttatactgcattaacaaagattctccattcagaaagcccctaaaggatattaaaaatatacaatgcctacttattggaaaagaagacgtgccaactacttcaaaagaagaagacgaccctggttttctacctggagagctagacgcacttttcgacgaaagttctacaaaaagagataccgaagacgccgatacaaggtaaaaaaaaagaaacattatcgtaaaagacaaaaaataattataaaacaatttaatcctaaatgtatgagaaaatgcaaaataattggaactaaatgcactattcaaggtagccctttaagatgccaccacaactttatacaatactataacagtaaagtacctgaaaaatatccaggaggaggtggatggagtcaactaatatttacactagattctttatatgatgactttgaaaaaatgcaaaatatatggactgcttcaaactgtactttacctcttgctaaatataaaggttgtactatgaaattttatcaaacaaattatattgattacattgttatatatgatacttgttggcctatggtagacacatacttatcacacccagatgccgcaccatctatgatgcacttaaaaaaaaataaaatatgtatacctagcagacaaacacaactaagaaaaaaaccatacaaaaaggtttttatacaacctccttcacaaatgtacaataaatggtattttcaaaaagaaatatgtaaaacaccattactaatgattacaacaacagcaacatcatttacatttccatactgctcaccaaaagcagaaaacaataacatatccattcactttatagacccaacaacctttagaaacttaaactttcaaaactacccaataacacaaggctattggtgtaaacaagcaaaacttgaacatgaagacagagaattacctatgtacttatatgccataagaaacccaaacagcctaatacaacagtcaaaaataaaccaaaacaatgtagacaaattaggcataataccactatgtaacagtaacacatttcaactaggacaagaagtaaaattaggaaccacacaaaacaatccagaacattggggaaacccattctatcactcaattattgatgaagacagttatactatatatatctcattaatgactccagcagaacttcacaatctaaatgcaacaccatcaaaagaatactatgtaacaaagctaacacaaccactagtacatacattaagatataaccctgaaacagacaaaggattaaaaaacaaagcatggatattaaaaacaaatgactacaataacacaaatgaaccagaaaacataaatttacaaatagaaggctttccactatatgtactcttttggggatggacagactgggttaaaaaaacaggtttaattaataatcttgatgataatggaattgttgtatttcaaacagaccaatttaatgaacagttaccactgtatattccaatagactttgactttttacatggctatgacccttatgttgaacatagttatgacggacaaccagcattaccttctagttacagtcaaaaacattggtaccctaaactaaaatttcaagaccaaagcatagaaaaaatttgtatgtccggtcctggttgtcctagactactaaataaagaatatatgcaagcatttgtaaaatacaaatttcactttacttggggaggctgtcctaaacaattagaaaaagcatgtaatccttgttcacagccaacatggaccacgcccgataacttccatggacgacttgaaatccagaacccaaacaccaatccacttacagaacttttcagctgggactgggacggtgactatgttacaacagaggctatcgaaagaatccagacatacacaaaaactgataaatcatcttttatctcaacagcaaacaaaaacaacaccaaagcagcaatacagaaggaacaaaaagcgacacaagaggaggaggagaagaaactcctcaaccagctccagctcctccaacaacagcgacaacaactccacagcctcctgctcaacagaataattacaaactaaaaggctgtaaaataaaagcatacctatttcctcctaaaaaaccaaaagttagaaaactaacacccagagaacaagaagaagaaaacctaatagccgctatatttcacagacctcctagaaaattttttggagatactcccatatatccatggttaccccctgaaccttatgtaaactttgaattaaactacaaaaaataaacaaggccaacaatattcacttagtggtgtcagtttatttaactttaacttatataaacatccaccgcctccctaaaattcaggcgccaaaattcaaaagggggctccgcccccttacacccccaagggggctccgc

SEQ ID NO: 4270 - protein, 677 aa, Betatorquevirus sp.; identical to SEQ ID NO: 4239

SEQ ID NO: 4271 - protein, 106 aa, Betatorquevirus sp.; identical to SEQ ID NO: 2647

SEQ ID NO: 4272 - DNA, 2620 bp, Betatorquevirus sp.
aaacccccagggggctccgccccctataacatcaaggggcaattcgggctatggcagtctagcggaacgggcaagtaacttaaatttacttttttagatgagtattaaaccaccaagatatggaccccgaggattagaactacaacttttaaactccatttttcaaaaccacgatttatgctgtggatgtgacgaccctctataccatatcctttcaataattaatacacataacaaagcaaacctttccgataccaaactcaaagaaataaaatgcctccttactggagaagatacagacaaagaagaccacgcagatggcaccgccggcgttttggacgctatagacgatggagatttagacgccctcttcgaagtttccgacgatatggacgcaccaactgggtaagaagaaaatttaaactatcatccataaaactaaaacaatatcaacctagatctataagaaactgtgtaattaaaggaatgaaatgtctttttcaaggaagtgctatgagaaaatcaaataactactggcaatacccacatactattattccagaaaaatttccgggagggggaggatggggtctacaagtaattagtcttagttcattatacgaagattaccaacacttagcaaattatttttcacaaagcaatgcaggcttaccattagtaagatttaaaggcatgaaactaatattctaccaaaaccaaaatacagactatgttgtagaaatagaaaactgctggccaatggttgacacaccattaaaacatgctaactctcaacctcagagaatgttaatgagtaaaaaaaaaattatagtacctagcatagcaacaaaaagactaagaaaaggaaagaaaaaaacctttgtaaaaccacctgcacaaatgcttaaccaatggtattttcaaaaagatgtatgtaatacaaaactagcaatgataacagccactgcatgttcactaacagactattatttaccatacaaatcagaatctaacaatatttctctaaatgcattaaataccaacatatttaaaaatgcagactttcaacaaccacctcaaacaacaggatatagccccagaaataactactacttatatgcacaaacaaacggagcctatgaaatacccaagcaagccacacaattaatatacttaggagacagcaaaaactatataaaaggacgacagtccacaaatgaagaacttaaaacctctggttttaaaaaagaaaactggggaaatccattttttgaacattacatatcaggagacataccaatgttcacatcatcaaaagggccaacagacactgtttggaaagaaaatgcaacatgtccaactgacccaaaaaaacacatagacaaatacttagtaccactacataacaaaccatacacaagagttagatataatccagacaaagacactggagaaggcaacgtaatatactttgtaagcaactataacagagcaggtgacaatagctttgatccaccagaagacccaaacaaaaaaattacaggctttccactatggattgcactttggggatggccagactggattaaaaaattaggactattaccaagagtagacaaagaccacatactagtaatacagtcatcattttttgaccaaaaatttccatactatgtatttttagatgacagttttaccacagccttaggaccctttgacacacaaaaaacagctgaagatgaatttaactggtacccaaaattttggtatcaacaaaaatccattgaaaccatttgtgcatgtggtccgggagtaagtagagctagagatgacgaatccttacaagctaaaatggaatataaagtgtatgttaaatggggaggatgtccatcaaccttagaaaaggtatatgatccatgttcacagccaaaatggcccacaaccagtgacatccaacaaacagtttcgatcacgaatccagaatacgaaccaagcaactacttctacacttgggacactagaagggactttcttacagacacagctctcaaaagacttaaaaaaaaccaagaaattgatgagactgtttcaattaaaacaggatcaaaaagcagcccaagcgccgatctccaaatcctccaaacactccaagaaagctcagacgaagcatcgacaccggaaaaaaagaaagagacactgcagcacaagctcctcagactcagacgcaaccacaagcagcttcagcagcaactcatcaaatacctaaaatcaccataatacataaacctgtaaaaataaacttatttaatgatcctcaacctgtaaaaaacaggcgctttacacccagtgaatgggaaacagaaaaatttatagcctcatggcttaaaagaccacaaagaaagtttttttatgaccctcctatataccctctttttcctccaacacccttagcaaattttgacttaaactttaaagaataaaggcctacaattttcacttagtggtgtctgtttatttaagttataacctatataaacgtccaccgcctcccaaactcgtaggcgccaaaatttaaaacaaggggctccgccccttaaaccccagggggctccgcccccta

SEQ ID NO: 4273 - protein, 667 aa, Betatorquevirus sp.
MPPYWRRYRQRRPRRWHRRRFGRYRRWRFRRPLRSFRRYGRTNWVRRKFKLSSIKLKQYQPRSIRNCVIKGMKCLFQGSAMRKSNNYWQYPHTIIPEKFPGGGGWGLQVISLSSLYEDYQHLANYFSQSNAGLPLVRFKGMKLIFYQNQNTDYVVEIENCWPMVDTPLKHANSQPQRMLMSKKKIIVPSIATKRLRKGKKKTFVKPPAQMLNQWYFQKDVCNTKLAMITATACSLTDYYLPYKSESNNISLNALNTNIFKNADFQQPPQTTGYSPRNNYYLYAQTNGAYEIPKQATQLIYLGDSKNYIKGRQSTNEELKTSGFKKENWGNPFFEHYISGDIPMFTSSKGPTDTVWKENATCPTDPKKHIDKYLVPLHNKPYTRVRYNPDKDTGEGNVIYFVSNYNRAGDNSFDPPEDPNKKITGFPLWIALWGWPDWIKKLGLLPRVDKDHILVIQSSFFDQKFPYYVFLDDSFTTALGPFDTQKTAEDEFNWYPKFWYQQKSIETICACGPGVSRARDDESLQAKMEYKVYVKWGGCPSTLEKVYDPCSQPKWPTTSDIQQTVSITNPEYEPSNYFYTWDTRRDFLTDTALKRLKKNQEIDETVSIKTGSKSSPSADLQILQTLQESSDEASTPEKKKETLQHKLLRLRRNHKQLQQQLIKYLKSP

SEQ ID NO: 4274 - protein, 103 aa, Betatorquevirus sp.; identical to SEQ ID NO: 2644

SEQ ID NO: 4275 - DNA, 2620 bp, Gammatorquevirus sp.
cgggagcccgaggtgagtgaaaccagcgaggtctaggggcaattcgggctagggcagtctagcggaacgggcaagaaactaaaaactatttttattttacagatgtcaatattttacaaaccaactccatacaatggatgtactaaaaaccaaatgtggatgtcctccataagtgatactcatgatatgcactgtggctgcactcaaccatttgctcacctactagatagcatttttcctgaaggacaccaagatagaaacaaaactatacaagaaattattgacagagacaaacaatgcctttctggtggccaagaagaagaagatggaggtctgcctataggttcaagcgccgcaaacctgcctacaggcgcagaaggcgaagaagaccaagataccaaagaaaatatagaagagcttttggccgtcgccgccgccgcagaagaaaggtaagaagaaaaagaaaaactttagttgttagacaatggcaaccagactctattagaaactgtaaaattaagctttttgggactcttgtattaggagctgaaggcactcaatacctatgctatagtaatgaaaaaaactcatggacaccaccacaaagacctggtggaggtggatttggtattgaaacttacaatttagcatggctatatgatcaatacagattaaaaagatgtatatggacagcatctaatgaatacaaagacttagttaggtttataaaagttaaatttttgttttttagacaccctaaaattgactttgttattaactatgacagacagttaccttttatactacaaaaacctacatacatgaattgtcacccactagcattactattatctcaacacaaaaaaattataccaagcaagacaaccaaaccaaaaggtaaaaatacagtgagcattactataaaaccaccaaaacaaatgatatctaaatggttttttgcaaaacaatttgctttgtatgatttactacaactacaaggtgcagcatgctcactaaactacccaaaactaggttgctgtaatgaaaacctaataattagtattttttatattaatccacaattttaccaagactctgattggggtgcctatcaaaaatcaccttaccttcctataaaaacaatagctactaatcttaaatatcactggaaaataggtaacaaaacaggaatattctcaccagattatttacatagacgtgatgacactgtatactatgaaagtgtagacttagaaaaaggcatgttttcaccctacatcctaaatacacaaaaaataacagttggtgaatcagaaacacatctctatgctcttcctctaggtgcagctagatacaatccagaaatagatgatggagtaggcaatgaaatatacttagtaccaattaaccttggaaactataaaaagccatcacaagataatttaatttttagaggcttaccactatggcttatgttttatggcctttatagttttataaagaagacacaagcagaatcctttttaggtttacacatgtttatagtaaaatcagaatatattttacctaaaccaaaagatccagcaagacaattttttccaatagtagacaacacatttgtaaatggaaagaatccatacaactcatacatatcaagcactgaaagaaagctatggtttccatctgctttacaccaagtacaagtaattaataactttgttaaatgtggaccctatgtgccaaagttagacaatgatagagaaagtacatgggaactaccatacaaatctattttctattttaaatggggtggtccacagatgccagaccagcaagtcactgacccaaaagaaaaaaccagctatattgtacccgatacaatccaacaaagactacaaattaccaaccctctcaaacaagcaactgaatcccttatacaccagtgggattacagacgaggactcattaaaacaaaagcttttaaacgaatgctcgaaaacctcggctctgaatcagatgtttactctgatacaggcacaccaaagaaaaggcaaaggatcgaaaatgcactccactaccaagaagaagagaacaaggaaatcaagacatgtctcctctcactctacgaaagttcttcctcagaaaaagaggaggaagaaccaaacctcctccagctcatcaacaaccagcgacagcagcaaaagcagctcaagctccagctcttaaccttaataaaacatttaaaagagaaacagaaccaactacaactacaaacaggagtaatctagttatattaacccgctttaaaaaaggctttgaagaagacactgaaaaagaagtagctaaagcattttgcagacccccaagaacctttaaagaagatcccccattttacccatggttacctccaacacccaaagtctgctttaagctcaattttaaaggctaggcccacaatgtacacttagtaaagcatgtttaataaagtttaacccaaaaaaacaaaaatttaacttttataaacctaactaagtctttgtattcattagatgagtttaccccgctagacggtgcagggaccggatcgagcgcagcgaggaggtccacagctgcccgtggg

SEQ ID NO: 4276 - protein, 663 aa, Gammatorquevirus sp.; identical to SEQ ID NO: 3581

SEQ ID NO: 4277 - protein, 116 aa, Gammatorquevirus sp.; identical to SEQ ID NO: 3582

SEQ ID NO: 4278 - protein, 113 aa, Gammatorquevirus sp.; identical to SEQ ID NO: 3583

SEQ ID NO: 4279 - DNA, 2620 bp, Gammatorquevirus sp.
cgggagcccgaggtgagtggaaccaccgaggtctaggggcaattcgggctagggcagtctagcggaacgggcaagaaacttaaaacaatttattgttttacagatgagcaactactctgcttctcacttttttaaaccaacaccttacaacaatgacaccaaaaatcaaatgtggatgtccatgatagctgatggacacgactgtatctgcaactgcaatagtccttttggtcatttgcttgcttctatttttcctcctggtcatcaagaccgcctacttaccattgaagaaattattaacagagatattcaagaatgcctttctggtggagacgcaggagaaagccatggtttggaaggtggaggagatataaaaagagatacaccagaagaagaaggcgcccactttataaaagacgaagagctagacgccctaatcgccgcaggagaagacgccggtggaaggtaagaagaaaaaagaagagaattaatgtaactcagtggcaacctgaatctataagaaaatgtaaaataataggtattgaacctttatgtgttggagcagaaggctctcaaatagactgctatactgtaactaaaacagactatgtaccacctaaagtaccatggggtggaggctttggattagaaaactttaccttaaaatacttatattctgaatatcaataccataacaatatatggacaagtagcaacacccaaaaagacctctgtagatacactggaggtaaatttattgtgtttagacaccctacacaggactttgttttaagctatgatatacaaccaccacatacattaaataaatttacatttcctagctgtcatccacatcaacaactactatctaaacaccacaaaataattttaagtcaagctagtaaccccaatggtaaatattataaaaaaataaaatttaaaccaccaaaacaaatgctaaccaaatggttttttacaaaaacattttcaccagccagtttaattgtagtaaaagctgcagcagctaacttccaacatgtaaacttaagtggcaaaaacaccaacatgctagtcacactatactcacttaatttatcattttacaaaaaccctgcatggggacttcaaacaagtacaagtaactactggccttactcacaagcagcaagtaaccttgaatactacatactggacagattaggaaacaaagtacaaaaaacaatgagtctaaccacaaaaagcccttacagtgacacagtagcctacaacactggatggtttaaaccagaattcttacaagctgctggtataggcaacataaaatcacctacagcaacacatcaaataatagcaggcagatacaaccctaacatagatgatggtgatggcaatgaaatatactgcactgccattacaagtagcacttggctaccacccacacatgacaaacagttacttataactaacatgccactttggttaggcctatatggatactactcttatgttagagaagcaaaaagtacagacttttggagactacatgtaattgtgttaaaatctaaagccattcactgctacccagaaattggcagttgtgacagatatgtttttatagactgggactatatacaaggtaaaaaaccctgggatcaaactataacaaccaaagagaaatcactatggtttcctgacatgtcctggcaaagaaaatcaatgaatgccatagtagaatcaggtccctttatacctaaactgtctgaagaaacttacagtacttgggaacttaacatgagatattatttttattttaagtggggaggtgctaacacaggagaagcccaagttgaaaatccagaaatgctgcccacctatgatgttcccgattcaatgccaaaaacaatacaaattgttaacccagaaaaacaagctccagaaacaatcttacacccctgggactaccgcaggggatttattaaagaaacagctcttaaaagaatgtgctcaaacatcgaaactgatacagaatttcaataccctacagaacaaacaccaaagaaaaaaagaagagtacaagcaactcttccaaatccccaagaagaaaaccaagaaatcaagagctgtctcctctcgctctgcgaagaaaattcatgccaagaggaggaagagcaagacctccacaagctcatcctcaagcagcagcacaagcaagagaagctcaagtacaacatgttcaagctcatcctagacctgaaagaaaaacagagaataattcaacaccacacaggactactagaatgacacccttcaaaaaagggttcgaaatagacactgaaaaagagttagcacaagcatttagtagaccccctagaatgtttaaagaagacccccctttctatccctggctacccagattaacacctattgtaaactttcaccttaattacaaactctaggcctacaactttcacttagcggagtatgtttatataagttacacccccaaaaaaattgtaaaattgtaaaaataaaaaaaaaaataaaaaattgtaaaaattcggcgctcgcgcgcgctgcgcgcgcgtcgagcgcagcgaggaggtccccggctgcccatggg

SEQ ID NO: 4280 - protein, 661 aa, Gammatorquevirus sp.
MPFWWRRRRKPWFGRWRRYKKRYTRRRRRPLYKRRRARRPNRRRRRRRWKVRRKKKRINVTQWQPESIRKCKIIGIEPLCVGAEGSQIDCYTVTKTDYVPPKVPWGGGFGLENFTLKYLYSEYQYHNNIWTSSNTQKDLCRYTGGKFIVFRHPTQDFVLSYDIQPPHTLNKFTFPSCHPHQQLLSKHHKIILSQASNPNGKYYKKIKFKPPKQMLTKWFFTKTFSPASLIVVKAAAANFQHVNLSGKNTNMLVTLYSLNLSFYKNPAWGLQTSTSNYWPYSQAASNLEYYILDRLGNKVQKTMSLTTKSPYSDTVAYNTGWFKPEFLQAAGIGNIKSPTATHQIIAGRYNPNIDDGDGNEIYCTAITSSTWLPPTHDKQLLITNMPLWLGLYGYYSYVREAKSTDFWRLHVIVLKSKAIHCYPEIGSCDRYVFIDWDYIQGKKPWDQTITTKEKSLWFPDMSWQRKSMNAIVESGPFIPKLSEETYSTWELNMRYYFYFKWGGANTGEAQVENPEMLPTYDVPDSMPKTIQIVNPEKQAPETILHPWDYRRGFIKETALKRMCSNIETDTEFQYPTEQTPKKKRRVQATLPNPQEENQEIKSCLLSLCEENSCQEEEEQDLHKLILKQQHKQEKLKYNMFKLILDLKEKQRIIQHHTGLLE

SEQ ID NO: 4281 - protein, 121 aa, Gammatorquevirus sp.
MSNYSASHFFKPTPYNNDTKNQMWMSMIADGHDCICNCNSPFGHLLASIFPPGHQDRLLTIEEIINRDIQECLSGGDAGESHGLEGGGDIKRDTPEEEGAHFIKDEELDALIAAGEDAGGR

SEQ ID NO: 4282 - protein, 111 aa, Gammatorquevirus sp.
LSPLALRRKFMPRGGRARPPQAHPQAAAQAREAQVQHVQAHPRPERKTENNSTPHRTTRMTPFKKGFEIDTEKELAQAFSRPPRMFKEDPPFYPWLPRLTPIVNFHLNYKL

SEQ ID NO: 4283 - DNA, 2620 bp, Gammatorquevirus sp.
cgggagcccgaggtgagtggaaccaccgaggtctaggggcaattcgggctagggcagtctagcggaacgggcaagaaacttaaaacaatttattgttttacagatgagcaactactctgcttctcacttttttaaaccaacaccttacaacaatgacaccaaaaatcaaatgtggatgtccatgatagctgatggacacgactgtatctgcaactgcaatagtccttttggtcatttgcttgcttctatttttcctcctggtcatcaagaccgcctacttaccattgaagaaattattaacagagatattcaagaatgcctttctggtggagacgcaggagaaagccatggtttggaaggtggaggagatataaaaagagatacaccagaagaagaaggcgcccactttataaaagacgaagagctagacgccctaatcgccgcaggagaagacgccggtggaaggtaagaagaaaaaagaagagaattaatgtaactcagtggcaacctgaatctataagaaaatgtaaaataataggtattgaacctttatgtgttggagcagaaggctctcaaatagactgctatactgtaactaaaacagactatgtaccacctaaagtaccatggggtggaggctttggattagaaaactttaccttaaaatacttatattctgaatatcaataccataacaatatatggacaagtagcaacacccaaaaagacctctgtagatacactggaggtaaatttattgtgtttagacaccctacacaggactttgttttaagctatgatatacaaccaccacatacattaaataaatttacatttcctagctgtcatccacatcaacaactactatctaaacaccacaaaataattttaagtcaagctagtaaccccaatggtaaatattataaaaaaataaaatttaaaccaccaaaacaaatgctaaccaaatggttttttacaaaaacattttcaccagccagtttaattgtagtaaaagctgcagcagctaacttccaacatgtaaacttaagtggcaaaaacaccaacatgctagtcacactatactcacttaatttatcattttacaaaaaccctgcatggggacttcaaacaagtacaagtaactactggccttactcacaagcagcaagtaaccttgaatactacatactggacagattaggaaacaaagtacaaaaaacaatgagtctaaccacaaaaagcccttacagtgacacagtagcctacaacactggatggtttaaaccagaattcttacaagctgctggtataggcaacataaaatcacctacagcaacacatcaaataatagcaggcagatacaaccctaacatagatgatggtgatggcaatgaaatatactgcactgccattacaagtagcacttggctaccacccacacatgacaaacagttacttataactaacatgccactttggttaggcctatatggatactactcttatgttagagaagcaaaaagtacagacttttggagactacatgtaattgtgttaaaatctaaagccattcactgctacccagaaattggcagttgtgacagatatgtttttatagactgggactatatacaaggtaaaaaaccctgggatcaaactataacaaccaaagagaaatcactatggtttcctgacatgtcctggcaaagaaaatcaatgaatgccatagtagaatcaggtccctttatacctaaactgtctgaagaaacttacagtacttgggaacttaacatgagatattatttttattttaagtggggaggtgctaacacaggagaagcccaagttgaaaatccagaaatgctgcccacctatgatgttcccgattcaatgccaaaaacaatacaaattgttaacccagaaaaacaagctccagaaacaatcttacacccctgggactaccgcaggggatttattaaagaaacagctcttaaaagaatgtgctcaaacatcgaaactgatacagaatttcaataccctacagaacaaacaccaaagaaaaaaagaagagtacaagcaactcttccaaatccccaagaagaaaaccaagaaatcaagagctgtctcctctcgctctgcgaagaaaattcatgccaagaggaggaagagcaagacctccacaagctcatcctcaagcagcagcacaagcaagagaagctcaagtacaacatgttcaagctcatcctagacctgaaagaaaaacagagaataattcaacaccacacaggactactagaatgacacccttcaaaaaagggttcgaaatagacactgaaaaagagttagcacaagcatttagtagaccccctagaatgtttaaagaagacccccctttctatccctggctacccagattaacacctattgtaaactttcaccttaattacaaactctaggcctacaactttcacttagcggagtatgtttatataagttacacccccaaaaaaattgtaaaattgtaaaaataaaaaaaaataaaaaattgtaaaaattcggcgctcgcgcgcgctgcgcgcgcgcgtcgagcgcagcgaggaggtccccggctgcccatggg

SEQ ID NO: 4284 - protein, 661 aa, Gammatorquevirus sp.; identical to SEQ ID NO: 4280

SEQ ID NO: 4285 - protein, 121 aa, Gammatorquevirus sp.; identical to SEQ ID NO: 4281

SEQ ID NO: 4286 - protein, 111 aa, Gammatorquevirus sp.; identical to SEQ ID NO: 4282

SEQ ID NO: 4287 - DNA, 2620 bp, Betatorquevirus sp.
tcgggctagatcagtctggcggaacgggcaagaaacttaaaaatattttattttttaggtatgagttctatttggaaaccaccaacatcatcactgagacaacaagaattaaattggcttaatatagtacatcaaacccacgactcattttgccactgcgaagaccccgacctacatttgatgattgctattaataaatttagtgcattccaaaagcctgaaccagaaattaaaaatataaaatgcctgcttaccggcgctaccaaagatggtacaaaaacagaagaagattctacaaaagaagattttggtttcctagacggagagctagacaaacttttcgcagaaacagaagaacaagaagaagatactacaaaccaaaggtaaaaagactttactataaaaggaaaaaaaactttttaaaaatacgaatgtttcaaccaaaaaatattgtaaaatgtaaaattactggttataaatgtttgtttcaaggtagtcctaatagaaaacaacataattggatacaatatatctattcttattcaaaaccagaaacaatgtcaggaggcggctggagtttacttgtatttagcttagatagcatgtttgaagactataatcatttacaatgtatttggactaaaggtaatgcaggtttacctcttgttagatatactggatgtaaacttaaattttatcaaagcaaatttgatgattacattactgtatatgacaattgttggcctatggtagacacaccacatacacatgcagactcatcacctagtcgaatgcttcaaaaaatacacaagatagtagttccaagcagacaaactaaacaaagaagaaagccatttaaaaccgtaaaaataaaaccaccaccacaaatgactaacaaatggtactttcaaagagatatatgtaaaataccactacttatgttaaccacaacaactgtagatttacaacaaccatttgcttacagcaaccaaaataacaacaatatattaattaaatatttaaacccaaatatttttaaaaacaataactttcaaaactacccattaacagaaggctactcaccaaaatcactaataaaccaagacaaccaacaaccggaaaaatactatatgtactcagatcacagtaacacaccacctgaaaaaaataaaacatggttaggacagttagtaccactaacaaacacaagacattacaaagcaggttctacactaagttatgtagttgacggaacaaatgacaaacctgaaaactggggaaatccattttattatgaacacctagacccagacacatctgaaacatacttttgcaattggaataccacaacctttaaaactaattgggaatcacttccaataactggaaacacaaccaatgaaactactaaaaaactaaaaatatttaaagccacagaacgacttatatatgaaactgtatataatccagaaaatgatacaggagaaacaaatttaatttacctaataaataactcacaagaaacacattttcaaccattacaaaaccaagacttaaaatttgaaggatttcctttatataatttattttggggatggacagactttattaaaaaactagaaactacaacaaacttagacaataactacactgttgttattaaaacaaaaacctttcacgaaaaagatgaactttttgtaattgtagacccatcatttgtactaggatacgaccctttcatacctcatacaacagattcacacacaccctcatactataatcaacaaaattggtttccaaaattagcatttcaagaagaaacaatagaaagtatatgtgaaacaggacctggtgtatcaaaatcaaaaaactatttacaaggtatatgtaaatacactttttattttaaatggggaggatgtcctaaaacactacaaaaagcatacaatccttgtttacagcccaaatggaccactcccaatacaatcgatgcaagacttgaaatacaggatccaaaccagccaccagaaaccaacttgttctactgggactggcaaaaagaatatgttacaaatgaagctattgaaagaattaaacgatacacattcactgatgaacaaatattcccaattacaggatcaaagtcatcagcacaagcaacgtcgacacaaaagaaaacaacccaggaagaaaaagaagaagagaaactactcctccagctcaacagactccgaaagcaacgagtccaactcgaactcctcatcagaatgagagaacaaaacttgttataattaataaagttcaactgttcccaaaaacaaaaaaacacagacgttttactccttgggaacaacaagaagaaaatgaaattgcagctatatttcgtagaccacccagaacttttactaatgatcctccattttacccttggttaccacctgaaccatatgtaaactttgatttaaattaccctgctttaaaaaaataaaggccaacaatttacacttgagggagtcagtttatttaagtaaaaacttatacaaacatccaccacctccctaaaattgggcgccaaaattcaaagggggctccgcccccttacacccccaagggggctccg

SEQ ID NO: 4288 - protein, 682 aa, Betatorquevirus sp.
MPAYRRYQRWYKNRRRFYKRRFWFPRRRARQTFRRNRRTRRRYYKPKVKRLYYKRKKNFLKIRMFQPKNIVKCKITGYKCLFQGSPNRKQHNWIQYIYSYSKPETMSGGGWSLLVFSLDSMFEDYNHLQCIWTKGNAGLPLVRYTGCKLKFYQSKFDDYITVYDNCWPMVDTPHTHADSSPSRMLQKIHKIVVPSRQTKQRRKPFKTVKIKPPPQMTNKWYFQRDICKIPLLMLTTTTVDLQQPFAYSNQNNNNILIKYLNPNIFKNNNFQNYPLTEGYSPKSLINQDNQQPEKYYMYSDHSNTPPEKNKTWLGQLVPLTNTRHYKAGSTLSYVVDGTNDKPENWGNPFYYEHLDPDTSETYFCNWNTTTFKTNWESLPITGNTTNETTKKLKIFKATERLIYETVYNPENDTGETNLIYLINNSQETHFQPLQNQDLKFEGFPLYNLFWGWTDFIKKLETTTNLDNNYTVVIKTKTFHEKDELFVIVDPSFVLGYDPFIPHTTDSHTPSYYNQQNWFPKLAFQEETIESICETGPGVSKSKNYLQGICKYTFYFKWGGCPKTLQKAYNPCLQPKWTTPNTIDARLEIQDPNQPPETNLFYWDWQKEYVTNEAIERIKRYTFTDEQIFPITGSKSSAQATSTQKKTTQEEKEEEKLLLQLNRLRKQRVQLELLIRMREQNLL

SEQ ID NO: 4289 - protein, 123 aa, Betatorquevirus sp.
LAERARNLKIFYFLGMSSIWKPPTSSLRQQELNWLNIVHQTHDSFCHCEDPDLHLMIAINKFSAFQKPEPEIKNIKCLLTGATKDGTKTEEDSTKEDFGFLDGELDKLFAETEEQEEDTTNQR

SEQ ID NO: 4290 - protein, 60 aa, Betatorquevirus sp.
LFPKTKKHRRFTPWEQQEENEIAAIFRRPPRTFTNDPPFYPWLPPEPYVNFDLNYPALKK

SEQ ID NO: 4291 - DNA, 2619 bp, Betatorquevirus sp.
ggggctccgccggtgagtgaaaccaccgaagtctaggggcaattcgggctagatcagtctggcggaccgggcaagaaacttaaaaatatatgtattttacagatgtcctccaagaaaccaacaagaagagaattaaaccaactaatcaacgtttgctgtggcgcccacgacctcatctgcgactgcgacgaacccaccaaacacatcatccttcacctattctcccaccaagaaccctaccaagtaacaaaacaacaaaaggataatatacaaaaatgccttattactacagaagaccatggagaaacaaccgctatcgttggagacgatggtataaacgaaggagacctagaggctattttcgcagaagacaaaaatggagaagacgccgaagggtaagaagaaagcttcctaaacttaatattaaagaatggcagccacagactattagaaaatgctgcataaaaggaatgcactgtttatttttatgtacagaagatactattagtagaaactatagaatgtatgaacatagcataataccagaaagatggccaggaggaggaggattttctgtaacaaaatacagcatagatggactatatgaacaacaccaactagatagaaactggtggacaaacagtaacacaaacttaccattatgcagatacacaggatgtaaaattaaattttaccaaagctgggaagtagactatgtagtaaatactagcctaaactatccaatgttagctactcaactactataccacagttgtcaacccagctttatgatgatgaacaaacactgtatatttgtaccatcaaaaataactaaaaaaattccaaaaggctatataactaaaaaatttagaccacctaaccaaatgagtaaccgttggttctttgcaaaagatctttcaaaagtaggtttgctaatgctaaccgcagcagcagcttcctttgaccattactacatagcaacagacaaaacctcaaataactgttcttttaccacacttaacccatacttatggaaaaaacataactttatacaaccaggcattaatggatattcactatccacaactgggactgtagaaaaaagaatgttcacaaccacacaacacatctccaacgacactcaaatatcaaacctaaaaccaagcacaattacatacttaggttggacaaaacaagaccaagaaggaaaaactgtatcacaaagtaacaaacagaactacttaacagaccacaaatactggggaaaccctttttcacatgaaattctaacaggctcacaacctgtattagtaacaactaaagattggactactatcaaagaaaacttaatagacaattttgactctaacatacccacaggatttttaacaacacccacagaaccattactacatgaatgcagatactctccagacagagacacaggagcaggaacaaaagtatatttaaaatctgtactaagagacgaatcaggttgggaaccaccaacaaacgaagaacttataacagagggctttccactatggttagcattatttggctttgtagactggcacaaaaaactagcagtagcaacaagcctatatacaagctacgtaattgtaattgaatccagctttataacaccacaactaccatactacatattattagaccaacactttattgaaggaaaatccagatacatgacagaacatgacacagaccaacaaactcaagcagacaaagattcctggtacccctgtgttaaataccaactagaaagcatagaaaacattgtaaaaacaggcccaggaattcctaaactaggtggaagaaaatcagtagaagctaaaatattctacaaattttattttaagtttggaggatgtccaccaaagatggacacaattaacgaccctactaaacaagagacataccccgttcccggttttcagtctacaacatattcgttacagaatccaacactccctcaagaatcctacttataccaatttgacgtcaaccaagacatccttacaaagaaagctgcaaaaagaattacaagagactgggaaactcaaaaaactttattttcaactacaggacgaatggaaccagcaccatactcggaaaaagaaggagaaatctcgccgacaccctcagactcggaagaggacccggcactcctacaaatcaagctccgaaagctcaagcgacagcgactctacttggagcagcaaatcgagcaactaatgcaacaaccataaactttatgtgcataaaaaaagctctgcttttcgaaccaccgcataaaaaactgagaaaaatgaacaaatatgaactagaaactgaaagactgtgtgctacagcctttaaaagaccacctgtatctatgtggggggaaattccttactggccatggttaaaaactgaacccttagtaaatcaacttccaaaagttaactttgacttaaattttaaaccctaataaaatttcaaggcctacaaaattcacttagtggtgtctgtttatataagtttaaacttaaataaaccaactccgcctcccaaaattgttggcgccataagggggctccgcccccttaaacccccaag

SEQ ID NO: 4292 - protein, 664 aa, Betatorquevirus sp.; identical to SEQ ID NO: 2948

SEQ ID NO: 4293 - protein, 98 aa, Betatorquevirus sp.; identical to SEQ ID NO: 2949

SEQ ID NO: 4294 - protein, 139 aa, Betatorquevirus sp.; identical to SEQ ID NO: 2950

SEQ ID NO: 4295 - DNA, 2619 bp, Betatorquevirus sp.
ccttaaacccccaagggggctccgccccctttcaaggggcaattcgggctagatcagtctggcggaacgggcaagaaacttaaaaaaatatttattttacagaatgaactaccaaaagcctattaaatactcaactaaacaacaaaatgtaaaccacattaacctacttgtgagtttacacgaccttaaatgtggatgcgaacaccctctgcaacataatatatttgacattcttgaacaagaaccatctttaaaacaagataaaaaatttatttctgaattacaaaaatggctttctactaccgagcctggaaatacccaagaagaagatacagacgttattggaaatggagacctagaaaaactattcgaagaaccttttggagaagaagaagacgtcgatacaaggtaagaagacgccgctttaaaagaaaacttaaaaaaataattttaaatgaatggcaacctcaaaagattagaaaactaactattacaggactatttccactattcatgtgtaacagagacagaatagcaaataatatgactcaatggctttacagtacagctccagaacattatgcctcaggaggaggattttcgttaacaaacttttctttaaactgtttatatgaacttcatcaaaaggacacaaactggtggacacaaagtaactgtaatatgccaatgataagatacttacactgcagacttaaattatacagagcagaagaaacagactatgttttcagatacagtacatgccaacccatgaaagcaacacaactaacatacatgtcatcacaaccatcaatgatgatgatgaacaaacataccatttttgttagatgccttaaaaatactcaacacaaaaagccatataaaatagtacacattaaacccccatcaggttttcaaaacaaatggtactggcaacatgatatatcaaacacaccattagtgctaacacagtgtgcagccgcaagctttactagatactttacatcagccacagccccctctactacaataggatttcaatccttaaatactaaattctttatttttcacaactaccaaaatccgggaacacagggatggcacccaaaacaaaatatatacttatggtcattaaaaaatggtgttaccggaagcatacaaaacgcacaaatacaaaacattgtgtatttaggaaacacaggcccaaacgaaccaggaaaaacaattaaagaagcctatccaaacacacaatcatcaaattgggaacaaaactttcaaaactacatgacaaacaaatcaaactggggaaacttttttaaaacagaatatctaacaggattagctagattaatatatacaaactgtgactaccaacaactaaaaaccaaatttaaatctcctacagacacattaaacacaaactttcaagaactaatagatcctactatatatagctgcagatataatccactttcagacacaggagaaaaaacatcagtttacctagtaccaaatataagagatgaaacaggatgggacccattaaacaataaaaacttaatagtcacgggataccccctgtggttagcaatgtatggatttatagactggatgaaaaaactttcagaagtacaacaaatagatattaactacttagtagtattcacaagcccttgtataacaccaaaattagactactatgtagttttagacaaaaactttatagaaggaacatctccatatcaagaacaatatcacctaacaccctctgacgaaaaacacctatacataaaatattcattccaaatgtttacaataaacaccattgccagtagcggaccaggaataccaaaattaccaggaacaaacagtgtagaagctcacatggaatacaaatttacttttaaggttggaggctgcccagctcctatggaacaagtatgtaacccagcagaacaaccagcataccccatccccaatactgacatccaaacaacttcgttgcagaatccaacaaccccaccagagtacatgttatactactttgacgaaaggaggggacaacttactgaaagagctacaaaaagaatcaaacacgactgggaaactaaagaacctttatttacaattacagcaaaaagcagcctggaacctgcagcccacaaagaagaaacatcatcggagacaacctcggaagaagaagaagaaacaacgatcgaagcccaactacaacaccagcgaagaaagcagcgactactccagcaccgaatcaagctcctcttaaaatatctcaaaaataccaaataacaacctgcacaaacacagtgtatttatttccacctgaagaatctccaaacagaagaatgacacctaaagaacaagaagacgaaagattttgggcctctctttttaaaagacctcaaagacattatataaaagacaaacccttttacccttgggtacctaacccccctcctaactgcatggttaattttgatctaaactacccttaataaaggccaacattatttcactctcggtgtccatttatttaagtataactttaataaacatccatgtacttccctaatttgttggcgccaaaagggggctccgccc

SEQ ID NO: 4296 - protein, 672 aa, Betatorquevirus sp.
MAFYYRAWKYPRRRYRRYWKWRPRKTIRRTFWRRRRRRYKVRRRRFKRKLKKIILNEWQPQKIRKLTITGLFPLFMCNRDRIANNMTQWLYSTAPEHYASGGGFSLTNFSLNCLYELHQKDTNWWTQSNCNMPMIRYLHCRLKLYRAEETDYVFRYSTCQPMKATQLTYMSSQPSMMMMNKHTIFVRCLKNTQHKKPYKIVHIKPPSGFQNKWYWQHDISNTPLVLTQCAAASFTRYFTSATAPSTTIGFQSLNTKFFIFHNYQNPGTQGWHPKQNIYLWSLKNGVTGSIQNAQIQNIVYLGNTGPNEPGKTIKEAYPNTQSSNWEQNFQNYMTNKSNWGNFFKTEYLTGLARLIYTNCDYQQLKTKFKSPTDTLNTNFQELIDPTIYSCRYNPLSDTGEKTSVYLVPNIRDETGWDPLNNKNLIVTGYPLWLAMYGFIDWMKKLSEVQQIDINYLVVFTSPCITPKLDYYVVLDKNFIEGTSPYQEQYHLTPSDEKHLYIKYSFQMFTINTIASSGPGIPKLPGTNSVEAHMEYKFTFKVGGCPAPMEQVCNPAEQPAYPIPNTDIQTTSLQNPTTPPEYMLYYFDERRGQLTERATKRIKHDWETKEPLFTITAKSSLEPAAHKEETSSETTSEEEEETTIEAQLQHQRRKQRLLQHRIKLLLKYLKNTK

SEQ ID NO: 4297 - protein, 117 aa, Betatorquevirus sp.
LAERARNLKKYLFYRMNYQKPIKYSTKQQNVNHINLLVSLHDLKCGCEHPLQHNIFDILEQEPSLKQDKKFISELQKWLSTTEPGNTQEEDTDVIGNGDLEKLFEEPFGEEEDVDTR

SEQ ID NO: 4298 - DNA, 2619 bp, Gammatorquevirus sp.
cgggagcccgaggtgagtgaaaccagcgaggtctaggggcaattcgggctagggcagtctagcggaacgggcaagaaactaaaaactatttttattttacagatgtcaatattttacaaaccaactccatacaatggatgtactaaaaaccaaatgtggatgtcctccataagtgatactcatgatatgcactgtggctgcactcaaccatttgctcacctactagatagcatttttcctgaaggacaccaagatagaaacaaaactatacaagaaattattgacagagacaaacaatgcctttctggtggccaagaagaagaagatggaggtctgcctataggttcaagcgccgcaaacctgcctacaggcgcagaaggcgaagaagaccaagataccaaagaaaatatagaagagcttttggccgtcgccgccgccgcagaagaaaggtaagaagaaaaagaaaaactttagttgttagacaatggcaaccagactctattagaaactgtaaaattaagctttttgggactcttgtattaggagctgaaggcactcaatacctatgctatagtaatgaaaaaaactcatggacaccaccacaaagacctggtggaggtggatttggtattgaaacttacaatttagcatggctatatgatcaatacagattaaaaagatgtatatggacagcatctaatgaatacaaagacttagttaggtttataaaagttaaatttttgttttttagacaccctaaaattgactttgttattaactatgacagacagttaccttttatactacaaaaacctacatacatgaattgtcacccactagcattactattatctcaacacaaaaaaattataccaagcaagacaaccaaaccaaaaggtaaaaatacagtgagcattactataaaaccaccaaaacaaatgatatctaaatggttttttgcaaaacaatttgctttgtatgatttactacaactacaaggtgcagcatgctcactaaactacccaaaactaggttgctgtaatgaaaacctaataattagtattttttatattaatccacaattttaccaagactctgattggggtgcctatcaaaaatcaccttaccttcctataaaaacaatagctactaatcttaaatatcactggaaaataggtaacaaaacaggaatattctcaccagattatttacatagacgtgatgacactgtatactatgaaagtgtagacttagaaaaaggcatgttttcaccctacatcctaaatacacaaaaaataacagttggtgaatcagaaacacatctctatgctcttcctctaggtgcagctagatacaatccagaaatagatgatggagtaggcaatgaaatatacttagtaccaattaaccttggaaactataaaaagccatcacaagataatttaatttttagaggcttaccactatggcttatgttttatggcctttatagttttataaagaagacacaagcagaatcctttttaggtttacacatgtttatagtaaaatcagaatatattttacctaaaccaaaagatccagcaagacaattttttccaatagtagacaacacatttgtaaatggaaagaatccatacaactcatacatatcaagcactgaaagaaagctatggtttccatctgctttacaccaagtacaagtaattaataactttgttaaatgtggaccctatgtgccaaagttagacaatgatagagaaagtacatgggaactaccatacaaatctattttctattttaaatggggtggtccacagatgccagaccagcaagtcactgacccaaaagaaaaaaccagctatattgtacccgatacaatccaacaaagactacaaattaccaaccctctcaaacaagcaactgaatcccttatacaccagtgggattacagacgaggactcattaaaacaaaagcttttaaacgaatgctcgaaaacctcggctctgaatcagatgtttactctgatacaggcacaccaaagaaaaggcaaaggatcgaaaatgcactccactaccaagaagaagagaacaaggaaatcaagacatgtctcctctcactctacgaaagttcttcctcagaaaaagaggaggaagaaccaaacctcctccagctcatcaacaaccagcgacagcagcaaaagcagctcaagctccagctcttaaccttaataaaacatttaaaagagaaacagaaccaactacaactacaaacaggagtaatctagttatattaacccgctttaaaaaaggctttgaagaagacactgaaaaagaagtagctaaagcattttgcagacccccaagaacctttaaagaagatcccccattttacccatggttacctccaacacccaaagtctgctttaagctcaattttaaaggctaggcccacaatgtacacttagtaaagcatgtttaataaagtttaacccaaaaaacaaaaatttaacttttataaacctaactaagtctttgtattcattagatgagtttaccccgctagacggtgcagggaccggatcgagcgcagcgaggaggtccacagctgcccgtggg

SEQ ID NO: 4299 - protein, 663 aa, Gammatorquevirus sp.; identical to SEQ ID NO: 3581

SEQ ID NO: 4300 - protein, 116 aa, Gammatorquevirus sp.; identical to SEQ ID NO: 3582

SEQ ID NO: 4301 - protein, 113 aa, Gammatorquevirus sp.; identical to SEQ ID NO: 3583

SEQ ID NO: 4302 - DNA, 2618 bp, Betatorquevirus sp.
ccccaagggggctccgcccccttacaccccgtcaaggggcaattcgggctagatcagtctggcggaacgggcaagaaacttaaaacaaatttatattttacaggtatgacatctatttggaagaaacctttatacagtccgaaacaacaagaattaaaatggcttaaccttatgtgggaaagccatgatcaaatgtgcagctgccaagatccacctcttcacttgatgattttaattaacaaagattctaacgcaccaaaaccagaagcagatattcgaaacctaaaatgcctccttaccggtatggatactactaccaaagaagatatagaaaacgaagaccctatcttttgcgaaggagaactagaaagactcttcgcagaagatggagaagaaaaagatacaaaagaagacgaaaggtaaactttaaattttttaaaaagtttaataagaaattaaagactattaaagtaaaacaatggcaaccaaagcaaattattaaatgtaaaattaaaggaactaaatgcctaatacaaggctctccattaaggagctcaaacaactttatacaatatgtatactcttatatacctgaatttcaacccgggggaggaggatggactttaatcatacacagtttagaaactctttatgaagactaccaacatttacaaaatatatggaccacaagcaacgcaggaatgccattagccagatatataggctgtaaaatgcgattttatcaaagcccagaaacagactacgttgttacatacgacaactgctggccaatggtagacacacctttaagccatgcagacgcagcaccaggatttatgttacaaaagaaaaacaaaataattattccctcaacattaaacaaaagaaaaagaaaaccatacaaacaagtctggattagaccaccagctcaaatgtataaccattggtacttcactaaagatatatgcaaaacaccattagtactcataactgctacaacttgcagcttaaacaatccttttgctaaaccagaagcaaaaagtaacaatatctcactaaaatgcttaaatgtaagactttttcaaaatacaaactttcaacacccaccagaaacaacatactactctccaaaaacaacagacgcaccatctccaaaaaacatttacttatactcaagtaacttacattacaaccaagcaaaagttagcgacttacatccactaggaaatacaaaagaaatgaaaataggagttccttacagcactctaaacaaaaaagatgacataaaactctcaaacctaggaaacccatttgaaaaaagtaactttatatcagacgaaatgtacctatactactcaacaaaaaattttacagaaatgtttgacataaaagataaccgtaacacattagacaagataccagagattttacctgtagagtctaaaacagtaataacagtaagatacaacccagacaaagataccggaaaagacaacaaagtatacttagtaaaaaattttgaaaaccaaggttggaaagaaccaacagacgaaaacctaattattgaaggctttccattatactatgcattatggggatggctagactggcaaaaaaaactaaaaaaagcagttagaatttttaatgactacactttagtaatacaaacaaaaatgttcgatgttgaattaccatactacgtactattagatcaagattttatagacgggtttgaaccttatggagatttacatcaaccacctatagaaccatcatactacagcacacaaaattggtttccaaaaacaacataccaagaacaatcaattcaaaaaatttgtgacaccggtccatttacacctaaaacaccttggaaccactacttacaaattagatatcaatattgtttttactttaaatggggaggatgtccaaaagagttaaaaaaagcatatgacccttgcttacagccaaaatggcccactcccgataacatctcaccagcaactgaaatctcgaatccttcaacctctccatcaactatcctctactcatgggattggaaagaagactacattaaaaagaaagctattaaacgaattgcagaccacacaccaattaatgaaaatatactctccattacagaatcaaactacaacccaaaacccctacaaaagaaaagaaaaacagaaacatcggagagcgaagaagagaaggaagaggaggagctcctccagcagctcctcaagctcaagaagcaacgaaagcacctccaacagctcctccaattaacaggtataaaataaaagactgcaaattcaaagtagaactttttcctactacaaaaccatttaaaaacagaaaatttactcctgaagaatgggaagacgaaaaattcttagcatcatggatgaaaagaccccaaagacactttttctatgaccctcctacctatccctggttaccaccagaacccctagtaaactttgatgtaaactttaaagaataaaggccaacaaaattcacttgatggagtccgtttctttaatataaacttaataaacatccaccacactcccaaaattgttggcgccaaagggggctccgcccccttacac

SEQ ID NO: 4303 - protein, 672 aa, Betatorquevirus sp.
MPPYRYGYYYQRRYRKRRPYLLRRRTRKTLRRRWRRKRYKRRRKVNFKFFKKFNKKLKTIKVKQWQPKQIIKCKIKGTKCLIQGSPLRSSNNFIQYVYSYIPEFQPGGGGWTLIIHSLETLYEDYQHLQNIWTTSNAGMPLARYIGCKMRFYQSPETDYVVTYDNCWPMVDTPLSHADAAPGFMLQKKNKIIIPSTLNKRKRKPYKQVWIRPPAQMYNHWYFTKDICKTPLVLITATTCSLNNPFAKPEAKSNNISLKCLNVRLFQNTNFQHPPETTYYSPKTTDAPSPKNIYLYSSNLHYNQAKVSDLHPLGNTKEMKIGVPYSTLNKKDDIKLSNLGNPFEKSNFISDEMYLYYSTKNFTEMFDIKDNRNTLDKIPEILPVESKTVITVRYNPDKDTGKDNKVYLVKNFENQGWKEPTDENLIIEGFPLYYALWGWLDWQKKLKKAVRIFNDYTLVIQTKMFDVELPYYVLLDQDFIDGFEPYGDLHQPPIEPSYYSTQNWFPKTTYQEQSIQKICDTGPFTPKTPWNHYLQIRYQYCFYFKWGGCPKELKKAYDPCLQPKWPTPDNISPATEISNPSTSPSTILYSWDWKEDYIKKKAIKRIADHTPINENILSITESNYNPKPLQKKRKTETSESEEEKEEEELLQQLLKLKKQRKHLQQLLQLTGIK

SEQ ID NO: 4304 - protein, 105 aa, Betatorquevirus sp.; identical to SEQ ID NO: 1876

SEQ ID NO: 4305 - DNA, 2617 bp, Betatorquevirus sp.
ccccaagggggctccgcccccttacacccagtctaggggcaattcgggctagatcagtctggcggaacgggcaagaaacttaatttattatattttacagatatgacatctttttggaggaaacccacatcatcactgagacaacaagaactaaaatggataaatttaatgcatgaaagccacgatttcttctgccactgcgacgaaccagatcttcactttcttgtatgcataaacaagttttcaacctgcccaaaaccagaattggatattaaaaatataaaatgcctccttaccggagatactaccagaatcgctacagaagaaactactacaggagaagatggaggtttcctagacggagaactagaaacacttttcgacgaaaacaatggtacagaacaaaaagacgacgcaaatacaaggtaaaaagatttagacttaaaaaaaagaaaacttttttaaaacttaaacaatttcaaccaaaatccataaactactgtaaaattactggatttaaatgtctttttcaaggatctcctctaagaaaacaacataactatattcaatatatatacagttatgtaccacctacttatcccgggggaggcggatggagtttacttgtatttagtctagatagtctttttgaagactaccaacacttacaatgtatttggagcaaaagcaatgccggtttgcctcttgtaagatttttagggggtaaaattaagttgtatcaaactgaatcaactgattatgctgttatatatgatagttgctggcctatggtagacacaccacacacacacgcagattcagctccaagtagaatacttcaaaagaaacataaaacaataatacctagtacaaacacacaaaagagaaaaaaaccatataaaactattagatttaaaccaccaccacaaatgcaaaacaaatggtactttcaaagagacatttgtaaaattccactactaatgctcacatcaactagcattgatcttacaaaacctttttgcaatcccacatgcaaaagtaacaacattataataagatacattaacccatacctttttaaaaataacaactttcaagactatccaaaaacaacaggatattcaccaaaatcactaagtgacggtccatattacttatatgcaagttataataatgaccctccacctccaaatacaaacgcagcgagttttaagacttggatacttaacacagttccactaataaatactaaaaactataactctggagcaatgatgtcagagattattctggaaggaaatgacaaaccagaaaactggggaaacccattttatcacacacacttagatttacaatcaacaaccatttacatatgcaattccaacacatcaacattaaaaactgcaatacgtagcagcaattttacacaagttaaaataactaaagccacagaaaatctaatttatcaaacaatttataatccagataacgataccggagaaacaaacaaaatttatttagttaaagcaacacaagaaacaaactttcaaccaccaacagacgaagatttaatatttgaaggttttcccctgtacattttattctggggatggacagactttgttagaaaattaaacaaaacacctaacattgacaccaactacatgatagttatacaaacaaaaacttttcacgaaaaaaatgacccatactttgtaccaatagacatacagtttgaacatggttacgacccttacataccattagacacacaaaaccacgaaccatcatattacaatcaacaaaactggtatccacaattaaaatatcaagaacttactatagaaaatatttgtgaatcaggaccagctgtaagccgttcaaaagattatttacaagcatactgcaaatatacattttattttaaatggggagggtgtccaaaaactcttgataaagcatataacccttgttcacagccaaaatggcccacaaccgatacagtccttccaggacttgaaattacgaatccatcagaaccaccagaaacccaactatactcctgggactgggaaaatgactttgttacacaaaaagctatacaaagaattagagaccacacagaacctcatgaaacattactctcaattacagagtccaaatcctcagcaaagccacaaaaaacaacacaagaaacgcaggaccagaaagaggaggagaaactactcttcaagctccaccagctcagaaagcagcgaatgcaactcgaactcctcataaagatgaaagagtacactttacaataattaatcaagttgaactatttcctaaaccaaaaaaacgcaaacgctttaactcctgggagcaaaacgaagaaagagaactagcaactatctttaaaagaccccaacgctattatcacggtgataaacccttttacccatggcttccccctgaaccttatgtaaactttgacttaaaatttcgtgattaaaaattcaaggccaacaaatttcactgagtggtgtccatttatataagttttactttaataaacagtcaccgcctccctaacaatagggcgccaaatttaaaagggggctccgcccccttacac

SEQ ID NO: 4306 - protein, 673 aa, Betatorquevirus sp.
MPPYRRYYQNRYRRNYYRRRWRFPRRRTRNTFRRKQWYRTKRRRKYKVKRFRLKKKKTFLKLKQFQPKSINYCKITGFKCLFQGSPLRKQHNYIQYIYSYVPPTYPGGGGWSLLVFSLDSLFEDYQHLQCIWSKSNAGLPLVRFLGGKIKLYQTESTDYAVIYDSCWPMVDTPHTHADSAPSRILQKKHKTIIPSTNTQKRKKPYKTIRFKPPPQMQNKWYFQRDICKIPLLMLTSTSIDLTKPFCNPTCKSNNIIIRYINPYLFKNNNFQDYPKTTGYSPKSLSDGPYYLYASYNNDPPPPNTNAASFKTWILNTVPLINTKNYNSGAMMSEIILEGNDKPENWGNPFYHTHLDLQSTTIYICNSNTSTLKTAIRSSNFTQVKITKATENLIYQTIYNPDNDTGETNKIYLVKATQETNFQPPTDEDLIFEGFPLYILFWGWTDFVRKLNKTPNIDTNYMIVIQTKTFHEKNDPYFVPIDIQFEHGYDPYIPLDTQNHEPSYYNQQNWYPQLKYQELTIENICESGPAVSRSKDYLQAYCKYTFYFKWGGCPKTLDKAYNPCSQPKWPTTDTVLPGLEITNPSEPPETQLYSWDWENDFVTQKAIQRIRDHTEPHETLLSITESKSSAKPQKTTQETQDQKEEEKLLFKLHQLRKQRMQLELLIKMKEYTLQ

SEQ ID NO: 4307 - protein, 108 aa, Betatorquevirus sp.; identical to SEQ ID NO: 2379

SEQ ID NO: 4308 - DNA, 2617 bp, Gammatorquevirus sp.
cgggagcccgaggtgagtgaaaccaccgaggtctaggggcaattcgggctagggcagtctagcggaacgggcaagaaacttaaaactatactctctttacagatgtcattgttttacaaaccaacaaaatacaatggctgtactaaaaaccaaatgtggatgtccaccataggtgactgccatgacattcactgtggctgtgaaagaccttttgctcatcttctagacagcatttttccagaaggacaccaagacagaaacaaaactatagctgaaattatacaaagagatttaacagaatgcctttctggtggccaagaagaagacggtggtgggctaccactaggttcaagcgccgcaaacctcgctatccaaagagaagaagaagaagaagatacaaaagaaaatatagaagagctcctcgccgccgccgccgccgcagaagaaaggtaagaagaaagagacccaatcttatagtcagacaatggcaaccagactctatagtactctgcaaaattaaattgtttagcagcttagtactaggagcagaaggtactcaatacctgtgttatactaatgaaaaaggagcatggactccaccacaacaaccaggcgggggaggctttggcatagagacatacagcttatcatatttatatgatcaataccttctaaagaaatgtatatggactagatcaaatgattacaaagacctatgcagatatttaaaatgtaaaattgttttctttagacaccccaaaatagactttgttgtaaactatgccagacagccgccatttctccttgaaaagcctacctacatgaactgtcaccctatagctatgctactctcacaacacaaaagagtaatacttagtaaaaaaacagaccctaaaggtaaaaatagagttacattaataattaaaccacctaaacaaatgataaccaaatggttcttcactaaacaatttgcactatttgatttacttcaaatacaagcagcagcctgtactttaaactatccaaaacttggatgctgcaatgaaaacctaattatctcaattttttaccttaacccacagttttaccaagacacaacatgggcacaagctgcagcaggaccatacaaaccttatgccacaattagaactgatttagtttattactataaaataggcactcaaacaggcaaatttacacctaactacctaaatgaacatggcactgaatcctactacaaaagtgtttccatagaccaaggctttttttcaccaagaatactaaatactcaatacatcaccgaaccacccgcaactaccaaacttgccaacatacctataggtgcagctagatataaccctgaaatagatgatggtagaggtaatgaagtttacctagtttctgtagcatcaggtcattaccaaaaacctacagaagacaatttaatatttagaggcctaccactatggcttatgttttttggcctagttagttttataaaaaaaattaaaactgcttcatttttagaactacacatgtttattgtaaaatctgaatatattttgcctaaacaccatgacacatccagacctttctttccactagttgatataaactttatcaatggcaaaaacccatacaactcatacatttccagtacacaaagacaactttggtacccaaatgttacacaccaaatcgaaacaattaattccatagtaaaatgtggcccatttatacctaaattagacaatgatagagacagcacatgggaattaccttttaaagcaactttctattttaaatgggggggtccacagatgccaaaccaaaatgtctcagaccccaaagaaaaagccagctacattgtacccgatacagtccaacaaggactacaaattaccaaccctctcaaacagaaagctgaatcccttttacatgagtgggactacagacgaggactcattaaaacaaaagcttttaagcgaatgctcgaaaaccttagcattgaatcagatgtgtgccaatctacagagacaccaaaaaagagacaaagggtcgagaactcactccactaccaagaagaagaaaaccaagagatcaagacatgtctcctctcactctgcgaaagttcttcctcagaaaaagaggaggaagaaacaaatctcctccagctcatccagcagcagcagcagcagcagaagcaactcaagctacagctcctcacactcatcaaagacctgaaggaaaaacaaaatgctttacaactacaaacaggagtaatttagtagtgctaacccgctttaaaaaaggctttgaagaagacacagaaaaagaactagcagctgcttttcacagaccccccagaacctacaaagaagaccaccctacttatccctggctaccaccagcaccaaaagttaactttaaacttaattttaaattctaggccaacaatgtacacttagtaactgatgtttgtataagcacaacccaaaaaaaataaataaataaaaaaaaaaataaccaagtggggtgacgaatggctgagtttaccccgctagacggtgcagggaccggatcgagcgcagcgaggaggtccccggctgcccgtggg

SEQ ID NO: 4309 - protein, 662 aa, Gammatorquevirus sp.
MPFWWPRRRRWWATTRFKRRKPRYPKRRRRRRYKRKYRRAPRRRRRRRRKVRRKRPNLIVRQWQPDSIVLCKIKLFSSLVLGAEGTQYLCYTNEKGAWTPPQQPGGGGFGIETYSLSYLYDQYLLKKCIWTRSNDYKDLCRYLKCKIVFFRHPKIDFVVNYARQPPFLLEKPTYMNCHPIAMLLSQHKRVILSKKTDPKGKNRVTLIIKPPKQMITKWFFTKQFALFDLLQIQAAACTLNYPKLGCCNENLIISIFYLNPQFYQDTTWAQAAAGPYKPYATIRTDLVYYYKIGTQTGKFTPNYLNEHGTESYYKSVSIDQGFFSPRILNTQYITEPPATTKLANIPIGAARYNPEIDDGRGNEVYLVSVASGHYQKPTEDNLIFRGLPLWLMFFGLVSFIKKIKTASFLELHMFIVKSEYILPKHHDTSRPFFPLVDINFINGKNPYNSYISSTQRQLWYPNVTHQIETINSIVKCGPFIPKLDNDRDSTWELPFKATFYFKWGGPQMPNQNVSDPKEKASYIVPDTVQQGLQITNPLKQKAESLLHEWDYRRGLIKTKAFKRMLENLSIESDVCQSTETPKKRQRVENSLHYQEEENQEIKTCLLSLCESSSSEKEEEETNLLQLIQQQQQQQKQLKLQLLTLIKDLKEKQNALQLQTGVI

SEQ ID NO: 4310 - protein, 116 aa, Gammatorquevirus sp.
MSLFYKPTKYNGCTKNQMWMSTIGDCHDIHCGCERPFAHLLDSIFPEGHQDRNKTIAEIIQRDLTECLSGGQEEDGGGLPLGSSAANLAIQREEEEEDTKENIEELLAAAAAAEER

SEQ ID NO: 4311 - protein, 113 aa, Gammatorquevirus sp.
MSPLTLRKFFLRKRGGRNKSPPAHPAAAAAAEATQATAPHTHQRPEGKTKCFTTTNRSNLVVLTRFKKGFEEDTEKELAAAFHRPPRTYKEDHPTYPWLPPAPKVNFKLNFKF

SEQ ID NO: 4312 - DNA, 2616 bp, Betatorquevirus sp.
cacctaattagaattgccgaccacaaactagtctaggggcaattcgggctagatcagtctggcggaacgggcaagaaacttaattttatttttttacagaatgaacaacttaattgaaccaaaatacactccaaaacaactggaacttaactggaaaaacttaattcatcagacccacgaccaaatttgtggctgcgaagatgttctcactcatgtaattcaactactgggacgcgacaacccaaaaccacttacaagcaaaaaaattaaagaaataagatggctccttactggagaaggtaccgccaaagaagatggagacgaccaagacgccctcgatatagacgacctcgaactactttttggtggcgaagaaaacaccgctactacagacccttctgggtaagaaaaaaacttaaacttaaaactataaaactaaaagtatggcaaccaaaaactattagaaaatgtaaagttaaaggaattaaaccaatatttcaaggaagtgctgatagactaacaaataactactggcaatatccaataagctatgttcaaccgggaactccggggggaggcggctggggaataatggcattaagtttgtcaagcttatttgaagattatcaacacttacaaaatatatttacaacaagtaacgcaggtttaccattagtaaaatacatgggtgttagactaaccttttatcaacatccatattcagattatgtagtagaagtagataactgctggcctatgttagatacaccactaaaacacccaaatagccaaccagcaagaatgctaatgggtaaaaaaaagattataatacccagcacagaaacaaaaccattaagaaaacgcaaaaaatcagtatacatttcaccgccttcacaaatgaccaataactggtattttcaaaaagacatttgcaacacaaaactagtaatgataacagcaacagcttgtagcttaaacaactactttttaccaccaagagcaacatcaaacaactgcactatatttgcattaaacacaaacatattcaaaaacgcagacttccaacatccatcacaaaccacaggctacacaccaagaaataacacatatatgtacggtggaacagccccctatgcaagtatatcaaaagaaacattaatatacttaggagactgcaaaacctacacagcaggaaaaccagggaacatgacagaaaaaaacaactggggaaacccttttcacaaagactacattaaaggcaataaaccagtatttttgagctctaaaccaccaacagacgaagtcttcaaaaaagagccagcagaaattaaaaaagaattacaagaaatgacatcaccaatagcatacgccatgagatataacccagacagagacacaggagagggcaatacagcatactttgtagataattatagaacagcaggagacttaggctttcaaaaacccagagaccccaatagaatcatagatggattcccactatggataatgctatggggttgggcagactggataaaaaaactagcagaaatacacagagtagatgatgactacataatggtaattcaaacatcattttttacagaaaaactaccattttatgtactattagacgactcatttttaagtggaaaaagttactatgacacagaacaaaccactaaagacctactaaactggtatccaaaattttactttcaacaacaaagcattgaaaacatatgcaaaacaggcccaggagtaagcagagtaagctcattactatctgttcaagctaaaatgaaatatgactttcgctttaaatggggaggctgtccagctacattagaaaaagtatatgatccttgttcacagcctcgatggcccatccccggtaacctcaatgaaggaattcagatccagaatccagacacagaccccagcaaagaaatctactcatgggattttagaaaagactttattacagaaccagctcttaaaagacttaaaaaagactcactacctttacaactcgcttgcctaccaacaggaagccgatcagatgtccaagccctcaaagcacagaaaacaaaagaccaccaagaaacgtcatcggaagaagaggaaacaccgaccctcaacctcaaactcctcagactccgacagcgacaacaacagctccaccaccagctcctcaagttaataaatacaaaataactcacaaagatacctatattaacctttttggattaaaaaaaccatttaaaaaccgtacttttaaaccccatgaagagcagttagaaagagaggtagcagctatttttaaacgccccccaagaacattcttttatgataccccttactatccttgggtaccccctgcaccaatggctaactttgctttgcgctttaaagatactgaataaaggccaacaattttcacttagtggtgtctgtttctttaataaaaacttaaataaaccaactccgcctcccaaaagtgttggcgccaaagggggctccgcccccttaaacccccaagggggctccgcccccttaaacccccaagggggctccgcccccttacaccccctaattaatattcaacaggaaaac

SEQ ID NO: 4313 - protein, 645 aa, Betatorquevirus sp.
MAPYWRRYRQRRWRRPRRPRYRRPRTTFWWRRKHRYYRPFWVRKKLKLKTIKLKVWQPKTIRKCKVKGIKPIFQGSADRLTNNYWQYPISYVQPGTPGGGGWGIMALSLSSLFEDYQHLQNIFTTSNAGLPLVKYMGVRLTFYQHPYSDYVVEVDNCWPMLDTPLKHPNSQPARMLMGKKKIIIPSTETKPLRKRKKSVYISPPSQMTNNWYFQKDICNTKLVMITATACSLNNYFLPPRATSNNCTIFALNTNIFKNADFQHPSQTTGYTPRNNTYMYGGTAPYASISKETLIYLGDCKTYTAGKPGNMTEKNNWGNPFHKDYIKGNKPVFLSSKPPTDEVFKKEPAEIKKELQEMTSPIAYAMRYNPDRDTGEGNTAYFVDNYRTAGDLGFQKPRDPNRIIDGFPLWIMLWGWADWIKKLAEIHRVDDDYIMVIQTSFFTEKLPFYVLLDDSFLSGKSYYDTEQTTKDLLNWYPKFYFQQQSIENICKTGPGVSRVSSLLSVQAKMKYDFRFKWGGCPATLEKVYDPCSQPRWPIPGNLNEGIQIQNPDTDPSKEIYSWDFRKDFITEPALKRLKKDSLPLQLACLPTGSRSDVQALKAQKTKDHQETSSEEEETPTLNLKLLRLRQRQQQLHHQLLKLINTK

SEQ ID NO: 4314 - protein, 115 aa, Betatorquevirus sp.
LAERARNLILFFYRMNNLIEPKYTPKQLELNWKNLIHQTHDQICGCEDVLTHVIQLLGRDNPKPLTSKKIKEIRWLLTGEGTAKEDGDDQDALDIDDLELLFGGEENTATTDPSG

SEQ ID NO: 4315 - protein, 129 aa, Betatorquevirus sp.
LPTNRKPIRCPSPQSTENKRPPRNVIGRRGNTDPQPQTPQTPTATTTAPPPAPQVNKYKITHKDTYINLFGLKKPFKNRTFKPHEEQLEREVAAIFKRPPRTFFYDTPYYPWVPPAPMANFALRFKDTE

SEQ ID NO: 4316 - DNA, 2615 bp, Betatorquevirus sp.
tacaccccctaataaatattcaacaggaaaaccacggggcaattcgggctagatcagtctggcggaacgggcaagaaacttaaaatattattcttttacagaaatgagcaaactatttcagaaaactaaagacaatgcaagaaaattagaacttcactggatgaatataatcttccaaacacacgaccaaatatgccgctgcaaggacccaatgctacaccttattcaactaattaacctgcaaaacagcaaaaaagaattatccattgaacaactacaaaaaataaaatgccaccttactggagaagaagaagatatccaagaagatacaaacgttttagatggcgtcgacctcgaaaaacttttttcagaaccagacgatggagacgacgccgccgctacggggtaagaagaaaatttaaactgtcctctataaaaataagacaatttcaacctaagcaaataagaaaatgtcatataaagggatttaaatgtttatttcaaggaagctcactaagagcagataacaactactggcaatatccaagaagtattgttccagaaggacaaccggggggaggaggatggggtctgttagcattaagcttgtctagcttctacgaggactggcaatatttacaaaatatatttactgctagcaatgctggattacctcttgtaagaataataggatttaaattaacattctatcaagaagactatgtagactatgttgtagaaatagataactgctggccaatgttagatacaccattaaaacacccaaactgtcaaccaagtagaatgctcttaagcaaaaagaaaattataatgccaagcacacaaacaagaccactaagaaaaagaaagaaaacagtatgggttagaccaccaagtcaactagaaaatagatggtactttcaaaaagacatatgcaacacaaaattaataatgatagctgccacagcatgctccttaaaccactattacatagcacccagagcacaaagtaacaatgctaccctatggtgcctaaacacaaacatttttaaaaatgcagacttccaacactttggaacaaatggataccaaccaaaaaacaacacatatatatacacaaacacaaacacaaacccagatcaattctctaaagaaaaactaataccattaacagacccaaaaacatacacagcaggtgcaactaacaccgatccaagtaaggccactaaaggaaatccattttataaaacatacttattaggaacagcaccaacatacaccagcacaaaatctccacaagaattaagcacaatgtcgtcagatcaaattaaacaagaaatgacaccaacacactggggactagcaataaagttaagatacaatccagacaaagacaacggtagcacaaacaaagcatactttgtagacaactacagaacagcaggagacaggggatttgaaccaccaacagaccccaatagaataatagaaggctttccattatggttattactatggggatggccagactggattaaaaaactagcagaaatacacagagtagacaaagactatattctagtaatacaaacagaccaatttacagaaaagtttccatactatgtattattagacgacacatttgtaaatggaaaaggtgcatatgaaacaccacaaacaactgaagacttactaaactggtatccaaaatttttatatcaacacgctagtgtaacaaacatttgtaaaactggaccaggggtaacaagaactaacatgttacacagtgtagaggcaaaaatgaaatatgacttaactgtaaaatggggaggatgtccttctactttagaaaaagtatatgatccttgttcacagccaaaatggcctacaccatataacttcactgaaggactacagatccagaatccagcaaacgaccccagagacattatccatacctgggacgtcagaagagattttattacagcaaaagctatcaaaagacttaaaaaagacaaaaaaactgatgactgtactttctcaactacagaccacagatcaggagtaccagcaattggctacacaactcaaagccccgaaacctcggagacagaaacggagacatcggaagaagagacgtcgtcactacagtcaaagctcaaccagctccgaaggaacaaccgcaagctacacaagcagctcctcaaattaatacaaactacaaaataattaactgtaaaactaaaatacaattattccctaatgtaaaagtaaaaaaaaatcgccgctttcacccctgggaaatagatactgaaagggatttagctaaaatatttagaagacctatgcgtacatttttctatgatgatcctttttacccttacttgcctcctacaccacttgctaatcaatatgcaaactttaaactaaactttgttgactcagatgaataaacaaggccttcaaatttcacttaatggtgtctgtttctttaagtttaaccttaataaactgactccgcctccctaaaattagggcgccaaaagggggctccgcccccttaaacccccaagggggctccgcccccttacacccccaagggggctccgccccct

SEQ ID NO: 4317 - protein, 646 aa, Betatorquevirus sp.
MPPYWRRRRYPRRYKRFRWRRPRKTFFRTRRWRRRRRYGVRRKFKLSSIKIRQFQPKQIRKCHIKGFKCLFQGSSLRADNNYWQYPRSIVPEGQPGGGGWGLLALSLSSFYEDWQYLQNIFTASNAGLPLVRIIGFKLTFYQEDYVDYVVEIDNCWPMLDTPLKHPNCQPSRMLLSKKKIIMPSTQTRPLRKRKKTVWVRPPSQLENRWYFQKDICNTKLIMIAATACSLNHYYIAPRAQSNNATLWCLNTNIFKNADFQHFGTNGYQPKNNTYIYTNTNTNPDQFSKEKLIPLTDPKTYTAGATNTDPSKATKGNPFYKTYLLGTAPTYTSTKSPQELSTMSSDQIKQEMTPTHWGLAIKLRYNPDKDNGSTNKAYFVDNYRTAGDRGFEPPTDPNRIIEGFPLWLLLWGWPDWIKKLAEIHRVDKDYILVIQTDQFTEKFPYYVLLDDTFVNGKGAYETPQTTEDLLNWYPKFLYQHASVTNICKTGPGVTRTNMLHSVEAKMKYDLTVKWGGCPSTLEKVYDPCSQPKWPTPYNFTEGLQIQNPANDPRDIIHTWDVRRDFITAKAIKRLKKDKKTDDCTFSTTDHRSGVPAIGYTTQSPETSETETETSEEETSSLQSKLNQLRRNNRKLHKQLLKLIQTTK

SEQ ID NO: 4318 - protein, 116 aa, Betatorquevirus sp.; identical to SEQ ID NO: 3520

SEQ ID NO: 4319 - protein, 140 aa, Betatorquevirus sp.; identical to SEQ ID NO: 3521

SEQ ID NO: 4320 - DNA, 2615 bp, Gammatorquevirus sp.
cgggagcccgaggtgagtgaaaccaccgaggtctaggggcaactcgggctagggcagtctagcggaacgggcaagaaacttaaaatattttgttttacagatgtcaagattctataaacctacaccatataatggctgtactaaaaaccaaatgtggatgtccttaattgctgatggccatgatatgcactgtggatgtactcaaccatttgctcacttgctagactccatttttcctgaaggacacactgacagagacaaaccaattagctttataattaaaagagatctacaactatgcctttctggtggaatagacgaagaaaaccatggtataccacttggaggtaccgcaaacgcattcgctggcctaaaagaagaaaaagataccacagaagaagaaaacctagacgctttactcgccgccgccgcagaagaagaagaactaaaaaggtaagaagaaaaagacaacagattttaattaaacaatggcaaccagactctattgttaaatgtaaaattaaaggcttaggatgccttgttgctggagctgaaggcagacaatccttttgttatacaaatgaacttagcaactacccacaaccaaaagctccaggaggaggaggatttggatgtgaagtttttagcttaaaatacttatatgatgaatgggtagctcacagaaatatatggacaaaatctaatgaatacaaagacctatgtagatacacaggtaccaaaattatactatatgcacatcaaacaacagactttgttttctcatttacaagacaacctccatttaacattgaaaaagacacatactctgactttcaccccattaaaatgctactgtcaagacaccacaaagtaatccttagcagaaagtcaaatcctacaggaaaattaagacacaaaattaaaattaaaccacctaaacaaatgataacaaagtggttttttcaaaaagaatttgcaaaatatggtttatttcaaatgcaagcatcagccattaacctgtcatttgcatattttggaccaaatacccaaagtcaacttttaaccttaagggcattaaatacaaagttttacacaaatgcatcttatggtaaaactacaaatacagcatatttaccctacaatacatatccacaccagggagttgacttttactatgacagaaaaaaccctactttaaaacttaatttacctatgagtacatcagacacttatgtaaaatcagtaggctactcaacaggcttttttcaacaaagagttttgaatgcctggaaagtaacacaaaaagacagtacacaacccacactgaacacacccattacattaattagatacaacccagctatggacacaggagagaatactagaatatggctaacaagcatacattcagacacttgggaagcaccacaagacaaagacttaatcatggtaggaaaaccactatggctagctttttttggcttttggaactggatagaaaaagccaaaatgactaaagactactttatctcacacatatttgtagtacaatctgatgctataagaagaattacaaacacagagcaaaaggtatttccactagttgacttagactttacacaaggcaaactaccatatgatgaatttttaacagagcaaaaaaaacagttgtggtatcccacagcagaaaaccaagttgtttcaataaatgctatagtagaaagtggcccctacattcccaaatacagtaacttaaaagaaagtacctgggaactaaaatattcctatacctccttttttaagtggggcggtccagaagtacaagatacaccagtccaaaacccaggaaaacagggagactatgatgtgcccgataaacagctacaaacaatacaagttagcaacccgctcaaagaatcctgcaaagcaatgcttagagcctgggactacagaagggggattattacaacaacagctcttaaaagaatgcatgagaacatctcacttagtgaaacttaccaatctgattgcacagaaacaccaaagaaaaagaaaaagatcacagcacaactcagaaaccccaaagaagagaaccaggaaatccaaacatgtctccactcgctcttcgaagaaagtacatgccaagacccgcaagcaagcctccagcagctcatccagcaccaacagcagcagcaagaaaaactcaagctcaacatcattcacctcctcacagacctcaagagaaagcaaaaattgatgctactccaaacaggtttagagtagagccattcaaagatggctttgaaaaagaaacagaaaaagaacttgcaattgccttttgtagacccccaagaatgtacaaaaacgacccacctttttacccctggctacctatatgccccaaagtacaatttaaccttaactttaaaggctaggccaacactgtacacttagtaaagcatgtttaataaagttaaacccccaaaaaaacaaaaaaggattgtctgccttcagctccagcaacaaggcatcctaagcctttaatttagtttaccccgctagacggtgcagggaccggatcgagcgcagcgaggaggtccacggctgcccaaggg

SEQ ID NO: 4321 - protein, 661 aa, Gammatorquevirus sp.; identical to SEQ ID NO: 3766

SEQ ID NO: 4322 - protein, 118 aa, Gammatorquevirus sp.; identical to SEQ ID NO: 3767

SEQ ID NO: 4323 - protein, 135 aa, Gammatorquevirus sp.; identical to SEQ ID NO: 3768

SEQ ID NO: 4324 - DNA, 2615 bp, Betatorquevirus sp.
cgggagccgaaggtgagtgaaaccaccgtagtctaggggcaattcgggctaggccagtctagcggaacgggcaagaaactaaaaataaattattttacagatgcaaagacctgtatacacagaccgcgcacttaaaaaccaatggattaatcacgtagtttctactcacgatcttctttgtggatgccaagaccccttaaaacacaccgtagaagaaatttgttccagagaaccagatattaaaaaatggcttactactaccgccgatggccctaccgctaccgacgccgtagatggtttaagtcccggcgacctcgatttgcttttcgcagacgatactggagaagatactgggtaagaaaacgttacagaaagagaaaactttctaaaatacctttaaaacaatttcaaccagtaactattagaagatcttatgtaaaaggaatgtatccatgctttttaactaactctcatagactagaccataatatgactcaatttatagactctatagctccttatcactttaacggaggaggaggttttgctataactcagtttacattaaatggactttatgaactgtttttaaaaggcatgaactggtggactcattctaattgtaatttacctcttgttagatacaatggatgtgctataaaattttacaaagcagaaaactatgattatgtagctataatacacagatgcttacctttaaaagcaactaatgaactatatatgtctagccaaccacaaattatgatgctaactaaacactgcatacacataccatgcagaaaagctaacagaaacaaaaagaactacaaaaaagtttttgtaaaaccacctacacaatttaccaacaaatggatgtttcaagcagaaatatccaaccaaccactgttagtaatacaaacatgcatagccagctttgacagaatgtacatgtctgctgactcacaaagcacaacaatgggatttatctcactaaatacacaaagctttcaactacacaactggaacacaccaccaacaacaggatacaaaccacaaaataaccaatggttatttggcacacaaaatggacaaagcaatccaaaccaagaaccaattaaaaatttaatatatttaggaggaactggtcctgcacaaacaggcatacctattacaaaccaaaccggtcttaacgagttacccacaaaacccacaatgtggggaaatattttcataccacactatttctcaggagaaggatcagtttacatttcatcaaaaggaccgttagaactaaagcaatattacagcactcttacctcaacaacctcaaaactagaaacagacaaagtacaagatgtaacttttataacaccaaaatcaacaccaaattacgtagactgtagatataatccactagcagacaaaggaacaggtaacaaagtatatttactctcaatttctaaagatcaaacaccatgggcaccacccacatcacctttactaataagacaagacttaccactatggattgctttatggggctttatagactgggaaaaaaaactagctgaaacatcacaaatcgatacaacaaaaattgtagttatagaaagcccttacattacacccaaattagacaaatatgtaccactagatcaatcatttatagatggcactagtcctcacaaaaataacatgacagaatatgatgaaaaaaattggtatccaaaaacagcatttcaatatgaaacaataactaacatatgtaactcagggccaggaacagctaaattaccaaaagaaacatcagctgaagctcactatcgttatacttttcattttaagttcggaggatgcccacctcctatggacaaaatatgtaaccccacaacacaagctgtatatcccgtgcccaataatgagtcgccaacaacttcgttacagagtccaacaaacccaatacaaacctacttgtacgacttcgacgaaagacatggacaaattacagctaaagctgcaaaacgcctcaaaaaagactatgaaactgaaaaaaattttttacaaattacaggatcaagcccaatggacctgcaagcccacgtcgaaacaccgacatcagaaccggaggactcggaagaagaggaagagaccctccacctcaagctccagcgactccgaagaaagcaaaaactactacgacagcgaatcctccagctattagacacacaaaacttagaatgataaaatgtaacttcaaagtaaatatgtttggtgataaccctccaaacaggagattaactccaaaagaatatgaggaagaaatagcagaaagtaaaatatggaaacatagacctagacaatatttatatgatatacctttctatgactttttaccccctgcacctaaaattccctttgtaaattttgaccttggatggaaaaaataaaggcctgcatacttcaacttgaggtgtccatttattttagtttaaacttatataaacatccaccactctcccaaatacgcaggcgcaaaagggggctccgcccccttaaaccccaagggggctccgcccccttacacccccaagggggctccgcccccttacaccggg

SEQ ID NO: 4325 - protein, 664 aa, Betatorquevirus sp.
MAYYYRRWPYRYRRRRWFKSRRPRFAFRRRYWRRYWVRKRYRKRKLSKIPLKQFQPVTIRRSYVKGMYPCFLTNSHRLDHNMTQFIDSIAPYHFNGGGGFAITQFTLNGLYELFLKGMNWWTHSNCNLPLVRYNGCAIKFYKAENYDYVAIIHRCLPLKATNELYMSSQPQIMMLTKHCIHIPCRKANRNKKNYKKVFVKPPTQFTNKWMFQAEISNQPLLVIQTCIASFDRMYMSADSQSTTMGFISLNTQSFQLHNWNTPPTTGYKPQNNQWLFGTQNGQSNPNQEPIKNLIYLGGTGPAQTGIPITNQTGLNELPTKPTMWGNIFIPHYFSGEGSVYISSKGPLELKQYYSTLTSTTSKLETDKVQDVTFITPKSTPNYVDCRYNPLADKGTGNKVYLLSISKDQTPWAPPTSPLLIRQDLPLWIALWGFIDWEKKLAETSQIDTTKIVVIESPYITPKLDKYVPLDQSFIDGTSPHKNNMTEYDEKNWYPKTAFQYETITNICNSGPGTAKLPKETSAEAHYRYTFHFKFGGCPPPMDKICNPTTQAVYPVPNNESPTTSLQSPTNPIQTYLYDFDERHGQITAKAAKRLKKDYETEKNFLQITGSSPMDLQAHVETPTSEPEDSEEEEETLHLKLQRLRRKQKLLRQRILQLLDTQNLE

SEQ ID NO: 4326 - protein, 85 aa, Betatorquevirus sp.
MQRPVYTDRALKNQWINHVVSTHDLLCGCQDPLKHTVEEICSREPDIKKWLTTTADGPTATDAVDGLSPGDLDLLFADDTGEDTG

SEQ ID NO: 4327 - protein, 69 aa, Betatorquevirus sp.
MIKCNFKVNMFGDNPPNRRLTPKEYEEEIAESKIWKHRPRQYLYDIPFYDFLPPAPKIPFVNFDLGWKK

SEQ ID NO: 4328 - DNA, 2614 bp, Betatorquevirus sp.
aaaccgtcggaggtgagtgaaaccaccgtagtctaggggcaattcgggctagatcagtctggtggaacgggcaagaaacttaaaataatatttgttttacagatgagcaaatttctacaaccaccactttatgagaaaagagctctagaaaatcaatggataaacaccatatttaacacccacgacttattctgcggatgcaacaaaccaattgaacacctagaggccattttaaaacctacaaaatgcctccatttcggcgccgccgcttctacagaaactggtggaactacaaaagaccaagatcttactatcgacgaaggagatttagaaaatctattttcggaagaaaacgacgtcgacgaagggtaagaagaaaaaaattttatagacaaaacaaaaaacttaaaactataaaaataaaccaatggcaacctagttctattaagaaatgtagaatagaaggatacttatgcttatttcaagcaggacctggaagatatggcaataactatgctttatggaaagaatctttctttccacaacattatgcgggaggaggaggatggagtattcaacaactatctttaggaaacctatttactcaacataaagaatatatgaactattggactaaaagtaatgttagaatgaatatgtgtagatactatggctgtaaaattactttgtttagagaaccgtatacagactatgtttttaactatatgcaacatataccaaaaactgtaactaatacattttactgttcctttcaccctataagactactaactcacaacagaaaaaaaataataccaagctttcaaacacagccacataaaagaaaaccatacaaaactatttgggtaccaccaccaaaattaatgaaaaaccaatggttttttcaacaacaattagcagactttccactactaacctttgtaacatctgctatatcacttacaggaatgtttggaagctgtaaaacaattagcaacaatataacattttttagtttagacactgaacaattcccatcaccactattccaatacaaagattctacaccaccaacatggggttacaaatacggaacaacctacctttatggtatacaacaaccaaatcacattttcattcaaaataccaaaggatcacttacatatttaggaaatacaatgccacaagaaccaggaacacatatagcagtactaaataacaggacagtaacaaacaaagaaaactggggaaatccattttactgggactacttatcaggagacgctgtactagtcacgttaaatgacaatccctcagaagtacttaacaaaaaggaggagaaattacaagcatcatcagaaaaaaaaacccattatatatttaaatgtagatacaacccatatcatgacaaaggaacaggtaacacagtatacctaatacctaactatgataaaacacaaacaaactggaatcccactaaagacacagacttaagatgggacaatctaccactatggctagtactatggggcctagaagacatagtaaaaagaataggtaaatgccacaacctagacatggactggacactagttataagaagcaactacatagtaccacctcaaaaagaatatgtaccacttagttatgattttatacacggtagaggaccatacgacacagaaagagaatttatgacagctgacgaccttacacattggtatcccagatacaaatatcaaagacaatgcatagacacatttattagatcaggcccatcagtagccacaggagacaactgtccaaatatacaagctaaaataaaatacaatttcttttttaagtggggcggaatctctgatcctcaagaaacaatctttgaccccaacagtcaacccgtcacaccttcgcccaataacttcaacatcctcaatgaaatcattgatccaacaacagacattacaaaagaaatatacccatgggactttagaagagactatcttacagaggcagctgcaaaaagaattacagaaagcgaaactgatgaccaatttatgttcacaaatggaaagcaaacttcaacagacctgcaactccaaacagaaacacaagagaaagagaccgagaaaacacaaaaagcgccactattccagcagctccagcagctccaacaatacaaccaacaactccagcagcgactccgaaacctaaagcaattatctacggacctataaataaagtagaactgtttaaaactaaacgtaaaaacaggagactaactccatacgaaatagaaacagatttacaaatagcaaaatggttaaaaagacctgtaagacatttttttaatgataccccttactacccatggctgccaccagcaccacttgtacaatttgaccttgtaaaaggatttaataaaggccaacattaattcacttgaggtgtccatttatttaagttacaacttatataaaccaacaccgcctccctaatacgcaggcgcacaagggggctccgcccccttaaacccccgggggggtaaaccccccctaaccccccccaactaattaatattcaacaggaaaaccacctaattagaattgccgaccac

SEQ ID NO: 4329 - protein, 662 aa, Betatorquevirus sp.
MPPFRRRRFYRNWWNYKRPRSYYRRRRFRKSIFGRKRRRRRVRRKKFYRQNKKLKTIKINQWQPSSIKKCRIEGYLCLFQAGPGRYGNNYALWKESFFPQHYAGGGGWSIQQLSLGNLFTQHKEYMNYWTKSNVRMNMCRYYGCKITLFREPYTDYVFNYMQHIPKTVTNTFYCSFHPIRLLTHNRKKIIPSFQTQPHKRKPYKTIWVPPPKLMKNQWFFQQQLADFPLLTFVTSAISLTGMFGSCKTISNNITFFSLDTEQFPSPLFQYKDSTPPTWGYKYGTTYLYGIQQPNHIFIQNTKGSLTYLGNTMPQEPGTHIAVLNNRTVTNKENWGNPFYWDYLSGDAVLVTLNDNPSEVLNKKEEKLQASSEKKTHYIFKCRYNPYHDKGTGNTVYLIPNYDKTQTNWNPTKDTDLRWDNLPLWLVLWGLEDIVKRIGKCHNLDMDWTLVIRSNYIVPPQKEYVPLSYDFIHGRGPYDTEREFMTADDLTHWYPRYKYQRQCIDTFIRSGPSVATGDNCPNIQAKIKYNFFFKWGGISDPQETIFDPNSQPVTPSPNNFNILNEIIDPTTDITKEIYPWDFRRDYLTEAAAKRITESETDDQFMFTNGKQTSTDLQLQTETQEKETEKTQKAPLFQQLQQLQQYNQQLQQRLRNLKQLSTDL

SEQ ID NO: 4330 - protein, 89 aa, Betatorquevirus sp.; identical to SEQ ID NO: 3372

SEQ ID NO: 4331 - protein, 62 aa, Betatorquevirus sp.; identical to SEQ ID NO: 3373

SEQ ID NO: 4332 - DNA, 2612 bp, Betatorquevirus sp.
cgggtgctgaaggtgagtgaaaccaccgaaatcaaggggcaattcgggctatatcagtctaacggaacgggcaagaaacttaaataaatactttttttacagatgagcaacagcaaattatcaaaaagagacaacttacaattagtaaactgctatgttagcatccacgacctaaaatgcaactgcgatcacccacttcaatgcattcttcaacaaattaatactcaagaaccaactctcaacattacctacaaaaaatgccctactggtatcgaaactggagatcaccatggtggaaaagaagaagaaaaaccttttggagaagaagaactcgaggctattttcgaaaaagacgctaccgaaggagacgggtaagaagaaaactaaaaactatctctttaagacaatggcagccttctactattcacaaaaccacagtaaaaggactatactgtttacttatagcccaccataaaagaattaacaaaaactggggacaatatcaaggaactgtggttgccgaaggactaccgggaggagggggatatagtatactaagatttactttagactccttattttctgaacatgaacttgtaagaaatgtatggacaaaatctaacaaacatttaccactgtttagatataatggatgtgaaattaagatatatagacctgaaaatgttgatttagttgtaagatttcaaacatgttacccaatgtcagctagccaatttttatatttaggatgtcaaccaggtataatgatgatgtctaaacatagccatataataccaagtttaaaaacaaaaccatatggaaaacactataaaaaatttagattaccaccacctcaacaaatgcaaaacaaatggtattttcaatcacaagaagcaaaaacaggcttacttttaatacaagcagctgcctgttctttaaaccaatactacatatcacaatacgcagaatcagacaccattacactatatacattaaacacaaaaatatttactaatttaaattttaaaaactttccaccaacaacaggataccaaccaaacccaaacatgtacttttgggcactacgaaacggagacgcaaaatacaaaaacctaatatacttaggaaacacaatagaataccaagaaggaaagacaatcgaagaagtagacacagactttaaaaaagctaaagaaaaatacatgaaaactaggcttaattggggaaacccatttgcacaaaaatatatgcacaaacaagtaaaaatgtactttacaaaaacacacttttctctagcactatcacaagtaaccaatggtgaagaagacatatcaggcaccaaaggctttacagaactaacacaagaactattttttatgctaagatacaaccccagaaatgattcaggaaaaaacgcacaaatataccttaaatcaaattggaaagaaaatgaaaatttagaacccccagaagacgaaaacctaaaagcaacaggttttcctaattggttaggatgctggggatttgtagactatgaaattaaacttggaaaagtaacacaagtacctactcattatatagtagtaatgatatctgaattttttactccaaaactacaatactatttactaatagacaaatacttcacagaaggagacagcgaatatttagaaggccgtacaggctgggaaaatttaaactggtatccaatgataacacatcaagatgactccctaaacacattagcactatcaggcccaggaacacctaaactaggatccattaaatcagcagaatgtaaaatggaatacaaatttcacttaaaggttggcggctgtgcagcaccaatggaaaaagttgcaaacccgtcagaacaaccaacttttccagtcccagataaactcattgactcaaattcgttacagaatccaacaacaccaatcgaatccttcttatggcaattcgatgaaaggcgaaatcaaattactgcaaaagctgcagaaagaatcacaaaagacttcggacttacagaatctttatttacagattcagcaacaactggaacagaagtcccagtccacaaaacattcccggaaaaagacctgtcgtcggaggaggaggaagcccaagaacaaacattattcgagcagctccagcagcacagactacaccaacagcaactcagacaacgaatcaagctcctcctaaacaaactacaaagttcaacataatacatagtaaaataaatgtatctatgttttatgaggaaacaaaaaataggagactaactcctaaagaaatggaggatgaaaaatacatagctaacctttttaaaagaccttataggcattttctaaaagacaaaccattttatccatatgtacctgttgatgaaaaatgcatggtaaactttgatcttaactatccctattaataaaggccctattgattcactctcggtgtctgttcctttaagtttcaaacttatataaaccacacccttctcccaaaatttgggcgccaaaagggggctccgcccccttaaacccccaagggggctccgcccccttaaacccccaagggggctccgcccccttacaccccctaatggg

SEQ ID NO: 4333 - protein, 657 aa, Betatorquevirus sp.; identical to SEQ ID NO: 3078

SEQ ID NO: 4334 - protein, 90 aa, Betatorquevirus sp.; identical to SEQ ID NO: 3079

SEQ ID NO: 4335 - protein, 59 aa, Betatorquevirus sp.; identical to SEQ ID NO: 3080

SEQ ID NO: 4336 - DNA, 2612 bp, Betatorquevirus sp.
ctccgcccccttaaacccccaagggggctcgtctaggggcaattcgggctagttcagtctggcggaacgggcaagaaacttaaaaaatatatttactttacagatgagcgacaaaaaaccaacaagaagagacttaaaccaactaataaatgtctgctgtggagcccatgacttagtgtgctactgcaacgaaccaacaaagcacattattcttcatttattcagcaaccaagagccttactttgtaacaaaagaagaaaaggataatataacaaaatgccttattactaccgaagaaggcaaaacagatatcgtcgccgaagatggtttcgaccatggagatttagaggctttattcgccatagaagacgccgctggagaaaacaacgcagggtaagaagaaaacttaaaagactttctataaaagaatggcagcctgaaaacattaaaaaatgctgcataaaaggcttacactgcctattttactgtaacaaagatactttacaaagaaactttagaatgtatgaacatagcataaatcctgaacatatcccaggaggaggaggattttctataactaaatacagcttagatggactttacgaacagcatgaacttgatagaaactggtggactcaaactaattataatttacctatggcaagatacttaggtggatatctaaaatgttatcaaagcaaacatgttgattatcttgtaaaatgtcactttaattatcctatggtagcaactcaattactgtatcaatcttgtcaacctagttttatgatgatgagccgctatactcactttatacctagtaaagaaactagactactcaaaaaaggatacaaaaaaattaaattacaccccccacaacaaatgagtaacaaatggtacttccaaagagacctatgcaaaacaggcttagtactaatacaagcagtagcagcctcttttgaccaatattacataggaacatacaacacatctaacaactgtactttatatacactaaacccacacttttggaaaagacacgactttatacaaccaccagtagatggttacacaccatactcagcaggaacaatcacaaaacacctatggacaactcactcaattataaccgatataactaaattaaaagcagaaaacttaatctacttatctttaacacaaaaaaaccaaccaggaacagaacttacaaaaacaaaccaaaacacttactttacagaccacaaaaattggggaaacccatttaaagaagaatacttaactgaaacagacacaatttatgttacaactgaaccaatggtaacattaaaagaaaaactatttacctccctaaatagctcaacagcactacaaacaggaattattacacaagtatcacaaaaactactaatacaatgcagatactctccagacagggacacaggagaaggaaacaaaatgtacttaaaaaacttaataagagacacatcaggatgggaagaaccctcagaagaagacctaataaccgaaggctttcctttatggacattagcatttggtttcctagattggcacaaaaaactaggaacagcagtaaacctatatagatcatgggtaatagttatacaaagtaaatttatagaacctgaattaccatactatatattgctagactacaattttgttcacgacacatcaccttaccaagacacatcacaaaaaataaaagatccagatgatgaaaataaatggtatccaagctgcagataccaacaacagtcactagaatctctagtacaaacaggaccaggaatatatagatttcataatgaaaagtcagtacaagcaaaaataaaatataacttttattttaagtttggaggatgtgtaccaaagatggacactattcacaacccttgcgaacaagcaatatatcccattccaaatcaaatctcttcaacatattcgttacagaatccagcacagccaccagaaacattcctctaccaattcgacgtttacaaagacttacttacaaaagcagctacaaaaagaatcacaaaagattggcaaactgaaacatctttttcaacaggtcaatcaagaatgcaacccagcacagcacaaaaagccctcgaagaggaagagacagcatcggacgaggaaaaagacccgcaaaagatgttcctccagctccagcagtacaagcgggagcgacgactcctggagttccagctcagggaactcctaacacaaccataaactttcaatgtgtaaaaaaagtacttttgtttgaacctgaacgtaaaaaggttagaaaaatgaccaaggaagaattagaaactgaaagattttgtgctattgcttttaaaagaccacctgtatctatgtggggcgatattccttactggccctggttgcaaccagagcctctagttaatcaactcccaaaagtttcctttgacttaaactataaaccctaataaaatttcaaggccaacaaatttcacttagtggtgtctgtttattaaagtttaacctatataagctaacaccgcctcccaacagtgttggcgccaaaagggggctccgcccccttacaccccccaaggggg

SEQ ID NO: 4337 - protein, 660 aa, Betatorquevirus sp.; identical to SEQ ID NO: 3994

SEQ ID NO: 4338 - protein, 112 aa, Betatorquevirus sp.; identical to SEQ ID NO: 3995

SEQ ID NO: 4339 - protein, 64 aa, Betatorquevirus sp.; identical to SEQ ID NO: 3996

SEQ ID NO: 4340 - DNA, 2612 bp, Betatorquevirus sp.
tacacccccaagggggctccgcccccttaagtctaggggcaattcgggctagatcagtctggcggaacgggcaagaaacttaatttattatattttacagatatgacatctttttggaggaaacccacatcatcactgagacaacaagaactaaaatggataaatttaatgcatgaaagccacgattttttctgccactgcgacgaaccagatcttcactttcttgtatgcataaacaagttttcaacctgcccaaaaccagaattggatattaaaaatataaaatgcctccttaccggagatactaccagaatcgctacagaagaaactactacaggagaagatggaggtttcctagacggagaactagaaacacttttcgacgaaaacaatggtacagaacaaaaagacgacgcaaatacaaggtaaaaagatttagacttaaaaaaaagaaaacttttttaaaacttaaacaatttcaaccaaaatccataaactactgtaaaattactggatttaaatgtctttttcaaggatctcctctaagaaaacaacataactatattcaatatatatacagttatgtaccacctacttatcccgggggaggcggatggagtttacttgtatttagtctagatagtctttttgaagactaccaacacttacaatgtatttggagcaaaagcaatgccggtttgcctcttgtaagatttttagggggtaaaattaagttgtatcaaactgaatcaactgattatgctgttgtatatgatagttgctggcctatggtagacacaccacacacacacgcagattcagctccaagtagaatacttcaaaagaaacataaaacaataatacctagtacaaacacacaaaagagaaaaaaaccatataaaactattagatttaaaccaccaccacaaatgcaaaacaaatggtactttcaaagagacatttgtaaaattccactactaatgctcacatcaactagcattgatcttacaaaacctttttgcaatcccacatgcaaaagtaacaatattataataagatacattaacccatacctttttaaaaataacaactttcaagactatccaaaaacaacaggatattcaccaaaatcactaagtgacggtccatattacttatatgcaagttataataatgaccctccacctcaaaatacaaactcaacgacttttaagcaatggatacttaacacagttccactaataaatactaaaaactataactctggagcaatgatgtcaaccattattaaggaaggatatgacaaaccagaaaactggggaaacccattttatcacacacacttagatttacaatcaacaaccatttacatatgcaattccaacacatcaacattaaaaactgcaatagcttccatggattttaaaaacgttaaaataactaaagccacagaaaatctaatttatcaaacaatttataatccagataacgataccggagaaacaaacaaaatttatttagttaaagcaacacaagaaacaaactttcaaccaccaacagacgaagatttagtatttgaaggttttcccctgtacattttattctggggatggacagactttgttagaaaattaaacaaaacacctaacattgacaccaactacatgatagttatacaaacaaaaacttttcacgaaaaaaatgacccatactttgtaccaatagacatacagtttgaacatggttacgacccttacataccattagacacacaaaaccacgaaccatcatattacaatcaacaaaactggtatccacaattaaaatatcaagaacttactatagaaaatatttgtgaatcaggaccagctgtaagccgttcaaaagattatttacaagcatactgcaaatatacattttattttaaatggggagggtgtccaaaaactcttgataaagcatataacccttgttcacagccaaaatggcccacaaccgatacagtccttccaggacttgaaattacgaatccatcagaaccaccagaaacccaactatactcctgggactgggaaaatgactttgttacacaaaaagctatacaaagaattagagaccacacagaacctcatgaaacattactctcaattacagagtccaaatcctcagcaaagccacaaaaaacaacacaagaaacgcaggaccagaaagaggaggagaaactactcttcaagctccaccagctcagaaagcagcgaatgcaactcgaactcctcataaagatgaaagagtacactttacaataattaatcaagttgaactatttcctaaaccaaaaaaacgcaaacgctttaactcctgggagcaaaacgaagaaagagaactagcaactatctttaaaagaccccaacgctattatcacggtgataaaccctattacccatggcttccccctgaaccttatgtaaactttgacttaaaatttcgtgattaaaaattcaaggccaacaaatttcactgagtggtgtccatttatataagttttactttaataaacagtcaccgcctccctaacaatagggcgccaaattcaaaagggggctccgccccct

SEQ ID NO: 4341 - protein, 673 aa, Betatorquevirus sp.
MPPYRRYYQNRYRRNYYRRRWRFPRRRTRNTFRRKQWYRTKRRRKYKVKRFRLKKKKTFLKLKQFQPKSINYCKITGFKCLFQGSPLRKQHNYIQYIYSYVPPTYPGGGGWSLLVFSLDSLFEDYQHLQCIWSKSNAGLPLVRFLGGKIKLYQTESTDYAVVYDSCWPMVDTPHTHADSAPSRILQKKHKTIIPSTNTQKRKKPYKTIRFKPPPQMQNKWYFQRDICKIPLLMLTSTSIDLTKPFCNPTCKSNNIIIRYINPYLFKNNNFQDYPKTTGYSPKSLSDGPYYLYASYNNDPPPQNTNSTTFKQWILNTVPLINTKNYNSGAMMSTIIKEGYDKPENWGNPFYHTHLDLQSTTIYICNSNTSTLKTAIASMDFKNVKITKATENLIYQTIYNPDNDTGETNKIYLVKATQETNFQPPTDEDLVFEGFPLYILFWGWTDFVRKLNKTPNIDTNYMIVIQTKTFHEKNDPYFVPIDIQFEHGYDPYIPLDTQNHEPSYYNQQNWYPQLKYQELTIENICESGPAVSRSKDYLQAYCKYTFYFKWGGCPKTLDKAYNPCSQPKWPTTDTVLPGLEITNPSEPPETQLYSWDWENDFVTQKAIQRIRDHTEPHETLLSITESKSSAKPQKTTQETQDQKEEEKLLFKLHQLRKQRMQLELLIKMKEYTLQ

SEQ ID NO: 4342 - protein, 108 aa, Betatorquevirus sp.; identical to SEQ ID NO: 2379

SEQ ID NO: 4343 - DNA, 2611 bp, Gammatorquevirus sp.
aggatccattttggaaccagcctggatttaatgcaggggcaattcgggctagggcagtctagcggaacgggcaagaaacttaaaatatactttttgttttacagatgcaacatataagcagcaaagacttttatgaaccaacaccttttaaccaaataacaaaagaacagatatggatgtcccaaatagctgatggacatgacaatatctgtcactgcaagcacccttttgctcatctgcttgctaatatatttcctcctggtcacaaagatcgcactctcagcattaaccagatactgcaaagagattaccaagaaaaatgcctttctggtggaggcgccgcaggcgctggtacaaacccagacaatggagatttaagagaagatttagaactcgcagaaagagaccacatagaagacgcagacctagaagaccttatcgccgcaggagaaagcgccgccggtacaaggtaaaaaaaaaaagaaagaccctacctgttcttcaatggcaaccagactctataagaaaatgtaaaattaaaggggtgggggtactagtactaggtgctgagggtaaacaatttgtatgctataccaatgtaatacaatcaactccacctcctaaagctcccactggaggaggatttggctgtatgcaatttagtttaggatatttgtatgaacaatataaattcagaaacaatatctggacacactctaacatagctatggatttatgcagatacctaagatgtaaactaaccttttatagacatctagaaacagattttattgttagatatgacagacaaccaccatttccattagaacctctaacttacccagggtgccaccctcaaaacctactacttagtaaacacaaattgttagtgctaagcagatccacaaaacctaatggaaaaattaaaaaaacaaagattattaaaccaccaaaacaaatgctaactaaatggttttttcaacatgattttgcagctgcaccactgtttcaacttactgccgctgctgctaacttgaactatgcacatataggctgctgtaacaaaaacaatatagttacttttaaagcattaaatccaggctggttccaaaatggatcctgggcacaatatagacaagaaaccacaccttatttaccatataagggtatatttaataaactatggttttgggacacctcaaactggccagcagatgatgtaacatctggctatgatacatgggtaaaacaacatggctttcaggtaaaacacaacacttacacagaaagtgttagttacacagatggctttttttcacctaaagcaatgaatgcagtttttataactacagaaaaaaaaaagagtacacacataggttacttaccacttgtaacctgcagatacaatccagccaaagatacaggagcagggaatacagtatggctacacagcaaccttagtcatggctatgataaacctaccacagacaaatcaattataataaaaggcctacccatatggatgatattttatgggtggctatcatatgtacaatatgtaaaaaaagcttcagactttttaatttcatacaccatatgcatagaatgccctgctatagatatctctgcttcacatggagctacaaatctaatcatacctatagatcaaacatttttagaaggaaaaccaccatatggacaagacatatcacaaagtgatttaactcactggcatccagacatatacaatcaagtagaagttataaactcttttgtatccactggtccatacataccaaaatataatcaaacaagaaatagtacatgggaattgcattacttttatgaatttctttttaagtggggaggtgctgaaactacagaaccaccagttgcagacccaggaacacaacccacatacgatgctctcgataaacagtatggctcagtacaaattagggaccctaggaaacaaatctatgaatccattatacacccctgggactacaggagaggagttcttaaaagctcagctcttaaaagaatacaggaccacatgtcaattgaaagcactttccaagaagatgctccaccaatcaaaaaacaaagaattacagggccctgtcttgctatcccagaacaagaagaagaagaaatccaaacatgtctccaggagctctgcaaagaaaatatctaccaagaagaggaaaaagaaccaaacatcatccagctcatccagcaacagcgagagcagcagcagcaaatcaagtacaacatcctcagactaatatcagacttaaaacacaaacaaaatctactaagactacaaacaggattcatttaacaacatttaaacccggctttgaagagcaaacagaaagagaactggctatagctttctgcagaccccctagaacatacaaagaggacccccctttttacccttggcttcctataacccccaaagtatgttttaaccttaactacaaattctaggccaacaatgtacacttagtaaagcatgtttaataaagtttgtcccaaaaccatagtttattaaatatacccttatatggtaaataaggtgtgggttcttgtctatattgtgccc

SEQ ID NO: 4344 - protein, 674 aa, Gammatorquevirus sp.
MPFWWRRRRRWYKPRQWRFKRRFRTRRKRPHRRRRPRRPYRRRRKRRRYKVKKKRKTLPVLQWQPDSIRKCKIKGVGVLVLGAEGKQFVCYTNVIQSTPPPKAPTGGGFGCMQFSLGYLYEQYKFRNNIWTHSNIAMDLCRYLRCKLTFYRHLETDFIVRYDRQPPFPLEPLTYPGCHPQNLLLSKHKLLVLSRSTKPNGKIKKTKIIKPPKQMLTKWFFQHDFAAAPLFQLTAAAANLNYAHIGCCNKNNIVTFKALNPGWFQNGSWAQYRQETTPYLPYKGIFNKLWFWDTSNWPADDVTSGYDTWVKQHGFQVKHNTYTESVSYTDGFFSPKAMNAVFITTEKKKSTHIGYLPLVTCRYNPAKDTGAGNTVWLHSNLSHGYDKPTTDKSIIIKGLPIWMIFYGWLSYVQYVKKASDFLISYTICIECPAIDISASHGATNLIIPIDQTFLEGKPPYGQDISQSDLTHWHPDIYNQVEVINSFVSTGPYIPKYNQTRNSTWELHYFYEFLFKWGGAETTEPPVADPGTQPTYDALDKQYGSVQIRDPRKQIYESIIHPWDYRRGVLKSSALKRIQDHMSIESTFQEDAPPIKKQRITGPCLAIPEQEEEEIQTCLQELCKENIYQEEEKEPNIIQLIQQQREQQQQIKYNILRLISDLKHKQNLLRLQTGFI

SEQ ID NO: 4345 - protein, 122 aa, Gammatorquevirus sp.
MQHISSKDFYEPTPFNQITKEQIWMSQIADGHDNICHCKHPFAHLLANIFPPGHKDRTLSINQILQRDYQEKCLSGGGAAGAGTNPDNGDLREDLELAERDHIEDADLEDLIAAGESAAGTR

SEQ ID NO: 4346 - protein, 124 aa, Gammatorquevirus sp.
LSCYPRTRRRRNPNMSPGALQRKYLPRRGKRTKHHPAHPATARAAAANQVQHPQTNIRLKTQTKSTKTTNRIHLTTFKPGFEEQTERELAIAFCRPPRTYKEDPPFYPWLPITPKVCFNLNYKF

SEQ ID NO: 4347 - DNA, 2611 bp, Betatorquevirus sp.
ttacacccccaagggggctccgcccccttagtctaggggcaattcgggctagatcagtctggcggaacgggcaagaaacttaatttattatattttacagatatgacatctttttggaggaaacccacatcatcactgagacaacaagaactaaaatggataaatttaatgcatgaaagccacgattttttctgccactgcgacgaaccagatcttcacttccttgtatgcataaacaagttttcaacctgcccaaaaccagaattggatattaaaaatataaaatgcctccttaccggagatactaccagaatcgctacagaagaaactactacaggagaagatggaggtttcctagacggagaactagaaacacttttcgacgaaaacaatggtacagaacaaaaagacgacgcaaatacaaggtaaaaagatttagacttaaaaaaaagaaaacttttttaaaacttaaacaatttcaaccaaaatccataaactactgtaaaattactggatttaaatgtctttttcaaggatctcctctaagaaaacaacataactatattcaatatatatacagttatgtaccacctacttatcccgggggaggcggatggagtttacttgtatttagtctagatagtctttttgaagactaccaacacttacaatgtatttggagcaaaagcaatgccggtttgcctcttgtaagatttttagggggtaaaattaagttgtatcaaactgaatcaactgattatgctgttgtatatgatagttgctggcctatggtagacacaccacacacacacgcagattcagctccaagtagaatacttcaaaagaaacataaaacaataatacctagtacaaacacacaaaagagaaaaaaaccatataaaactattagatttaaaccaccaccacaaatgcaaaacaaatggtactttcaaagagacatttgtaaaattccactactaatgctcacatcaactagcattgatcttacaaaacctttttgcaatcccacatgcaaaagtaacaatattataataagatacattaacccatacctttttaaaaataacaactttcaagactatccaaaaacaacaggatattcaccaaaatcactaagtgacggtccatattacttatatgcaagttataataatgaccctccacctcaaaatacaaactcaccgacttttaagcaatggatacttaacacagttccactaataaatactaaaaactataactctggagcaatgatgtcaaccattattaaggaaggatatgacaaaccagaaaactggggaaacccattttatcacacacacttagatttacaatcaacaaccatttacatatgcaattccaacacatcaacattaaaaactgcaatagctaccatggattttaaaaacgttaaaataactaaagccacagaaaatctaatttatcaaacaatttataatccagataacgataccggagaaacaaacaaaatttatttagttaaagcaacacaagaaacaaactttcaaccaccaacagacgaagatttagtatttgaaggttttcccctgtacattttattctggggatggacagactttgttagaaaattaaacaaaacacctaacattgacaccaactacatgatagttatacaaacaaaaacttttcacgaaaaaaatgacccatactttgtaccaatagacatacagtttgaacatggttacgacccttacataccattagacacacaaaaccacgaaccatcatattacaatcaacaaaactggtatccacaattaaaatatcaagaacttactatagaaaatatttgtgaatcaggaccagctgtaagccgttcaaaagattatttacaagcatactgcaaatatacattttattttaaatggggagggtgtccaaaaactcttgataaagcatataacccttgttcacagccaaaatggcccacaaccgatacagtccttccaggacttgaaattacgaatccatcagaaccaccagaaacccaactatactcctgggactgggaaaatgactttgttacacaaaaagctatacaaagaattagagaccacacagaacctcatgaaacattactctcaattacagagtccaaatcctcagcaaagccacaaaaaacaacacaagaaacgcaggaccagaaagaggaggagaaactactcttcaagctccaccagctcagaaagcagcgaatgcaactcgaactcctcataaagatgaaagagtacactttacaataattaatcaagttgaactatttcctaaaccaaaaaaacgcaaacgctttaactcctgggagcaaaacgaagaaagagaactagcaactatctttaaaagaccccaacgctattatcacggtgataaaccctattacccatggcttccccctgaaccttatgtaaactttgacttaaaatttcgtgattaaaaattcaaggccaacaaatttcactgagtggtgtccatttatataagttttactttaataaacagtcaccgcctccctaacaatagggcgccaaattcaaaagggggctccgccccc

SEQ ID NO: 4348 - protein, 673 aa, Betatorquevirus sp.
MPPYRRYYQNRYRRNYYRRRWRFPRRRTRNTFRRKQWYRTKRRRKYKVKRFRLKKKKTFLKLKQFQPKSINYCKITGFKCLFQGSPLRKQHNYIQYIYSYVPPTYPGGGGWSLLVFSLDSLFEDYQHLQCIWSKSNAGLPLVRFLGGKIKLYQTESTDYAVVYDSCWPMVDTPHTHADSAPSRILQKKHKTIIPSTNTQKRKKPYKTIRFKPPPQMQNKWYFQRDICKIPLLMLTSTSIDLTKPFCNPTCKSNNIIIRYINPYLFKNNNFQDYPKTTGYSPKSLSDGPYYLYASYNNDPPPQNTNSPTFKQWILNTVPLINTKNYNSGAMMSTIIKEGYDKPENWGNPFYHTHLDLQSTTIYICNSNTSTLKTAIATMDFKNVKITKATENLIYQTIYNPDNDTGETNKIYLVKATQETNFQPPTDEDLVFEGFPLYILFWGWTDFVRKLNKTPNIDTNYMIVIQTKTFHEKNDPYFVPIDIQFEHGYDPYIPLDTQNHEPSYYNQQNWYPQLKYQELTIENICESGPAVSRSKDYLQAYCKYTFYFKWGGCPKTLDKAYNPCSQPKWPTTDTVLPGLEITNPSEPPETQLYSWDWENDFVTQKAIQRIRDHTEPHETLLSITESKSSAKPQKTTQETQDQKEEEKLLFKLHQLRKQRMQLELLIKMKEYTLQ

SEQ ID NO: 4349 - protein, 108 aa, Betatorquevirus sp.; identical to SEQ ID NO: 2379

SEQ ID NO: 4350 - DNA, 2610 bp, Gammatorquevirus sp.
cgggagcccgaggtgagtgcaaccaccgaggtctaggggcaattcgggctagggcagtctagcggaacgggcaagaaacttaaaactatattttatttcagatgtcacagttctttaaagactgtacctacaatcatgaaaccagagaacagatgtggatgagtgttgttactgactttcatgacagcatttgctcatgcacatcaccagttgcccacctaattgatattgtttttcctgaagggcataaagataaagatctaactataagacacattcttaatagagatctaaaatcatgcctttctggtggaatagaagaaagaggttttggtggggcaacagaaggtggagaacaaaaagatggacaagaagaaagaaaagaagacaaagatatagaagatacagacttagaaggcctactcgccgccgtagaagacgcagaaaaaaggtaagaagaaaaagaaaagctataccaatagttcagtggcagcctgactctataagaaactgtaaaattaaaggatacagtgctttagtgctgggagctgaaggaactcaatatctctgctataccaatgaaagattttcaattgttccacctcaatatgcaggaggtggaggctttggtatacagacctacacactgcagtacctatatgaagaaaataaatttaaaaacaacatatggactgcaagtaatctattcacagacttgtgtagatacctaaaagtgaaattttacttttatagacaccaaaaagcagactttattatttcatacagcaggcaaggaccatttgcattaaataagtacacctacactatggcacatccatatatgctaatgcaaagtagacacaaaaaaatactgctgagtaaacttattaatcctaaaggaaaaataactaaaaaaatgacagtcagaccaccaaaacaaatgatcagcaaatggtttttccaaaagcaattctctacacaaaatttactacaacttacagcagcagcagctagctttgcataccccagactaagctgctgcaatgaaaatcaaacagttactatttactatttaaacccacaattctttactcacagtacatgggctagagctcttagtagatactatgaaccttatgataacattgcacaagacattactttttactaccaagatggtaggcaaactaaaacctttcaaccaattaaatgctacaaagagcaagaaaaaccagaacaacaatactataaatccattagctatgaggatggctggttttcaaaaaaaatattaacagccactaaagttacaagccaggatgtaacctatggtcatctacctgtatctgcatgcagatacaacccaacagaagacaatggagtaggtaacatggtatacctaagtagcattttaacaggattttttgacaagccaagtgaaaaagacttagtatatcaaaatgccccactatggcttatttttcatggatactacagctttataaaaaagataaaagactccagttttatgagcctccacatgtttattattaaaagcccttttttaaagccttcaccatcagccatcacaaaagactactttccaatagtagatttaaactttactataggccttaacccatacaaagcatatataagttccacacaaaaaaagttatggtatccatcctgtgaacaccaaatagaaaccattaacagcattgtacaaacaggaccatatatacctaaatattcagatgacagagacagtacatgggaactcccttaccattatcttttttattttaagtggggaggcccagaaacaccacaacaagaaattgcagatccaaagacaaaaaacatctatactgtacccgatacaatcgagggaacagtacagatatgcaaccccctcaaactatcaactgaatccttactacacaactgggacattagaaggggcctcattacagaaacagctcttaaaagaatgtgcgaggacatcgaaactgatacaactttccaaccagatacagaccagccacctccaaaaagaccaagagttacaggagagctacaacacatacaagaaaccaaccaagagatccaagcatgtctccaggcgctctgcaaagaagatacctaccaagaaacgccacaaacacaagaagacatcatccagctcatcaacaagcagcaagagcaacagcagcagctcaagcacaacatcataatgctactacaagaaatgaaacacaaacagcaaatgcttcaactaacaacaggccttatagactaaccccaattaaacctggctttgaaatggagacagaactagaactctgcaatgcttttaaaagataccctcgcaaataccatgaagacccttgtacatacccctggcttccaaatcctgtacccagagtttgttttgcccttagatttaagcactaggcattcaacttacacttagtaaagcatgtttaataaagtttaaccccccaaaaaaaaaaaaaaaaaaaaataaaaaattgcaaaaattcggcgccgctagacggtgcagggaccggatcgagcgcagcgaggaggtccccggctgcccaaggg

SEQ ID NO: 4351 - protein, 667 aa, Gammatorquevirus sp.; identical to SEQ ID NO: 1066

SEQ ID NO: 4352 - protein, 117 aa, Gammatorquevirus sp.; identical to SEQ ID NO: 1067

SEQ ID NO: 4353 - protein, 113 aa, Gammatorquevirus sp.; identical to SEQ ID NO: 1068

SEQ ID NO: 4354 - DNA, 2609 bp, Betatorquevirus sp.
ttacagctgaaggtgagtgaaaccaccgaaatcaaggggcaattcgggctaggttagtctggcgagacgggcaagtaacttaaatttattttacagatgagtaaattctacattccttcaaaatactcaagaaaacaaaaaaatctacaagaaataaaccttcatgtagctattcacgaccttaactgcggctgtaataatcctctacgccatattatctaccaaattttggaacaagaaccatctttaaactttattgaacaaccatgccatactactggaaccgctggcgccgccgcccatggagaagaagacaccgcttttggaccagaagatttagaacaactcttcgcagaagaaaaagaaggcgtagatacagggtaagaaaactaaaattaaaatatttacccttaaaagaatggcaaccaaagactatccataaaagcgtagttaaaggactatattgcttatttcaatgcaaccataaaagacttaactacaactttgcacagtacgaagcctcaatcgcgccaaaaaacataccggggggaggaggttactctttgtttcgctttaatttagatgctttatttgaacaaaatcaactagtaagaaatgtatggactaaatctaacaaacatttaccatttgttagatatcttggatgtcaatttaaaatttatagaccagaatttgtagatgtatgtataaaatttcaaaactgttaccctatgacagcaagtccatttttatacatgggaacacaacctagtttaatgatgatgtctagaaaaagctataaaataccctgcaaaaaaaccaacagaaaaattaaaccttacgtaaaatttaaatttccaccaccacaaaacatgcaaaataagtggtacttccaaaaagacatagcaaaattaggcttaatattagtagctacaacagcatgctcattagaccaatattatatatcaaactacgcagaaaacacaactatagaatttcaagtattaaatacaaagatttttcaaaacagacaattcagaaacacaaccacaacaggatattatccaaaagaaaacttttatttatacagctcgaatggaaacatacctaagccaaactacttacaaacaacatatttaggaaacaccatagaatatcaatatggacaaccatttaattataaaaatgacatggacgaaagtaattatgcagaaagaaaatctgaatacttatcaaacagatcacactggggaaacccattccaccactataacatacaaaaatcacacaaaatatggttttctacaaacccaccagcacaagcatatccaaaaaccttgaacgacgcaaaaaaaccaataccatggacagaagtaacacaagaactatactttacactaagatacaacccagtaacagacacaggaaaagatgttcaaatatatttattaaaaaactgggcagaagaaacaggttgggaaccaccacaaaatgaacttttaatacaagcaggtttcccactatggcttatagtatggggctttaaagactaccaaaccaaactaggccaagtaacagatatagaacatcactacattatagcctttaaacatccaaattttgaaccaaaattagacgcctacataccattaaacctatcttttataaatggacacagtgaatactacccagaagacgaaagaactgcccaagataacttaaattggtatccaatgtcacattaccaaacagcagccatagaaaacatagcacaaggtgggccaggtacagctaaattaggaaacattaaaacagcagaatgtcattgtgaatataaattttattttaagtttggcgggtgtgaaccaccaatggaaaaaacaacagatccaggaaaacaacctactttccctataccaaataacttcaatggcccaaattcgttacagaatccagacgacccaattgactccttcttatacaactttgatgaacgatggggccaaattacaaaaacagctgcacaacgaatcacaaaagactcaacaactaaaacaactctatttacagattcaacaacaactggaacagacgtgccaatcctccaagcactccaaacacaagacctctcgtcggaggaggaggaagcccaaaaagagacattattcgagcagctccaactccagcgaaacaagcaaaaacaactccgatacagaatcaagcagctcctaacaatgctccaaaatatacaataaaacactgtaaaattactgtaaacttgtttaatgagcaaaaaaaccgtagacttaatagcagagagagagcagaagacaaagaggaagcaaaaatatggggtagaagtgaaaaatattttctgaaagatatacccttctactatggctgtgtacctgaaccttatgttaactttaaactaaactatgtagaataaacaaggcccattaattcatatctcggagtccgtttctttaatataaacttaaataaacatccacctcatctcccaatcactaggcctacaagggggctccgcccccttacacccccaagggggctctgcccccttacacccccaagggggctccgccccc

SEQ ID NO: 4355 - protein, 662 aa, Betatorquevirus sp.; identical to SEQ ID NO: 3423

SEQ ID NO: 4356 - protein, 95 aa, Betatorquevirus sp.; identical to SEQ ID NO: 3424

SEQ ID NO: 4357 - protein, 56 aa, Betatorquevirus sp.; identical to SEQ ID NO: 3425

SEQ ID NO: 4358 - DNA, 2609 bp, Betatorquevirus sp.
aagggggctccgcccccttaaacccccatagtctaggggcaattcgggctagatcagtctggcggaacgggcaagaaacttaatatattttattttacagatgagtaaactctacaaacctctaaatatcagcttaaaccacaaaaacttacaatggatgaatgctcaagtcgctcttcatgatatgcactgccaatgtgacgagccattaagacacatcattctacaaatcatagaaaaagaaccaactataaaatttaacaaagaagaatctattaaaattcaaaaatgccttactactggagaagaagacgatggcgacgtacttggcgccggagacctagatacccttttcgcagaagacgtttttggagaagaagacaacgatgggtaagaaaacccaaaagaaaacttaaaaaaataactattaaacaatggcaaccaagtactattagaaaactaactgttaaaggacaataccccctttttgccggaacctcagacagaattgccaatgactatactgcttatgtagatgaaattgctccaaaagatgttccaggcgggggactatacagtattacagtattcactttacaaggattatatgaactgcaccaaaagggtagaaattggtggacacaatctaactgtgacttgcctttaattagatattcaggatgtactataaaactttactttaacccttcagcagactatataactactataattaactgtggagaacttaaagctaatttagaaatgtttcaatctacacaaccttctgttttactacttaacaaaaaaaaaagagtaatgctatgtagaaactataaaagaaaacgcagaccatataaaaaatggtttatacaacctcctgcaatgttatataacaaatggtattttcaaaaagaactaagtacatacccactattaatgttaataactgctgccggtagctttgacagatactatcaaggagctaactcaatttcagaaacaataggattccaatctttaaacacagacttttttgttatacacagctggaaatttccatcaacattaccatacagaccaaatgatagattttatatgtttggcataggaggtactacaacatttgacgaagccacacctcaacaattaatattactaggaaatcctacagataacacaaaaggattaactataggaacagctactgccagtgaatggcaacaaaaagttacacaatatttagctaaatccacaaactggggtaatccatttcaccctaattggctacatgccgatgaaggagaaggccttatatgccttttagaagtaactggaacaatgacactagaacaaaaactaaaatcactaaccccaacagcaactttaaaatcacaacactttattgaaccaacaaaaccatttacagtacattgcagatataatccacaagcagacatgggtagaaactccatatttgtaaccagaataacaggagacaacacaccttggcacaaaccaagcgatgaacacctattaacacaaggcctaccactatggctactacactggggatggctagactacttaagaaaatcaggaacaccacaaagactagatacagactacattcatgtaatagtatcagaccacataagtcccaaagaattatcctactatgtacctatagattatgactttttaaatggaaaaagtccttattctgaccatataaaaccctatgaccaacaaaactggcatccaaaaattaactttcaacaaaaaagcatagcacatatatgccaaagtggaccactaacaattaaattaccacaagatattagtgctactgctcactttagttataaatttcattttaagctcggaggctgcccaccagcaatggacaaagtttgtgaaccagctaaacaaccctcctatcctcaacccggtaacctcctatcgtcaattatattgcagaacccacaaactccaattgaatacttcctcagctcctttgatcaaagaagggaactccttacagaaagagctgcaaagcgcctcaaaaaagaccaagaatttaaagaaactgttcttaaacctacaggacaaactctcctcgacgtccaaatgtcatcccctcaaacaacatcgtcagaagacacatcgtcggaggaagaaagcgaggaggagacacagcagcagctccacagacaccagcgaaaacacagaaaactccagcgaggaattctcaagctcctgaacctactccaacattcaaaataattaatagcacaataaaagtaaacctttttcctgaaactaaacaaaaaaatagacgccttacggcaaaagagagaagtgacgatatacaagatgctaaaatatggggtagatatgtaaaaaattatttactggaaactcatttttataaagatgtacctattacacccttaattccccgtatcaactttgaccttggttacaaacaataaagcctgcatactttcacacctcggtgtccatttatttaagtttaaacctatataaacatccaccacactccctaatacgcaggcgcaaaagggggctccgcccccttaaacccc

SEQ ID NO: 4359 - protein, 665 aa, Betatorquevirus sp.
MPYYWRRRRWRRTWRRRPRYPFRRRRFWRRRQRWVRKPKRKLKKITIKQWQPSTIRKLTVKGQYPLFAGTSDRIANDYTAYVDEIAPKDVPGGGLYSITVFTLQGLYELHQKGRNWWTQSNCDLPLIRYSGCTIKLYFNPSADYITTIINCGELKANLEMFQSTQPSVLLLNKKKRVMLCRNYKRKRRPYKKWFIQPPAMLYNKWYFQKELSTYPLLMLITAAGSFDRYYQGANSISETIGFQSLNTDFFVIHSWKFPSTLPYRPNDRFYMFGIGGTTTFDEATPQQLILLGNPTDNTKGLTIGTATASEWQQKVTQYLAKSTNWGNPFHPNWLHADEGEGLICLLEVTGTMTLEQKLKSLTPTATLKSQHFIEPTKPFTVHCRYNPQADMGRNSIFVTRITGDNTPWHKPSDEHLLTQGLPLWLLHWGWLDYLRKSGTPQRLDTDYIHVIVSDHISPKELSYYVPIDYDFLNGKSPYSDHIKPYDQQNWHPKINFQQKSIAHICQSGPLTIKLPQDISATAHFSYKFHFKLGGCPPAMDKVCEPAKQPSYPQPGNLLSSIILQNPQTPIEYFLSSFDQRRELLTERAAKRLKKDQEFKETVLKPTGQTLLDVQMSSPQTTSSEDTSSEEESEEETQQQLHRHQRKHRKLQRGILKLLNLLQHSK

SEQ ID NO: 4360 - protein, 111 aa, Betatorquevirus sp.; identical to SEQ ID NO: 2085

SEQ ID NO: 4361 - DNA, 2605 bp, Betatorquevirus sp.
cccccttacacccccaagggggctccgcccccttaggggcaattcgggctagatcagtctggcggaacgggcaagaaacttaatatatatttctttacagatgagcaaactctttaatccagcaaaactaacagaaaaaagaacaattctacaaaatgtaaacgcctttgtagccatccacgatcttacctgcgactgcgagaaaccacttaaatgcatcatacaacaaatctacactcaagaaccaacacttcattttgaaccaaaggaattacaaaaatggcttactactaccgtaaccgcaggcgcccatggtggagaagaagaaaaagattttactggagaagaaatcgacgcccttttcgaaaatatcgaagaagacgcctcagggtaagaaaaaaacttaaattcttacctttaaaacaatggcaaccaagccacataagaaaactaactgtcaaaggcatgtactgtttatttgagtgtaaccacaaacttttaacacataattacactcaataccatgaatctatctcacctgaaggaatacctctaggaggaggcttttcattaaacagattcactttaaactgcttattcaatgaacacttaaaagctagaaatatatggacaacatcaaacaaaaactttcctttaataagatacaccggctgcgaattcaaaatctacaggccaaaactagtggatgcagtcataaacttccaaaactgctttccaatggaggcctcagaactaacatatcacagcacacaaccatacattgctatgatgacaaaaggaagcaaaaaaattagaagactagatgatacaaaaaataaaaaaccatacaaaaaattcaaattccctcctccacaacaaatgacaaatagatggtttttttctgcagacatcagcaacacaggtctaattatgcttgcatcctctgccgctagctttcctaacatatatatatctccatacgcagaaacaaacaacataacactaaaattattaaactgtataatattccaaaatagacactttaaccaattaacaacttcagggtatcatcctaaagacggaatgtggctatatgccacagcaaacggagaagacgaccctgaaataggagatataatatttttaggcaattgtattcaatacaacagaggcacaccactcatagacctaccaggtatagacaaagacaaaagaaaaacattaagagacgcaatgaaaatatacactaactcaaaatactggggtaatccatttcacgaagaccatttaaatcaaaaaacaagatactactttacacaaaacagtccacaaataactttcggaacaggcacacatgcaacaaaaacattagctacaaaaatatcagaactacccctcacacgactacatcaagaattctacttcacaggaagatacaacccaaatagagacagagcagaagataatttaatatatttcttaaaaacaacagcagaagccacaggatgggatcctgatccagaaaaagacacattactaacaccccacctaccactatgggcaggagtatggggcctactagactaccatgaaaaactaaaagatatgcaacacatggacacagactacataacagttatacaaacaaaatcaattgaaccacaagacataaacctaaaatactatgtaatattagaccctcaattcacacatggagacagtgaatggcatgacgggcacgacagaactgaatgggacaacatacactggcaccccatgctacactaccaacacagatctatagaaactctaggccaatcaggacccgcaacagcaaaactaggcccttacaaaacagaagaattacattgtgaatataaatttcactttaaggttgggggatgcgcaccaccaatggattctatcacagatccatcagaacaaactacttacccagtaccaactaacatcattgaccaacattcgttacagagtccagaacaaccaattgaaacctacctatactcatttgacgaaagacaccaacaaattacaaaaacagctgcacaaagaatccttaaagactttaaacctacaacacctttgttcacagatccaacaacaactggaacacaagtcccactcctcaaaaaaatcgagacacaagagacggacagcgagacggaaaccgaagaaacgacattactcgagcaactcatccagcagcgaaaacagcaactccgaatccagcagcgaatcaagcaattaatcaaacaattaacaactacaacataacatgcgtacataaagttcacttatttccacctaaaccaaaacaaagaagattcaccccctgggaaagacaacaagaagcagaagacgccagaatttggggcagaccacaaagatatttcttttatgataaacccttttatccagagtgtggaccagaacccctagtaaactttgaccttggttggagacataaataaagaaataaagggctaggccccataaattcacagctcggtgtctgtttctttaaatgtgaacttatttaaaccaactccgcctccctaatttcaggcgccaaaagggggctccg

SEQ ID NO: 4362 - protein, 671 aa, Betatorquevirus sp.; identical to SEQ ID NO: 2478

SEQ ID NO: 4363 - protein, 111 aa, Betatorquevirus sp.; identical to SEQ ID NO: 2479

SEQ ID NO: 4364 - DNA, 2604 bp, Gammatorquevirus sp.
cgggagcccgaggtgagtgaaaccaccgaggtctaggggcaattcgggctagggcagtctagcggaacgggcaagaaacttaaaatatatatttctttcagatgatctcagcaaaagattttcacaaacaatgccagtacaaccctgaaactagagaccaactttggtgctctattatagctgattcccatgatcagaactgtgggtgtcagtggccatttgctcacctcctcagctgtctatttccacctggacacaaagacagaaaattaaccattgaccaaattctttggagagactaccaagaactatgccattcttctggagacgccgcaacaggtactggtggggtacctggagaaaacaaaacagatataaaagaaaaaactactggagacatcctagaagaagacgcagacgtagaacagctcctcgccgccgccgccgctaccgcagaagaagaagaaaggtaagaagaaaaagacaacaaattcctgttaaacaatggcagccagacagcatagtaaaatgtcatattaaaggcaactcagtaattgtactaggagctcatggcaaacaaatgaactgttatacagtagttaaaaatgataatgtaccccctaaagcacctatgggagggggctttggagtagaaagattttcattacaatacttatatgaagaacatgtttttcataataatatctggactaaatcaaatattctaaaagatctttgtagatacctatgggtaaaatttagattttatagacattcatggtgtgactttatagtgcagtatgaaagacaaccaccatttacaattgacaagtggacatacccagctacacacccacaccaactactccaagctaaacacaaaaaaataattattagcaaagcaacaaaaccaacaggtagacttacaacaaaatttaaagttaaacctccaaaacaaatgctatctaaatggttcttttctgaccattttacagactatacactcctcatattaagagctgcagcattagaacttaagtttagctacctaggattcagtaattctaatcaagaaatctctttgttttatttagaccaagcattctatgcaaatgcaaactggggtgcatattctacaactgcatataaaccatatgacaatattccacagcaattttcatataaatatgctctaggtaccaaaacaggcacaataacttcagaaacacaatcaacctatgataactctgttagctatgacaaaggctactttcaaccaacacttttacaagccacctctataactgcaggaacaggcacacccactgcaacaataccaataaatgtagccagatataaccctaacttagacaatggacaaggtaataaaatttaccttacatctatattaactaaaaactatgaccccccaaccacagacaaatccttactaatagaaaatgtacccctatggctaggcctatatggattcctaagctatgttacagtaatcaaaaagggaaaagcatttctagagagccactgtgttatactacaatccccagcaattttacctagcagtcaaataggtgcaggaaaaacatatttacctatagactacaccatgataaatggcaaaggcccatacaatgaaacattaacaactaacatgaaaaaaaaatggttcccaacagtagaaaaacaaatggaaactttaaatgctatagtatgtgcaggcccatacatacccaaatacaatgatattaaagaagacacatgggaactaaaatttgaatataactttttatttaaatggggtggtcctcagacaggtgaccaaccagttacaaacccagctcaacaaggagactatgatgtacccgatcacttccagtcatcaatacaaatccagaacccacaaaaaattaatacagaatccattttacatgcatgggaccaaagacgaggacactttacaaaaaaagctattaaaagaatgcttgataacctccaaattgacacagactatgaaccaattacagactctccaccaaaaaagaaaatcagaaaaggtccccaactatacactccccacgaaaaagaagaagagatcgagacctgtctccgctcactctgcgaagaaaattccttccaagaaaagcagacggaggacctccagcacctcatccagcagcagcaacagcagcagttccagctcaagagaaacctcctcatcctaattgcagacatgaagagaaaacaaacaatgttacaactacaaacaggactgctagaataaatctaacaagatttcaacctggctttgaacagcaaacagaatgggagctttcctgcatattcctaagacccatgagaacctataaagaagaccctcctttttatccctggttaccccctgaacccaaagttaattttgagctaaactacaaatgctaggccgtccccatacacttagtaaagcatgtttatataagcagcacactgtattaataaaataaaaaaaaaaaaaaaaaacaaaaaaaaccgctagacggtgcagggaccggatcgagcgcagcgaggaggtccccggctgcccgtggg

SEQ ID NO: 4365 - protein, 669 aa, Gammatorquevirus sp.
LERLPRTMPFFWRRRNRYWWGTWRKQNRYKRKNYWRHPRRRRRRRTAPRRRRRYRRRRRKVRRKRQQIPVKQWQPDSIVKCHIKGNSVIVLGAHGKQMNCYTVVKNDNVPPKAPMGGGFGVERFSLQYLYEEHVFHNNIWTKSNILKDLCRYLWVKFRFYRHSWCDFIVQYERQPPFTIDKWTYPATHPHQLLQAKHKKIIISKATKPTGRLTTKFKVKPPKQMLSKWFFSDHFTDYTLLILRAAALELKFSYLGFSNSNQEISLFYLDQAFYANANWGAYSTTAYKPYDNIPQQFSYKYALGTKTGTITSETQSTYDNSVSYDKGYFQPTLLQATSITAGTGTPTATIPINVARYNPNLDNGQGNKIYLTSILTKNYDPPTTDKSLLIENVPLWLGLYGFLSYVTVIKKGKAFLESHCVILQSPAILPSSQIGAGKTYLPIDYTMINGKGPYNETLTTNMKKKWFPTVEKQMETLNAIVCAGPYIPKYNDIKEDTWELKFEYNFLFKWGGPQTGDQPVTNPAQQGDYDVPDHFQSSIQIQNPQKINTESILHAWDQRRGHFTKKAIKRMLDNLQIDTDYEPITDSPPKKKIRKGPQLYTPHEKEEEIETCLRSLCEENSFQEKQTEDLQHLIQQQQQQQFQLKRNLLILIADMKRKQTMLQLQTGLLE

SEQ ID NO: 4366 - DNA, 2604 bp, Betatorquevirus sp.
cgggtgccgaaggtgagtgcaaccaccgtagtcaaggggcaattcgggctagatcagtctggtggaacgggcaagaaactaaaatatatattttttacagaatgtccaagtttttaaaaccaacaatatacaaaaatggagccctagaaacacagtggatgaactccattttcacaacacacgacattgtctgcggctgccaagacaccattaaccacttaaaatttttaattgaaaaccaacaatgccattctattatcgaaggaattggaacaacaactactttcgcagacgccgatatcgacgcaggggacctagaaagacttttcgcagaagacgaagacaacgaagggtaagaagaaaacgctttaaaaaatatagactaagaaaacttaaaactataatacaaagacaataccaacctgaacaaataagaaaatgtaaaataagaggatttctagaacttatagaatgcggatatggcagactttcagataactgggcattatacaaagaaagctatgtacctgaacatgaaccaggagggggagggtggagcatacaacaactaactttgggaaatttatatatacaaagcaaatatgccatgaactactggacacatacaaacagaggttacaatttagccagatacctaggagtaaacataagactctacagacaaccacaaacagactatatatttcattacaatttacaagacccacaaataataactaaatacacatatccatcatatcacccatacaaaatactacaataccatcaacgaattgtagttccaagcttacaaactgcaccacataaaaaaaaactatacaaacaaagatttattaaaccaccaaaaaaaatgaaaaatcaatggtactttcaagaacaactaacagacttcccactgttaacattttatacaacagcagtagacctacaatcaatgtttatttcctccaaagcacaaaacaataacataacattaaatgtattaaacacacaactttttcgcaacccaaattttcaatttccaccagaaacatcaggatacaaaccagattcagaaaattacttatatggttatacaggaccacatatacaatggccaaaacaaggcgttcccctaaaagatttcatattattagcagacacaacaaacaataccccaggagaaccaataatagataacattatgccaccaaaaaaaaaatggggtaacccattttttcatgaattttttaatatggacgcagcaacaacattacaaagtataaaacccggagatagtacctttgctcaaaaaagaattatagaaactgacctaaaagtacaaccatactatgaacaagtcagatataaccctaacaaagatgacggagaaggtaatgaggcaaatataataaaaaattttacaagtgctcaacaatcaaattgggatccaccaaaagatgaagatctcatattaagaggacacccattatggctaatgctttggggtctacaaagttacatagaaaaaaagaaactatttaatgacttagacaaaaacggaatacttgtaataagaacaaaaaagtttagtgggccaccattgccagcatacgttatactaaatgatagcttttgtagaggacaaggcccatacgaccaaccaagagaagaaataaatttatacaataacacacactggtatccacgctttaaatatcaaaaagaagcactagaacaaatattagaaacaggaccaggagtttacaaaactaacagaggaacatccatacagtctcacttacactatacttttctttttaagtggggaggcaacccatcaaagatggaaacaattgcagacccaacaacacaaccaacaggacctgaccccaataacctcctattctcaaatgaaatcaatagtccagaacaaacaatccttaactacatctacaagtgggatgtcagacgagacctccttacacaaaaagctacaaacagaattacagaactccaaattcctaaacaaactgtatttacagatggaaaagcaacttcaacagacatcccaatctggacacaaacaacaccacaaacgaaagagaccacggaagaagaaaaccaagagatacagcagcagctcgagctcgtccaactgtacaaccaacaactccagcagcgactcagacaactaatattatccaacaacccataaatataaaatgcattaaaaaagtatacctatttgatcctccaaaaccacgtaaaaatgaaagatttacagggtgggactgggaaactgagttacaactatgtaaagcctttaaaagacctatgagaacctttaaaaatgatcccccttattacccatggttgcctccagaacccattgttaactttgatttaaactttaataaaggccagcattaattcacttaacaagtctgtttatttaagtataaacttaataaaccaacaccgcctccctaatacgcaggcgcaaagggggctccgcccccttaaacccccagggggggcaagcccccccaaaacccccccaaaaaaaccacaaaatttgcattgccgaccacaaacggtcgg

SEQ ID NO: 4367 - protein, 657 aa, Betatorquevirus sp.
MPFYYRRNWNNNYFRRRRYRRRGPRKTFRRRRRQRRVRRKRFKKYRLRKLKTIIQRQYQPEQIRKCKIRGFLELIECGYGRLSDNWALYKESYVPEHEPGGGGWSIQQLTLGNLYIQSKYAMNYWTHTNRGYNLARYLGVNIRLYRQPQTDYIFHYNLQDPQIITKYTYPSYHPYKILQYHQRIVVPSLQTAPHKKKLYKQRFIKPPKKMKNQWYFQEQLTDFPLLTFYTTAVDLQSMFISSKAQNNNITLNVLNTQLFRNPNFQFPPETSGYKPDSENYLYGYTGPHIQWPKQGVPLKDFILLADTTNNTPGEPIIDNIMPPKKKWGNPFFHEFFNMDAATTLQSIKPGDSTFAQKRIIETDLKVQPYYEQVRYNPNKDDGEGNEANIIKNFTSAQQSNWDPPKDEDLILRGHPLWLMLWGLQSYIEKKKLFNDLDKNGILVIRTKKFSGPPLPAYVILNDSFCRGQGPYDQPREEINLYNNTHWYPRFKYQKEALEQILETGPGVYKTNRGTSIQSHLHYTFLFKWGGNPSKMETIADPTTQPTGPDPNNLLFSNEINSPEQTILNYIYKWDVRRDLLTQKATNRITELQIPKQTVFTDGKATSTDIPIWTQTTPQTKETTEEENQEIQQQLELVQLYNQQLQQRLRQLILSNNP

SEQ ID NO: 4368 - protein, 84 aa, Betatorquevirus sp.
MSKFLKPTIYKNGALETQWMNSIFTTHDIVCGCQDTINHLKFLIENQQCHSIIEGIGTTTTFADADIDAGDLERLFAEDEDNEG

SEQ ID NO: 4369 - protein, 118 aa, Betatorquevirus sp.; identical to SEQ ID NO: 2748

SEQ ID NO: 4370 - DNA, 2604 bp, Gammatorquevirus sp.
cgggagcccgaggtgagtgaaaccaccgaggtctaggggcaattcgggctagggcagtctagcggaacgggcaagaaacttaaaatatactttattttacagatgagcaagtctacattttttaaaccaccacaatacaattcttatggaagagaacaactctggatagatgtattcactttgtcacacgatacttggtgtggttgtaatcatcctttggctcatcttattgaccgtgttctgcctcctggtcataaagatagagaccttactatttcagagatcttgtcccgggacctaaaccaagcatgccattctggtggcctagaagaaatcgctggtggtcccgcaccagatttagatacagaagaaggccctacaaacgaagaactagaaaaactattttcagaagacgccataaacgagctcctagacgccgccgcaagagacgaaggaccaaggtaagaagaaaaaagaaattcttaaaactaattcaatggcaaccaccattcattagaaaatgtaaaattataggatatgaaactgttatactaggagctaatggaagacaatttagagactatacttcaacaatgaatgaatgggtacctccaactgtaccagggggtggaggattttccatttctcattatacattagaatacctttatgaacaatatgaactgcacaataacatatggacatgcacaaatactccatatgatctttgcagatttacaggcacaacacttatattttacagacacccacacacagattttatagttcagtaccacaaatactaccctatgacagaaacctcacacacaccaatgcacacacatccactactaatgctactctctaaacacaagataattataccctcaatgttaacaaagccacatggaaaaagaacagttaaaaagaaaattagacctcctagtcaaatgtcaaacaaatggttctttactcaagatttttctaaacaaccatttttactcctaaaagccactgcctgtgacttaaactatgttaaaataggaaaatacagtgagaataacttaacaaacctatggagcctttcacacaaattttttgacaatggacaatttggccaaggcacaactacaagtacattatacaaacccatacacacatggatatacaatactaactgggtatcaggcaaatatttaaaaagcacaccggaaagactagtaaacatgagtgacaattacctttccagtataaactatgatactgggtggtttaattataaaatattaaatgcacaagaactaacacaaccatctagcaaaactaaaccagcctttttaaccagatacaatccatccacagacacaggaaaaggcaacaaagtctggcttaaatctatttttaaacaagactggcaaccaccacaaacagaatcatatttaatatttgcagatgaacccctttggcttatattctttggatggctagactacattaacatactaaaaccagactatgatatattttacaagtacacagtagttatagagtcaccttatataaaaaagccaacagacattagatacattataccaatagatgacagttttatgaatggcaaaagtccatacaatgccacagttacagacacagaaaaacaaaaatggatacctacacttagacaccaacaacaaactctaaacaacatagtactatgtggaccatttattactaggccagaaggtaaattatctaactgggaactacatctaaaatacaaatttttttttaagtggggaggaacccagcaagcagaaaacaccatactcgatccaacaacagcaagtaaatttcccgtgccagataagttcttcaaaacaatacaaattactgacccaacaaaacaaatcccacaaacaatcctacacacctgggactacagaagagacattgttacacaaaaagctcttaagagaatgcttgaacacttaccagatgaacaatctgtatcaacagattcagaataccacaaacaccacaaaaggccaaaaatgtctgccagacaagtatactaccaaaaagaaaaagaagacacaatcaactgtctccaacagctctacggagaaagtacctgccaagaagaagagaagacagaagaaaaaacactgcaagagctcatccagcagcagcagcagcagcagcacatcaagcacaacctcctcaaattaatcaattctatgaagagaacccaagtacaaatgcaactgcaaacaggaatactgtaaccctaaaaagatttaaaccaggctttgaagaagaaacagaaaaacagcttgcagcagcttttaagagaccccctagaacatatacatgtgaccctcctttttatccatggttaccaataacacccaaagtgtgctttaagcttaactttaaaggctaggccaacactgtacacttagtaaagcatgtttaataaagtttaaccccaaaaaaaaaagctttaataattagacaatggcaaccagacagtattagaacttgccgctagacggtgcagggaccggatcgagcgcagcgaggaggtccccagctgcccaaggg

SEQ ID NO: 4371 - protein, 658 aa, Gammatorquevirus sp.; identical to SEQ ID NO: 4227

SEQ ID NO: 4372 - protein, 120 aa, Gammatorquevirus sp.; identical to SEQ ID NO: 4228

SEQ ID NO: 4373 - protein, 113 aa, Gammatorquevirus sp.; identical to SEQ ID NO: 4229

SEQ ID NO: 4374 - DNA, 2604 bp, Betatorquevirus sp.
ccccaagggggctccgcccccttacacccagtctaggggcaattcgggctagatcagtctggcggaacgggcaagaaactaaaatatactattttacagatatgacatctttttggaggaaaccaacatcttcactgagacaacaagaactaaaatggctaaatttgatgcatgaatcccacgacttcttttgccactgcgacgaaccagaccttcacttgctttgctgtatcaacaaattttctacttgccctaaacctgaaattgacattaaaaatataaaatgcctccttaccggagatactaccaaaaccgctacagaagaaaatactaccgaagaagatggaggcttcctcgaaggagagctagaacgacttttcgacgaaaacaatggtacagaaaaagaagacaaagatacaaggtaaagaaatttaaactgaaaagaaaaagaacttatttaaaactaaaacaatttcaacctaaatctattaactattgtaaaattactggttttaaatgcctttttcaaggttcaccaataagaaagcaacataactatattcaatatatttatagttttacaccgccaacatttcctggcggaggtggatggagtttacttgtatttagcctagacagtttatttgaagattatcaacacttacaatgtatttggtcaaaaagtaatgcaggtctacctcttgtaagatatttaggaggaaaaattaagctataccaaaatgaatctactgattatgttactgtatatgatacttgctggccaatggttgacacaccacacacacatgcagactctgcacccagcagaatgttacaaaagaaacataaaacaatagtacctagtacaaatacacaaaaaagaaagaaaccatacaaaacaattagatttaaaccaccagcacaaatgctaaacaaatggtactttcaaagagacatttgtaaaataccattacttatgctaactactacaagcatagacttaacaaaacctttctgtaatccaaactgtaaaagtaacaacattgttattagatacattaatccatacttatttaaaaacaataactttcaagactacccaagaaccacaggctattcacctaagacattatcagatggtccttactatttatatgcaagtcttcaaggtgacattccagacaaaactaacactgtcagttttaaacaatttataggtggttgtataccactaacaaatacaaaaaactataatgctggcaaaccaatacaaacattagcaacaggaacaaacaacaaaccagaaaactggggaaatccattttatagaacacacttagacttagaagcatttaccatttatatttgtaacgaaaaccctgtctcactactaaacaattacaatactaccagttttaacaacaccaaaataaccaaagctacagaaaatatgatataccaaacaatttataatccagacaatgatactggagaaacaaacaaagtatacttagtaaaagcaacacaaaatacacaatttcaaccacctacagacgaagaccttatatttgaaggtttcccactatacattttactatggggatggacagactttattagaaaactaaacaaaacacctaacattgacaccaactacatgctagtaatacaaacaaaagtattccatgaaaaagatccatattttgtaccaatagacatacaatttgaacatggctttgatccatacctaccattagacacagaaaaccatcaaccatcatactacaatcaacaaaactggtatccacaactaaaataccaagaactaactatagaaaacatttgtgaatcaggtcctgctgtatctagatcacaatcatacctacaatgctattgtaaatattcattttactttaaatggggaggctgtcctaagactcttgataaagcatataacccttgttcacagcctaaatggcccacaaccgatacaatcactccaggacttgaaattacgaatccatcagaaccaccagaaacccaactatactactgggactgggacaatgactatgttacacaaaaagctatacaaagaattagagaccacacagaacctcatgaatcaatattctcaattacagactcaaagtcatcagcaaaaccacagaaaacaacacaagaaacgcaggaccaaaaagaggaggagaaactactcctcaagctccaccacctcagaaagcagcgaatgcaactcgaactcctcataaagatgaaagagtccactttaccataattaatcaagttgaactttttccaactactaaaaaacgcaaacgcttcaatgcctgggaacaaaacgaagaaagagagcttgccgctatttttaaaagacctcaacgctattaccacggcgataaaccttattatccatggtgccctcctgaaccctatgtaaactttgacttaaactatcattaaaatttcaaggccaacaaatttcacttagtggtgtccatttatataagtttaaccttaataaacagtcaccgcctccctatcaatagggcgccaaattcaaaagggggctccgcccccttacac

SEQ ID NO: 4375 - protein, 670 aa, Betatorquevirus sp.
MPPYRRYYQNRYRRKYYRRRWRLPRRRARTTFRRKQWYRKRRQRYKVKKFKLKRKRTYLKLKQFQPKSINYCKITGFKCLFQGSPIRKQHNYIQYIYSFTPPTFPGGGGWSLLVFSLDSLFEDYQHLQCIWSKSNAGLPLVRYLGGKIKLYQNESTDYVTVYDTCWPMVDTPHTHADSAPSRMLQKKHKTIVPSTNTQKRKKPYKTIRFKPPAQMLNKWYFQRDICKIPLLMLTTTSIDLTKPFCNPNCKSNNIVIRYINPYLFKNNNFQDYPRTTGYSPKTLSDGPYYLYASLQGDIPDKTNTVSFKQFIGGCIPLTNTKNYNAGKPIQTLATGTNNKPENWGNPFYRTHLDLEAFTIYICNENPVSLLNNYNTTSFNNTKITKATENMIYQTIYNPDNDTGETNKVYLVKATQNTQFQPPTDEDLIFEGFPLYILLWGWTDFIRKLNKTPNIDTNYMLVIQTKVFHEKDPYFVPIDIQFEHGFDPYLPLDTENHQPSYYNQQNWYPQLKYQELTIENICESGPAVSRSQSYLQCYCKYSFYFKWGGCPKTLDKAYNPCSQPKWPTTDTITPGLEITNPSEPPETQLYYWDWDNDYVTQKAIQRIRDHTEPHESIFSITDSKSSAKPQKTTQETQDQKEEEKLLLKLHHLRKQRMQLELLIKMKESTLP

SEQ ID NO: 4376 - protein, 107 aa, Betatorquevirus sp.
MTSFWRKPTSSLRQQELKWLNLMHESHDFFCHCDEPDLHLLCCINKFSTCPKPEIDIKNIKCLLTGDTTKTATEENTTEEDGGFLEGELERLFDENNGTEKEDKDTR

SEQ ID NO: 4377 - DNA, 2603 bp, Betatorquevirus sp.
cccccaagggggctccgcccccttacacccgtctaggggcaattcgggctagatcagtctggcggaacgggcaagaaactaaaatatactattttacagatatgacatctttttggaggaaaccaacatcttcactgagacaacaagaactaaaatggctaaatttgatgcatgaatcccacgacttcttttgccactgcgacgaaccagaccttcacttgctttgctgtatcaacaaattttctacttgccctaaacctgaaattgacattaaaaatataaaatgcctccttaccggagatactaccaaaaccgctacagaagaaaatactaccgaagaagatggaggcttcctcgaaggagagctagaacgacttttcgacgaaaacaatggtacagaaaaagaagacaaagatacaaggtaaagaaatttaaactgaaaagaaaaagaacttatttaaaactaaaacaatttcaacctaaatctattaactattgtaaaattactggttttaaatgcctttttcaaggttcaccaataagaaagcaacataactatattcaatatatttatagttttacaccgccaacatttcctggcggaggtggatggagtttacttgtatttagcctagacagtttatttgaagattatcaacacttacaatgtatttggtcaaaaagtaatgcaggtctacctcttgtaagatatttaggaggaaaaattaagctataccaaaatgaatctactgattatgttactgtatatgatacttgctggccaatggttgacacaccacacacacatgcagactctgcacccagcagaatgttacaaaagaaacataaaacaatagtacctagtacaaatacacaaaaaagaaagaaaccatacaaaacaattagatttaaaccaccagcacaaatgctaaacaaatggtactttcaaagagacatttgtaaaataccattacttatgctaactactacaagcatagacttaacaaaacctttctgtaatccaaactgtaaaagtaacaacattgttattagatacattaatccatacttatttaaaaacaataactttcaagactacccaagaaccacaggctattcacctaagacattatcagatggtccttactatttatatgcaagtcttcaaggtgacattccagacaaaactaacactgtcagttttaaacaatttataggtggttgtataccactaacaaatacaaaaaactataatgctggcaaaccaatacaaacattagcaacaggaacaaacaacaaaccagaaaactggggaaatccattttatagaacacacttagacttagaagcatttaccatttatatttgtaacgaaaaccctgtctcactactaaacaattacaatactaccagttttaacaacaccaaaataaccaaagctacagaaaatatgatataccaaacaatttataatccagacaatgatactggagaaacaaacaaagtatacttagtaaaagcaacacaaaatacacaatttcaaccacctacagacgaagaccttatatttgaaggtttcccactatacattttactatggggatggacagactttattagaaaactaaacaaaacacctaacattgacaccaactacatgctagtaatacaaacaaaagtattccatgaaaaagatccatattttgtaccaatagacatacaatttgaacatggctttgatccatacctaccattagacacagaaaaccatgaaccatcatactacaatcaacaaaactggtatccacaactaaaataccaagaactaactatagaaaacatttgtgaatcaggtcctgctgtatctagatcacaatcatacctacaatgctattgtaaatattcattttactttaaatggggaggctgtcctaagactcttgataaagcatataacccttgttcacagcctaaatggcccacaaccgatacaatcactccaggacttgaaattacgaatccatcagaaccaccagaaacccaactatactactgggactgggacaatgactatgttacacaaaaagctatacaaagaattagagaccacacagaacctcatgaatcaatattctcaattacagactcaaagtcatcagcaaaaccacagaaaacaacacaagaaacgcaggaccaaaaagaggaggagaaactactcctcaagctccaccacctcagaaagcagcgaatgcaactcgaactcctcataaagatgaaagagtccactttaccataattaatcaagttgaactttttccaactactaaaaaacgcaaacgcttcaatgcctgggaacaaaacgaagaaagagagcttgccgctatttttaaaagacctcaacgctattaccacggcgataaaccttattatccatggtgccctcctgaaccctatgtaaactttgacttaaactatcattaaaatttcaaggccaacaaatttcacttagtggtgtccatttatataagtttaaccttaataaacagtcaccgcctccctatcaatagggcgccaaattcaaaagggggctccgcccccttaca

SEQ ID NO: 4378 - protein, 670 aa, Betatorquevirus sp.
MPPYRRYYQNRYRRKYYRRRWRLPRRRARTTFRRKQWYRKRRQRYKVKKFKLKRKRTYLKLKQFQPKSINYCKITGFKCLFQGSPIRKQHNYIQYIYSFTPPTFPGGGGWSLLVFSLDSLFEDYQHLQCIWSKSNAGLPLVRYLGGKIKLYQNESTDYVTVYDTCWPMVDTPHTHADSAPSRMLQKKHKTIVPSTNTQKRKKPYKTIRFKPPAQMLNKWYFQRDICKIPLLMLTTTSIDLTKPFCNPNCKSNNIVIRYINPYLFKNNNFQDYPRTTGYSPKTLSDGPYYLYASLQGDIPDKTNTVSFKQFIGGCIPLTNTKNYNAGKPIQTLATGTNNKPENWGNPFYRTHLDLEAFTIYICNENPVSLLNNYNTTSFNNTKITKATENMIYQTIYNPDNDTGETNKVYLVKATQNTQFQPPTDEDLIFEGFPLYILLWGWTDFIRKLNKTPNIDTNYMLVIQTKVFHEKDPYFVPIDIQFEHGFDPYLPLDTENHEPSYYNQQNWYPQLKYQELTIENICESGPAVSRSQSYLQCYCKYSFYFKWGGCPKTLDKAYNPCSQPKWPTTDTITPGLEITNPSEPPETQLYYWDWDNDYVTQKAIQRIRDHTEPHESIFSITDSKSSAKPQKTTQETQDQKEEEKLLLKLHHLRKQRMQLELLIKMKESTLP

SEQ ID NO: 4379 - protein, 107 aa, Betatorquevirus sp.; identical to SEQ ID NO: 4376

SEQ ID NO: 4380 - DNA, 2602 bp, Alphatorquevirus sp.
agtcccccgctcgtgctgacacgcttgcgcgtgtcagaccacttcgggctcgcggggggtggtggagaaagcggtggacccgtggccgacttcgcagacgatggcctagacgacctcgtcgccgccctcgacgaagaagagtaaggaggaggaggaggtggaggagagggcgacccagacgcagactgtacagacgctacagacggtacagacgaaaacgaaagagggctaaaataactataagacagtggcaaccagccaaaactagaaaatgctacataaggggctacatgcccgcccttatgtgcggctggggagcctacagcagaaactacagcagtcacttagaggacaaaataactgcgggaccctatggtgggggacacagcactatgagattctctctacaggtgctctacgaagagcacctgaaacaccacaactactggacgcgcagcaaccaggacctagaactggccctgtactatggctgcacaattaagttttacagggaccccgaaacagactttatagttacataccagagaaaatctcctctgggaggtaacataatgacagcaccatcactacacccagcagaagccatgcttacaagaaacaaaatactaatacccagtctacaaactaaaccaaagggcagaaaaactgtaaaagttaacatagcaccccccactctatttgtgcacaagtggtactttcaaaaggacatatgtgacttaacactgttcaacttgaacgttgttgcggctgacttgcggtttccgttcggctcaccacaaactgacaacatttgcataaccttccaagttctctcttccgtttacaacaactttctctccataacccatacttcctcaaccagtgacactataatagacgaatttttaaaactagcaattccagacacacctaaaaaaagacactggaatgttttaaatacatacaaaacagaaggttgcttttcacacccacaactgcaaaaatacaaaatacctcaagcaggcataggtgctgagaattactttagcacaccagacggactatggggagaccctatatacagcaaaaacaatacaggcgcagagcaatcagcagagaacattcgaactacaattaaaaacaacatgaaatcttactttaaaaaaatacaagaggagagtacaataataacaaagggagacaaattattctgtcacctcacaggcatattttcaccaccctggctaaatataggcagagttagtagagagtttccaggcctatataatgacgttatatacaacccatggacagacaaaggctcaggcaacaaagtatggctagacagcctaacaaaacaagacaacatttacaaaaaaggacaaagtgtccttcttatggaagacatgcccttatacataatgctaaacggatacatagactgggccaaaaaagaactaaacaactggcagatgcaaaccatgtacagagtaatgatagtatctccctatacttttcccagactatatttagaaaccaatccctacaacgggtatgtcatgtactcacaagcctttggagcaggccttatgccagacaaagtatcaattccacccatagcatggagaggcaagtggtacccacacgtactacaccaagaagcagtaataaatgacatagtgcagtgtggaccctttgcaccaaagatacaaaaaccaaacatgcagctcaacatgaaatactcatttagattcacatggggcggtaatcctatttccgcacagattgttaaagacccctgcacccagcccacctttgaaattcccggtggcggtaacatccctcgcagagtacaagtcatcaatccgaaattcctcgggcccaactacagtttcagatcatttgacatacgacgtgacctctttagcgacaagagtcttaaaagaatctcagaacaaccagagacttttgagtctttattctcaggtggcaaacgccccaggatcgatctacccaagtacgtcccgccagaagaaaactccgatacccagcagaggcaacaaagagaacagaggccgtggacgagcgaaagcgaaagcgaagcagaagcccaagaagagacgccgcagggctcggtccgagagcagctccagcagcagctccaagagcagcttcaactccgaaggggactcaagtgcctcttcgagcagctagtgagaacccagcagggagtccacgtagacccctgcctcgtgtaggccccgagcagtggctctttccagagagaaagcccagaccccctcctacttccggggactgggccatggagtaccttatgtgtaagataatgaacaggcctccccgcactcacctcacagacccgccattctacccttactgcaaaaacaattacaatgtaacctttcagcttaactacaaataaaagcctgcttctctgctcaaggccgtgggagtttcacttgtcggtgtctacctctaaaggtcactaagcactccgagcgccagcgaggagtgcgacccttccccctgactcaacttcttcggagccgcgcgctacgccttcggctgcgcgcggcacctc

SEQ ID NO: 4381 - protein, 690 aa, Alphatorquevirus sp.; identical to SEQ ID NO: 1559

SEQ ID NO: 4382 - DNA, 2602 bp, Alphatorquevirus sp.
cgccagcgaggagtgcgacccttccccctggtgtaggggcaattcgggcacgggtctggccgggctatgggcaagattcttaaaaaacttcctcgctctgttgtccggcaggataccaagtcatgccgtggtctccgccaaaacataacatcagaacgagagaggatttgtggattcaatcagttatttattcacatgacactttttgtggctgtgataatattcttgagcatcttaatagcctcctgggtggcctacaaccagctccacctagagacccagcaccccctgccatacggagcctgccggcactgccgccagctccgccgccccctgaagaaccacggcgtggtggagatacagaaggaggccgtggagaagatggaggagacgccgctggggcttacgaacccgaagacctagaagaacttttcgccgccgccgcacaagacgatatgtgagtagagggcggcgccgccgatacaggcgcagacggagacgggggcgacgcagacggggacgcagacgcagacacagaaaaacactcattctcaggcaatggcaaccagacgttataaaaagatgctttataacagggtggctgcccctaattatctgtggaaacggacacacgcaatttaactttataactcacatggatgacattccacctaagaatgcatcctacgggggcaacttcaccaacttgacctttaaccttgcctgcttttatgacgaattcatgcaccacagaaacaggtggtcagcctccaaccatgacctagaactagtcagatacctcaaaaccaacctaaaactgtacagacacgagtcaatagactatatagtaagcttcaccactacaggccctttcgagacaaatgaaatgtcctacatgctcactcaccctctggccatgctcctaagcaaaaaacacatagttgtgcccagccttaaaacaaaaccacacggtagaaagtacaaaaagataacaatcaagcccccaaaactaatgctaaacaagtggtactttgctgcagacttctgccacataggcctgtttcagctctgggccacaggcctagagctcagaaacccctggctaagatcaggcacaaacagcccagtcataggcttctatgtgcttaaaaaccaggtctatcaaaacagatacagcaacctaaacacacacgaacattaccaagcaagactacaggcataccaagaactaacaaaacaaaaaacttccgataagtggtacaattggcaatatacatacaacaaagtaatgaaacctatttactatgcagctgccaatgaaacaaattctaagtttaagggcaaaacatacaattggaaaaattacaaagaaaactttacagaggtacaagacaagtggacaaaaacctgtaaagaagcctatgagttagtatcagacgaatacagacaaatatacaccactactttaacatatccaccaccatgggatccaacaacttccaacacaggcagacaataccttgaacatgactgtggcatctacagcccatactttctaacaccacaaatatacaccccagaatggcacacagcctggtcttacattagatacaacccccttacagacaaaggcataggcaacagagtctgtgtgcagtattgcagtgaagccagcagtgactataacccagtaaagagcaagtgcatgttacaagacatgcccttgtggatgatgctatatggctacgcagactatgtagtaaagagcacaggcatccagtcagcctggacagacatgagagtagccatcaggagtccctacacagaccccaaactcgtaggctcatcagaaaacacaatgtacatccccataggcctagaattcatgaacggagacatgccagacaagaggccctacctcggaccggcgacgctcttccactcgtgggacctcagacgtggatacattaatacaaaaagtattaaaagaatgtcagaacacctcgacgctaatgagtatttttcaacaggcatcgtgtccaaaaaaccccggttcgacacaccccaccacgggcagctatcaaaccaagaagaagacgccttatctatcctcagacaactccagaaagagcaagaagagagcagcacatcagaagaagaacaagcactccaaaagcaagaagaccaaaaagaaaagctcctacagcagctccgagtccagcgacaccaccagcgagtcctcagacaaggaatcaaacacctcatgggagacgtcctccgactcagacagggagtccactggaacccaatcctgtaatacttccaccagagccaataccagacctgctattccccaatactggtaaaaaaaaaaagttttctcccttcgattggcagtgcgagcaggagcttgcgtgtctaatgaaacggcctatgcgtttctatccctcagacaacccgttctacccgtggctaccccccaagcgagatatcccaactatatgtaaagtaaactttaaaataaacctcagtgattaaaattcgaggccccgggagtttcacttagcggtgtctacctctaaaggtcactaagcactccgag

SEQ ID NO: 4383 - protein, 571 aa, Alphatorquevirus sp.; identical to SEQ ID NO: 4179

SEQ ID NO: 4384 - DNA, 2601 bp, Betatorquevirus sp.
cccccaagggggctccgcccccttacacccctctaggggcaattcgggctagatcagtctggcggaacgggcaagaaacttaaaaaatatttttattacagatatgtcatctatctggaagaaaccaactacaactccgagacaacaagaactcctatggctgaacttattccatcaatctcacgaccaattttgccaatgtgaagaccctgaccttcactacttaatggtaatcaacaaattctccaactacaaaaaaccagaatcagaaataatcaacataaaatgcctccttaccggaaaaactactggaccaactactactacagacgcagaagacgacctccatatcgacgcaggagatttagacaaactcttcgaaaaagatttcgaagaagaacctaccggagaaaacaccgaaaggtaaagaaatataaatttaaaaaacttaaaaagctaaccttaaaagtttttcaacctaaaactattaaacaactaaaaattaaaggatttaaatgcttatttcaaggaagcattaaaagagcaaacaataactatatacaatatatatatgatactgtaaatgataaacgccctggaggcggagcatggagcttacaaatatttagcctagcaagcttatatgaagaatgggaacatttgctaaatatatggacaaatagcaacgcaggactgccacttataagattcttaggagtatcatttaaattttatcaaagccccgaaactgactatgttgtaaaatatgacaactgctggccaatggtagacacaccatacacacacgcagacagcgcaccttcaagaatgataagaagtcaccataaaattacaataccaagcagaaaaacaaaattaagaagaaaaccatataaaaaagtatttgttagaccaccatcacaaatgacaaataactggtactttcaaagggacatttgcaaaacacctttagtaatgctaaccacaacagccgttgacctcagatttccttttgcaccaccagaagctttaagcaataacgttactttatacacacttaatacttttcaatttaaaaatactaacttccaacaaccagaagccacaggatactattataaatcagaaggcacacaaaaatattacttatatgcagcagctagagaccactcaaacacttgggctgacctaataccacttacaaacacaaaagacaaccaaccaggaaaacaattaagaatacttataaaacctaccagttcaagcgataataaaatgagtaactggggaaatcctttttatcacgtatacgactatgaaaactttaaattttacttcttaacaaaaccaccaacacaaatacaattttcagaactacaaaaaaccttaacagataacattacagaatttacaagctacatatactatcaactaagatataatcccgaaaaagatacaggtcaagacaataaagtttatttaatatcaaatttacatgatacaaactgggaagagccaaacaacagtaacctaatatttgatggctttcctttaactattttattatggggatggactgactggcaaaagaaactaaaacaagtatccaacatagacaaccaatacatagtcgttatacaaacaaaatttttctcagaaaagttaaaatactatgtactaatagacagggactttatagacggatttgaaccatactcaccacacacacaagaagaacaattacctataacacctgcaaatcaacaacactggtacccaaaacatttatttcaacaacaatcaataaatacactatgcttaagtgggcaagcatgtcctagaccaccatggaatcactatttacaagccttttgcacatacactttttattttaaaataggaggctgtcctaaacaattacaaaaagcttatgatccttgcttacagtctaaatggcccacagccgataacatgcctgcaagatatcaaattacgaatcctgaaaccccaccagaaacagaactgttctcctgggattgggatgaagactatgttaaaagaacagctatacaacgaattgcagaatacacaccaacttatgaaacaatattcttctctacaggaagcaaatcagatcccataccactcaaaaaagtccaagaaaaccagacacaagaagaagaggaggagaaagaattattcctccagctccagcagctcagacaccgacgaaaactcctccaactccaactaagagaattatcattaaaaagtgcaccaagatagtagaactttttccaaaaccaaacaaaaaaaacagaagatttacaccagacgaaagagaaacagaaagacaagtagcaatagcttttcacagaccacaaagaactttcttttacgaccctcccatatatccttggttacctcctgaacctaaagttcccaaagtaaactttcaattaaactacccattgtaaccaataaaaatttcaacgccaacaaatttcacttgtcggagtccatttatttaattttaacttatataaacatccaccgcctcccaatattgttggccaacaaagggggctccgcccccttaaa

SEQ ID NO: 4385 - protein, 666 aa, Betatorquevirus sp.
MPPYRKNYWTNYYYRRRRRPPYRRRRFRQTLRKRFRRRTYRRKHRKVKKYKFKKLKKLTLKVFQPKTIKQLKIKGFKCLFQGSIKRANNNYIQYIYDTVNDKRPGGGAWSLQIFSLASLYEEWEHLLNIWTNSNAGLPLIRFLGVSFKFYQSPETDYVVKYDNCWPMVDTPYTHADSAPSRMIRSHHKITIPSRKTKLRRKPYKKVFVRPPSQMTNNWYFQRDICKTPLVMLTTTAVDLRFPFAPPEALSNNVTLYTLNTFQFKNTNFQQPEATGYYYKSEGTQKYYLYAAARDHSNTWADLIPLTNTKDNQPGKQLRILIKPTSSSDNKMSNWGNPFYHVYDYENFKFYFLTKPPTQIQFSELQKTLTDNITEFTSYIYYQLRYNPEKDTGQDNKVYLISNLHDTNWEEPNNSNLIFDGFPLTILLWGWTDWQKKLKQVSNIDNQYIVVIQTKFFSEKLKYYVLIDRDFIDGFEPYSPHTQEEQLPITPANQQHWYPKHLFQQQSINTLCLSGQACPRPPWNHYLQAFCTYTFYFKIGGCPKQLQKAYDPCLQSKWPTADNMPARYQITNPETPPETELFSWDWDEDYVKRTAIQRIAEYTPTYETIFFSTGSKSDPIPLKKVQENQTQEEEEEKELFLQLQQLRHRRKLLQLQLRELSLKSAPR

SEQ ID NO: 4386 - protein, 122 aa, Betatorquevirus sp.; identical to SEQ ID NO: 2125

SEQ ID NO: 4387 - DNA, 2601 bp, Gammatorquevirus sp.
cgcgccggcgctgtgagtgaaaccaccgaggtctaggggcaattcgggctagggcagtctagcggaacgggcaagaaacttaaaataaactttattttacagatgaccaactactctgcaagtcacttttttaaaccaactccttacaacaatgacaccaaaaatcaaatgtggatgtccatgatagctgatgggcacgactgtatctgcaactgccatagtccttttggccatttgcttgcttctatttttcctcctggtcatcaagaccgttttcttacaattgaagaaattattaatagagacattaaagaatgcctttctggtggaggagaagaagaaaaccatggtttgggcgctggagacgatataaaaagagatacccaagaagaagaaggcgcccactttataaaagacgaagaactagacgcactaatcgccgcaggagaagacgccgctggaaggtaagaagaaaaaaaaaaagaataaatgtaactcaatggcagcctgaaagtattagaaaatgtaaaataataggaattgaacccctctgtgtaggtgctgaaggctcacaaattgactgctatacagtaactaaaacagactatgtgccacctaaagtaccatggggaggaggcttcggcttagaaaactttaccctaaaatacttatactcagaattccaatatcataacaatatatggactgccagcaatactcaaaaagacctatgtagatacacaggtggaaaatttataatatacagacatccctatcaagactttgtagtatcctatgacatacaaccaccacacaccttaaacaaatttactttccctagctgtcatccacaccaacaactactgtctaaacatcacaaaattatactaagccaagctagtaaaccaaatggtaaatactacaaaaaaataaaatttaaaccaccaaaacaaatgataacaaaatggttttttacaaaaacattctcaccagctagtttaattgtaataaaagctgcagctgcaaatttccaacacattaacctaagtggcaaaaatacaaacatgttagttacactgtactcactaaatttatcattttataaaaacccagcatggggtttatccacagctcatgcaaactactggccatacgcacaagcaccaaacaatttaaaatactttattttagacaagtctggcaacaaaatacaaaaagaaatgaccttaactactagaagcagctactcagacacaattaactacaacactggttggtttaaatcagaatttttacaagctgcaggaattggtgaagttactgcagctacagcaacacatcaagttatagctggtagatacaaccctaatatagatgatggagaaggaaatgaaatatattgtacagccattacaagtacaacttggctaccacctactcatgacaaacaactacttataactaacatgccactatggctaggcttatatggatattactcctttgttagagagtctaaatctgaagacttttggaaactacatgttattgtactaaaatccaaagccattcattgctacccagaaataggtagttgtgatagatatgtttttattgactgggactatatacaaggcaaaaaaccatgggaccaatcaataaccacaaaagaaaagtcctattggtaccctgatatgtcctggcaaagaaaatccatgaatgcaattgtagaatcagggccatttataccaaaactatcagaagaaacatatagcacatgggaactaaacatgagatattatttttatttcaagtggggaggtgcaaacacatctgaagcccaagttgaaaatccagaactcctacccacctatgatgtacccgattcaatgccaaaaacaatacaaattgttaacccagaaaaacaagctccagaaaccatcctgcacccctgggactaccgcaggggatttattaaagaaacagctcttaaaagaatgtgctcaaacatcgaaactgatacagaatttcaactccctacagaacaaacaccaaagaaaaaaagaagagtacaagcaactcttcaaaatccccaagaagaaaaccaagaaatcaaaacatgtctcctctcactctgcgaagaaagtacatgccaagaagaggaggagcaagacctccacaagctcatcctcaagcagcagcgccagcagcaaaagctcaaatacaacatgttcaagctcctcctagacctgaaagaaaaacagagaataatacaacatcacacaggcctactagaatgaaactaacaccatttaaaaaaggatttgaaatagaaacagagcatcaacttgcacaagcattctgtagaccaccaagacactttaaagaagaccccccattttatccatggctacctaaacttgtaccccttgtaaactttcacttaaattttaaaggctaggccaacactgtacacttagcggtgtttgtttatataagtttacaccccaaaaaaattgtaaaataaaaaaaaaaaaaaaaaaaataaaaaattgcaaaaattcggcgctcgcgcgcgctgcgcgcgcgcgagcgccgtca

SEQ ID NO: 4388 - protein, 661 aa, Gammatorquevirus sp.; identical to SEQ ID NO: 2891

SEQ ID NO: 4389 - protein, 121 aa, Gammatorquevirus sp.; identical to SEQ ID NO: 2892

SEQ ID NO: 4390 - protein, 113 aa, Gammatorquevirus sp.; identical to SEQ ID NO: 2893

SEQ ID NO: 4391 - DNA, 2598 bp, Gammatorquevirus sp.
cgctgcgcgcgcgtgagtgaaaccaccgaggtctaggggcaattcgggctagggcagtctagcggaatgggcaagaaacttaaaactatttattttttagatgtcaagatttataaagaatacaaactacaatggagatacaaaaaaccaaatgtggatgtccatgatatcagatggccatgatatgttttgtggatgtacacagccatttgctcacctcctagacagcatttttcctgaaggtcacaaagacagaggtctaccaattgcttacattattaaaagagatctacaacaatgcctttctggtggagacgtagaagaaagagatggtatggccgcaggtacaagcgccgctaccctacaactcgtcaaagaagaagaagaagaacctggtacagaaggagacatagaagaccttatcgccgccgtagaaaacgcagaaaaaaggtaaaaaaaaaaaaacctactttgattgttagacagtggcaacctgattcaattaagctatgcaaaatcaaaggctttgacagcctaatatggggagcacaaggaactcaaggaatgtgttccaccttacaaatgtttgaatatactagatacaaatatccaggtggtggatcattttgtgctcaagtatatactcttgaatacttatatgaccaatacaaactaagaaataacatatggacagctactaaccaatggaaagacttgtgtagatacctaaaaacatattttaccttttatagacaccaaaaagttgactttgttgtttgttattatagacaaccaccatttgacatcaatgtagatacctatatgaattttcacccatacatgctactacaacaaaaacacaaaataatactacctagcaaacaaacaaatcctagaggtaaatccaagaaaactaaattaattaaaccaccgaagcagatgctctcaaaatggttttttcaaaaagaattctctcattttgacttagttatgatagcagccagtgcctgcagcctttcatacccaagaataggctgctgtaatgaaaatagaatgataaccttaacatgcttaaatgctaggtttttccaagacagcaattggggccacacacttacaggcgacaactactttaaaccatatccattaatctcaactgagctagtttattactcaggaaacactcaaaggcccacaatgtataaccctatcaaagactacattgaaaaaacaccaacaatagaaactgaaagtggcagatattatagatcaattagctgggaaggaggcttcttttcacccagaattctttcagcttgggatattcagatgggctcaagaaagattaggccactacccatagtcctagctagatataacccagcagtagacgatggtaaaggtaataagatatggcttacatcaatttttggtggacactatgaccctccatcaaaaacaccagattttattatagaaggcaaaccactttggctagccttttggggatactatgactacttaaaacaatcaaaaggtgaaggaatttttcctgttcatatgtttgttgttaaaagcccctacatacaaacatctcaaacagaaacagccacagactactatgcttttatagacagagacatactccaaggaaaactaccatatgatacaccaataactaaatcagaaaaaacactgtggtatccaacagtagaatggcaactaaaaacaatctcagccatatgtcaatcaggaccatatgtgcctaaattggataatcaaacagaaagtacatgggagctacctattcactattcctttcattttaagtggggaggcccccacattacagacacaccagttgatgatccctccaaaaagaacaaatatcctgtgcccgatacaatccaagaagcaatacaaatctatgatcctgcaaaaaacattgcaaccacaatgttccatgactgggactacagacgaggttgccttacatcaacagctattaaaagaatgcaacaaaacctccaaactgattcatctctcgaatctaattcagacacagagccaccacaaaagaaaagaagactcctaccaaccctacacgacccagagaagaaaacggaaaagatccgcaaatgtctcctctcactctgcgaagaaaataccttccaagaaatccaagaagaggagaacctcctcaacctcatcaagcagcagcagcagcagcaaaacaagctcaagcagcagctcctcacactgatcaaagacctgaaacaaagacaaacatccctgcaactacaaacagggatgtacgagtaacccttaccagatttcaaccaggatttgaacaagaaacagaaagagagctagcacaagcatttaaaagaccccccagactttttaaagaagacaaacccttttacccctggttacctagatttacaccccttgtaaactttcacttaaattttaaaggctaggcctacacctttcacttagtggtgtatgtttatataagttcacaccccaaaaaaattgtaaaaaataaacataaaaaaaaaaaataaaaaattgcaaaaattcggcgctcgcgcg

SEQ ID NO: 4392 - protein, 674 aa, Gammatorquevirus sp.; identical to SEQ ID NO: 3163

SEQ ID NO: 4393 - protein, 117 aa, Gammatorquevirus sp.
MSRFIKNTNYNGDTKNQMWMSMISDGHDMFCGCTQPFAHLLDSIFPEGHKDRGLPIAYIIKRDLQQCLSGGDVEERDGMAAGTSAATLQLVKEEEEEPGTEGDIEDLIAAVENAEKR

SEQ ID NO: 4394 - protein, 114 aa, Gammatorquevirus sp.; identical to SEQ ID NO: 3165

SEQ ID NO: 4395 - DNA, 2598 bp, Gammatorquevirus sp.
aaattgcaaaaattcggcgctcgcgcgcgctgcgcggggcaattcgggctagggcagtctagcggaacgggcaagaaacttaaaacaatactttgttttacagatgcaaaacatttctgcaaaagacttctttattgaaactccatataaccaagatactaaaaatcaaatatggatgtctcaaattgctgattctcatgacaatatctgtgactgcaagcatccttttgctcacctgcttgcttctatttttcctcctggtcataaggacagggtgctgtccattaatcaaatacttgcaagagattatacagagaaatgcctttctggtggagacgcagaaagaagagatggtggggaaaattcaggtggcgccgccgcttcaacaaatataaaggcagaagaagaaaaagacttttcagaagaagaaatagaaaagctcctcgccgccgccgcagaagaaaatacaaggtaagaagaaaaaaaaaaaaaattgttattcaacaatggcaaccacagagtataagaaaatgtaaaattaaaggattttcatgtattgttatgggagcaaatggaactcaataccaatgctatacaaatcaagccaaagaatatgtacagcctaaagctccttcaggtggtggttttggttgtgaagttataaacttaaaatggttatatgatcaatatttgtgccataacaatatatggactgcctccaatgaatacaaagacttatgcagatatactgggggaaaaattacattttacagacatccatttgtagactttgttgtggcatatgacaatcaacctccatttgacttaaataaatacacctatccagaaatacaaccacaaaacatgctactcagaaaacataaaagactagtactcagtaccctgacaaaacctacaggaagatctaaagttacaattaaatttggaccaccaaagcaaatgataactaaatggttttttcaaaaagactttgctgatgccaacttaattaaaatttcagcagctgcagcaagctttagatttccctcaatatctcatggctcacaaggaccaatctttacagtatatgccttaaatacaacattttatcaaaatagtaattggctggattccagtcaagaaacacaaggctatgtaccttacacaggatgcaagtttccactacactttaaatacaaagaaagaggtacctataaagtttttacatatgacccaagaacatttaaacataaatacaatgaaagcataacctatgaaaacggaatatttagtccaaaagtattatttgctgaagctattgtacaaagcaacaccacaccacccccagactcagattggaagacactccaaggttacatagcctcactaccactaatacctcttagatataacccacaggaagatacaggacacggtaacagtgtttatttaacaagtttaataaaaggtcactatgacaaaccatctgttactgaagcatttcactttgacaatgtacctttatacacagcattttatggatatgctgactttgtccaacaagacacaaaagacaaaggggtactagacactcacatgtttgtagtaaaatgtgatgctttacatcctatatcacaaaatacaaaacaaatatactaccccattatagacatggactaccctgctggtaaactaccttgggatgaatatttgtcccaaaaaataaaaaacacctggtacccaactgcagaatggcaaaaaataaccatgaatagctttgtcacttcaggtccatacactccaaaatttgatcctggagatagagactccacatggcaattaaactataaatatcaatttttttttaagtggggaggccctgaagtcacagaccctgcagttgaagatcccaaaacaagaaaaaaatatcctgtgcccgatacagtcttccagacagtaccggtatccaacccacaaaaactccaaacagaaagtctcttacatgagtgggactttagaaggggatttgttacagcaacagctcttaaaagaatgtcagaaaacatccaaactgatacatctttctactctgatgactcagagtcaccccgaaaacgaagaaagaccacaaaagaacttacaaccacggagaaaaaacaagagaaaatcaaaaaatgtctcctctcactctgcgaagagcctacatgccaagaagaaacggaggacctacacaagctcatccagcagcagcagcagcagcagtacaagctcaaaagaaacctcctcaagctcctcacacacctgaaaaaaacacagagagtatcacaacttcaaacaggccttttggaataaaattaacaagatttaaaccaggatttgaatgggacacagaatgtgaactagcacaagcatttagaagaccccctagattgtttaaagaagacaccccattttacccctggttacccaaacctgaaccccttgtcaattttcaccttaattttaagttctaggccgacactgttcacttagcggagtctgtttatataagtttgcaccccaaaaaaattgtaaaaataaaaaaaaaaaaaaaataaa

SEQ ID NO: 4396 - protein, 677 aa, Gammatorquevirus sp.
MPFWWRRRKKRWWGKFRWRRRFNKYKGRRRKRLFRRRNRKAPRRRRRRKYKVRRKKKKIVIQQWQPQSIRKCKIKGFSCIVMGANGTQYQCYTNQAKEYVQPKAPSGGGFGCEVINLKWLYDQYLCHNNIWTASNEYKDLCRYTGGKITFYRHPFVDFVVAYDNQPPFDLNKYTYPEIQPQNMLLRKHKRLVLSTLTKPTGRSKVTIKFGPPKQMITKWFFQKDFADANLIKISAAAASFRFPSISHGSQGPIFTVYALNTTFYQNSNWLDSSQETQGYVPYTGCKFPLHFKYKERGTYKVFTYDPRTFKHKYNESITYENGIFSPKVLFAEAIVQSNTTPPPDSDWKTLQGYIASLPLIPLRYNPQEDTGHGNSVYLTSLIKGHYDKPSVTEAFHFDNVPLYTAFYGYADFVQQDTKDKGVLDTHMFVVKCDALHPISQNTKQIYYPIIDMDYPAGKLPWDEYLSQKIKNTWYPTAEWQKITMNSFVTSGPYTPKFDPGDRDSTWQLNYKYQFFFKWGGPEVTDPAVEDPKTRKKYPVPDTVFQTVPVSNPQKLQTESLLHEWDFRRGFVTATALKRMSENIQTDTSFYSDDSESPRKRRKTTKELTTTEKKQEKIKKCLLSLCEEPTCQEETEDLHKLIQQQQQQQYKLKRNLLKLLTHLKKTQRVSQLQTGLLE

SEQ ID NO: 4397 - protein, 123 aa, Gammatorquevirus sp.; identical to SEQ ID NO: 3756

SEQ ID NO: 4398 - protein, 112 aa, Gammatorquevirus sp.; identical to SEQ ID NO: 3757

SEQ ID NO: 4399 - DNA, 2597 bp, Betatorquevirus sp.
gggggctccgcccccttacacccccccgtagtctaggggcaattcgggctagttcagtctggcggaacgggcaagaaacttaaaatatattattttacagatgcaaatacaaccaccgattagaacctacaaacaaaccatttctgattggaaaaacttaattgttcacgttcacgacaatatctgcaaatgcaacaaaccattggaacatacaattgatacttgcaccaacaatccttctgaattaagattaaataaatctactaaacaacaactacaacaatgcctttctacaccagaagaagatggccccggagacgttatcgatggtttcgacgatggagagctagacgcccttttcgcccaagataccgaagaagatactgggtaagaaaatattctcgaaagagaaaactttataaaattactgaaaaacaatggcaaccaaaagttatcagaaaaactcatgttaagggcacataccccttatttctttgtacaaagcacagaattgcaaacaatatgatacaatacttagactctatagctccagaacactactatggtggaggaggattttcaataatgcaattttctttacaagctttatacgaagaatttgtaaaagccaaaaactggtggactcatacaaactgttttctaccaataataagatatatgggttgcagctttaaattttataaaaccgaatactatgactatgttgtacttattgaaagatgttatccacttgcttgtactgatgaaatgtacttatctactcaacctagtattatgatgcttacaaaaaaatgtatatttgtaccatgtaaacaaaacagcaaaggtaaaaaaccatatagaaaagtaaaagttaagccaccatcccaaatgactaccggatggcatttctcacaagacttagcaaacatgccactagtagtgttaaaaacatcagtatgcagtttcgacagatactacacagacagcacagctaaatctacaacaataggattcaaaacattaaacacaacaacatttaaatatcatgactggcaagacccaccaacaacaggctacaaaccacaacaaaacttatggttctatggagctgaaaacggttctcctacagacctagacaatacaccacttaactctcttatatatttagggggcacaggaccatacactaaaggcacaaaaatagcaaaccaatcaggacaactacaacaaaattacttttctacacctaaactatggggaaacatttttcatgatgactatttaacaggtacttcacctgtatttgtcactaacaaaccccctaaacacattgaagaaaattgggaacatcttaaaaataaaacaataaaacaaagtgaaatttttacagtaagaactataccactatggcaacaatgcagatataatccattcgcagacaaagcaacaaataacaaaatatggctagtatcaatacactcagatcacacagaatggaaacctatagataaccctttattacaaagaaatgatctaccactctggcttatagtatggggatggcaagactggcaaaaaaaaaaccaacaaacatcacaaccagacattaactatttaacagtaatatcatcaccctacataagcacatatccaaaactagactattatgtattaatagacgaatcaatgtttgaaggacactctacttatatagactcaattacagacagtgacaacaaacactggtacccaaaaaacagatttcaaatagaaactctaaacttaatagctaacacaggacctggaacagtaaaacttagagacaatcaggcagcagaggctcacatggtatatcgctttaattttaagcttggaggatgcccagcaccaatggaaaagatttgtgaccctagcagacaaaccaaatatcctattcccaataaccagcaacaaacaacttcgttgcagagtccagaaaacccaattcaaacctatctctacgacttcgacgaaaggaggggcctacttacagaaagagctacaaaaagaatcaaacaagatcacacatctgaaaaaactgttttgccatttacaggagcagcaacagacctccccatactcaaaacaacatcacaggaggaaagctcctcggaagaagaagaagaccaacaagcggagaagaaactactccagctccgaagaaagcagcagcgactcagagacagaatcctccagctcttagacatacaaaatatgtaataaaacatagcagtgtaaaaattgatatgtttggtgaaacacctatgcctaaccggagaatgactccggaagaatttgaacaagaattaattgtagctcgtatattccaacgacctccttgttactttataaaagatagacctacttatccttgggtgcctaaaccttctgatgaaaaattcatggtaaactttgacttaaacccccctcaataaacaaggcctgcaaactttcactctcggtgtccgtttatattagtttaaacttaaataaacatccaccacactccctaatacgcaggcgcagaagggggctccgcccccttacacccccaa

SEQ ID NO: 4400 - protein, 659 aa, Betatorquevirus sp.; identical to SEQ ID NO: 3379

SEQ ID NO: 4401 - protein, 110 aa, Betatorquevirus sp.; identical to SEQ ID NO: 3316

SEQ ID NO: 4402 - protein, 62 aa, Betatorquevirus sp.; identical to SEQ ID NO: 3317

SEQ ID NO: 4403 - DNA, 2597 bp, Betatorquevirus sp.
tccgcccccttgcacccccagggggctcaaatcaaggggcaattcgggctaggtcagtctggcggaacgggcaagaaacttaaaataatttatttttcagatgagcaaattctttgtggaaaaaccaactaacataaaaagagacaaccttgagatgataaatggctacgttcacatacatgatttaaaatgcaactgcaacacacctctacaacatattattaatcaactaattgaaaaagaacctgaattaacaaaatgccttactacaactactaccgaagatggccatggagacgccgtggatactatagaagacggagacctagaccgccttttcgcagaagattttaccgaagacgacgcagatacacggtaagaagaaaacttaaaaaaattattgttaaagaattccaacctagaacaattagaaaatgcataatcaaaggactacatccgttatttatggcaaaccatgcaagactaactaacaacttaacacaatggctatactcaatagctccaacacacttcccatctggaggtggattttcaataactcaatatactttaaatggactttatgaactgcatcaaaaactagaaaactggtggactaatacaaactgtaacttaccattagtaagatacttagggggttcatttaaactgtacagacaatgggaaacagactatgtattttcgtacttaacctgctttcctatgaaatcaactcatgctatgtatatgcaatgtcaacctagtatgttaatgatgacaaaaaactctgttcttgtaaaatgtatgaaagaatatagaggaaaaaaaaattataagttaattaaattcagaccaccagaacaaatgaccacaaaatggtattttcaacacgatctttgtcaagtacctttaatagtaactatgtgctctgcagcttcctttacaagatataacttaagtgcaacaggaatatctacaacaattggcttttactgtttaaatacaaaattatttatatatcataatttccaaaattatgccactacaggataccaacctaaaaacaatttttacttatacggcctaaaaaacggcaccactccaacagcacaagcaaaagcaaaagaattagtatacttaggagcaccaggaacatatcaagaaggcaatacaataatagcacctcacagtgaaacaaaaacctggcctgaagatatgaacaagtacttttcagattacaaacaatggggaaatccatttcaccctatgtggctcacacaaaatggaccccgagtactcacatcacaactctcacctaatcaatttaaaaccacattcaccaccccagaaacacaaatcgaggcacacatgcaagaatttacagatccactaatatatcaatgcagatactgccctaatgcagacacaggagaaggaaacaaaatttacttagttccaaacataagagaccaaagggactgggaaccattaaacaataaaaacctaatagcaacaggttttcctctatggactttagcttttggatggatagactggcaaaaacaacaaagagaagcacaacaaatagacattaactatataacagttatagtaacaaattttataaatccaaaattaccatactacgtagtattagacaaaaactttgtagatgacacaaatggaggacaatctccatacataggacaattaaatgatgcagacaaagcacattattatcctaaaggtacttttcaaatacaaactttaaatgaaataggaagctcaggaccaggtataataaaactacctggaacaaactcttgtgaagctcacttacaatataaatttcgttttaagtttggaggctgccttgcacctatggacaaagtatgcaacccctgtgatcaacccaaatatcccatacccaataactacaatgaaacaacttcgttacagaatccagcaacaccaccagaaacctttctctggcaatttgatgaaaggaggggtgaaattacacaaaaagctgcaaaacgcctcaaaacatgcacagacattaaagaacttattctcccaactgcaggaacaagcctccaactacctgcaacatcccaccaagaaacatcgacatcagaaagcgaaacgacatcggaagaagaggaccagacattactccagcagctccaacaccagcgaagaagacaaagaaagtacaaccagcgaatcctccacctactcaaattaatcaaaaattcaaaataataaatagccccataaacattgacttatttggggacaaacaaccaaaaaacagaagaatgactccacaagaaaaagaaacagacttgtttttagctaaaatgtttcgtagacctcctttagattatatactagataggcctacctatccttacatacctactcctcctcaaaaatacatggtaaactttgacctaaatccccctcaataaacaaggcctgcattaattcacttctggtgtccatttattaaagtaaaaacttaaataaacatccaccactctcccaatcaacgccggcgtagggggctccgcccccttacaaccccagggggc

SEQ ID NO: 4404 - protein, 668 aa, Betatorquevirus sp.; identical to SEQ ID NO: 3852

SEQ ID NO: 4405 - protein, 92 aa, Betatorquevirus sp.; identical to SEQ ID NO: 3853

SEQ ID NO: 4406 - protein, 50 aa, Betatorquevirus sp.; identical to SEQ ID NO: 3854

SEQ ID NO: 4407 - DNA, 2594 bp, Gammatorquevirus sp.
gcgcgcgcgagcgccgtcacgcgccggcgcttctaggggcaattcgggctagggcagtctagcggaacgggcaagaaacttaaaactatatttgttttacagatgtcacacattcaagctaaagatttctacaaaccaacaccatacaatcaggacacgaaaaatcaaatttggctttctcaaattggtgattctcacgacaatttctgccattgtaacactccctttgctcatctccttgctagtatctttcctgtgggtcacaaagaccgtactctcaccattgatcaaattctacttagagattataaacaactatgcctttctggtggagaagacgcaggagatactggtggggccgctacagaaataaaagaagagccagatggccaaaaagaagaagaagaagaccaagatatagaagaaagactagacgctttactcgcagaggccgcagaaaacgccgaaaggtaagaagaaaaagaaaagctattaacattaaacaatggcaacctgaaagtatagttaattgtaaaataaaaggctatacagccacaatagtaggagctcaaggaagacaaatgttttgctacaccgcccataaaactgaatctgtagcaccaaaaactccatatggaggaggctttgcatatgatgtattcagcttaaaatacctatttgaagaatgggtttttcataacaatatctggactgcttccaatttacttaaagaactttgcagatatctaagagtaagaatgactttttacagagacccaaaaacagactttattatagcctttgacatacagcctccatttaacttaaccaaatggacataccctgctctacatccacatcaaatgcttcttcaaaaacacaaaattattttactctctaaatcccataaccctaaaggtaaactatataaaagaatctctgttagaccccctaaacaaatgataaacaaatggtttttttctagttcattttcaccttacccacttatagctattaaagccacctcatgcaacctacaatactcctttataggctgctgcaatgaaaacccacaggtagggttttactacataaatcatagcttttttcaaaatgctaactggggtcaagcaagcacttcttactatctacccaaagaccacttacaaatcccacaagagtacaaagatgataaaggtaactttgacgttccagacacaaaccatgcaagtgaattttcaggtccatccgcacaatactacttaagtataagttatgcatatggatggtttaacaaaagagcaacacactccaaagtatatataggaaaagtagaagcaggcatacaaccatttaatgtagcattttataatccttatttagacaaaggagaccaaaatgaaatatacttaactagcattttaaccaaaacatgggacccaccaaaaacagacacatcactatacttatcaggacttccactatggatgggcctatatggctttgtttcatatgtaaaacaaattaaagataaagaaaatgtactagatgaatatgtacttgtaatgagatcacctgcaatatttccatactctcaaataggagcaggaaacttttacatgcccatatctcaaaactttatggatggctatggaccaagcagacagccaccaactgcaaaaatgaaaaagttatggtatccaacacttagacaccaaatagacatacttaacatatttgtaacagcaggaccttatatacaaaaatacaatgaccaaaaagaatctaactgggaactaaaatcaaaatattgtttttactttaagtggggaggcagttaccatacagaaaaagaagtacaagatccaaccaagcaggacacttatgatgtccccgataaattcacttcagcaatacaaattaccaacccagaaatacaaacaacagaaacaattatccacccttgggactacagacggggatatattaaagaatcagctattaaaagaatgtgcgaaaacttctcagttgattcagatatctcaacagatgcagaggagccacagaaaaagaaaccaaaaagagagggacctcagctatgcatccccggccaaaaggacccggaaacacaaaaatgtctccgctatctcttcgaagaaagtacatgccaagacccgaaaacacaagaagaaatgcaagccctcatcctccagcagcagcaccagcagttggagctcaaaagaaacctcctacacctcctcacagagttaaaacaacaacagaaaatgctacaactacaaacaggcatgttaccttaaccagatttaaagaaggcttcgaaagagaaacagaaaatgaacttgcttttgcctttttaagacctccaagactgtttaaagaagacaccccattttatccatggctaccaactcttgtaccccgtgtaaactttcacctaaactttaaattctaggcctgcactgttcacttagtggtgtatgtttaataaagttttcaccccaaaaaaattgtaaaaacaacaaaaaaaaaaaaaaaataaaaaattgcaaaaattcggcgctcgcgcgcgctgc

SEQ ID NO: 4408 - protein, 666 aa, Gammatorquevirus sp.
MPFWWRRRRRYWWGRYRNKRRARWPKRRRRRPRYRRKTRRFTRRGRRKRRKVRRKRKAINIKQWQPESIVNCKIKGYTATIVGAQGRQMFCYTAHKTESVAPKTPYGGGFAYDVFSLKYLFEEWVFHNNIWTASNLLKELCRYLRVRMTFYRDPKTDFIIAFDIQPPFNLTKWTYPALHPHQMLLQKHKIILLSKSHNPKGKLYKRISVRPPKQMINKWFFSSSFSPYPLIAIKATSCNLQYSFIGCCNENPQVGFYYINHSFFQNANWGQASTSYYLPKDHLQIPQEYKDDKGNFDVPDTNHASEFSGPSAQYYLSISYAYGWFNKRATHSKVYIGKVEAGIQPFNVAFYNPYLDKGDQNEIYLTSILTKTWDPPKTDTSLYLSGLPLWMGLYGFVSYVKQIKDKENVLDEYVLVMRSPAIFPYSQIGAGNFYMPISQNFMDGYGPSRQPPTAKMKKLWYPTLRHQIDILNIFVTAGPYIQKYNDQKESNWELKSKYCFYFKWGGSYHTEKEVQDPTKQDTYDVPDKFTSAIQITNPEIQTTETIIHPWDYRRGYIKESAIKRMCENFSVDSDISTDAEEPQKKKPKREGPQLCIPGQKDPETQKCLRYLFEESTCQDPKTQEEMQALILQQQHQQLELKRNLLHLLTELKQQQKMLQLQTGMLP

SEQ ID NO: 4409 - protein, 123 aa, Gammatorquevirus sp.
MSHIQAKDFYKPTPYNQDTKNQIWLSQIGDSHDNFCHCNTPFAHLLASIFPVGHKDRTLTIDQILLRDYKQLCLSGGEDAGDTGGAATEIKEEPDGQKEEEEDQDIEERLDALLAEAAENAER

SEQ ID NO: 4410 - protein, 124 aa, Gammatorquevirus sp.
MHPRPKGPGNTKMSPLSLRRKYMPRPENTRRNASPHPPAAAPAVGAQKKPPTPPHRVKTTTENATTTNRHVTLTRFKEGFERETENELAFAFLRPPRLFKEDTPFYPWLPTLVPRVNFHLNFKF

SEQ ID NO: 4411 - DNA, 2591 bp, Betatorquevirus sp.
cacccccaagggggctccgcccccttacacccccaggggcaattcgggctagatcagtctggcggaacgggcaagaaacttaaaatatatttattttatagatatgtcatctatttggaagaaaccaaatgtgacaccgagatatctagaacttggatggatgaatttagtacaccaaagccatgatcaaatttgccactgtgaagacgccgacctacactttatgattttaatcaacaaattcggaggagccaaaaaaccagaaccagaaataagaaacataaaatgcctccttaccggagatactaccaaagctactactacagaaaccgcagaagaagatatcggaatagattcaggagacctagaaaaacttttcgaagaagatattggagaaccaaataccgcagaagacgtccaaaggtaaaaaaattcagaaaaagaaaactaaaaaaactaatacttaaagtatttcaacctaaatctattaaaaaatgtaaaattaaaggaatgaaatgcctctttcaaggagccattgaaagagcaagcaataactatatacaatacatttatgatactgttaatgacagaagaccagggggtggaggatggagtttacaagtgtttagcctagaatcattatttgaagaatatgaacatttgttaaatgtatggactactagcaacgccgctttaccccttgttagatatagaggttgtaaatttagattttatcaaagtaatgatactgattatgttgtaaagtatgacaactgttggcctatggtagacacaaaatacacacacgcagacagcgcaccacaaagaatgctaagagcacaacataaaatagtagtacctagcagaaaatcacaaactagaaaaaaaccatataaaacagcattcataagacctccatcacaaatgacaaataactggtatttccaaagagacatttgcaaaacacctttagcaatgctaaccacaacagccgttgacttaagaaacccttttgcagcaccagaagcccgcagcaataatgttacattatactcattaaacacttttcaatttaaaaataccaactttcaacaaccagatccacaaaaaggataccactataaaacagaaggaacagaaaaatactacttatatgcagctcatacaaacagtagtacttggggagaactaataccactaacaaacaccaaagacaaccaaccaggacaacaacttaaagtacttcttaataataataataacaacaaactatcaaactggggaaatccatttcaccacacatacacaccagatgattttaaattctactttatgacaaaatcacctacagaactcaataaaacagatttaaacaagactttaacaacaacaggtataacagaatttacaagctatttatattaccaattaagatacaatccagaaaaagacaccggagacacaaacaaagtatacttagtatctaacttacatgaaacaaactggaatgaaccagaaaacccaaatttaattttagaaggctttccacttagtatactactttggggatgggtagactggcaaaaaaaattaaaacaagtatcaaacataaataaccaatacattgtagtaattaaaacaaaaatgttttcagaaaacttaaaccactacgtactgctagacaaagactttatagatggatttgaaccatactccccacacgatacaaacgacataatacctataacaccacaaaatcaacaacactggtacccaaaattttcatttcaagaacaatctattaacacactttgcctatcaggttcaggatgcccacgaccaccatggaatcactatctacaggccttatgtacatatacattctatttttcctttggaggatgtccaaaacaattagaaaaagtttatgatccttgtttacagtcaaaatggcccacagccgataacatcccttcaacaactgaaatcaagaatcctaacaccgcaccccaaacagaacttttctcctgggactgggaaggtgactttgttaaaacaacagctatacaacgaattaaagaatacacgccatcttatgaatcaatattctcatctacaggaacaaagtcagatgcaataccactcaaagaagcccaagaaagccaaacacaagcccaagaagaggaaaaggagttattcgtccagctccagcagctccgacacaagcggaaaatcctccagtaccaactaaacgaattattattaagaagcacaccacaacagtagaactatttccaaaaccaaaaaagaacagaacttttacaccttcagaaagagaattagaaagacaagtagctatagcattttgcagaccccaaagacaatacttttatgatacccctatatacccatggctaccacctgcaccaataatgccaaaagtaaactttgatataaactatgtagataaataaaaaattcaaggccaacaaatttcacttgtcggagtccatttatttaagttaaactttaataaacatccaccactctcccaaaattgttggcgtagcaaagggggctccgccccctta

SEQ ID NO: 4412 - protein, 666 aa, Betatorquevirus sp.
MPPYRRYYQSYYYRNRRRRYRNRFRRPRKTFRRRYWRTKYRRRRPKVKKFRKRKLKKLILKVFQPKSIKKCKIKGMKCLFQGAIERASNNYIQYIYDTVNDRRPGGGGWSLQVFSLESLFEEYEHLLNVWTTSNAALPLVRYRGCKFRFYQSNDTDYVVKYDNCWPMVDTKYTHADSAPQRMLRAQHKIVVPSRKSQTRKKPYKTAFIRPPSQMTNNWYFQRDICKTPLAMLTTTAVDLRNPFAAPEARSNNVTLYSLNTFQFKNTNFQQPDPQKGYHYKTEGTEKYYLYAAHTNSSTWGELIPLTNTKDNQPGQQLKVLLNNNNNNKLSNWGNPFHHTYTPDDFKFYFMTKSPTELNKTDLNKTLTTTGITEFTSYLYYQLRYNPEKDTGDTNKVYLVSNLHETNWNEPENPNLILEGFPLSILLWGWVDWQKKLKQVSNINNQYIVVIKTKMFSENLNHYVLLDKDFIDGFEPYSPHDTNDIIPITPQNQQHWYPKFSFQEQSINTLCLSGSGCPRPPWNHYLQALCTYTFYFSFGGCPKQLEKVYDPCLQSKWPTADNIPSTTEIKNPNTAPQTELFSWDWEGDFVKTTAIQRIKEYTPSYESIFSSTGTKSDAIPLKEAQESQTQAQEEEKELFVQLQQLRHKRKILQYQLNELLLRSTPQQ

SEQ ID NO: 4413 - protein, 122 aa, Betatorquevirus sp.; identical to SEQ ID NO: 2605

SEQ ID NO: 4414 - DNA, 2591 bp, Betatorquevirus sp.
cacccccaagggggctccgcccccttacacccccaggggcaattcgggctagatcagtctggcggaacgggcaagaaacttaaaatatatttattttatagatatgtcatctatttggaagaaaccaaatgtgacaccgagatatctagaacttggatggatgaatttagtacaccaaagccatgatcaaatttgccactgtgaagacgccgacctacactttatgattttaatcaacaaattcggaggagccaaaaaaccagaaccagaaataagaaacataaaatgcctccttaccggagatactaccaaagctactactacagaaaccgcagaagaagatatcggaatagattcaggagacctagaaaaacttttcgaagaagatattggagaaccaaataccgcagaagacgtccaaaggtaaaaaaattcagaaaaagaaaactaaaaaaactaatacttaaagtatttcaacctaaatctattaaaaaatgtaaaattaaaggaatgaaatgcctctttcaaggagccattgaaagagcaagcaataactatatacaatacatttatgatactgttaatgacagaagaccagggggtggaggatggagtttacaagtgtttagcctagaatcattatttgaagaatatgaacatttgttaaatgtatggactactagcaacgccgctttaccccttgttagatatagaggttgtaaatttagattttatcaaagtaatgatactgattatgttgtaaagtatgacaactgttggcctatggtagacacaaaatacacacacgcagacagcgcaccacaaagaatgctaagagcacaacataaaatagtagtacctagcagaaaatcacaaactagaaaaaaaccatataaaacagcattcataagacctccatcacaaatgacaaataactggtatttccaaagagacatttgcaaaacacctttagcaatgctaaccacaacagccgttgacttaagaaacccttttgcagcaccagaagcccgcagcaataatgttacattatactcattaaacacttttcaatttaaaaataccaactttcaacaaccagatccacaaaaaggataccactataaaacagaaggaacagaaaaatactacttatatgcagctcatacaaacagtagtacttggggagaactaataccactaacaaacaccaaagacaaccaaccaggacaacaacttaaagtacttcttaataataataataacaacaaactatcaaactggggaaatccatttcaccacacatacacaccagatgattttaaattctactttatgacaaaatcacctacagaactcaataaaacagatttaaacaagactttaacaacaacaggtataacagaatttacaagctatttatattaccaattaagatacaatccagaaaaagacaccggagacacaaacaaagtatacttagtatctaacttacatgaaacaaactggaatgaaccagaaaacccaaatttaattttagaaggctttccacttagtatactactttggggatgggtagactggcaaaaaaaattaaaacaagtatcaaacataaataaccaatacattgtagtaattaaaacaaaaatgttttcagaaaacttaaaccactacgtactgctagacaaagactttatagatggatttgaaccatactccccacacgatacaaacgacataatacctataacaccacaaaatcaacaacactggtacccaaaattttcatttcaagaacaatctattaacacactttgcctatcaggttcaggatgcccacgaccaccatggaatcactatctacaggccttatgtacatatacattctatttttcctttggaggatgtccaaaacaattagaaaaagtttatgatccttgtttacagtcaaaatggcccacagccgataacatcccttcaacaactgaaatcaagaatcctaacaccgcaccacaaacagaacttttctcctgggactgggaaggtgactttgttaaaacaacagctatacaacgaattaaagaatacacgccatcttatgaatcaatattctcatctacaggaacaaagtcagatgcaataccactcaaagaagcccaagaaagccaaacacaagcccaagaagaggaaaaggagttattcgtccagctccagcagctccgacacaagcggaaaatcctccagtaccaactaaacgaattattattaagaagcacaccacaacagtagaactatttccaaaaccaaaaaagaacagaacttttacaccttcagaaagagaattagaaagacaagtagctatagcattttgcagaccccaaagacaatacttttatgatacccctatatacccatggctaccacctgcaccaataatgccaaaagtaaactttgatataaactatgtagataaataaaaaattcaaggccaacaaatttcacttgtcggagtccatttatttaagttaaactttaataaacatccaccactctcccaaaattgttggcgtagcaaagggggctccgccccctta

SEQ ID NO: 4415 - protein, 666 aa, Betatorquevirus sp.; identical to SEQ ID NO: 4412

SEQ ID NO: 4416 - protein, 122 aa, Betatorquevirus sp.; identical to SEQ ID NO: 2605

SEQ ID NO: 4417 - DNA, 2591 bp, Betatorquevirus sp.
gggggggggggggggggggggggggggggggtctaggggcaattcgggctagttcagtctggcggaacgggcaagaaacttaaaactaattttattttacagatgagcaaatttctacaaccatgcctatactctggaagagcacttaacaaccaattactaaattcaattatttctaaccacgacctttgctgtggctgtactgaacccattaaacatttaaaatatctgcttgaatcaacatgccattcttccgaaaaaacttcagaagatactataaatacagaaaaaactactacaaacgacgaccctggtttcgacgccggagacctcgaaagactgttcaaactaagcgacgacgacgaccggtaagaaaaaaattttttaaaaaaaaaaaactaagaaaaattaaactacaacaatggcaaccaagccatattaaaaaatgcaaaattaaaggaacaatacagctttttcaagctggaaaaggcagattcagccataactaccaactatataaagaaagctttgtacctccccaccaacctggtggtggcggatggtcatatataattttaagccttggaaacttatttacagaaaaccaaagactacaaaactggtggactaaatccaacaaaggactacctttatgtagatttaatggtgttaaatttaaattttatcgccaacaatttactgattatattgtaacatggtcaaatgaatatcctatggaagttggtaaatttcactatcctagcatacatccacaaagaatgctttcatataatcatagaattatagtacctagctacaactctatgcctcattggaaaaaaccttttaaatcttgctttataagaccacctaaagaaatgacagacaaatggtattttcaaaaccactttcaaagatttccactatgtatgttagcaactacagcatgtagcctaaatagcttatacgtagctacaaatgtactaaataacaactgcaccattaaatgtttaaacacaaactttttccaacgaaaatcttttcaatttccagcagtaactacaggatactttccaaaaccaaatgtatatgcttatgcgtctcctaatggaggctatgctataacagacatacaaatatctgaaatgacatacttaggacaaacaggtccttatgacgaaggagaagaatttggtaactacaaactagaaaactacacaaaaccacattggggaaacatttttcattacaattacctaaacgaacaaagacaaataatcatgacacaatatcaactctcacattggtttcaatcaaacccacctggcacagcactacccagaaagataaatcaaggagaggcccagtttttcaccgaccccctttattatgactgccgatataatcccactaaagacacaggcataggtaatgaggcatactgggtatctaacttaatagaagaagatggatggaacacacaaaaagatccagatcttaaaatatcaggatttcctctatggatattactgtggggatggtatgattggactagaaaacttaacaaaataaaaaatgttgacaatgattacatactggttgtaaaaacacaatttatagaaccaaaacttcccttttatgtatttttaagcgatgcattttgtaacggacaagccccttacgggcaacctttaaacacttggtcagaatatgaaagaaaccactggtaccctagatatagatttcaagaagaagctatagaaactttacttatgactggtacaggtgtatgtagagctgaaaatgtacagcaaatacaagctcattgttactataaatttttctttaagtggggtggaaacccagcaaccttcgaaacagttatcgatccaacaacacaaccttactaccctgtacccggtcaactcttacaaacaactgagatcgtggatccaaatgaaagccccctcaacatgttctatgacttcgacgtccgcagacacctcattaaacaatcagctattaacagaattacagacttctcaaactttgaaaaccttatgttcacagatggaaacccacctacaatcccagagacgaccacacaaaaaactgcacaaacgaaaacaaccgaggaaaaagagaaagaggagacactcaagcagctccagcagtacagacaactcaacatacaactcctgcagcgattccagcaactcaaacaattagtggaaaatacataatacataaatgtaaagaaaatgttatgctttttccaaaaactactgtaaaaccgcgccgctttaaaccctatgaaatggaaactgaaaaatggctagcatcactgtttaaaagacctgttagaacctttattactgatactcctttctacccctatttacctcctgaacccaaagttaactttgacctaaactatactcactaaataaaaattcaacgccaacaactttcacttagtggtgtcagtttattaaagttataacttatataaacatccaccgcctccctaaaattcaggcgccaaaagggggctccgcccccttacacccccggggggggggggggggggg

SEQ ID NO: 4418 - protein, 666 aa, Betatorquevirus sp.
MPFFRKNFRRYYKYRKNYYKRRPWFRRRRPRKTVQTKRRRRPVRKKFFKKKKLRKIKLQQWQPSHIKKCKIKGTIQLFQAGKGRFSHNYQLYKESFVPPHQPGGGGWSYIILSLGNLFTENQRLQNWWTKSNKGLPLCRFNGVKFKFYRQQFTDYIVTWSNEYPMEVGKFHYPSIHPQRMLSYNHRIIVPSYNSMPHWKKPFKSCFIRPPKEMTDKWYFQNHFQRFPLCMLATTACSLNSLYVATNVLNNNCTIKCLNTNFFQRKSFQFPAVTTGYFPKPNVYAYASPNGGYAITDIQISEMTYLGQTGPYDEGEEFGNYKLENYTKPHWGNIFHYNYLNEQRQIIMTQYQLSHWFQSNPPGTALPRKINQGEAQFFTDPLYYDCRYNPTKDTGIGNEAYWVSNLIEEDGWNTQKDPDLKISGFPLWILLWGWYDWTRKLNKIKNVDNDYILVVKTQFIEPKLPFYVFLSDAFCNGQAPYGQPLNTWSEYERNHWYPRYRFQEEAIETLLMTGTGVCRAENVQQIQAHCYYKFFFKWGGNPATFETVIDPTTQPYYPVPGQLLQTTEIVDPNESPLNMFYDFDVRRHLIKQSAINRITDFSNFENLMFTDGNPPTIPETTTQKTAQTKTTEEKEKEETLKQLQQYRQLNIQLLQRFQQLKQLVENT

SEQ ID NO: 4419 - protein, 89 aa, Betatorquevirus sp.
MSKFLQPCLYSGRALNNQLLNSIISNHDLCCGCTEPIKHLKYLLESTCHSSEKTSEDTINTEKTTTNDDPGFDAGDLERLFKLSDDDDR

SEQ ID NO: 4420 - protein, 59 aa, Betatorquevirus sp.
MLFPKTTVKPRRFKPYEMETEKWLASLFKRPVRTFITDTPFYPYLPPEPKVNFDLNYTH

SEQ ID NO: 4421 - DNA, 2590 bp, Gammatorquevirus sp.
cgggagcccgaggtgagtgaaaccaccgaggtctaggggcaactcgggctagggcagtctagcggaacgggcaagaaacttaaaatatatgtatgttttacagatgcaaaatctctctgtccaagacttcttcaaagaaactcactataacaaagatacaaaaaaccaactatggatgtccaccattgcagacttccatgatgctatctgtgactgctttcatccttttgctcatttgcttgctagtatttttcctcctggtcatcaagatcgcgatctcaccattaatcaaattttgcaaagagactaccaagaaacatgccattctggtggggcaggaggagaaaattctggtggaaaaataactacagaaaaagaacctacagaaagagaagaaaaagatggccaagaagaagaagatacactagacgccctactcgccgccgccgcagaagaagaagaaggcaaaaggtaagaaaaaaaaaacaaactcttaccttaaaagtctggcaaccagatacaattagaaaatgcaagattaaagggactggcattcatatagtgggtggtaatggaactcaatacagatgttttacagccaacagatttgactggacacccccactaatgccaggtgggggagggtttggagtagaaaaatttaccctacaacacctatacaatgaacatttacttagcaacaacatatggacacaaagtaataaaatgttagacctatgtagatacactggatgtagaattaaattttacagacatgaaaccatagactttattgccagctacaatagaaatttaccttttaacttagaaaagtatacatatgcagatgcacacccaaattccttactacacagcagacacaaaaaaattatacccagccttaaaactaaaaggcatggtaaaagatatgttaccatgaaaatcaagccacctaaacctgtatctaacaagtggttttttcaagaaactttttccaacactccattatttaaattaacaacatctattatagaccttagatacccacacatcagtcaaataggcagtaatgaacttgtatcattattttgccttaatacagacttctatgccaatgcaggctggggtaatgcgcacgcacctccaacacactccacatggtatgtaccatactacaaaatagcaaacataactactgtaattattaaaggtaaagatcaacaaataactgtagataacacaacctacaagaacagcatatcatatgaaacaggttattttcagcctaaactactacaagcagaaaaaattaaaaacacttctatgcaaaatattccaatacaagctagcagatacaaccctactaaagatgatggtgtaggcaacaagttgtggctagtaaatgtagttaattactcatttttaccaccaaaaacagatgcagacctatacattgaaaacttaccactatggcaattagtgtgggggtttacagactttgtaaaacaaacaaaaaaagacagcacatttttaaacacatactatgcagcatttgaaagcaaatacttagaaccagctgttagtaccagtaaaatttatatacctatagacatgtcatttatacagggcaaaggcccatatgactcatatgtgagcaactacagaaaacaaaactggtaccccacactaaatgcacaattaaaaacattaaattccatagcacaaagtggaccttttgtaccaaaactagacaacatttttttaagttcttgggaactatacagtaattacaccttttactttaagtttggaggttcagaactaccagaaccagacacagtcaatcctcaagaccaaggtacctatgttatacccactaacatcaaaaaagcaatacaagtcagtaacccgcaaaaacaaagcccctacacaaccctacacagttgggactacagacgaggcctcattacaagctcagcttttaaaagaatgtgcgagaaccaaacaactgatacagaatttgaacctgatacagaaacagtgccaaaaaagaaaaagaaagtccaacatggaaatcaactccaaagagcagaagaagaggaggaagagatccagaactgtctcctcagtctctgcgaagaaaataccttccaagaaaccccgcaaacaaatctcctcgagctcatccagcagcagcagcagcagcagcagaagctcaaacacaacctcctcaaactcctctcagacctcaagttaaagcagagaagtatacaactacaaacaggcctcatacattaacaccattcagacctggttttgaatgggaaactgaaaaacagttatcaatcatattccatagacccatgagacacttccaagaagaccctccattttatccatggcttccacctgcaccccgagtttgttttaaccttaattacagaggctaggccaacaatgtacacttagtggtgtttgtttaataaagttttacccccaaaaaaaataaaaaaaaaaaaaaaaaaaaaaaccgctagacggtgcagggaccggatcgagcgcagcgaggaggtccccggctgcccatggg

SEQ ID NO: 4422 - protein, 659 aa, Gammatorquevirus sp.
MPFWWGRRRKFWWKNNYRKRTYRKRRKRWPRRRRYTRRPTRRRRRRRRRQKVRKKKQTLTLKVWQPDTIRKCKIKGTGIHIVGGNGTQYRCFTANRFDWTPPLMPGGGGFGVEKFTLQHLYNEHLLSNNIWTQSNKMLDLCRYTGCRIKFYRHETIDFIASYNRNLPFNLEKYTYADAHPNSLLHSRHKKIIPSLKTKRHGKRYVTMKIKPPKPVSNKWFFQETFSNTPLFKLTTSIIDLRYPHISQIGSNELVSLFCLNTDFYANAGWGNAHAPPTHSTWYVPYYKIANITTVIIKGKDQQITVDNTTYKNSISYETGYFQPKLLQAEKIKNTSMQNIPIQASRYNPTKDDGVGNKLWLVNVVNYSFLPPKTDADLYIENLPLWQLVWGFTDFVKQTKKDSTFLNTYYAAFESKYLEPAVSTSKIYIPIDMSFIQGKGPYDSYVSNYRKQNWYPTLNAQLKTLNSIAQSGPFVPKLDNIFLSSWELYSNYTFYFKFGGSELPEPDTVNPQDQGTYVIPTNIKKAIQVSNPQKQSPYTTLHSWDYRRGLITSSAFKRMCENQTTDTEFEPDTETVPKKKKKVQHGNQLQRAEEEEEEIQNCLLSLCEENTFQETPQTNLLELIQQQQQQQQKLKHNLLKLLSDLKLKQRSIQLQTGLIH

SEQ ID NO: 4423 - protein, 128 aa, Gammatorquevirus sp.
MYVLQMQNLSVQDFFKETHYNKDTKNQLWMSTIADFHDAICDCFHPFAHLLASIFPPGHQDRDLTINQILQRDYQETCHSGGAGGENSGGKITTEKEPTEREEKDGQEEEDTLDALLAAAAEEEEGKR

SEQ ID NO: 4424 - protein, 110 aa, Gammatorquevirus sp.
LSPQSLRRKYLPRNPANKSPRAHPAAAAAAAEAQTQPPQTPLRPQVKAEKYTTTNRPHTLTPFRPGFEWETEKQLSIIFHRPMRHFQEDPPFYPWLPPAPRVCFNLNYRG

SEQ ID NO: 4425 - DNA, 2590 bp, Betatorquevirus sp.
cccccgctgaaggtgagtgaaaccaccgaaatcaaggggcaattcgggctaattcagtctggcggaccgggcaagattcttaatataacatattttttacagatgagcaaatttctaaaacccacctactacaatggccgcgctgcagaacaacactgggtaggattggtattttcaacccatgataccatttgcagctgcaactcagttattgatcacctaaattaccttattgaccagcaaaaatgccaccattctacaaaagaaattactactaccgcaactactggggctacagaagaagaagaaatgcctttcgacgaaaaagatttagaggcacttttcgcagaaaaccaagaagacaccgccgggtaagaaaaagaaaattttctaaaaaattttctaaaaaacttaaaaaactaagactagtacaatggcaacctagctacataagaaaatgtactataaaaggattcttactattatttgaagcgggacacggacgctttgcaaataacttttgttgttataaagaatcatatactccacataatcaacccggaggcggagggtggagcattcaacaaattaacttgggaaacttatttacacaaaaccaatactttatgaacttttggagtcacacaaacaatggactcaacttatgcagatatacaggatgcagaatagacctctacagacaaccagacatagattacatatttacttactacacagaacagccacaaaatgcaggcaaatactggtacccgagctttcacccaatgaaaatgctaacatataaaaataaaattacagtaccaagcttaaaaacacaaccaaacaaaaagaaaattaaaaaaaccatacatttaaaaccaccaaaactgctaaaaaaccaatggtattttcaaacacacttagctaactacccacttttaagctttgcaacaactgcagttagtttaaaccacatgtttctcagtagctcttcaaacaacatgaacataacaataccaacacttaacacatcattttttatgaaatctgcctttcaatacgcaagcagagactttggctacataccaaaagataacacatacatatacggactccgaaacggcgaccctgttttatctaataattacagacacgaagtaatttacttaggtagctcatacaatgacacaggcatcccagtgggatccaacggatggggagacaaatacacaaaacaacaatggggaaacgttttcaacttcaactacttccaaaacataagaacaacattcataacccacataccaccttcagatctactaagtaaagacaaaatgaaagaaaaactaccaacaactggcttaacagttaaatttgaaccatactactataatgaacgttataacccttacaaagacaagggtgacggaaacatggcctactggctctcagtttccgatgccaccaaaaacaactggcaaccacccgcagaccaagacctcataatatcaggctttcctttctggttaatgctctggggatttgaagactatactaaaaaatgcggcaaagtaacaaactttgacgataacatgatactggttttaaaaacaaaatacatatcaggtacacaccaatactatgtaccactaagtcaaagctttatagatggacaagcaccatatcacaatgacgctacagaaatagcaccaaatgacttatcacactggtttcctaaatggaaattccaaaaagaaaccatagatgcacttttaatgtcaggcccaggaacatgtaaagcagaaggcctacaatctatacaaggtttcatgaaatattattttttctttaagtggggaggcaactcatctgaacttgaaactatcagcgacccagtctcccaaccaattactcccagtccccctggacagttcctacaaaatgaaattactaacccacaaaccagcatcgaaaacatgctctacaaatgggacattaggagacacattcttacacaagcggctacagaaagaattaaagaatgcgaaactgatgagcactctttgttctcagatggagtacaaacttcaacagacatcccatggccacaaaaaacaacaccacaagagaaaacgaccccgcaagaagaaaagcaagcactactcctccagctccaacagctcgagcaattcaacaaagaactccagcaacgattcctcagactcagacaactaacaatggaaacataacctttactttagtaaaaaaagcttacctattcccccctaaacctaccaaactaacaccactaacagggatggattgggaagatgagttatacatttgcaaatggctaaaaagacctatgcgtagatataaagaggacccccctttttacccttactgtgttcctgaacctaaagtaaactttgaacttgtaaaaggatttaataaaggcctgcattaattcacttctggtgtctgttcctttaagtaaaaccttactaaaccaacaccgcctccctaatacgcaggcgcacaagggggctccgcccccttaaacccccgggggggaaaccccccctaagcc

SEQ ID NO: 4426 - protein, 667 aa, Betatorquevirus sp.
MPPFYKRNYYYRNYWGYRRRRNAFRRKRFRGTFRRKPRRHRRVRKRKFSKKFSKKLKKLRLVQWQPSYIRKCTIKGFLLLFEAGHGRFANNFCCYKESYTPHNQPGGGGWSIQQINLGNLFTQNQYFMNFWSHTNNGLNLCRYTGCRIDLYRQPDIDYIFTYYTEQPQNAGKYWYPSFHPMKMLTYKNKITVPSLKTQPNKKKIKKTIHLKPPKLLKNQWYFQTHLANYPLLSFATTAVSLNHMFLSSSSNNMNITIPTLNTSFFMKSAFQYASRDFGYIPKDNTYIYGLRNGDPVLSNNYRHEVIYLGSSYNDTGIPVGSNGWGDKYTKQQWGNVFNFNYFQNIRTTFITHIPPSDLLSKDKMKEKLPTTGLTVKFEPYYYNERYNPYKDKGDGNMAYWLSVSDATKNNWQPPADQDLIISGFPFWLMLWGFEDYTKKCGKVTNFDDNMILVLKTKYISGTHQYYVPLSQSFIDGQAPYHNDATEIAPNDLSHWFPKWKFQKETIDALLMSGPGTCKAEGLQSIQGFMKYYFFFKWGGNSSELETISDPVSQPITPSPPGQFLQNEITNPQTSIENMLYKWDIRRHILTQAATERIKECETDEHSLFSDGVQTSTDIPWPQKTTPQEKTTPQEEKQALLLQLQQLEQFNKELQQRFLRLRQLTMET

SEQ ID NO: 4427 - protein, 122 aa, Betatorquevirus sp.
LKVSETTEIKGQFGLIQSGGPGKILNITYFLQMSKFLKPTYYNGRAAEQHWVGLVFSTHDTICSCNSVIDHLNYLIDQQKCHHSTKEITTTATTGATEEEEMPFDEKDLEALFAENQEDTAG

SEQ ID NO: 4428 - protein, 121 aa, Betatorquevirus sp.
MATKNNTTRENDPARRKASTTPPAPTARAIQQRTPATIPQTQTTNNGNITFTLVKKAYLFPPKPTKLTPLTGMDWEDELYICKWLKRPMRRYKEDPPFYPYCVPEPKVNFELVKGFNKGLH

SEQ ID NO: 4429 - DNA, 2588 bp, Betatorquevirus sp.
tagatcagtctggcggaacgggcaagaaacttaaaatattttattttacagatgagtaaactctacaaacctctaaatatcagcttaaaccacaaaaacctacaatggatgaatgctcaagttgctcttcatgatatgcactgccaatgtgaccagccactaagacacatcattgtacaaataatagaaaaagaaccgaatataaaattcaacaaagaagaatctactaaaattcaaaaatgccttactactggagaagaagacgatggcgacgttcttggcgccggagacctagatacccttttcgcagaagacgtttttggagaagaagacaacgatgggtaagaaaacccaaaagaaaacttaaaaaaataactattaaacaatggcaaccaagtactattagaaaactaactgttaaaggacaataccccctttttgccggaacctcagacagaattgccaatgactatactgcttatgtagatgaaattgctccaaaagatgttccaggcgggggactatacagtattacagtatttactttacaaggattatatgaactgcatcaaaagggtagaaattggtggacacaatctaactgtgacttgcctttaattagatactcgggatgtactataaaactttactttaacccttcagcagactatataactactataattaactgtggagaacttaaagctaacttagaaatgtttcaatctacacaaccttctattttactacttaacaaaaaaaaaagagtaatgctatgtagaaactataaaagaaaacgcagaccatataaaaaatggtttatacatcctcctgcattgttatataacaaatggtattttcaaaaagaactaagtacatacccactattaatgataataactgcggccggtagctttgacagatactatcaaggagctaattcaatttcagaaacaataggattccaatctttaaacacagacttttttgtaatacatagctggaaatttccatcaacattaccatacagaccaaatgacagattttacatgtttggcataggaggtactacaacatatgacaacgccacacctcaacaattaatattactagggaatcctacagataacagaaaaggatcaatgataggaacagctactcccactacctggacacaaaaagttacaacatatttagctaaatcaacaaactggggtaatccatttcaccctgattggctacatgccgatgaaggagaaggccttatatgccttttagaagtcactggaacaaccaccctagaagaaaaactaaaattactaaatgcaacatctccattaaaatcacaaggctttattgaaccaacaaaaccatttacagtacattgcagatataatccacaggcagacatgggaagaaactccatatttgtaaccagaataacaggagacaacacaccatggcacaaaccaaacgatgaacacctattaacacaaggcctaccactatggctactacactggggatggctagactacttaagaaagtcaggaacaccacaaagactagatacagactacattcatgtaatagtgtcagaccacataagtccaaaagaattatcctactatgtacctatagattatgactttttaaatggaaaaagtccttattctgatcacataaaaccctatgacgaacaaaactggcatccaaaaattaactttcaacaaaaaagcatagcacatatatgccaaagtggaccactaacaattaaattaccacaagatataagtgctactgctcactttagttataaatttcattttaagctcggaggatgcccaccagcaatggacaaagtttgtgaaccagctaaacaaccctcctatcctcaacccggtaacctcctatcatcaattatattgcagaacccacaaactccaattgaatacttcctcagctcctttgatcaaagaagggaactccttacagaaagagctgcaaagcgcctcaaaaaagaccaagagtttaaagaaactgttcttaaacctacaggacaaactctcctcgacgtccaaatgtcatcccctcaaacaacatcgtcagaggacacatcgtcggaggaagaaagcgaggaggagacacagcagcagctccacagacaccagcgaaaacacagaaaactccagcgaggaattctcaagctcctgaacctactccaacattcaaaatagttaatagcacaataaaagtaaacctattccctgaaagtaaacagaaaaatagacgccttacggctagagaaagaagtgacgatatacaagatgctaaaatatggggtagatatgtaaaaaattatttactggaatctcatttttataaagatgtacctattacacccttaattccccgtataaactttgaccttggttacaaacaataaagcctgcatactttcacacctcggtgtccatttatttaagtttaaacctatataaacatccaccacactccctaatacgcaggcgcaaaagggggctccgcccccttaaaccccaagggggctccgcccccttaaaccccca

SEQ ID NO: 4430 - protein, 665 aa, Betatorquevirus sp.
MPYYWRRRRWRRSWRRRPRYPFRRRRFWRRRQRWVRKPKRKLKKITIKQWQPSTIRKLTVKGQYPLFAGTSDRIANDYTAYVDEIAPKDVPGGGLYSITVFTLQGLYELHQKGRNWWTQSNCDLPLIRYSGCTIKLYFNPSADYITTIINCGELKANLEMFQSTQPSILLLNKKKRVMLCRNYKRKRRPYKKWFIHPPALLYNKWYFQKELSTYPLLMIITAAGSFDRYYQGANSISETIGFQSLNTDFFVIHSWKFPSTLPYRPNDRFYMFGIGGTTTYDNATPQQLILLGNPTDNRKGSMIGTATPTTWTQKVTTYLAKSTNWGNPFHPDWLHADEGEGLICLLEVTGTTTLEEKLKLLNATSPLKSQGFIEPTKPFTVHCRYNPQADMGRNSIFVTRITGDNTPWHKPNDEHLLTQGLPLWLLHWGWLDYLRKSGTPQRLDTDYIHVIVSDHISPKELSYYVPIDYDFLNGKSPYSDHIKPYDEQNWHPKINFQQKSIAHICQSGPLTIKLPQDISATAHFSYKFHFKLGGCPPAMDKVCEPAKQPSYPQPGNLLSSIILQNPQTPIEYFLSSFDQRRELLTERAAKRLKKDQEFKETVLKPTGQTLLDVQMSSPQTTSSEDTSSEEESEEETQQQLHRHQRKHRKLQRGILKLLNLLQHSK

SEQ ID NO: 4431 - protein, 111 aa, Betatorquevirus sp.; identical to SEQ ID NO: 358

SEQ ID NO: 4432 - DNA, 2587 bp, Gammatorquevirus sp.
cgggagcccgaggtgagtgcaaccaccgaggtctaggggcaactcgggctagggcagtctagcggaacgggcaagaaacttaaaatatattttattttacagatgcaaaacatctccagcaaagatttttttgtaccaacaccatacaaccaggaaacgaaaacacaaatatggatgtctcaaattgctgactctcacgataatatctgcaattgcagtcatccatttgctcaccttttgtcttccatatttcctcctggccaccaagatagggacctcactattaatcaaatactcgcaagggattaccaggataaatgcctttctggtggaagcgccgccggaggccatggtatggcagattcaggtaccggaggcggtttcaaaccaaaagaagaagatacagaagaagatttaccaggagaagaaatagaccaattactcgccgccgccgccgcaggcgaagacaccacaaggtaagaagaaaaaaaactaaaattcctgtactgcagtggcaaccagacagtattagaaaatgccacataaaaggacaaggtactctagtagttggagcagaaggaactcaaatgttctgctacacaaaagacaaatttaaatatgtacctcctaaaactccttatggtggaggctttggagcagaaaaatttactttagcctatctgtacgaagaatattctttccacaataatatatggactgctagtaacatgtacaaggacctatgcagatacttatactgcaaaattattttttttagacatccagacacagactttgtaattaactacagcagacaaccaccatgggaactaaataaatacacatacccaagttgtcacccacaacaaatgctactagacaaacacaaagttgttatatttagtcaggctagtaaaccccatggaaaatataagtacacactcaaaataaaaccaccaaaacaactaatcacaaaatggttttttgcaaagcccttttcaaactatggcttactatttctaaaaggctcatccatgaatttaagatacagttacttaagtgcctctaatgaaaatatgctagttaacataagttctttaaatcctagttggtatataaatacagactgggcaagagctaggccagacacacaagcttacctaccacaaactaatatgaaaagaacactatcttacaaaaacaaaacaagaagtggaagtgaaacagtcacagacatgaaacaaactgcattcacttcatatgatgtgagtgtaagctatccagacggatggtttaataaaaactttcttagagcaatagaattagattcacccagaggtaccaaactagctcaactacctttaaactatggtagatacaaccccactagagataaaggccaaggtaacaaaatatatattattagtacaatagcagatgggtggggaccacctaccacagacaaaaatgtacttatagaagatttaccactttggcttggcttatatggctatgtttcttacttagaaaccattaaaccacctgattggctaaaatcatcagtaatagtactagtatctgatgctatttaccactcgggaacaccagttccttccactaaatgggtacccatagactcagactatatagatggcaataaaccatatgaccaatacataacaactacagaaaaaaacagatggtatccaagttacaaatggcaattaaaaactttaaatgctattgtagaatgtggcccatatatacaacaatatagtgaagaaaaaaacagtacatgggaactaaaataccattataatttttactttaagtggggtggaccacaagttccaggacaagacattaaaaatccacaagaccttaacacctatgatgtacccgataagttcacaggcagaatacaaattaccaacccagccaaacaagctccagaaacaattttacagccgtgggactacagaaggggacagcttaaagaaacagctcttaaaagaatgctccaacacctcgaaactgattcagagtttgaatattttacagaagagagtccaaaaaagaaaaaacaaagacttggagcagccctcagagatccccaagaagcacagaaagaaacccaagcttgtctcctctcactctgcgaagaaaatacatgccaagacccacaagagaagacactcgagcagctcatccaccagcagcagcaacagcagcagcacctcaaattcaacatcatcaaactcctcctagacctaaaggaacaacagagaatgttacaactacagacaggaatattagagtaaccctaacaagatttaaatcaggatttgaaagagacacagaaaatgaattagctagagcatttttaagaccccctagactatttaaagaagacagcccattctatccctggctaccccaacctgtaccccttgtaaactttcaccttaattacaaattctaggcctacaatgttcacttagtggtgtatgtttaataaagtttgcaccccaaaaaaaatataaaaaaaaaaaaaaaaaaaaataaaaaattgcaggctgcccatggg

SEQ ID NO: 4433 - protein, 667 aa, Gammatorquevirus sp.
MPFWWKRRRRPWYGRFRYRRRFQTKRRRYRRRFTRRRNRPITRRRRRRRRHHKVRRKKTKIPVLQWQPDSIRKCHIKGQGTLVVGAEGTQMFCYTKDKFKYVPPKTPYGGGFGAEKFTLAYLYEEYSFHNNIWTASNMYKDLCRYLYCKIIFFRHPDTDFVINYSRQPPWELNKYTYPSCHPQQMLLDKHKVVIFSQASKPHGKYKYTLKIKPPKQLITKWFFAKPFSNYGLLFLKGSSMNLRYSYLSASNENMLVNISSLNPSWYINTDWARARPDTQAYLPQTNMKRTLSYKNKTRSGSETVTDMKQTAFTSYDVSVSYPDGWFNKNFLRAIELDSPRGTKLAQLPLNYGRYNPTRDKGQGNKIYIISTIADGWGPPTTDKNVLIEDLPLWLGLYGYVSYLETIKPPDWLKSSVIVLVSDAIYHSGTPVPSTKWVPIDSDYIDGNKPYDQYITTTEKNRWYPSYKWQLKTLNAIVECGPYIQQYSEEKNSTWELKYHYNFYFKWGGPQVPGQDIKNPQDLNTYDVPDKFTGRIQITNPAKQAPETILQPWDYRRGQLKETALKRMLQHLETDSEFEYFTEESPKKKKQRLGAALRDPQEAQKETQACLLSLCEENTCQDPQEKTLEQLIHQQQQQQQHLKFNIIKLLLDLKEQQRMLQLQTGILE

SEQ ID NO: 4434 - protein, 125 aa, Gammatorquevirus sp.
MQNISSKDFFVPTPYNQETKTQIWMSQIADSHDNICNCSHPFAHLLSSIFPPGHQDRDLTINQILARDYQDKCLSGGSAAGGHGMADSGTGGGFKPKEEDTEEDLPGEEIDQLLAAAAAGEDTTR

SEQ ID NO: 4435 - protein, 113 aa, Gammatorquevirus sp.; identical to SEQ ID NO: 4148

SEQ ID NO: 4436 - DNA, 2587 bp, Gammatorquevirus sp.
gcaattcgggctagggcagtctagcggaacgggcaagaaacttaaaacaatacttattttacagatgagccatctatgtccagctgacttctaccacaaaacaaaatacaacctagacacactaaaccaactatggatgtcacagcttgctgattctcatgacagttggtgtgactgccttactccttttgggcatttgcttgcttctatttttcctcctggtcatcaagaccgtgatcttacaattaatcaaatactggacagagactacaaagaaaaatgccattctggtggaaccggaggagaaagccatggtacggaccacggaggagatggaccttcagaaaatataaaacaagaagaagaagaagaaaatatcccagaagaagaactagaaaaacttatcgtcgccgcagaagaacaagaaagagaaaggtaagaagaaaaatacctaaactaacattgaaagtatggcagccagaatctgttagaaaatgtaaaattagacttttaggaactctagtaaatggtgctgaaggaagacaaatgttttgctataccaatgaaattgctaactacttaccaccaaaatctccagggggtggaggatttggctgcgaaattataactttagaatacctgtatgaacaatacctacaaagaaactgtatttggactagatcaaatcaatacagtgacctttgcagatacacaggcggttctataacattgtatagacaccccagtatagactttatattctcctacaacatacaaccaccatttacaatacaatcagacacatatagaaacattcatcctcttctacaactgctaagcagaagacatagagttatattaagcaaatctactaatcctaaaggtaaaataaaacacaaaattaaatttaagccacctaaagaaatgagtactaaatggttttttcagaatgacttttcacatacaccacttatacaattaaatgcagctgcagctgacatggaatatgtaacccttggctgttgtaatgttagccagatgtcaaccttttatgcattaaattctgaccacttttttaaagagtctagttggggacaatttaaaagttcaccttacaaaccttattcaacaatgaaactcccacttacctttgtatacacaaagcaaggtggccaagaaggtacatacactatagaccaagacacctttggtactggcacagggtcttacacaaaaagtgtatcaagactctgcggttggtttaacaacagagtactactagcaaaagctgtatatcaacaagctgcaccaacaactgctaaaccattggatgaaacaaaaaaactagctacacttccaatagttaccatgagatacaaccccatagaagacactggtgcaggcaatgaagtatggcttgcatccattttccatggatcctatgataaaccaagtgtaacaccagactacctagttaaaggctaccctttatacctagcattttttggattttataactacttactacaaatcagcaatgataaaggtatttttttttctcacatgtttgtagtaaaaagtcctgcacttaaaccactacaatcatctacaggccaacaattttatccactagtagactgggatttcttaaatagtaaactaccatatgatgaatacataggagacaatgactctagaaaatggtatcctacagtagaatcccaactagtaagtattaataattttgtaaaatcaggaccatacataccaagactagataatcaaagaaatagcacttgggaattaagatacaaactaaacatgtactttaaatgggggggaccacaggttacagaccctccaattgatgacccacaacacaaaaaagactaccccactccaggtagtctccaagaaacattacagattgctgacccaaaaaaacaaaaaccagaaaccatgttccatgagtgggactacagaaggggcattattacaacagcagctattaaaagaatgtcagacaacctcgaaactgattcatctttccaatctgatgattcagaaccagaaaaaaagaaaaagagagtctccaaagcactcccatacctccaaaagaaagaagacaaaatcaagaaatgtctccaggagctctgcgaagaaaataccttccaagaatcacaagacctcagacagctcatccaacaacagcagcagcaacagcagcagctcaagtcaaacatcctggagctcctcagagacttaaaacagaaacaaagatatctgagcctacaaactggaaacctaaactaacaagatttaatccaggacatgaatgggaaacagaaaaacaagtagcacaagcatttaacagaccccctagactgtttaaagaagacccccccttttacccctggcttcccagacctgaaccccgtgtaaacttccacttaaactttaaattctaggcctacaactttcacttagcggtgtatgtttatataagttttacccccaaaaaaataataaaataaaaaaaaaaaaaaaaaaaataaaaaattgcaaaaattcggcgctcgcgcgcgct

SEQ ID NO: 4437 - protein, 677 aa, Gammatorquevirus sp.
MPFWWNRRRKPWYGPRRRWTFRKYKTRRRRRKYPRRRTRKTYRRRRRTRKRKVRRKIPKLTLKVWQPESVRKCKIRLLGTLVNGAEGRQMFCYTNEIANYLPPKSPGGGGFGCEIITLEYLYEQYLQRNCIWTRSNQYSDLCRYTGGSITLYRHPSIDFIFSYNIQPPFTIQSDTYRNIHPLLQLLSRRHRVILSKSTNPKGKIKHKIKFKPPKEMSTKWFFQNDFSHTPLIQLNAAAADMEYVTLGCCNVSQMSTFYALNSDHFFKESSWGQFKSSPYKPYSTMKLPLTFVYTKQGGQEGTYTIDQDTFGTGTGSYTKSVSRLCGWFNNRVLLAKAVYQQAAPTTAKPLDETKKLATLPIVTMRYNPIEDTGAGNEVWLASIFHGSYDKPSVTPDYLVKGYPLYLAFFGFYNYLLQISNDKGIFFSHMFVVKSPALKPLQSSTGQQFYPLVDWDFLNSKLPYDEYIGDNDSRKWYPTVESQLVSINNFVKSGPYIPRLDNQRNSTWELRYKLNMYFKWGGPQVTDPPIDDPQHKKDYPTPGSLQETLQIADPKKQKPETMFHEWDYRRGIITTAAIKRMSDNLETDSSFQSDDSEPEKKKKRVSKALPYLQKKEDKIKKCLQELCEENTFQESQDLRQLIQQQQQQQQQLKSNILELLRDLKQKQRYLSLQTGNLN

SEQ ID NO: 4438 - protein, 124 aa, Gammatorquevirus sp.
MSHLCPADFYHKTKYNLDTLNQLWMSQLADSHDSWCDCLTPFGHLLASIFPPGHQDRDLTINQILDRDYKEKCHSGGTGGESHGTDHGGDGPSENIKQEEEEENIPEEELEKLIVAAEEQERER

SEQ ID NO: 4439 - protein, 109 aa, Gammatorquevirus sp.
MSPGALRRKYLPRITRPQTAHPTTAAATAAAQVKHPGAPQRLKTETKISEPTNWKPKLTRFNPGHEWETEKQVAQAFNRPPRLFKEDPPFYPWLPRPEPRVNFHLNFKF

SEQ ID NO: 4440 - DNA, 2587 bp, Betatorquevirus sp.
accccctaattaatattcaacaggaaaatagtctaggggcaattcgggctagatcagtctggcggaacgggcaagaaacttaattttatttttttacagaatgaacaacttaattgaaccaaaatacactccaaaacaactggaacttaactggaaaaacttaattcatcagacccacgaccaaatttgtggctgcgaagatgttctcactcatgtaattcaactactgggacgcgacaacccaaaaccacttacaagcaaaaaaattaaagaaataagatggctccttactggagaaggtaccgccaaagaagatggagacgaccaagacgccctcgatatagacgacctcgaactactttttggtggcgaagaaaacaccgctactacagacccttctgggtaagaaaaaaacttaaactaaaaactataaaactaaaagtatggcaaccaaaaactatcagaaaatgtagagttaaaggaattaaaccaatatttcaaggaagtgctgatagactaacaaataactactggcaatatccaataagctatgttcaaccgggaactccggggggaggcggctggggaataatggcattaagtttgtcaagcttatttgaagattatcaacacttacaaaatatatttacaacaagtaacgcaggtttaccattagtaaaatacatgggtgttagactaaccttttatcaacatccatattcagattatgtagtagaagtagataactgctggcctatgttagatacaccattaaaacacccaaatagccaaccagcaagaatgctaatgggtaaaaaaaagattataatacccagcacagaaacaaaaccattaagaaaacgcaaaaaatcagtatacatttcaccgccttcacaaatgaccaataactggtattttcaaaaagacatttgcaacacaaaattagtaatgataacaggaaccgcctgtagcttaaacaactactttttaccaccaagagcaacatcaaacaactgcactatatttgcattaaacacaaacatattcaaaaacgcagacttccaacatccatcacaaaccacaggctacacaccaagaaataacacatatatgtacggtggaacagccccctatgcaagtatatcaaaagaaacattaatatacttaggagactgcaaaacctacacagcaggaaaaccagggaacatgacagaaaaaaacaactggggaaacccttttcacaaagactacattaaaggcaataaaccagtatttttgagctctaaaccaccaacagacgaagtcttcaaaaaagagccagcagaaattaaaaaagaattacaagaaatgacatcaccaatagcatacgccatgagatataacccagacagagacacaggagagggcaatacagcatactttgtagataattatagaacagcaggagacttaggctttcaaaaacccagagaccccaatagaatcatagatggattcccactatggataatgctatggggttgggcagactggataaaaaaactagcagaaatacacagagtagatgatgactacataatggtaattcaaacatcattttttacagaaaaactaccattttatgtactattagacgactcatttttaagtggaaaaagttactatgacacagaacaaaccactaaagacctactaaactggtatccaaaattttactttcaacaacaaagcattgaaaacatatgcaaaacaggcccaggagtaagcagagtaagctcattactatctgttcaagctaaaatgaaatatgactttcgctttaaatggggaggctgtccagctacattagaaaaagtatatgatccttgttcacagcctcgatggcccatccccggtaacctcaatgaaggaattcagatccagaatccagacacagaccccagcaaagaaatctactcatgggattttagaaaagactttattacagaaccagctcttaaaagacttaaaaaagactcactacctttacaactcgcttgcctaccaacaggaagccgatcagatgtccaagccctcaaagcacagaaaacaaaagaccaccaagaaacgtcatcggaagaagaggaaacaccgaccctcaacctcaaactcctcagactccgacagcgacaacaacagctccaccaccagctcctcaagttaataaatacaaaataactcacaaagatacctatattaacctttttggattaaaaaaaccatttaaaaaccgtacttttaaaccccatgaagagcagttagaaagagaggtagcagctatttttaaacgccccccaagaacattcttttatgataccccttactatccttgggtaccccctgcaccaatggctaactttgctttgcgctttaaagatactgaataaaggccaacaattttcacttagtggtgtctgtttctttaataaaaacttaaataaaccaactccgcctcccaaaagtgttggcgccaaagggggctccgcccccttaaacccccaagggggctccgcccccttaaacccccaagggggctccgcccccttac

SEQ ID NO: 4441 - protein, 645 aa, Betatorquevirus sp.
MAPYWRRYRQRRWRRPRRPRYRRPRTTFWWRRKHRYYRPFWVRKKLKLKTIKLKVWQPKTIRKCRVKGIKPIFQGSADRLTNNYWQYPISYVQPGTPGGGGWGIMALSLSSLFEDYQHLQNIFTTSNAGLPLVKYMGVRLTFYQHPYSDYVVEVDNCWPMLDTPLKHPNSQPARMLMGKKKIIIPSTETKPLRKRKKSVYISPPSQMTNNWYFQKDICNTKLVMITGTACSLNNYFLPPRATSNNCTIFALNTNIFKNADFQHPSQTTGYTPRNNTYMYGGTAPYASISKETLIYLGDCKTYTAGKPGNMTEKNNWGNPFHKDYIKGNKPVFLSSKPPTDEVFKKEPAEIKKELQEMTSPIAYAMRYNPDRDTGEGNTAYFVDNYRTAGDLGFQKPRDPNRIIDGFPLWIMLWGWADWIKKLAEIHRVDDDYIMVIQTSFFTEKLPFYVLLDDSFLSGKSYYDTEQTTKDLLNWYPKFYFQQQSIENICKTGPGVSRVSSLLSVQAKMKYDFRFKWGGCPATLEKVYDPCSQPRWPIPGNLNEGIQIQNPDTDPSKEIYSWDFRKDFITEPALKRLKKDSLPLQLACLPTGSRSDVQALKAQKTKDHQETSSEEEETPTLNLKLLRLRQRQQQLHHQLLKLINTK

SEQ ID NO: 4442 - protein, 115 aa, Betatorquevirus sp.; identical to SEQ ID NO: 4314

SEQ ID NO: 4443 - protein, 129 aa, Betatorquevirus sp.; identical to SEQ ID NO: 4315

SEQ ID NO: 4444 - DNA, 2586 bp, Gammatorquevirus sp.
aaattgcaaaaattcggcgctcgcgcgcgctgctaggggcaattcgggctagggcagtctagcggaacgggcaagaaacttaaattatacccttgtttttagatgagccatctatgtccagctgacttttaccacagaactacatttaaccttgatactcaaaaccaaatatggatgtctcagctagcagacgggcatgacaatttctgtgactgcaaaactccttttggccatttgcttgcttctatttttcctcctggtcataaagaccgtgatctcacaattaatcaaattttgctgcgagactaccaagaacaatgccattctggtggaaaagaagaaggcggccatggtatggcaccttcaggagacgctggagacgcagacaatataaaacaagaaaaagaagaagaagatatcccagaagaagaactagaaaaacttatggccgccgtagaagaagaagaaaacacaaggtaagaagaaaaattcaaaaactaactcttaaagtatggcaaccagactctgttagaaaatgtaaaattaaactactcgggactctagtaaatggagcccaaggaagacaaatgtactgctatacaaatgaaataggtaattacttacctcctaaatcacctgggggagggggatttggctgtgaaataattaccctagaatacttatatgaacaatacttacaaagaaactgcatatggactagaagtaatcaatacagtgacctttgtagatatacaggtggaaaaataacattgtacagacatccaacaatagactttgttttctcatacaacatacaaccaccatttactatagaaaaagacacttatttaaacctacaaccacaactacaattactgagcagaagacacagagtaatactcagcaaagctactaatccaaaaggcagaataaaacacacaataaaatttaaaccacccaaagaaatgtccactaaatggttttttcaaaatgatttttcacatacacccctaatacaattaaatgctagtgcagcagacttccaatatgtaactatgggctgctgcaatgtaagccaaatgtctacattttatgcacttaactcagcacacttctttaaacaatccacatggggagagttcactagcaatccttacgagccatacccaacaataaatttacctttaacatttgtatacactgaaaaaggaggtagggaaggcagatatgttattacaacaactacatttggaacaggaacaggctcatacacaaaaagtgttagcagactatcgggatggtttaataacagagtactactagcaaaagcagtttaccaaggaaactttccacaaggaaacctaccagaagcatcaaaacttggtaccttacccatagttacagctagatataacccaatagaagacactggtcaaggcaatgaagtatggctaacatccatatttcatggagcctatgacaaaccaacagttactcctgactacttaatacaaggatacccactatacattgcattctttggctactataactttttacttcaaaaatctaatgataaaggtatcatgtacagccatatgtttgtagttaaaagcaaagcacttagacctttacaatcatctacaggccaaacatattaccctatagtagactgggactttttaaatggcaaactaccctatgatgaatacattggagacaatgacagcagaaaatggtttcccacagtagaatctcaactgatatccattaataactttgtacaatcaggaccatacatacctagactagacaatgttaaaaacagtacctgggaacttagatacaaacttaccatgtactttaaatgggggggtcctcaggttacagacccaccaattgatgacccacaacacaaacaagactaccccactccaggtactttccaagaaacattacaaattgctgacccgaaaaaacaaaaacctgaaaccatgtttcatgaatgggactacagaagggggattattacaacagcagctattaaaagaatgtcagaaaacctcgaaactgattcatctatccaatctgatgcttcagaaccaccaaaaaagaaaaaaagaacaaccaaagaactcccctgcctccaaaagaaggaagaaagaatcaagaaatgtctccaggaactctgcgaagaaaatatcttccaagaatcacaagacctccagctcctcatccaacagcagcaccagcaacagcaacagctcaagtcaaacatcctggagctcctcaaagacctcaaacagcagcagagatacctaagtttgcaaacaggaaacctacattaacaagatttaaaccaggctttgaatgggacacagaaatacaagtagcaaaagcatttaacagaccccctagattatttaaagaagataaacccttttacccatggcttcctaaaccagaacccattgtaaactttcaccttaattttaaattctaggcctacaatgttcacttagtggagtatgtttatataagttacacccccaataaactgtacataaaaaaaaaaaaaaaaataaa

SEQ ID NO: 4445 - protein, 676 aa, Gammatorquevirus sp.
MPFWWKRRRRPWYGTFRRRWRRRQYKTRKRRRRYPRRRTRKTYGRRRRRRKHKVRRKIQKLTLKVWQPDSVRKCKIKLLGTLVNGAQGRQMYCYTNEIGNYLPPKSPGGGGFGCEIITLEYLYEQYLQRNCIWTRSNQYSDLCRYTGGKITLYRHPTIDFVFSYNIQPPFTIEKDTYLNLQPQLQLLSRRHRVILSKATNPKGRIKHTIKFKPPKEMSTKWFFQNDFSHTPLIQLNASAADFQYVTMGCCNVSQMSTFYALNSAHFFKQSTWGEFTSNPYEPYPTINLPLTFVYTEKGGREGRYVITTTTFGTGTGSYTKSVSRLSGWFNNRVLLAKAVYQGNFPQGNLPEASKLGTLPIVTARYNPIEDTGQGNEVWLTSIFHGAYDKPTVTPDYLIQGYPLYIAFFGYYNFLLQKSNDKGIMYSHMFVVKSKALRPLQSSTGQTYYPIVDWDFLNGKLPYDEYIGDNDSRKWFPTVESQLISINNFVQSGPYIPRLDNVKNSTWELRYKLTMYFKWGGPQVTDPPIDDPQHKQDYPTPGTFQETLQIADPKKQKPETMFHEWDYRRGIITTAAIKRMSENLETDSSIQSDASEPPKKKKRTTKELPCLQKKEERIKKCLQELCEENIFQESQDLQLLIQQQHQQQQQLKSNILELLKDLKQQQRYLSLQTGNLH

SEQ ID NO: 4446 - protein, 125 aa, Gammatorquevirus sp.; identical to SEQ ID NO: 2128

SEQ ID NO: 4447 - protein, 120 aa, Gammatorquevirus sp.; identical to SEQ ID NO: 2129

SEQ ID NO: 4448 - DNA, 2585 bp, Betatorquevirus sp.
cccttacacccccaagggggctccgcccccttacacccgcaattcgggctagatcagtctggcggaacgggcaagaaacttaaaatatatttattttatagatatgtcatctatttggaagaaaccaaatgtgacaccgagatatctagaacttggatggatgaatttagtacaccaaagccatgatcaaatttgccactgtgaagacgccgacctacactttatgattttaatcaacaaattcggaggagccaaaaaaccagaaccagaaataagaaacataaaatgcctccttaccggagatactaccaaagctactactacagaaaccgcagaagaagatatcggaatagattcaggagacctagaaaaacttttcgaagaagatattggagaaccaaataccgcagaagacgtccaaaggtaaaaaaattcagaaaaagaaaactaaaaaaactaatacttaaagtatttcaacctaaatctattaaaaaatgtaaaattaaaggaatgaaatgcctctttcaaggagccattgaaagagcaagcaataactatatacaatacatttatgatactgttaatgacagaagaccagggggtggaggatggagtttacaagtgtttagcctagaatcattatttgaagaatatgaacatttgttaaatgtatggactactagcaacgccgctttaccccttgttagatatagaggttgtaaatttagattttatcaaagtaatgatactgattatgttgtaaagtatgacaactgttggcctatggtagacacaaaatacacacacgcagacagcgcaccacaaagaatgctaagagcacaacataaaatagtagtacctagcagaaaatcacaaactagaaaaaaaccatataaaacagcattcataagacctccatcacaaatgacaaataactggtatttccaaagagacatttgcaaaacacctttagcaatgctaaccacaacagccgttgacttaagaaacccttttgcagcaccagaagcccgcagcaataatgttacattatactcattaaacacttttcaatttaaaaataccaactttcaacaaccagatccacaaaaaggataccactataaaacagaaggaacagaaaaatactacttatatgcagctcatacaaacagtagtacttggggagaactaataccactaacaaacaccaaagacaaccaaccaggacaacaacttaaagtacttcttaataataataataacaacaaactatcaaactggggaaatccatttcaccacacatacacaccagatgattttaaattctactttatgacaaaatcacctacagaactcaataaaacagatttaaccaagactttaacaacaacaggtataacagaatttacaagctatttatattaccaattaagatacaatccagaaaaagacaccggagacacaaacaaagtatacttagtatctaacttacatgaaacaaactggaatgaaccagaaaacccaaatttaattttagaaggctttccacttagtatactactttggggatgggtagactggcaaaaaaaattaaaacaagtatcaaacataaataaccaatacattgtagtaattaaaacaaaaatgttttcagaaaacttaaaccactacgtactgctagacaaagactttatagatggatttgaaccatactccccacacgatacaaacgacataatacctataacaccacaaaatcaacaacactggtacccaaaattttcatttcaagaacaatctattaacacactttgcctatcaggttcaggatgcccacgaccaccatggaatcactatctacaggccttatgtacatatacattctatttttcctttggaggatgtccaaaacaattagaaaaagtttatgatccttgtttacagtcaaaatggcccacagccgataacatcccttcaacaactgaaatcaagaatcctaacaccgcaccacaaacagaacttttctcctgggactgggaaggtgactttgttaaaacaacagctatacaacgaattaaagaatacacgccatcttatgaatcaatattctcatctacaggaacaaagtcagatgcaataccactcaaagaagcccaagaaagccaaacacaagcccaagaagaggaaaaggagttattcgtccagctccagcagctccgacacaagcggaaaatcctccagtaccaactaaacgaattattattaagaagcacaccacaacagtagaactatttccaaaaccaaaaaagaacagaacttttacaccttcagaaagagaattagaaagacaagtagctatagcattttgcagaccccaaagacaatacttttatgatacccctatatacccatggctaccacctgcaccaataatgccaaaagtaaactttgatataaactatgtagataaataaaaaattcaaggccaacaaatttcacttgtcggagtccatttatttaagttaaactttaataaacatccaccactctcccaaaattgttggcgtagcaaagggggctccgcc

SEQ ID NO: 4449 - protein, 666 aa, Betatorquevirus sp.; identical to SEQ ID NO: 3312

SEQ ID NO: 4450 - protein, 122 aa, Betatorquevirus sp.; identical to SEQ ID NO: 2605

SEQ ID NO: 4451 - DNA, 2581 bp, Gammatorquevirus sp.
aaaaaaaaataaaaaattgcaaaaattcggcgctcgcggcaattcgggctagggcagtctagcggaacgggcaagaaacttaaaacaatacttattttacagatgagccatctatgtccagctgacttctaccacaaaacaaaatacaacctagacacactaaaccaactatggatgtcacagcttgctgattctcatgacagttggtgtgactgccttactccttttgggcatttgcttgcttctatttttcctcctggtcatcaagaccgtgatcttacaattaatcaaatactggacagagactacaaagaaaaatgccattctggtggaaccggaggagaaagccatggtacggaccacggaggagatggaccttcagaaaatataaaacaagaagaagaagaagaaaatatcccagaagaagaactagaaaaacttatcgtcgccgcagaagaacaagaaagagaaaggtaagaagaaaaatacctaaactaacattgaaagtatggcagccagaatctgttagaaaatgtaaaattagacttttaggaactctagtaaatggtgctgaaggaagacaaatgttttgctataccaatgaaattgctaactacttaccaccaaaatctccagggggtggaggatttggctgcgaaattataactttagaatacctgtatgaacaatacctacaaagaaactgtatttggactagatcaaatcaatacagtgacctttgcagatacacaggcggttctataacattgtatagacaccccagtatagactttatattctcctacaacatacaaccaccatttacaatacaatcagacacatatagaaacattcatcctcttctacaactgctaagcagaagacatagagttatattaagcaaatctactaatcctaaaggtaaaataaaacacaaaattaaatttaagccacctaaagaaatgagtactaaatggttttttcagaatgacttttcacatacaccacttatacaattaaatgcagctgcagctgacatggaatatgtaacccttggctgttgtaatgttagccagatgtcaaccttttatgcattaaattctgaccacttttttaaagagtctagttggggacaatttaaaagttcaccttacaaaccttattcaacaatgaaactcccacttacctttgtatacacaaagcaaggtggccaagaaggtacatacactatagaccaagacacctttggtactggcacagggtcttacacaaaaagtgtatcaagactctgcggttggtttaacaacagagtactactagcaaaagctgtatatcaacaagctgcaccaacaactgctaaaccattggatgaaacaaaaaaactagctacacttccaatagttaccatgagatacaaccccatagaagacactggtgcaggcaatgaagtatggcttgcatccattttccatggatcctatgataaaccaagtgtaacaccagactacctagttaaaggctaccctttatacctagcattttttggattttataactacttactacaaatcagcaatgataaaggtatttttttttctcacatgtttgtagtaaaaagtcctgcacttaaaccactacaatcatctacaggccaacaattttatccactagtagactgggatttcttaaatagtaaactaccatatgatgaatacataggagacaatgactctagaaaatggtatcctacagtagaatcccaactagtaagtattaataattttgtaaaatcaggaccatacataccaagactagataatcaaagaaatagcacttgggaattaagatacaaactaaacatgtactttaaatgggggggaccacaggttacagaccctccaattgatgacccacaacacaaaaaagactaccccactccaggtagtctccaagaaacattacagattgctgacccaaaaaaacaaaaaccagaaaccatgttccatgagtgggactacagaaggggcattattacaacagcagctattaaaagaatgtcagacaacctcgaaactgattcatctttccaatctgatgattcagaaccagaaaaaaagaaaaagagagtctccaaagcactcccatacctccaaaagaaagaagacaaaatcaagaaatgtctccaggagctctgcgaagaaaataccttccaagaatcacaagacctcagacagctcatccaacaacagcagcagcaacagcagcagctcaagtcaaacatcctggagctcctcagagacttaaaacagaaacaaagatatctgagcctacaaactggaaacctaaactaacaagatttaatccaggacatgaatgggaaacagaaaaacaagtagcacaagcatttaacagaccccctagactgtttaaagaagacccccccttttacccctggcttcccagacctgaaccccgtgtaaacttccacttaaactttaaattctaggcctacaactttcacttagcggtgtatgtttatataagttttacccccaaaaaaataataaaataaaaaaaaaaa

SEQ ID NO: 4452 - protein, 677 aa, Gammatorquevirus sp.; identical to SEQ ID NO: 4437

SEQ ID NO: 4453 - protein, 124 aa, Gammatorquevirus sp.; identical to SEQ ID NO: 4438

SEQ ID NO: 4454 - protein, 109 aa, Gammatorquevirus sp.; identical to SEQ ID NO: 4439

SEQ ID NO: 4455 - DNA, 2580 bp, Betatorquevirus sp.
cgggagccgaaggtgagtgaaaccaccgtagtctaggggcaattcgggctaggccagtctagcggaaagggcaagaaacttaaatatatttattttacagatgcaaaaaccactatacacagaaaaagcattaaaaaaccaatggattaaccacctagtttctgctcacgaccttgtttgcggctgccctgaaccacttcaacacacagtaaaagaaatcttgaaaaaacaaccagaaattaaaaaatgccttactacagaagaagatacccttaccgctggagacgccgtcgatggtttaagtcccggagacctcgatttgcttttcgcagacgatactggagaagatacagggtaagaaactcttataaaaaaagaaaacttactaaaataagcttaaaacaatttcaacctataactattagaagaagctatataaaaggaatgtatccatgctttttaactaactctcacagactggaccataacatgactcaatttatagactctatagctccatatcattttaatggaggaggaggatttgctataactcaatttactcttgacggactttacgaactatttctaaaaggaatgaactggtggactcatagtaattgtaacttacctttagtaagataccatggatgtagtattaagttttacaaagctgaaaactatgactatgtagctataattcacagatgtttacctttaaaagcaactaatgaattatatatgtcttcacaacctcaaataatgatgctaacaaaacactgtatacacataccttgtagaaaagctaacagaaacaaaaaaaactataaaaaagtatttgtaaaaccccctacacaatttacaaacaaatggatgtttcaggcagacatttgcaaacaaccactacttgtaatacaaacatgcatagcaagctttgatagaatgtttttagcagcagacgctcaaagcacaacaatgggttttatatctttaaacacacaatcatttttactacacaactggaattcaccaccaacaacaggatacaaaccacaagaaaaacaatacttatttggaacacaaaacggacaacacgaccctaacaaagaacctattaaaagtttaatatacttagggggcacaggacctgctaaaacaggcgtacctatacatgacatgacaggtttaaccaaactacccacagaaaccacaatgtggggaaatatatttgtaccacactattttagtggtgaaggatccgtttatatttcatcaaaaagcccttcagaaattaaaacttactacactggacaagccacaaaacttacccaagacacagttgagaaagttgactttattacaccaaaatcaactgccaattttattaactgtagatataatccccttgcagacaaaggcacaggaaacaaagtttacttagtatcaaattctagagaccaagaaccctgggcaccaccaacatcacctttactaataagacaagacttacctttatggataatactatggggatttgtagactgggaaaaaaaattagcagaaacatcacaaatagacactacaaaaatagtagtaatagaatccccctatattacaccaaaactagcaaaatatgttccactagaccaatgctttatagatggacacagcccacatataacagacatgacaaattatgatgaacaacactggtatcctaaagttgcatttcaatatgaaagtataacaaatatatgcaactcaggaccaggtacagctaaattaccaaaagaaacatcagcagaagctcactataaatacacttttcatttaaagttcggaggatgcccacctcctatggaaaaaatatgcaacccgaccaaccaagctgtgtatcccgtccccaataaccagccgtcaacaccttcgttacagagtccaacaaacccaatacaaacctacttgtacgacttcgacgaaagacgtggacaaattacagaaaaagctgcaaaacgcctcaaaaaagactatgaaactgaaaaacctcttttacaaattacaggatcaagcccaatggacctcgaagcccacgtcgagacacagacatcagaccaggaggactcggaagaagaggaagagaccctctacctcaagctccagcgactccgaagaaagcaaaaattactccgacagcggatcctccagctgttagacacacaaaacttagaatgataaaatgtaactttaaagtaaacatgtttggtgataaccctccaaacaggagattaacaccaaaagaatttgaagaagaattagaaaacagtaaaatatggaaacatagacctagacaatatttgtatgatatacctttctatgactttttaccacctacacctataatcccacgtattaattttgaccttggatggaaaaaataaaggcctgcatacttcaacttgaggtgtccatttattttagtttaaacttatataaacatccaccactctcccaaatacgcaggcgcaaaagggggctccgcccccttaaacccccaagggggctccgcccccttaaacccgg

SEQ ID NO: 4456 - protein, 661 aa, Betatorquevirus sp.
MPYYRRRYPYRWRRRRWFKSRRPRFAFRRRYWRRYRVRNSYKKRKLTKISLKQFQPITIRRSYIKGMYPCFLTNSHRLDHNMTQFIDSIAPYHFNGGGGFAITQFTLDGLYELFLKGMNWWTHSNCNLPLVRYHGCSIKFYKAENYDYVAIIHRCLPLKATNELYMSSQPQIMMLTKHCIHIPCRKANRNKKNYKKVFVKPPTQFTNKWMFQADICKQPLLVIQTCIASFDRMFLAADAQSTTMGFISLNTQSFLLHNWNSPPTTGYKPQEKQYLFGTQNGQHDPNKEPIKSLIYLGGTGPAKTGVPIHDMTGLTKLPTETTMWGNIFVPHYFSGEGSVYISSKSPSEIKTYYTGQATKLTQDTVEKVDFITPKSTANFINCRYNPLADKGTGNKVYLVSNSRDQEPWAPPTSPLLIRQDLPLWIILWGFVDWEKKLAETSQIDTTKIVVIESPYITPKLAKYVPLDQCFIDGHSPHITDMTNYDEQHWYPKVAFQYESITNICNSGPGTAKLPKETSAEAHYKYTFHLKFGGCPPPMEKICNPTNQAVYPVPNNQPSTPSLQSPTNPIQTYLYDFDERRGQITEKAAKRLKKDYETEKPLLQITGSSPMDLEAHVETQTSDQEDSEEEEETLYLKLQRLRRKQKLLRQRILQLLDTQNLE

SEQ ID NO: 4457 - protein, 85 aa, Betatorquevirus sp.
MQKPLYTEKALKNQWINHLVSAHDLVCGCPEPLQHTVKEILKKQPEIKKCLTTEEDTLTAGDAVDGLSPGDLDLLFADDTGEDTG

SEQ ID NO: 4458 - DNA, 2579 bp, Betatorquevirus sp.
cgggagccgaaggtgagtgaaaccaccgtagtctaggggcaattcgggctaggccagtctagcggaaagggcaagaaacttaaatatatttattttacagatgcaaaaaccactatacacagaaaaagcattaaaaaaccaatggattaaccacctagtttctgctcacgaccttgtttgcggctgccctgaaccacttcaacacacagtaaaagaaatcttgaaaaaacaaccagaaattaaaaaatgccttactacagaagaagatacccttaccgctggagacgccgtcgatggtttaagtcccggagacctcgatttgcttttcgcagacgatactggagaagatacagggtaagaaactcttataaaaaaagaaaacttactaaaataagcttaaaacaatttcaacctataactattagaagaagctatataaaaggaatgtatccatgctttttaactaactctcacagactggaccataacatgactcaatttatagactctatagctccatatcattttaatggaggaggaggatttgctataactcaatttactcttgacggactttacgaactatttctaaaaggaatgaactggtggactcatagtaattgtaacttacctttagtaagatacaatggatgtagtattaagttttacaaagctgaaaactatgactatgtagctataattcacagatgtttacctttaaaagcaactaatgaattatatatgtcttcacaacctcaaataatgatgctaacaaaacactgtatacacataccttgtagaaaagctaacagaaacaaaaaaaactataaaaaagtatttgtaaaaccccctacacaatttacaaacaaatggatgtttcaggcagacatttgcaaacaaccactacttgtaatacaaacatgcatagcaagctttgatagaatgtttttagcagcagacgctcaaagcacaacaatgggttttatatctttaaacacacaatcatttttactacacaactggaattcaccaccaacaacaggatacaaaccacaagaaaaacaatacttatttggaacacaaaacggactacacgaccctaccaaagaacctattagaagtttaatatacttagggggcacaggacctgctaaaacaggcgtacctatacaagacatgttaggtttaagcaaactacccacagaaaccacaatgtggggaaatatatttgtaccacactattttagtggtgaaggatccgtttatatttcatcaaaaagcccttcagaaattaaaacttactacactggacaagccacaaaacttacccaagacacagttgagaaagttgactttattacaccaaaatcaactgccaattttgttaactgtagatataatccccttgcagacaaaggcacaggaaacaaagtttacttagtatcaaattctagagatcaagaaccctgggcaccaccaacatcacctttactaataagacaagacttacctttatggataatactatggggatttgtagactgggaaaaaaaattagcagaaacatcacaaatagacactacaaaaatagtagtaatagaatccccctatattacaccaaaactaccaaaatatgttccactagaccaatgctttatagatggacacagcccacatataacagacatgacaaattatgatgaacaacactggtatcctaaagttgcatttcaatatgaaagtataacaaatatatgcaactcaggaccaggtacagctaaattaccaaaagaaacatcagcagaagctcactataaatacacttttcatttaaagttcggaggatgcccacctcctatggaaaaaatatgcaacccgaccaaccaagctgtgtatcccgtccccaataaccagccatcaacaccttcgttacagagtccaacaaacccaatacaaacctacttgtacgacttcgacgaaagacgtggacaaattacagaaaaagctgcaaaacgcctcaaaaaagactatgaaactgaaaaacctcttttacaaattacaggatcaagcccaatggacctcgaagcccacctcgagacacagacatcagaccaggaggactcggaagaagaggaagagaccctctacctcaagctccagcgactccgaagaaagcaaaaattactccgacagcggatcctccagctgttagacacacaaaacttagaatgataaaatgtaactttaaagtaaacatgtttggtgataaccctccaaacaggagattaacaccaaaagaatttgaagaagaattagaaaacagtaaaatatggaaacatagacctagacaatatttgtatgatatacctttctatgactttttaccacctacacctataatcccacgtattaattttgaccttggatggaaaaaataaaggcctgcatacttcaacttgaggtgtccatttattttagtttaaacttatataaacatccaccactctcccaaatacgcaggcgcaaaagggggctccgcccccttaaacccccaagggggctccgcccccttaaaccgg

SEQ ID NO: 4459 - protein, 661 aa, Betatorquevirus sp.
MPYYRRRYPYRWRRRRWFKSRRPRFAFRRRYWRRYRVRNSYKKRKLTKISLKQFQPITIRRSYIKGMYPCFLTNSHRLDHNMTQFIDSIAPYHFNGGGGFAITQFTLDGLYELFLKGMNWWTHSNCNLPLVRYNGCSIKFYKAENYDYVAIIHRCLPLKATNELYMSSQPQIMMLTKHCIHIPCRKANRNKKNYKKVFVKPPTQFTNKWMFQADICKQPLLVIQTCIASFDRMFLAADAQSTTMGFISLNTQSFLLHNWNSPPTTGYKPQEKQYLFGTQNGLHDPTKEPIRSLIYLGGTGPAKTGVPIQDMLGLSKLPTETTMWGNIFVPHYFSGEGSVYISSKSPSEIKTYYTGQATKLTQDTVEKVDFITPKSTANFVNCRYNPLADKGTGNKVYLVSNSRDQEPWAPPTSPLLIRQDLPLWIILWGFVDWEKKLAETSQIDTTKIVVIESPYITPKLPKYVPLDQCFIDGHSPHITDMTNYDEQHWYPKVAFQYESITNICNSGPGTAKLPKETSAEAHYKYTFHLKFGGCPPPMEKICNPTNQAVYPVPNNQPSTPSLQSPTNPIQTYLYDFDERRGQITEKAAKRLKKDYETEKPLLQITGSSPMDLEAHLETQTSDQEDSEEEEETLYLKLQRLRRKQKLLRQRILQLLDTQNLE

SEQ ID NO: 4460 - protein, 85 aa, Betatorquevirus sp.; identical to SEQ ID NO: 4457

SEQ ID NO: 4461 - DNA, 2579 bp, Gammatorquevirus sp.
aaattgcaaaaattcggcgctcgcgcgcgctgctaggggcaattcgggctagggcagtctagcggaacgggcaagaaacttaaaacaatgctttgttttacagatgtcaaaagttcaagctaaagacttttatactcccacaccctacaatcaagaaacgaaaaatcaaatatggatgtctcaaattagtgattctcacgataatttctgcaattgtcacactccctttgctcacttacttgccagtatctttcctgttggtcaccaagataggaatctcacaattaatcaaattcttctcagagattacagagaaaaatgccgttctggtggaatagaagaagaaagccctggtggggccgttggagaaaaagatggacctacaaaagaaaaaacaccagaagaagaagacctagaaaacggagacatagaagaacttttagacgccgtcgccgccgcagaagaacatacaaggtaagaagaaaaagaaaattaataactgtaaagcaatggcaaccagataaaattttaaactgtaaaattaaaggatatgatactttagttttaggagcagaaggaaaacaattggtatgctataccaatgttaaacaagcttggacacctccaaaaactcctgggggagggggattcggtgtacagcaatactcacttggatacttgtatgaacaatatatttttagaaaaaatatatggactaaatcaaatatagcactagacctagtaagatatataagagccaaatttacattttacagacacccagaaacagactttattgtacggtatgatagacaaccaccatttacaatagatgaattgacataccctttaacacacccagctcaacttatgctcgcaaaacataaattctttgtactcagtacagctacaaaaccacttggtagactaacaaaaaggaaaataattaaaccacctaaacaaatgctaactaaatggttttttcaagaagactttagcaaagcaggactactacaactaacagcagctgcagcaaatttaaggtatgcaaacctaggctgctgcaacacaaaccaaattattacagcattctccataaacacttcatttttccaacaaggaaactgggcaataggcacaggagacagatacaaaccctacctagcaatacctaccacactatactactggccagaaaaaccaccaagcaaggaagacgagagaagagaatacaacaagaaatacatgttcacacaacaaataacttcatataatgactcagttagctatgaaaaaggctactttagcactaaagtactaacagccaaattttactcacaagaccaaatggataacacaggccttgccaatttaccactactttcatttagatataatccagccttagactcaggaaaaggaaatgcaatttggctacacaactcactaactacatcatatgataaaccagcaatagacaaaacccttatactacaaggcctacccctgtggcaaatgctatggggctggcttagctatgtacaatacattaaaaaagccactgacttttttacatcccacattataatactacaaagtcctgctattaaacctgcaccaacagcctcaccacaaacatactacattccactatcaacagactttgtaaatggcaagcctccttacaatgagccacttaccacctggtggagagcacactggtatcccaacatatatgaccaactacctgtactaaatgctattgtagaatctggcccttttgtacctaaatactcacaaactaaaaacagtacatgggaactaaaatacacttacaattttttctttaagtggggaggtccagacattacagaaccagcagtggctgaccccagccaacaacaaacatatcctgtacccgataaaatgtcagaggcagtacaaattagggaccctgccaaacaaaagtttgaatcaatcctgcatccctgggactacagacgtggcctcattaaagaatcagctcttaaaagaattcgagacaacctctcaattgattcaactttccaaccagatgaaacacctaaaaaaaaaagaaaaacagttggtccctgtcttacagtgccaggagaggaagaacaagaaatacagaaatgtctccaagaactcttcgaagaaagtacctaccaagaaatccaagaagaaacatcaatccagcagctcatccaacagcagcaccagcaccagcagcagctcaagtggaacatgctcagactaatatcagacttgaaagaaaaacagagacaattacaactacaaacgggttttataagttaacaccattcaaaccaggttttgaacaacaaacagagagagaacttgctatagcttttaaaagaccacccagattatttaaagaagacaaacccttttatccatggctacccaaaccaacacctattgttaactttcaccttaactacaaattctaggccaacactgttcacttagcggtgtttgtttaataaagtttgcaccccaaaaaaaattgtaaaattaaaaaaaaaaaaaaaaataaa

SEQ ID NO: 4462 - protein, 672 aa, Gammatorquevirus sp.; identical to SEQ ID NO: 875

SEQ ID NO: 4463 - protein, 124 aa, Gammatorquevirus sp.; identical to SEQ ID NO: 876

SEQ ID NO: 4464 - protein, 126 aa, Gammatorquevirus sp.; identical to SEQ ID NO: 877

SEQ ID NO: 4465 - DNA, 2579 bp, Gammatorquevirus sp.
aaattgcaaaaattcggcgctcgcgcgcgctgctaggggcaattcgggctagggcagtctagcggaacgggcaagaaacttaaaacaatgctttgttttacagatgtcaaaagttcaagctaaagacttttatactcccacaccctacaatcaagaaacgaaaaatcaaatatggatgtctcaaattagtgattctcacgataatttctgcaattgtcacactccctttgctcatttgcttgccagtatctttcctgttggccaccaagataggaatctcacaattaatcaaattcttctcagagattacagagaaaaatgccgttctggtggaatagaagaagaaagccctggtggggccgttggagaaaaagatggacctacaaaagaaaaaacaccagaagacgaagacctagaaaacggagacatagaagaacttttagacgccgtcgccgccgcagaagaacatacaaggtaagaagaaaaagaaaattaataactgtaaagcaatggcaaccagataaaattttaaactgtaaaattaaaggatatgatactttagttttaggagcagaaggaaaacaattggtatgctataccaatgttaaacaagcttggacacctccaaaaactcctgggggagggggatttggtgtacagcaatactcacttggatacttgtatgaacaatatatttttagaaaaaatatatggactaaatcaaatatagcactagacctagtaagatatataagagccaaatttacattttacagacacccagaaacagactttattgtacagtttgatagacaaccaccatttacaatagatgaattaacataccctttaacacacccagctcaacttatgctcgcaaaacataaattctttgtactcagtacagctacaaaaccacttggtagactaacaaaaacaaaaataattaaaccacctaaacaaatgctaactaaatggttttttcaagaagactttagcaaagcaggactactacaactaaaagcagctgcaacaaatttaaggtatgcaaacctaggctgctgcaacacaaaccaaattattacagcattctccataaacacttcatttttccaacaaggaaactgggcaataggcacaggagacagatacagaccctacctagcaatacctgccaaactatactactggccagaaaaaccaccaagcacttcatcagaaagagaagaatacaacaagaaatacatgttcacacaagaaataagttcatataatgactcagttagctatgaaaaaggctactttagcactaaagtactaacagccaaattttactcacaagacaaaatggataacacaggccttgccaatttaccactactttcatttagatataatccagccttagactcaggaaaaggaaatgcaatttggctacacaactcactaactacatcatatgataaaccagcaatagacaaaacccttatactacaaggcctacccctgtggcaaatgctatggggctggcttagctatgtacaatacattaaaaaagccactgacttttttacatcccacattataatactacaaagtcctgctattaaacctgcaccaacagcctcaccacaaacatactacattccactatcaacagactttgtaaatggcaagcctccttacaatgagccacttaccacctggtggagagcacactggtatcccaacatatatgaccaactacctgtactaaatgctattgtagaatctggcccttttgtacctaaatactcacaaactaaaaacagtacatgggaactaaaatacacttacaattttttctttaagtggggaggtccagacattacagaaccagcagtggctgaccccagccaacaacaaacatatcctgtacccgataaaatgtcagaggcagtacaaattagggaccctgccaaacaaaagtttgaatcaatcctgcatccctgggactacagacgtggcctcattaaagaatcagctcttaaaagaattcgagacaacctctcaattgattcaactttccaaccagatgaaacacctaaaaaaaaaagaaaaacagttggtccctgtcttacagtgccaggagaggaagaacaagaaatacagaaatgtctccaagaactcttcgaagaaagtacctaccaagaaatccaagaagaaacaccaatccagcagctcatccaacagcagcacgagcaccagcagcagctcaagtggaacatgctcagactaatatcagacttgaaagaaaaacagagacaattacaactacaaacgggttttataagttaacaccattcaaaccaggttttgaacaacaaacagagagagaacttgctatagcttttaaaagaccacccagattatttaaagaagacaaacccttttatccatggctacccaaaccaacacctattgttaactttcaccttaactacaaattctaggccaacactgttcacttagcggtgtttgtttaataaagtttgcaccccaaaaaaaattgtaaaattaaaaaaaaaaaaaaaaataaa

SEQ ID NO: 4466 - protein, 672 aa, Gammatorquevirus sp.; identical to SEQ ID NO: 3816

SEQ ID NO: 4467 - protein, 124 aa, Gammatorquevirus sp.; identical to SEQ ID NO: 3817

SEQ ID NO: 4468 - protein, 126 aa, Gammatorquevirus sp.; identical to SEQ ID NO: 3818

SEQ ID NO: 4469 - DNA, 2579 bp, Gammatorquevirus sp.
aatatatctacaaagatcttttgctatgttatctaggggcaactcgggctagggcagtctagcggaacgggcaagaaacttaaaacaatactttgttttccagatgcaaaacataacagcaaaagacttctttaaaccaacaccttttaacaatgaaaccaagcagcaaatttggatgtcacaaatagctgatgcacatgacaatatctgtcactgcaaccatccttttgctcacctgcttgctaatatttttcctgttggtcataaagacagggatcttaccattaatcaaattctgcaaagagattatacagaaaaatgcctttctggtggaggagaagaaagaagagatggtttggcagattcaacaagaaccgctggaggtttcaaagaaataaaaccagaagaagaagatataccagaagacgagctagacgctttcctggccgccgccgccgcagaagaaaacaccgcaaggtaagaagaaaaagaaaacttattactataaaacaatggcagccagactctataacaaactgtaaaattaaaggttatgggactctagtactaggagcccaaggcaaacaactagtatgctacaccaatgttaaacaagcatggactccaccaaaaacaccaggagggggaggttttggctgtgaacaatattcactaggctacctatatgaccaatatattttcagaaataatatatggacaaaatctaacatagcaaaagatctttgtagatatattagatgcagacttactttttttagacacccagaaacagattttgtagtacaatatgacagacaacctccctttaacatagatgaatatacatatgcttcttgccacccatatgcactcatgcaagctaaacacaaattttttgtactaagcacagctacaaaaccactaggtagagtaacaaaaaaaaagataattaaacctccaaaacaaatgataactaaatggttctttactgaagacttttccacagcaggcttatttcaattaaaaggagcttgctgtaatatgagatactccaacttaggttgctgtaacaccaaccaaataataactgctttttctataaatacttctttttttcaacaaggtaattgggctaatgcagcacaaccatattacaaaccatggccaacaatacctagcacactatactattggccatctaaacctcctcctagctctgacaaaagtaaaagagaagattttaacaataaatacatgaccacacaaaccattcgcacctatgatgactctgtaagctatgaacaaggatacttctctagtaaaattttaacagcaaaatttatagaccagaaccaatttggagacacaggcatggctaatcttccccttgtctcatttagatacaatccctcagtagatagtggtaaaggcaacgccatttggctgcacagctcactaacaacaacctatgacaaaccagccatagataaaactcttatattacaaggcctaccactgtggcaaatgctttggggatggctcagctatgtacaatacattaaaaaagcaacagacttttttacaagccacataattatactacaaagccctgccataaaacctgcaccaacagcatctccacaacaattttatataccactatccactgattttgtaaatggaaaaccaccttacaatgaacccctcacaacttggtggagagcccactggtaccccaacatatatgatcaactacctgttctaaatgccatagtagaatcaggaccatatgtaccaaaatattcacaaacaaaaaacagtacatgggaactaaactacaaatatgattttctttttaagtggggcggaccagatattacagaaccagcagttgttgacccagggcaacaagggacattccctgtacccgataaaatccaatcaacaatacaaattagggacccagccaaacaaacctatgaaagcatattacactcatgggactacagacgtggattcattaaagaatcagctcttaaaagaatgcaagaacacatgtcagttgattcaactttccaaccagatgaaattcctagaaaaaggagaaaaacaacaggcccttgtcttacagccccagaagaagagaaccaagaaatccacaaatgtctccaagagctctgcaaagaaagtacatcagaagaagcaccgcaagaggaaaacctacagcagctcatcatccagcagcagcagaagcagcagcagctcaaatggaacctcctcagaatcatagcagacctaaaggaaaaacagagaaacctacaactgcaaacaggattcctacattaactagatttaaaccaggctttgaagaagacacggaaaaagaacttgccagaatatttagaagaccacctagaacatataaagaggaccgccccttttatccatggttaccaatatgtcccaaagtttgtttcaaactaaactttaaaggctaggccaacaatgtacacttagtagagtatgtttaataaagtttacccccaaaaaaaaacaaaaaaaaaagtaagtctgcatct

SEQ ID NO: 4470 - protein, 675 aa, Gammatorquevirus sp.
MPFWWRRRKKRWFGRFNKNRWRFQRNKTRRRRYTRRRARRFPGRRRRRRKHRKVRRKRKLITIKQWQPDSITNCKIKGYGTLVLGAQGKQLVCYTNVKQAWTPPKTPGGGGFGCEQYSLGYLYDQYIFRNNIWTKSNIAKDLCRYIRCRLTFFRHPETDFVVQYDRQPPFNIDEYTYASCHPYALMQAKHKFFVLSTATKPLGRVTKKKIIKPPKQMITKWFFTEDFSTAGLFQLKGACCNMRYSNLGCCNTNQIITAFSINTSFFQQGNWANAAQPYYKPWPTIPSTLYYWPSKPPPSSDKSKREDFNNKYMTTQTIRTYDDSVSYEQGYFSSKILTAKFIDQNQFGDTGMANLPLVSFRYNPSVDSGKGNAIWLHSSLTTTYDKPAIDKTLILQGLPLWQMLWGWLSYVQYIKKATDFFTSHIIILQSPAIKPAPTASPQQFYIPLSTDFVNGKPPYNEPLTTWWRAHWYPNIYDQLPVLNAIVESGPYVPKYSQTKNSTWELNYKYDFLFKWGGPDITEPAVVDPGQQGTFPVPDKIQSTIQIRDPAKQTYESILHSWDYRRGFIKESALKRMQEHMSVDSTFQPDEIPRKRRKTTGPCLTAPEEENQEIHKCLQELCKESTSEEAPQEENLQQLIIQQQQKQQQLKWNLLRIIADLKEKQRNLQLQTGFLH

SEQ ID NO: 4471 - protein, 125 aa, Gammatorquevirus sp.
MQNITAKDFFKPTPFNNETKQQIWMSQIADAHDNICHCNHPFAHLLANIFPVGHKDRDLTINQILQRDYTEKCLSGGGEERRDGLADSTRTAGGFKEIKPEEEDIPEDELDAFLAAAAAEENTAR

SEQ ID NO: 4472 - protein, 125 aa, Gammatorquevirus sp.
LSYSPRRREPRNPQMSPRALQRKYIRRSTARGKPTAAHHPAAAEAAAAQMEPPQNHSRPKGKTEKPTTANRIPTLTRFKPGFEEDTEKELARIFRRPPRTYKEDRPFYPWLPICPKVCFKLNFKG

SEQ ID NO: 4473 - DNA, 2578 bp, Gammatorquevirus sp.
cgggagcccgaggtgagtgaaaccaccgaggtctaggggcaattcgggctagggcagtctagcggaacgggcaagaaacttaaaatacttttttttttacagatgttcaacagttctgactttatcaaaaaaactaaatataactctgacaccaaaaatcaactttggtgctctgttatagctgattcacatgactcctggtgtggatgtgaaacaccctttgcacatctactagcatccatatttccaccaggacacaaagatagaaaacttacaattgatgatatattaaaaagagattatctagaatgccattctactggaaaagaagacgcagaccctggtatggtgcctggtaccgccgccgccgccgcagaccctggagatggccacaaaaaagaaggaggatacgtagaagacgcagagctagaagaacttataaaggcaggagaagacatcaaagaaaggtaagaagaaagaaaaagagactaaccttacatcaatggcaaccagaatctattagaaaatgtaaaataaaaggcctaggccttttagttttaggtgcagaaggcactcaaatgaactgttatactactaacaaatttgactatgttccacctaaagttccatatgggggaggatttggtactgaactgtactcattagaatatttatatgaagaatatacactgcacaacaatatctggacaacaagtaatattggattagacctatgtagatacacaggaggcaactttatattttttagacacccagacatagacttcatagtgacctatacattaagcctacctataacaatagacaaatatacatttccagccatacatccacatcaaatgcttctagacaaaagacatagggtaatatttagccaaaaaagcaaaccaaatggaaaatactatgttaaaattaaatttaagcctccaaaacaaatgataaacaagtggttttttacacagcaattttcaaaataccaacttatatttttaaaagctacagcagttaactttagatactcatttttaactgaaacatcacaaaacttactagtaaacattgtttcacttaatcccagcttttaccaaaacaaacactgggatcaagcacaactacacgaaaatccatacaaaccatacaataatgtaaaaaacaatatgacatttaaatatagagtaaagggagaagagagaactaaactatatccaccaccagatctatcatacacacaaagcataaacaaaaatactgggtggtttcaacctataatattacaggcatatgaagtactaagtggagtaacacctcaagcagtaacaccaactatagctggtagatataatcccacaaaagactcaggaacaggcaacatactatttatatcatctactcttacagaagactggcaaccacctaatgataaagcacttaaaatagaaaatgtaccactgtggttggctgcatttggatttctttcttatataaaaacaattaaaacagaagagttctttggatcacatttagtagttcttaaatccactgcaattcactgttccacacaagtaggatcctgtaattactatgctcccttagacattgaatatatacaaggtaaaaaaccttttgaccaaccaatcttacctagtgaagctgccaaatggactccaaatataagatggcaactaaaagccttaaactctatagtggaaagtggtccctttataccacaactaaatgaacaaaaaaatagcacatgggaactaaaatatttatacaaattttactttaagtggggaggacccagaggcactgatgcacagattacagacccatcacagctaccaaccgccgatgtgcccgataaaatcttcaaaacagtacagattgtcaacccaacaaaacaaatacctgaaacaattatccacccctgggactacaggagaggtatcattacaaaaacagctattaaaagaatgtgcgagcacctccaaactgatacagactttgaaatctctgaaacagaaactcccaaaaagaaaaagaaaatcaaaggagcagctctccaaaacccagaggaagaattccaagagctacaagcctgtctccaggatctctgcaaagaaaatatctaccaaacaccagagacagacctccagcagctcatcctccaacagcagcagcagcagagagagctcaaatacaacctcgtccagctcctcgtagatctaaaacaacaccagaaccaactacagttacaaacaggactattcacctaactagatttaaacctggatttgaacaagaaacagaaagacaactagctattattttctgcagaccccctagaacatacaaagaagatcccccattttacccctggttacccccagaacccaaagtaaactttgaacttaattttaaatactaggccaacaatgtacacttagtaaagcatgtttaataaagttacaccccaaaaaaaaaaaaaaaaaaaaaaccgctagacggtgcagggaccggatcgagcgcagcgaggaggtccccagctgcccgtggg

SEQ ID NO: 4474 - protein, 662 aa, Gammatorquevirus sp.
MPFYWKRRRRPWYGAWYRRRRRRPWRWPQKRRRIRRRRRARRTYKGRRRHQRKVRRKKKRLTLHQWQPESIRKCKIKGLGLLVLGAEGTQMNCYTTNKFDYVPPKVPYGGGFGTELYSLEYLYEEYTLHNNIWTTSNIGLDLCRYTGGNFIFFRHPDIDFIVTYTLSLPITIDKYTFPAIHPHQMLLDKRHRVIFSQKSKPNGKYYVKIKFKPPKQMINKWFFTQQFSKYQLIFLKATAVNFRYSFLTETSQNLLVNIVSLNPSFYQNKHWDQAQLHENPYKPYNNVKNNMTFKYRVKGEERTKLYPPPDLSYTQSINKNTGWFQPIILQAYEVLSGVTPQAVTPTIAGRYNPTKDSGTGNILFISSTLTEDWQPPNDKALKIENVPLWLAAFGFLSYIKTIKTEEFFGSHLVVLKSTAIHCSTQVGSCNYYAPLDIEYIQGKKPFDQPILPSEAAKWTPNIRWQLKALNSIVESGPFIPQLNEQKNSTWELKYLYKFYFKWGGPRGTDAQITDPSQLPTADVPDKIFKTVQIVNPTKQIPETIIHPWDYRRGIITKTAIKRMCEHLQTDTDFEISETETPKKKKKIKGAALQNPEEEFQELQACLQDLCKENIYQTPETDLQQLILQQQQQQRELKYNLVQLLVDLKQHQNQLQLQTGLFT

SEQ ID NO: 4475 - DNA, 2577 bp, Gammatorquevirus sp.
aaaataaaaaattgcaaaaattcggcgctcgtctaggggcaattcgggctagggcagtctagcggaacgggcaagaaacttaaattatacccttgtttttagatgagccatctatgtccagctgacttttaccacagaactacatttaaccttgatactcaaaaccaaatatggatgtctcagctagcagacgggcatgacaatttctgtgactgcaaaactccttttggccatttgcttgcttctatttttcctcctggtcataaagaccgtgatctcacaattaatcaaattttgctgcgagactaccaagaacaatgccattctggtggaaaagaagaaggcggccatggtatggcaccttcaggagacgctggagacgcagacaatataaaacaagaaaaagaagaagaagatatcccagaagaagaactagaaaaacttatggccgccgtagaagaagaagaaaacacaaggtaagaagaaaaattcaaaaactaactcttaaagtatggcaaccagactctgttagaaaatgtaaaattaaactactcgggactctagtaaatggagcccaaggaagacaaatgtactgctatacaaatgaaataggtaattacttacctcctaaatcacctgggggagggggatttggctgtgaaataattaccctagaatacttatatgaacaatacttacaaagaaactgcatatggactaaaagtaatcaatacagtgacctttgtagatatacaggtggaaaaataacattgtacagacatccaacaatagactttgttttctcatacaacatacaaccaccatttactatagaaaaagacacttatttaaacctacaaccacaactacaattactgagcagaagacacagagtaatactcagcaaagctactaatccaaaaggcagaataaaacacacaataaaatttaaaccacccaaagaaatgtccactaaatggttttttcaaaatgatttttcacatacacccctaatacaattaaatgctagtgcagcagacttccaatatgtaactatgggctgctgcaatgtaagccaaatgtctacattttatgcacttaactcagcacacttctttaaacaatccacatggggagagttcactagcaatccttacgagccatacgcaaaaataaacttacctttaacatttgtatacactgaaaaaggaggtaaggaaggcagatatattattacagacaaaacatttggaaaaggaacaggctcatacacaaaaagtgttagcagactaataggatggtttaataacagagtactactagcaaaagcagtttaccaaggagagtataaaacagatccactaccagaatcatcaaaacttgctaccttacccatagttacagctagatataacccaatagaagacactggtcaaggcaatgaagtatggctaacatccatatttcatggagcctatgacaaaccaacagttactcctgactacttaatacaaggatacccactatacattgcattctttggctactataactttttacttcaaaaatctaatgataaaggtatcatgtacagccatatgtttgtagttaaaagcaatgcacttagacctttacaatcatctacaggccaaacatattaccctatagtagactgggactttttaaatggcaaactaccctatgatgaatacattggagacaatgacagtagaaaatggtttcccacagtagaatctcaactagtatccattaataactttgtacaatcaggaccatacatacctagactagacaatgttaaaaacagtacctgggaacttagatacaaacttaccatgtactttaaatgggggggtcctcaggttacagacccaccaattgatgacccacaacacaaaaaagactaccccactccaggtactttccaagaaacattacaaattgctgacccgaaaaaacaaaaacctgaaaccatgtttcatgaatgggactacagaagggggattattacaacagcagctattaaaagaatgtcagaaaacctcgaaactgattcatctatccaatctgatgcttcagaaccaccaaaaaagaaaaaaagaacaaccaaagaactcccctgcctccaaaagaaggaagaaagaatcaagaaatgtctccaggaactctgcgaagaaaatatcttccaagaatcacaagacctccagctcctcatccaacagcagcaccagcaacagcaacagctcaagtcaaacatcctggagctcctcaaagacctcaaacagcagcagagatacctaagtttgcaaacaggaaacctacattaacaagatttaaaccaggctttgaatgggacacagaaatacaagtagcaaaagcatttaacagaccccctagattatttaaagaagataaacccttttacccatggcttcctaaaccagaacccattgtaaactttcaccttaattttaaattctaggcctacaatgttcacttagtggagtatgtttatataagttacacccccaataaactgtacataaaaaaaaaaaa

SEQ ID NO: 4476 - protein, 676 aa, Gammatorquevirus sp.
MPFWWKRRRRPWYGTFRRRWRRRQYKTRKRRRRYPRRRTRKTYGRRRRRRKHKVRRKIQKLTLKVWQPDSVRKCKIKLLGTLVNGAQGRQMYCYTNEIGNYLPPKSPGGGGFGCEIITLEYLYEQYLQRNCIWTKSNQYSDLCRYTGGKITLYRHPTIDFVFSYNIQPPFTIEKDTYLNLQPQLQLLSRRHRVILSKATNPKGRIKHTIKFKPPKEMSTKWFFQNDFSHTPLIQLNASAADFQYVTMGCCNVSQMSTFYALNSAHFFKQSTWGEFTSNPYEPYAKINLPLTFVYTEKGGKEGRYIITDKTFGKGTGSYTKSVSRLIGWFNNRVLLAKAVYQGEYKTDPLPESSKLATLPIVTARYNPIEDTGQGNEVWLTSIFHGAYDKPTVTPDYLIQGYPLYIAFFGYYNFLLQKSNDKGIMYSHMFVVKSNALRPLQSSTGQTYYPIVDWDFLNGKLPYDEYIGDNDSRKWFPTVESQLVSINNFVQSGPYIPRLDNVKNSTWELRYKLTMYFKWGGPQVTDPPIDDPQHKKDYPTPGTFQETLQIADPKKQKPETMFHEWDYRRGIITTAAIKRMSENLETDSSIQSDASEPPKKKKRTTKELPCLQKKEERIKKCLQELCEENIFQESQDLQLLIQQQHQQQQQLKSNILELLKDLKQQQRYLSLQTGNLH

SEQ ID NO: 4477 - protein, 125 aa, Gammatorquevirus sp.; identical to SEQ ID NO: 2128

SEQ ID NO: 4478 - protein, 120 aa, Gammatorquevirus sp.; identical to SEQ ID NO: 2129

SEQ ID NO: 4479 - DNA, 2576 bp, Gammatorquevirus sp.
cgggagcccgaggtgagtgaaaccaccgaggtctaggggcaactcgggctagggcagtctagcggaacgggcaagaaacttaaaataatttatttgtttcagatgtcagcattctataaaccaacaccatacaatggctgtactcaaaatcaaatgtggatgtcaatgataggagatgctcatgatattcactgtggatgcgaactgccatttgcccacctactagacagcatctttcctgaaggtcacaaagacagagatcttacaattaaacaaattgttgaaagagatttgaaagtatgccattctggtggaatagaagaaaaaagttttggtttggtcgccggttcaagcgccgcaaacctcgctggagaccaaagagaagaagaagaagatacaaaagaaaatatagaagagcttttggccgccgccgccgccgcagaagaaaggtaagaagaaaaagacctaccttgcttgttagacaatggcaaccagactctatagtaaactgtaaaattaaattctttggcagtctagtaatgggagcagaaggaacccaatacttatgctacactaataacaagtatgattggactcctcctaaacagccaggcggcggtggctttggcattgaaacctttaacttatcatacttatatgaccaatacaaattaaaaagatgcatttggacaaaatcaaatgactataaagacttatgtagatttataagagctaaatttgtattctttaggcatccattagtagactttgcagtttcatactctagacaaccaccatttaaactagaaaaagagtcctacatgaactgtcaccctatagccatattattacaaagacataaaaaagttatactgagtaaagctaatcacccacaaggaaaaaacaaagtaataataaccattaaaccaccaaaacaaatgatatctaagtggttttttcaaaaacatttttcagtttttgacctactagaacttaaagcatcagcctgcttactttcatatccaaaattatcagacaaaaatgaaaatcaaataagtacaatatactacttaaacaccctattttaccaagacacagactgggcacaatacatagaagacacctggaaaccaataaaaacactcaccacagacttagtctatctctataaaataggcaacaaatatggcacttatcaatttcaagaaagtaaaggtgcaggacaacaaaaatactaccacagtgttagtttagaaaaaggctacttttgcccatatgttattaatgcttatcaaattaatataaaaggtactgagacacatcagtatgcattgccactaggagcaggcagatacaatccagaaattgatgatggaaaaggcaatgaaatttatttagtgccaataaatacaggccactacaataaaccatctgaagacaacttgatatacagaggatacccactgtggctaatgttctatggcctatacagccttataaaaaaaatgaaaacagctagctggatggaattacatatgtttatagttaagtcagactacatactaccaaaaccaaaagatcctcacaaacaattctttccaataattgattataacttcataataggtaaaaacccatatgattcatacattagcaccacagaaaaacaactatggtatcccacttgtctacatcaagtagaaactattaacgcaattgtaaaatcaggcccatttatccccagactagaaaaccaattacagagtacatgggaactaccatacaaatcaactttttattttaaatgggggggtccacagatgccagaccagcaagttgcagatccaaaacttcaagactcctacattgttcccgataaccaacagcagggaatacagatatcagaccccctcaaacaagcagttgaaagtgttatccacacttgggactacagaagaggatccattacaaagaaagctcttaaaagaatgtaccaaaacctcgaaactgactcagatgtgtgctctcctacagggacaccaagaaaaagacaaagagtacccaatgcactcccgtacccacaagaagaaaaccaaaagatcaagacatgtctcctctcactctgcgaaagttcttcctcagaaaaagaggaggaaacatcaaacatccagcagctcatcaagcagcagcacaagcaccaaaagcagctcaagctccagctcctaactctgatacaagatataaaggacaaacagaatcaacttcaacttcacacaggtctaatttagttacccttactaagttcaaaaaaggttttgaagaaacaacagaacatgaattagcagcagcatttaacagaccaccaagaacctacaaagaagatccccctttttacccctggcttccaatatgccccaaagtatgctttaagcttaattacaaaccctaggcctacactgttcacttagtggtgtatgtttaataaagttaacaccccaaaaaaattgtaaaaaagggggatcttctttgtaggttcttggtggtctgttaaatgctgctgctaggctgcccatggg

SEQ ID NO: 4480 - protein, 662 aa, Gammatorquevirus sp.
MPFWWNRRKKFWFGRRFKRRKPRWRPKRRRRRYKRKYRRAFGRRRRRRRKVRRKRPTLLVRQWQPDSIVNCKIKFFGSLVMGAEGTQYLCYTNNKYDWTPPKQPGGGGFGIETFNLSYLYDQYKLKRCIWTKSNDYKDLCRFIRAKFVFFRHPLVDFAVSYSRQPPFKLEKESYMNCHPIAILLQRHKKVILSKANHPQGKNKVIITIKPPKQMISKWFFQKHFSVFDLLELKASACLLSYPKLSDKNENQISTIYYLNTLFYQDTDWAQYIEDTWKPIKTLTTDLVYLYKIGNKYGTYQFQESKGAGQQKYYHSVSLEKGYFCPYVINAYQINIKGTETHQYALPLGAGRYNPEIDDGKGNEIYLVPINTGHYNKPSEDNLIYRGYPLWLMFYGLYSLIKKMKTASWMELHMFIVKSDYILPKPKDPHKQFFPIIDYNFIIGKNPYDSYISTTEKQLWYPTCLHQVETINAIVKSGPFIPRLENQLQSTWELPYKSTFYFKWGGPQMPDQQVADPKLQDSYIVPDNQQQGIQISDPLKQAVESVIHTWDYRRGSITKKALKRMYQNLETDSDVCSPTGTPRKRQRVPNALPYPQEENQKIKTCLLSLCESSSSEKEEETSNIQQLIKQQHKHQKQLKLQLLTLIQDIKDKQNQLQLHTGLI

SEQ ID NO: 4481 - protein, 119 aa, Gammatorquevirus sp.
LFQMSAFYKPTPYNGCTQNQMWMSMIGDAHDIHCGCELPFAHLLDSIFPEGHKDRDLTIKQIVERDLKVCHSGGIEEKSFGLVAGSSAANLAGDQREEEEDTKENIEELLAAAAAAEER

SEQ ID NO: 4482 - protein, 113 aa, Gammatorquevirus sp.
MSPLTLRKFFLRKRGGNIKHPAAHQAAAQAPKAAQAPAPNSDTRYKGQTESTSTSHRSNLVTLTKFKKGFEETTEHELAAAFNRPPRTYKEDPPFYPWLPICPKVCFKLNYKP

SEQ ID NO: 4483 - DNA, 2574 bp, Gammatorquevirus sp.
ttgcaaaaattcggcgctcgcgcgcgctgcgtctaggggcaattcgggctagggcagtctagcggaacgggcaagaaacttaaaatatactttttgttttacagatgcaacatataagcagcaaagacttttatgaaccaacaccttttaaccaaataacaaaagaacagatatggatgtcccaaatagctgatggacatgacaatatctgtcactgcaagcacccttttgctcatctgcttgctaatatatttcctcctggtcacaaagatcgcactctcagcattaaccagatactgcaaagagattaccaagaaaaatgcctttctggtggaggcgccgcaggcgctggtacaaacccagacaatggagatttaagagaagatttagaactcgcagaaagagaccacatagaagacgcagacctagaagaccttatcgccgcaggagaaagcgccgccggtacaaggtaaaaaaaaaaagaaagaccctacctgttcttcaatggcaaccagactctataagaaaatgtaaaattaaaggggtgggggtactagtactaggtgctgagggtaaacaatttgtatgctataccaatgtaatacaatcaactccacctcctaaagctcccactggaggaggatttggctgtatgcaatttagtttaggatatttgtatgaacaatataaattcagaaacaatatctggacacactctaacatagctatggatttatgcagatacctaagatgtaaactaaccttttatagacatctagaaacagattttattgttagatatgacagacaaccaccatttccattagaacctctaacttacccagggtgccaccctcaaaacctactacttagtaaacacaaattgttagtgctaagcagatccacaaaacctaatggaaaaattaaaaaaacaaagattattaaaccaccaaaacaaatgctaactaaatggttttttcaacatgattttgcagctgcaccactgtttcaacttactgccgctgctgctaacttgaactatgcacatataggctgctgtaacaaaaacaatatagttacttttaaagcattaaatccaggctggttccaaaatggatcctgggcacaatatagacaagaaaccacaccttatttaccatataagggtatatttaataaactatggttttgggacacctcaaactggccagcagatgatgtaacatctggctatgatacatgggtaaaacaacatggctttcaggtaaaacacaacacttacacagaaagtgttagttacacagatggctttttttcacctaaagcaatgaatgcagtttttataactacagaaaaaaaaaagagtacacacataggttacttaccacttgtaacctgcagatacaatccagccaaagatacaggagcagggaatacagtatggctacacagcaaccttagtcatggctatgataaacctaccacagacaaatcaattataataaaaggcctacccatatggatgatattttatgggtggctatcatatgtacaatatgtaaaaaaagcttcagactttttaatttcatacaccatatgcatagaatgccctgctatagatatctctgcttcacatggagctacaaatctaatcatacctatagatcaaacatttttagaaggaaaaccaccatatggacaagacatatcacaaagtgatttaactcactggcatccagacatatacaatcaagtagaagttataaactcttttgtatccactggtccatacataccaaaatataatcaaacaagaaatagtacatgggaattgcattacttttatgaatttctttttaagtggggaggtgctgaaactacagaaccaccagttgcagacccaggaacacaacccacatacgatgctctcgataaacagtatggctcagtacaaattagggaccctaggaaacaaatctatgaatccattatacacccctgggactacaggagaggagttcttaaaagctcagctcttaaaagaatacaggaccacatgtcaattgaaagcactttccaagaagatgctccaccaatcaaaaaacaaagaattacagggccctgtcttgctatcccagaacaagaagaagaagaaatccaaacatgtctccaggagctctgcaaagaaaatatctaccaagaagaggaaaaagaaccaaacatcatccagctcatccagcaacagcgagagcagcagcagcaaatcaagtacaacatcctcagactaatatcagacttaaaacacaaacaaaatctactaagactacaaacaggattcatttaacaacatttaaacccggctttgaagagcaaacagaaagagaactggctatagctttctgcagaccccctagaacatacaaagaggacccccctttttacccttggcttcctataacccccaaagtatgttttaaccttaactacaaattctaggccaacaatgtacacttagtaaagcatgtttaataaagtttgtcccaaaaaaaaaaaaaaaaaaaaaaaaataaaaaa

SEQ ID NO: 4484 - protein, 674 aa, Gammatorquevirus sp.; identical to SEQ ID NO: 4344

SEQ ID NO: 4485 - protein, 122 aa, Gammatorquevirus sp.; identical to SEQ ID NO: 4345

SEQ ID NO: 4486 - protein, 124 aa, Gammatorquevirus sp.; identical to SEQ ID NO: 4346

SEQ ID NO: 4487 - DNA, 2574 bp, Gammatorquevirus sp.
cgggagcccgaggtgagtgaaaccaccgaggtctaggggcaattcgggctagggcagtctagcggaacgggcaagaaacttaaattattttttgttttttagatgtacagaaacaagttatggcaaccacctaaatataactgtgaaggcagaacacagctctgggtagatgcctgcatcaactcacacgattcttggtgtggttgtaatcatcctgctatacacctgcttagttctttactacctcctggccacaaggatagaggccttactgtggaagaactaatcattagagaacaatgccattctggtggggccgccgaaagagatggtggacaaacagaagatttacctacaagagaagaagaaactacaggagaaaacctagacgcaggattttcagacgccgccatagacgagctactggccgccgccgcagaagacgtagaaccaaggtaagaagaaaaagaaaatatattaaactactacaatggcaaccagatagtattagaaaatgcaaaattaaaggaatagagacattagtactaggagctaatggaaaacaatacagaaactatacaacaagcatgaatgaatggacaccccctactactcctacagggggaggctttgctactagtaaatactctttaggctacttatatgagcaacatcaactacacaacaatatatggacacattctaatgtgaactatgacctctgcagatatacaggctgtaaaatagacttttacagacaccaaacacaagactttatagttgtatatcaaagagaatatccaatgattataaatgaagacacatatacagaaacacacccacatagtatgctactacaacaacataaaatagttataccttccatgaaaacaagaccatttggaaaaaagaaaattagaaagaaaattagaccaccaaaacaacaaactaacaaatggttttttcaacactcatttacagacacagggttgctatttataaaagcagcagcatgtgaccttaactacattcacttaggtgaatacagtgaaaatgaactaacgagttttttagcactaaacatagaaagcttttatgtacaagctggatggggtcattctcaaaaaggtgcttataaacctataagcactatgactgttacttctgttacaggcataggatatgataataaacctttcacagtaaatgtaacagataactacaaagcaagtattaactatgacacaggattctttgcaagtcctattttaagaagcaaatccatttcaaaacccgatagcttagctacaaaaaaaccactaataggatgcagatacaatcctaaaatagacacaggtgaaggtaactatgtatggctaatagcagtccaacaacaagactatagaaagccatcctcagacaaaactcttatagcacatggaaaacccatgtggctactactatatggatggacagactatgtactcagactaaaaaaaggtcaagacatatatacacaatactacttagcattacaatcaccacaaattagatctacacaaggacaaacacaaaacaaaacatatataccaatagatgatacctttgtacagggaaatggaccctacaatgccactcctacttctaaacaaaaagaatactggtaccctactctagaacatcaacagcaaacattaaacaatatagtaaaatgtggtccatttataccaagacctgaaggcaaaaaatctaactgggaactacacattaactattgtttttattttaagtggggaggagctcttgacacaaaccaccaagttgcagacccttcaaaacaaacagactaccccgtgccagataacctcaaccaagcattacaaattgttgacccgcaaacccaaattccagcctccatgctacacacctgggactacagacggggattcattacacaaaaagctcttaaaagaatgcaaagctacttaccaatggaaccaactctatcaacagattcagagtgcagctcacccctcaaaaagagacgcctttcaaaaagagaacctccactccaagaagaagagacagaaacagaccactgtctccaacaactcttcgagcaaagttcatgccaagaaatccaagaagagaaagaaaacccaatatacaagctcatccagcagcagcagcagcagcagcatgtcatcaagtacaacctcctccaactcttaactgctttgaagaaaacacagctacaaatgcaactccatacaggaattttagaataaacagacgctttaaaccaggctttgaaacacaaacagaaaaagagttaagcattgcattctgtagaccccccagaacctttgtaaatgatcctccattttatccctggctaccaatagcacccaaagtgtcctttgcactcaactttaaattctaggccaacaatgtacacttagtaaagcatgtttaataaagttaaaccccccaaaaaaaaaaaaaaaaaaaaaaacgctagacggtgcagggaccggatcgagcgcagcgaggaggtccccggctgcccaaggg

SEQ ID NO: 4488 - protein, 662 aa, Gammatorquevirus sp.
MPFWWGRRKRWWTNRRFTYKRRRNYRRKPRRRIFRRRHRRATGRRRRRRRTKVRRKRKYIKLLQWQPDSIRKCKIKGIETLVLGANGKQYRNYTTSMNEWTPPTTPTGGGFATSKYSLGYLYEQHQLHNNIWTHSNVNYDLCRYTGCKIDFYRHQTQDFIVVYQREYPMIINEDTYTETHPHSMLLQQHKIVIPSMKTRPFGKKKIRKKIRPPKQQTNKWFFQHSFTDTGLLFIKAAACDLNYIHLGEYSENELTSFLALNIESFYVQAGWGHSQKGAYKPISTMTVTSVTGIGYDNKPFTVNVTDNYKASINYDTGFFASPILRSKSISKPDSLATKKPLIGCRYNPKIDTGEGNYVWLIAVQQQDYRKPSSDKTLIAHGKPMWLLLYGWTDYVLRLKKGQDIYTQYYLALQSPQIRSTQGQTQNKTYIPIDDTFVQGNGPYNATPTSKQKEYWYPTLEHQQQTLNNIVKCGPFIPRPEGKKSNWELHINYCFYFKWGGALDTNHQVADPSKQTDYPVPDNLNQALQIVDPQTQIPASMLHTWDYRRGFITQKALKRMQSYLPMEPTLSTDSECSSPLKKRRLSKREPPLQEEETETDHCLQQLFEQSSCQEIQEEKENPIYKLIQQQQQQQHVIKYNLLQLLTALKKTQLQMQLHTGILE

SEQ ID NO: 4489 - protein, 118 aa, Gammatorquevirus sp.
MYRNKLWQPPKYNCEGRTQLWVDACINSHDSWCGCNHPAIHLLSSLLPPGHKDRGLTVEELIIREQCHSGGAAERDGGQTEDLPTREEETTGENLDAGFSDAAIDELLAAAAEDVEPR

SEQ ID NO: 4490 - protein, 114 aa, Gammatorquevirus sp.
LSPTTLRAKFMPRNPRRERKPNIQAHPAAAAAAACHQVQPPPTLNCFEENTATNATPYRNFRINRRFKPGFETQTEKELSIAFCRPPRTFVNDPPFYPWLPIAPKVSFALNFKF

SEQ ID NO: 4491 - DNA, 2574 bp, Gammatorquevirus sp.
cgggagcccgaggtgagtgaaaccaccgaggtctaggggcaattcgggctgggcagtctagcggaacgggcaagaaacttaaaactatttgttttttagatgaacaacctgacagcaatagacttctacaaaccacctccatacaatactgaaactttaaatcaaatatggatgtcccagataagtgattctcatgacatttggtgcaactgcaacggtcctttcgctcatctgcttgctagtatttttcctcctggtcacaaagaccgtgatctcactgtgtctcaaattattaaaagagactacaaacagtcatgcctttctggtggaaaagaagaagaaggccctggtttggcagatggaggtaccgccagcgccgctaccgccgcagaaacaagacctatagaaggagaagaagaagactacccaggagacgaaatagaacatctactcgccgccgctatagaagaaagcgcaaggtaagaagaaaacaaaaaaaaattccaatacagcaatggcaacctgatagaattgttaaatgtaaaattaaaggatattcttgcttagtacttggagcagaaggcagacaaatgtactgctatacaaatgaagctaaagaatatttgcagccaaaagccccagggggaggtggttttggtactgaagtatttactttaaaatggctatttcaagaatggcaatcacataataacatatggacaaaaactaatgaatacactgacctttgcagatacacaggaacaaaaataatactatatagacatcctacagtagacttcattttttcatatgaaagaatgccaccatttgaaataaataaatttacatacccagaccttcaacctcaaaacatgctactacacaaacacaaaaaaattattcttagcagaagatcaaatccccgaggaaaaattaaacatattatacatataggaccccctaaacaaatgataacaaagtggtttttccaaagaaatttttgtgatgcacacctatttagaatttcagccacagcctgcacttttgaatacccaagatatgcaaagggcagtgccagcaacattcttacagttccctcattagatacttttttttatgcaaacagtgactgggcccacacacacaatggaccatacctcaatattaacacagcaccagcaaactattattttaaatacagagatagcagaggcatagaacaaaaaggcacatatcaaaaaccaacaggtacatcagaaacagcatactatcaaagtgtaaattacaacacaggtcttttccaaagtaatttacttaaagctcatttcataagttctactagtcacacaggcccctcacaagcagtactaccaattatatacttaagatataacccacatgaagacacaggccatggaaacgaagtttatttaacttcagtatttaatggaaattacaacaagccaggacccagtgcacctgatttatcatttaatggtgtgccactgtggatggcattttggggatactataattatttactaatatctacagcaaacaaaggcctgtaccttacacatatgtttgtagttaaatcaccagcactacgcccactatcacaagctactgaacaaaaatactaccccatactagatatggattttataaatggaaaattaccatggggtgaatatttatcagaaaaccaaaaaaaactgtggtacccaactgcagaaactcaaacacaaattattaatgccatagtatgtactggcccatatgttcctaagctaaacaaccagccagatagcacttgggaactaccttacagatatatttcttattttaaatggggtggtccccaaatacaggaccaaaacgtggacgacccctgtgccagaaaaacatacaatgttcccgatacaatcaaacaaacagtacaagtgcatgacccggcaaagctacacccagaaaccatcttccatgactgggactacagacggggtatcattacacaaacagctattaaaagaatgtcagaaaacctcgaaattgattcaattatctcatctgatgactcagaatcaccaccaaaaaaaaggaaaatcaccaaagagttgcccagtgccaatcaaaaagagcaagaaatcaagaaatgtctcctctcactctgcgaagaacctatctgccaagaaacaccgcaaacacttcagcagcacatccagcagcagcagcagcagcagcaacagctcaaaagaaacctcctgtacctcctcaacaacctaaagaaaacacagagaaatatggaactacagacaggaatcctagaataagaagatttaaaccaggatttgaagaagaaacagaacgagaactagcaagaatatttaaaagaccaccaagaacatatacatgtgaccccccattttacccctggttacctataacacccaaagtctgctttaaccttaatttcaaattctaggccaacaatgtacacttagccaagcttgttttttaaagtttcagtattgtatggaggtggtttgtagaagtctattgctgtcaggtggg

SEQ ID NO: 4492 - protein, 672 aa, Gammatorquevirus sp.
MPFWWKRRRRPWFGRWRYRQRRYRRRNKTYRRRRRRLPRRRNRTSTRRRYRRKRKVRRKQKKIPIQQWQPDRIVKCKIKGYSCLVLGAEGRQMYCYTNEAKEYLQPKAPGGGGFGTEVFTLKWLFQEWQSHNNIWTKTNEYTDLCRYTGTKIILYRHPTVDFIFSYERMPPFEINKFTYPDLQPQNMLLHKHKKIILSRRSNPRGKIKHIIHIGPPKQMITKWFFQRNFCDAHLFRISATACTFEYPRYAKGSASNILTVPSLDTFFYANSDWAHTHNGPYLNINTAPANYYFKYRDSRGIEQKGTYQKPTGTSETAYYQSVNYNTGLFQSNLLKAHFISSTSHTGPSQAVLPIIYLRYNPHEDTGHGNEVYLTSVFNGNYNKPGPSAPDLSFNGVPLWMAFWGYYNYLLISTANKGLYLTHMFVVKSPALRPLSQATEQKYYPILDMDFINGKLPWGEYLSENQKKLWYPTAETQTQIINAIVCTGPYVPKLNNQPDSTWELPYRYISYFKWGGPQIQDQNVDDPCARKTYNVPDTIKQTVQVHDPAKLHPETIFHDWDYRRGIITQTAIKRMSENLEIDSIISSDDSESPPKKRKITKELPSANQKEQEIKKCLLSLCEEPICQETPQTLQQHIQQQQQQQQQLKRNLLYLLNNLKKTQRNMELQTGILE

SEQ ID NO: 4493 - protein, 127 aa, Gammatorquevirus sp.
MNNLTAIDFYKPPPYNTETLNQIWMSQISDSHDIWCNCNGPFAHLLASIFPPGHKDRDLTVSQIIKRDYKQSCLSGGKEEEGPGLADGGTASAATAAETRPIEGEEEDYPGDEIEHLLAAAIEESAR

SEQ ID NO: 4494 - protein, 109 aa, Gammatorquevirus sp.
MSPLTLRRTYLPRNTANTSAAHPAAAAAAATAQKKPPVPPQQPKENTEKYGTTDRNPRIRRFKPGFEEETERELARIFKRPPRTYTCDPPFYPWLPITPKVCFNLNFKF

SEQ ID NO: 4495 - DNA, 2574 bp, Gammatorquevirus sp.
cgggagcccgaggtgagtgaaaccaccgaggtctaggggcaactcgggctagggcagtctagcggaacgggcaagaaacttaaaatatacactctcttacagatgctatctaccaaagacttctacaaaaaatgtacctacaatcaagacaccaaaaatcaactctggtgttctataattgctgattctcatgattcaacctgtggctgtgacagaccatttgctcatcttctagcaagcatatttccaccaggacacgcagacagaaaccttaccatcaatcaaatccttgaaagagactacaaatcactatgcctttctggtggagcagaagaagaaaattctggtggggtagaagaggcagatatcaaagaagaaaatactataaaacaagaagacaaagaagacgcagacagtttacaaggagaagatttagaaaaccttctaagcgccgtcgcagacgcagaaaaaaggtaagaagaaaaaaagctgctcttaagcttgtacaatggcaaccagacagtataactaaatgtaaaattaaagggcttggacttctagtaatgggaagcgaaggcagacaattttcttgttatacagtagttaagaacaaatattggccaccaaaagtaccctctggaggtggatttggctgtgaaaaatattctttatcttatgcttatgaggaatataaatttggaaacaacatatggactaaaacaaatgtaagcaaagatctgtgcagatacttactagctaaacttgttttttttagagctcctgagacagattttattgtatcatatactagacaaccaccatttgacttaaatatattaacatatccaggttgccacccacaccagctacttcaatctaaacacaaaaaaataatttacagcaaatttactaagccaaatggaaaatacaaatacaaaatgattattaaacctcctaagcaaatgataaacaaatggtttttcacatctgacttttgtaaacaaggactattccttctaaaaggtgcagcactaaatttaaactactcatatctaggctgctgcaactcaaaccaactagcaaatgttctttctctaaacattaaattttaccaacatgcagcgtgggcacaagtaacaactccaaacccatacaaaccatactctacagcaccagacccaatatgggctaaatacccaaactcagcagacaaaaaaaaaataagtggaatgaatacagattatacatctagtgtaagcttaaaaacaggctggtttagaccagaaatattacaagccagccagttattccaaacagaatcaactgttacagctacaagagctgtaggagctgctagatacaatccaaacaaagatgcaggcacaggaaacaaagtttatttaacctctatttttgcagacacatataagccaccaacaacagacaaaatgctagtaatagaagacttacctatctggctagcattatatggatttacagactatgttagaacagttaaaacctcagatttcttaaaacaaagcctactaataattcaaacagactacatgcattgtgaaccagaaatacagtcttgtaaaatatttataccactagacttgtattttatacaaggcaaaagttacagaggattaacacctacagactatgaagccagaaactggtatcccagcttagaaagacaactagatgctattaatgctttagttgaaactggaccctacattccaaaattatcagaaaccagaaacagtacatgggaacttaaatacacttattctctttttttcaagtggggaggcccccaaatacatgatgaacaagtacatgacccatgtacctttccaacataccctgtccccgataaggacagcaagacaatacaaatcaaagacccagcaaaacaaaaaactgaatcccttttacacaaatgggatgtcagaaggggaatcattaaagaacaagctattaaaagaatgttcagcaacatctcaactgatacagaatttcaaccaattacagaagatgctccactcccgaaaaagaaaagaagaggagcccgactcaccgatccccaagaagaaatcaaagagatcaaagcctgtctccagagtctctgcgaagaaagtacataccaagaaatccaagaaacacaagacctcagacagctcatcaagcaacagcagcagcagcaagaccagctcaagtacaacatcctcaagctcctctcagagttgaaaaaaaaacaacaacaactacaactacaaacaggcatgtttctataaaatttaacccaggtcatgactgggaaacagaagtacaagtagcagctgcatttaaaagacccccaaggacatacaaaacagaccctcccttttacccatggttaccacctgaaccctttgtaaattttcaccttaactataaaggctaggcccttactgttcacttagtagtgtatgtttatataagcacaaccctaaatagtttaccccgctagacggtgcagggaccggatcgagcgcagcgaggaggtcccaggctgcccaaggg

SEQ ID NO: 4496 - protein, 664 aa, Gammatorquevirus sp.
MPFWWSRRRKFWWGRRGRYQRRKYYKTRRQRRRRQFTRRRFRKPSKRRRRRRKKVRRKKAALKLVQWQPDSITKCKIKGLGLLVMGSEGRQFSCYTVVKNKYWPPKVPSGGGFGCEKYSLSYAYEEYKFGNNIWTKTNVSKDLCRYLLAKLVFFRAPETDFIVSYTRQPPFDLNILTYPGCHPHQLLQSKHKKIIYSKFTKPNGKYKYKMIIKPPKQMINKWFFTSDFCKQGLFLLKGAALNLNYSYLGCCNSNQLANVLSLNIKFYQHAAWAQVTTPNPYKPYSTAPDPIWAKYPNSADKKKISGMNTDYTSSVSLKTGWFRPEILQASQLFQTESTVTATRAVGAARYNPNKDAGTGNKVYLTSIFADTYKPPTTDKMLVIEDLPIWLALYGFTDYVRTVKTSDFLKQSLLIIQTDYMHCEPEIQSCKIFIPLDLYFIQGKSYRGLTPTDYEARNWYPSLERQLDAINALVETGPYIPKLSETRNSTWELKYTYSLFFKWGGPQIHDEQVHDPCTFPTYPVPDKDSKTIQIKDPAKQKTESLLHKWDVRRGIIKEQAIKRMFSNISTDTEFQPITEDAPLPKKKRRGARLTDPQEEIKEIKACLQSLCEESTYQEIQETQDLRQLIKQQQQQQDQLKYNILKLLSELKKKQQQLQLQTGMFL

SEQ ID NO: 4497 - DNA, 2572 bp, Gammatorquevirus sp.
aaataaaaaattgcaaaaattcggcgctcggtctaggggcaattcgggctagggcagtctagcggaacgggcaagaaactaaaaattatattgtttttacagatgctttgcagcaaagacttctttaacaaatctgaatacaatgctgaaactaaagaacaaatgtggctaagtattataggagactcacatgattcaatatgtaaatgccagttttgttttgcacatttactggcatgcattttcccactaggccactcagatagaaacaaaaccattgaagaaattctacagagagactacaaagcaaaatgcctttcttctggaggaggagacgccgctacttttggcccaagcaaaaatatcaaagaagaaggtactacagaagaaaaagatggccaaatagaagaagaagacgacgcagacctcgcaaacctactcgccgccgtagaagaagaaggaggtacaaggtaagaagaaaaaaacctactttgactgttaaacaatggcagccagatagcattgttaaatgcaaaattaaaggatttactactcttgtactgggagctgaaggcaaacaattagtgtgctacacaaatgtaaaaactgctacaaccccaccaaaagctccaggtggagggggatttggatgtgaacagttttctttagaaagcttatatactgaatttaaatttcaaagaaatatatggactaaaagtaatatactaaaagacttatgtagataccttctatgtaaagtcacattttacagacatccagaaacagactttattgtagcctacagcagacaaccaccatttgacatatctaaagacatatataccagctgtcacccagctcaactactactagctaaacataaaataattataccaagcagatctacaaaccccaaaggcaggctaaaggtgaaaagacttataaaaccacctaaacaaatgctaaacaaatggttttttcaagaacattttgcacactttcctttagtaatgtttaaagctgcagctgcaaactttaattatgcaaatttaggctgctgtaataaaaaccaaataagtacttttttttatataaacactgccttttacaaactaccacactgggcagccagaaagacaacagacccatatgttccatatataggctttccaagtactgtatacacatggaacttaaaagaatatcaatctgcagatgtaaccacagtggcaaaagatactcaaaaatacacaaaacccaacaactacataaactcaattagttacacctcaggattcttttcaaaacaaatactacaagcagtactaataacctcacaaagcaccatagcatcaccaacaggtacaacacctctaaatatatgcagatacaatccttcaattgacagtggaaaaggcaacacaatatggctagttagtacacttgctaacagctggcaaaaaccacctacagacaaaataatcatatacagtggcctaccattatatttaatgctatatggctttcttagctatgtacaatacatgaaaaaaacacctgattttttcaatggatatgtaattgccatggaatcacctgcactactaccatactcacaaataggagctgaaaccaaaataatagtaccactagacaataatatgccagctggcaaagcaccatatgatgaagacctaacagcaaccatgaaaacctactggtaccctaacatatacaatcaactttctgtattaaatacaattgtagaaagtggtccttttgttcccaaatactctgaaactaaaaacagtacttgggaacttgatatgttttacacctttcttttcaagtggggcggcccagaaacacctgaacctgcagttgccgaccctcagctacaagggacttatgaagtgcccgatacaatccaaaatgcagtacaaattagggacccagcaaagcaaaaagctgccagccttttgcacccctgggacatcagacatggttactttacaaagtcagctcttaaaagaatgtatgaaaacctctcgattgactcaactttcgcatcagatacagaacacaggccaaaaaagaaaaagaagcagacaggaccagagctctcacacccacaagaggaggaggaagagctccaagcatctctcctctcactctgcgaagaaaatatctaccaagaaacaacaccacaaaacctcgagcagctcatcagacaacagcagcaacagcagcaggagctcaagtacaacatcctcagaataatatcagacctgaaagacagacagaacctgttaagactacaaacaggtgcactgtactaaccagatttaaaccaggttttgaagcagacacagaaagagaattatccataatttttcgaagaccaatgagaacatataaagaagatcccccattttacccatggttacctcctgaaccctatgttaactttaatcttaatttcaaatgctaggccaacactgtacacttagcagtggatgtttaataaagtatgcaccccaaaaaaactgtaaaataaaaaaaaaaaaaaaaa

SEQ ID NO: 4498 - protein, 675 aa, Gammatorquevirus sp.
MPFFWRRRRRYFWPKQKYQRRRYYRRKRWPNRRRRRRRPRKPTRRRRRRRRYKVRRKKPTLTVKQWQPDSIVKCKIKGFTTLVLGAEGKQLVCYTNVKTATTPPKAPGGGGFGCEQFSLESLYTEFKFQRNIWTKSNILKDLCRYLLCKVTFYRHPETDFIVAYSRQPPFDISKDIYTSCHPAQLLLAKHKIIIPSRSTNPKGRLKVKRLIKPPKQMLNKWFFQEHFAHFPLVMFKAAAANFNYANLGCCNKNQISTFFYINTAFYKLPHWAARKTTDPYVPYIGFPSTVYTWNLKEYQSADVTTVAKDTQKYTKPNNYINSISYTSGFFSKQILQAVLITSQSTIASPTGTTPLNICRYNPSIDSGKGNTIWLVSTLANSWQKPPTDKIIIYSGLPLYLMLYGFLSYVQYMKKTPDFFNGYVIAMESPALLPYSQIGAETKIIVPLDNNMPAGKAPYDEDLTATMKTYWYPNIYNQLSVLNTIVESGPFVPKYSETKNSTWELDMFYTFLFKWGGPETPEPAVADPQLQGTYEVPDTIQNAVQIRDPAKQKAASLLHPWDIRHGYFTKSALKRMYENLSIDSTFASDTEHRPKKKKKQTGPELSHPQEEEEELQASLLSLCEENIYQETTPQNLEQLIRQQQQQQQELKYNILRIISDLKDRQNLLRLQTGALY

SEQ ID NO: 4499 - protein, 127 aa, Gammatorquevirus sp.
LFLQMLCSKDFFNKSEYNAETKEQMWLSIIGDSHDSICKCQFCFAHLLACIFPLGHSDRNKTIEEILQRDYKAKCLSSGGGDAATFGPSKNIKEEGTTEEKDGQIEEEDDADLANLLAAVEEEGGTR

SEQ ID NO: 4500 - protein, 105 aa, Gammatorquevirus sp.
LRRKYLPRNNTTKPRAAHQTTAATAAGAQVQHPQNNIRPERQTEPVKTTNRCTVLTRFKPGFEADTERELSIIFRRPMRTYKEDPPFYPWLPPEPYVNFNLNFKC

SEQ ID NO: 4501 - DNA, 2570 bp, Gammatorquevirus sp.
tccatttgtaaagtgagtgaaaccaccgaggtctaggggcaactcgggctagggcagtctagcggaacgggcaagaaacttaaaacaatttttgttttacagatgtcctacttgtttcaaccaacaaaatacaacaatgaaaccaaagaacaactgtggatgagtatttttgcagatgcccatgattccatttgtgaatgtcctacaccatttgcacacgccctttggtgcatgtttccagaaggtcacaaagatagaaaattaaccattgaacaagtaataaccagagatacagcactatggcattctggtggtacagaagaagaaaaccatggtttggcagatggagacgcaaaccaacaagaaaatacaaaacaacaaccagaagaagaaaaagaagactcccttggagacgtagaaatagaagaacttatcgccgccgccgacgacgccattacaaggtaagaagaaaaaaaagaaaaattactatacaacaatggcaacctgaaagtataaaaaaatgtaaaattaaaggtacaggacagctagtactaggagctgaagggacacaatacagatgctttactgtttataaaaatgaatggacaaatcctaaagttgccactggtgggggatttggagttgaactgtttactctaaattacttatacaaagaatacttagccaaaaataatatatggacagcatcaaatgtttacaaagacttttgcagatacactggatgctccataaccttatttagacaccccactactgactttattttttgctatgacatacagccaccattcacaattaacaagcacacctacatgatggctcatccacactttttacttcaaagaaaaagaaaaaaaatactactaagcactctaacaaaacctaatggaaaattaacaaaaaaaataaaaataaaacctccaaaaatgctacaaaccaaatggcattttcaagaagaatttgcagactttggcttagttactttaatagcatcagcatgcaattttagatatccatggcttgcctgctgcaatgaaaatttattaataacactttactacctacaaccaactttctggtcacactctgaatgggcacaatattctacaacctgctataaccccaaaggtcacacaaacccaatgaaagaaactttaacatataaaggtgaaattaataacaagccctatgagtatactatgacacactttaacccacccacttatcaacaatctctaaacaaagatgtaggttggtttaatccaaaagttcttaatgcacacacagtcttagatggaaagcaaagacaatcattagtaccctgtggagtactcagatataatccatacatagacacaggggaaaaaaacaaactctatgtctgtagtgtactagttggatcatggactgaaccaaaagaccaagaccttgtactagaaaactttcctctttgggctatgttttttggattcacatcctacctaaaacaagtaaaatctaaaacagtaccactaaatggatccatgctagtagttaaatctccagctctatacagagtatttggagaagaccccaaagacttctacccactaattgataaatcttttatgctaggcaaaggtacaaacaacacagaccccatactaccaaaagccaacctatggtatccagcagtatttgctcaaagagacagtatttcacaaatagttaattgtggaccttatttaccaaaatacaatgaagtaaaagaaagcacatggcaattaaatttcttttacaacttttattttaagtggggaggctcctacccaccacaacaagaagcagaaaatccaaaggacaaaggtacctatcctatacccaatacagagcaagaaacaatacagattgaaaaccctcttaaacaaaaatacaacaccatatttaaaccctgggactacagaagaggtacccttacaaaaacagctcttaaaagaatgtatgaaaacctctcggatgatgaatctttatcaacagattcaacatgctcaacctctccaaaaagaaagaagctactcccaacactccaagacccgaaaaaagaaagacaagaaatccagacatgtctcctctcgctctgcgaagaaagttccttccaagaaacacaggagaacgccaacctcttccagctcatcaaaaaccagcacaagcaacagcagcaactcaagtacaacttactaacattgatttcagatttgaaagcgaaacagagaaaccttttacatcaatcaggatttctagcttaaacatattcaaacctggctttgaatatgacacagaaaaagaaatggccatagcctttaaaagaccaatgagaaagtttaagcatgatccccccttttacccctggctaccccctgctcccaaagtctgctttaacctcaactacaaagactaggccaacaatgtacacttagacaagcttgtttaataaagttgtaccaaaaaaaaaaaaataaaataaaaaaaaagaacaactgtgaataaatgtttttacaaatgcccataat

SEQ ID NO: 4502 - protein, 668 aa, Gammatorquevirus sp.
MAFWWYRRRKPWFGRWRRKPTRKYKTTTRRRKRRLPWRRRNRRTYRRRRRRHYKVRRKKRKITIQQWQPESIKKCKIKGTGQLVLGAEGTQYRCFTVYKNEWTNPKVATGGGFGVELFTLNYLYKEYLAKNNIWTASNVYKDFCRYTGCSITLFRHPTTDFIFCYDIQPPFTINKHTYMMAHPHFLLQRKRKKILLSTLTKPNGKLTKKIKIKPPKMLQTKWHFQEEFADFGLVTLIASACNFRYPWLACCNENLLITLYYLQPTFWSHSEWAQYSTTCYNPKGHTNPMKETLTYKGEINNKPYEYTMTHFNPPTYQQSLNKDVGWFNPKVLNAHTVLDGKQRQSLVPCGVLRYNPYIDTGEKNKLYVCSVLVGSWTEPKDQDLVLENFPLWAMFFGFTSYLKQVKSKTVPLNGSMLVVKSPALYRVFGEDPKDFYPLIDKSFMLGKGTNNTDPILPKANLWYPAVFAQRDSISQIVNCGPYLPKYNEVKESTWQLNFFYNFYFKWGGSYPPQQEAENPKDKGTYPIPNTEQETIQIENPLKQKYNTIFKPWDYRRGTLTKTALKRMYENLSDDESLSTDSTCSTSPKRKKLLPTLQDPKKERQEIQTCLLSLCEESSFQETQENANLFQLIKNQHKQQQQLKYNLLTLISDLKAKQRNLLHQSGFLA

SEQ ID NO: 4503 - protein, 120 aa, Gammatorquevirus sp.
MSYLFQPTKYNNETKEQLWMSIFADAHDSICECPTPFAHALWCMFPEGHKDRKLTIEQVITRDTALWHSGGTEEENHGLADGDANQQENTKQQPEEEKEDSLGDVEIEELIAAADDAITR

SEQ ID NO: 4504 - protein, 137 aa, Gammatorquevirus sp.; identical to SEQ ID NO: 3970

SEQ ID NO: 4505 - DNA, 2570 bp, Gammatorquevirus sp.
aataaaaaattgcaaaaattcggcgctcgcgcctaggggcaattcgggctagggcagtctagcggaacgggcaagaaacttaaatttatttttactttacagatgcaaaacctgtctcacaaggacttctttaaaccaacaccttacaatacagataccaaaaatcaaatatggatgtcacaaattgctgactctcatgacaatatctgtcactgcaacagtccttttgggcacctgcttgcttctatttttcctcctggtcataaggaccgggatcttacagttaatcaaatactacaaagagactacaaagcactatgcctttctggtggagacgcagaaacaagccatggtttcgcagattcaaatacaaaactagaaaaaggtttagaagaagaaaaagaaaattccctagacggagaagatatagaaaagttactcgccgccgccgcagaagaaaggtaagaagaaaacttaaaaaaataactcttaaacaatggcaacctgaatctataaagaaatgtaaagtaataggattttcatgcttagtactaggagctaatggaagacaaatgtactgttatacaaatgtagctgatcaatatacaatagcaaaatctccagggggaggaggctttggctgtgaacttataaacttaaaatggttatatgaccaatatactgcacacaataatatatggactcgatctaatgagtacacagacttagtaagatatacaggctgtaccataactgtttttagacatccatatgttgattttatttttcaatatgcactgcaaggtccattcacattaaacaaatatacatacccacagcttcaaccacaaaatgctcttctagctaaacataaaagaattatcttaagcagacaaaatgctccaaataaaaaacaagctgtaaaaattaagataaaaccgcctaaactaatgtctaccaagtggttttttcaaaaagatttctgtgaatatgctctagtacaaatatgtgccactgcatgctcactaacatttcccagaatacaaccaaatgcacaaaaccaaataataactttatatgccttaaatccttccttttactttaacagtaactggctagccacgagttcacaaggctataaaaatataactacacaaatttttccactgttttttgatcacaacataaaaggcattccatctccatatgaactaaaccccaataaaattccaacaacagtagaagaaccatataaaagtaatatatatctctacacaacttcatacaaatatggattcttttcacctcaagtaatgacagcaactagggtatatacaaaaaaggatgacccagagggtactaaaattgctaatttaccactaatagtccttagatacaacccaaacacagatgatggctatggcaatgaaatttacttaacaagcctacacaagggacactatgacaaaccctcagttacaccagattatatgtttccaggcgtccctctctggatgggactatatggctatggaaactatcttatacaatccagcaaagacaaaggcctactaactacacacatgttcatattaaaatcaagatcactacacccaatatcacaagttacaaaagatacatactatccaataattaacacagatatggcttttggaaaactaccatatgatgaatatataactactaccaaaaaaaatgcatggtatcctacaggtgaaatgcaagatgatgctttaaacaacatagtaatgacaggaccatttcaaccaaaatttaacaatataactaacagcacctgggaacttgactataaatacaaatttttttttaagtggggcggtccatacacatcagaccccgtggcagaagacccatgtaaaaaaggaaccttccctacactcagtgcactgcaacaaacaatacaaattaagaacccagagaaacttagtccagaatccattctacaccagtgggacttcagaaggggcattgttacagcaacagctcttaaaagaatgtcagaaaacctcgaaactgatacatctctcgaatctgatgactcagaaacaccaaaaaagaaaagaaaagtcagcaaagagatgccatgcttcaatcaaaaggaagagaaaatcaaaaaatgtctcctctctctctgcgaagagcctacctaccaagaaaccccgcaaaacctcgagcagctcatccagcagcagcagcagcagcagcaccagctcaagaaaaacatctacaagctcctcaaacacctgaaacatggacaacaacaagttcaactccaaacaggagttttagagtagaaccattcaaaccagggtttgaatgggaaacagaatgtgaatgtgcaaaagcattttgcagaccacccagacattataaaaatgatcccccattttacccctggcttcctattacacccaaagtaatttttaaccttaattttaaagactaggccaacaatgtacacttagtggagtctgtttatataagttacatccccaaataaattgtaaaaataaaaaaaaaaaaaaaaa

SEQ ID NO: 4506 - protein, 672 aa, Gammatorquevirus sp.
MPFWWRRRNKPWFRRFKYKTRKRFRRRKRKFPRRRRYRKVTRRRRRRKVRRKLKKITLKQWQPESIKKCKVIGFSCLVLGANGRQMYCYTNVADQYTIAKSPGGGGFGCELINLKWLYDQYTAHNNIWTRSNEYTDLVRYTGCTITVFRHPYVDFIFQYALQGPFTLNKYTYPQLQPQNALLAKHKRIILSRQNAPNKKQAVKIKIKPPKLMSTKWFFQKDFCEYALVQICATACSLTFPRIQPNAQNQIITLYALNPSFYFNSNWLATSSQGYKNITTQIFPLFFDHNIKGIPSPYELNPNKIPTTVEEPYKSNIYLYTTSYKYGFFSPQVMTATRVYTKKDDPEGTKIANLPLIVLRYNPNTDDGYGNEIYLTSLHKGHYDKPSVTPDYMFPGVPLWMGLYGYGNYLIQSSKDKGLLTTHMFILKSRSLHPISQVTKDTYYPIINTDMAFGKLPYDEYITTTKKNAWYPTGEMQDDALNNIVMTGPFQPKFNNITNSTWELDYKYKFFFKWGGPYTSDPVAEDPCKKGTFPTLSALQQTIQIKNPEKLSPESILHQWDFRRGIVTATALKRMSENLETDTSLESDDSETPKKKRKVSKEMPCFNQKEEKIKKCLLSLCEEPTYQETPQNLEQLIQQQQQQQHQLKKNIYKLLKHLKHGQQQVQLQTGVLE

SEQ ID NO: 4507 - protein, 120 aa, Gammatorquevirus sp.
MQNLSHKDFFKPTPYNTDTKNQIWMSQIADSHDNICHCNSPFGHLLASIFPPGHKDRDLTVNQILQRDYKALCLSGGDAETSHGFADSNTKLEKGLEEEKENSLDGEDIEKLLAAAAEER

SEQ ID NO: 4508 - protein, 120 aa, Gammatorquevirus sp.
MLQSKGRENQKMSPLSLRRAYLPRNPAKPRAAHPAAAAAAAPAQEKHLQAPQTPETWTTTSSTPNRSFRVEPFKPGFEWETECECAKAFCRPPRHYKNDPPFYPWLPITPKVIFNLNFKD

SEQ ID NO: 4509 - DNA, 2569 bp, Gammatorquevirus sp.
tcacgcgccggcgtgagtgaaaccaccgaggtctaggggcaattcgggctagggcagtctagcggaacgggcaagaaacttaaaactattgtttgtttttagatgtccatctataaaccaactaaatacaacaaagaaactaaaaaccaactatggatgtctgctataggagatatacatgattcattttgtggatgtgacattccatttgctcatctactagacaacatatttccagaaggccataccgacagaaacaacaccatatcagctattattgaaagagataaaaaatgcctttctggtggagaagaagaaaaagaaattggtatggcaattggtacaggtattggagaaaaagaagacctcaaaaaagaagaagaagaagaagacctcgcagacgaagatatactacaaggactaatagacgcaggagaagacgccactacaaggtaagaagaaaaaaaaaaaaaatacctgtaactcaatggcagccagactccattagaaaatgtaaaattataggactgggaactcttgtactaggagcagaaggcacacaaatgtactgttatactacagaaaaagacaaatatgtgccaccgaaattcccatatggagggggatgtggagttgaaatatttaccttaagatacttatatgaacaatactgtatgcataacaatatatggactacttcaaatgactttaaagacttactaacataccatggatgtaagattactttttttagacatccagaaacggactttattgtaagctatacaaggacaataggagaaggcataactaaatatacatttccagctgtacatccacaccaacagtttcttagcaaaagacacaaagttatttttagcacagctacaaaacctaatggaaaacccacagttaaattatttataaaaccacctaatcaaatgctaacaaaatggttctttgcaaaaaactttactaaatatccactttttacacttagaggagcagccattaacttgagatactcatacctaagtgacaaaaaccaaaatcaacttgtaaatatatatgctataaacccagacttttatatgcacacaaactgggatcaagcattttctccaagtagtagtcctaaccactatgttccatatacaaacattccaaacaacctaaggtacgagatcaaaacaccaacaggtacagcaacaagaacactaaccattactaacacaaatgccttatctcttactgaaggctacttcaacagccaatttttaaaagctataaacattcctgttcaaggaacacatgcagctacaactcctctactactaggtagatataatccaaccacagatgatggtacaggcaaccaaatttatttagtaagtacagtagcagacagctggcaaccaccaagtaaagatttaaacttatttctctcaggaatgcctctttggttaggcttatatggtttttttagctttataaatacaattaaaccagcacctgaatttttaaaaacacatctcctagttttacacagtgagtctatacactgctggcctcaaataggaggctgcaaaaaatatgcacctatagactgggaatatatacaaggtaaaaaaacatgggaccaagatatacaaccatcagaaagaactaaatgggctccaaactgtacatggcaaatgaaaactttaaatgctattgtagaatcaggaccttttataccacagtattcagaccagcttaaaagtacctgggaactaaaatataaatataaattttattttaagtggggcggtccacaaaaccatgaaccagatgtcaaagatcccaatgaccttcccacctttgatgtacccgatacaatcaaccaaagaatacagattaggaacccagaaacccaaggcacagaaactatccttcatccctgggacttccgaaggggattcattacagaaacagctcttaaaagaatgtatgaacacctcccacctgattcagaaattgaattcattacagaaccaccaaaaaagaaaaagagaaaaggagccgcataccaaaacccacaagaagagaaccaggaaatccagagctatctccagacactctgcaaagaaaataccttgccagagcaagaaacagacctacagctcctcatccaccagcagcaccagcagcagcaacaagtcaagtacagcatcttcaagctcctcctagacttgagagacaaacaaaaaatgctacagctacaaactggactattagactaacaaaatttaaaccaggacatgaactagaaacagaacaccaagtagcaaaagcattttgtagaccccctagaacctacaaagaggacccccctttttacccttggcttcctcctgaaccctatgtaaactttcacctcaattttaaaggctaggcccacaattttcacttagtggagtatgtttatataagttacacccccaaaaaaactgtaaaataaaaaaaaaaaaaaaaaataaaaaatttcaaaaattcggcgctcgcgcgcgctgcgcgcgcgcgagcgccg

SEQ ID NO: 4510 - protein, 662 aa, Gammatorquevirus sp.
MPFWWRRRKRNWYGNWYRYWRKRRPQKRRRRRRPRRRRYTTRTNRRRRRRHYKVRRKKKKIPVTQWQPDSIRKCKIIGLGTLVLGAEGTQMYCYTTEKDKYVPPKFPYGGGCGVEIFTLRYLYEQYCMHNNIWTTSNDFKDLLTYHGCKITFFRHPETDFIVSYTRTIGEGITKYTFPAVHPHQQFLSKRHKVIFSTATKPNGKPTVKLFIKPPNQMLTKWFFAKNFTKYPLFTLRGAAINLRYSYLSDKNQNQLVNIYAINPDFYMHTNWDQAFSPSSSPNHYVPYTNIPNNLRYEIKTPTGTATRTLTITNTNALSLTEGYFNSQFLKAINIPVQGTHAATTPLLLGRYNPTTDDGTGNQIYLVSTVADSWQPPSKDLNLFLSGMPLWLGLYGFFSFINTIKPAPEFLKTHLLVLHSESIHCWPQIGGCKKYAPIDWEYIQGKKTWDQDIQPSERTKWAPNCTWQMKTLNAIVESGPFIPQYSDQLKSTWELKYKYKFYFKWGGPQNHEPDVKDPNDLPTFDVPDTINQRIQIRNPETQGTETILHPWDFRRGFITETALKRMYEHLPPDSEIEFITEPPKKKKRKGAAYQNPQEENQEIQSYLQTLCKENTLPEQETDLQLLIHQQHQQQQQVKYSIFKLLLDLRDKQKMLQLQTGLLD

SEQ ID NO: 4511 - protein, 117 aa, Gammatorquevirus sp.
MSIYKPTKYNKETKNQLWMSAIGDIHDSFCGCDIPFAHLLDNIFPEGHTDRNNTISAIIERDKKCLSGGEEEKEIGMAIGTGIGEKEDLKKEEEEEDLADEDILQGLIDAGEDATTR

SEQ ID NO: 4512 - protein, 104 aa, Gammatorquevirus sp.
LQRKYLARARNRPTAPHPPAAPAAATSQVQHLQAPPRLERQTKNATATNWTIRLTKFKPGHELETEHQVAKAFCRPPRTYKEDPPFYPWLPPEPYVNFHLNFKG

SEQ ID NO: 4513 - DNA, 2568 bp, Gammatorquevirus sp.
cgcgcgcgagcgccgtcacgcgccggcgctcgctaggggcaattcgggctagggcagtctagcggaacgggcaagaaacttaatatataactctttttacagatgcaaagacttactttttttcaaccaccactatacaatcatattggcagaaatcaactttggatagatgcctgtatctttgcacacgattgctggtgtggctgcaatcatcctattgctcattttattgattctgtattgccttctggtcacaaggatagagaccttactattaacgagatcctgtccagggacctaaaagaaacatgcccttctggtggaaccgtcgcaaaaagtggtggggacgcggccgctttcgctaccgaagaagaaaatcaaatttcaaacgcagaactagaagaaatctttacagaagacgccataaacgagctcctagacgccgccgcaaaagacgaacaaccaaggtaagaagaaaaaagaaataccttaaattactacaatggcagccagaatctattagaaaatgtaaaattaaaggctatgaaacccttatactaggagctaatggaaaacaatttagagactatacatctaccatgaatgactgggttccacccacagtaccaggtggaggtggattttcaatatcaagatatactttagaatacctgtatgaacaatttcaactacacaacaacatatggacacattccaatgaaaactatgatctctgtagatacctaggaactaaaattgtattctacagacatccacacacagactttgtagtacaataccaaagagaatatcccatgacagaaacagccctaacaccactacatacacatccactaattttactacaacaaaaaaacaaaataataattccaagcagaataacaaaaccacatggcaagattaaaattaaaaaatttattaaaccacctgcacaacaaacaaataaatggtttttcattagagactttgcaaaaaccccactactattaattaaagcaacagcctgtgatttaaactatgttagactagccaaaggcagtgaaaacaaccaaacaaacatatggagtctcaacactgtattttacttaaatggagcctttggacaaaaagcaagcagtcataatacctatgaacctgcacacacaatgacttttcaacaaggacaaatacaaggtaccctacccaacaacaaatcatttcaaacacacatgaaaaacacatatgattcttcagtaaattattctgaaggctggtttaactctaatgtattactcagctctacacttacagtacctcaattacaaactaagcctgttttcatcacaagatacaatccaatgctagacacaggcaaaggtaataaaatatggctaaaatcaatatttgcagaatcctgggctccaccatccattgaaacatatttaatcatgcaagatgaacctctatggctacttttttatggctggctagattatatcaacgaattaaagccagcatatgacatattcaacaaatacaccatagtcatacaaagcccttactttcaaactcctacacccaaaccaacttacttagtaccactagatgactcatttatacaaggaaacggaccatacaacagcactcctacaactacagataaaaacagatggatacctgtactaaaacaccaacaacaatctataaacaacttagttaaatgtggcccgttcatcactaaaccagatggaaaatattcaaactgggaattacatctaaactacacttttctttttaagtggggaggagcacaacctccagaaaacaccatatatgatcccaccaaaggaagtatctaccctgtgcccgataaattctacaaaacagtacaaatccaagatccaacaaaacaaatcccacaaaacatactccacacatgggacttcagaagagggattgttacaacaaaagctcttaagagaatgtatgactacttatcagatgaatcaaatatatcaacagattcagagtgcccagaaccccagaaaaaagccaaaaaatcagccagacaagtcctcggccaagaaaacaaaaaagaaagcctcaactatctccagcaactcttcgaagaagatacatcacaaaaagaagaaacccaaaagaaaacaatcgagcagctcatcgagcagcagcagcagcagcagcagaatatcaagcacaacctcatcaagctaatcacagatgtgaagaaaacacaactgcagatgcaagtacacactggaattttaaactaaacagaaagtttaaaccaggttttgaagaagaaacagaaaaacaactagcagcagcatttaaaagacccccaagaacctatgtaaatgacacaccattttacccatggttacccccagcccccaaagtctgctttaagcttaacttcaaaaactaggccaacactgttcacttagtggtgtatgtttaataaagtttacaccccaaaaaaatatgtaaaaaaaaaaaaaaaaaaaaataaaaaattgaaaaatttcggcgctcgcgcgcgctgcg

SEQ ID NO: 4514 - protein, 661 aa, Gammatorquevirus sp.
MPFWWNRRKKWWGRGRFRYRRRKSNFKRRTRRNLYRRRHKRAPRRRRKRRTTKVRRKKKYLKLLQWQPESIRKCKIKGYETLILGANGKQFRDYTSTMNDWVPPTVPGGGGFSISRYTLEYLYEQFQLHNNIWTHSNENYDLCRYLGTKIVFYRHPHTDFVVQYQREYPMTETALTPLHTHPLILLQQKNKIIIPSRITKPHGKIKIKKFIKPPAQQTNKWFFIRDFAKTPLLLIKATACDLNYVRLAKGSENNQTNIWSLNTVFYLNGAFGQKASSHNTYEPAHTMTFQQGQIQGTLPNNKSFQTHMKNTYDSSVNYSEGWFNSNVLLSSTLTVPQLQTKPVFITRYNPMLDTGKGNKIWLKSIFAESWAPPSIETYLIMQDEPLWLLFYGWLDYINELKPAYDIFNKYTIVIQSPYFQTPTPKPTYLVPLDDSFIQGNGPYNSTPTTTDKNRWIPVLKHQQQSINNLVKCGPFITKPDGKYSNWELHLNYTFLFKWGGAQPPENTIYDPTKGSIYPVPDKFYKTVQIQDPTKQIPQNILHTWDFRRGIVTTKALKRMYDYLSDESNISTDSECPEPQKKAKKSARQVLGQENKKESLNYLQQLFEEDTSQKEETQKKTIEQLIEQQQQQQQNIKHNLIKLITDVKKTQLQMQVHTGILN

SEQ ID NO: 4515 - protein, 122 aa, Gammatorquevirus sp.
MQRLTFFQPPLYNHIGRNQLWIDACIFAHDCWCGCNHPIAHFIDSVLPSGHKDRDLTINEILSRDLKETCPSGGTVAKSGGDAAAFATEEENQISNAELEEIFTEDAINELLDAAAKDEQPR

SEQ ID NO: 4516 - DNA, 2568 bp, Gammatorquevirus sp.
aaaataaaaaattgcaaaaattcggcgctcgtctaggggcaattcgggctagggcagtctagcggaacgggcaagaaacttaaaacaatttttgttttatagatgtcaaagatccaaagctctgacttttatactgccacaccctttaatccggagacaaagactcagatatggatgtctcaaattgctgattctcacgacaatatctgccattgtactcacccctttgctcatctgcttgccagtatctttcctgtgggtcaccaagataggaataaaacaattaatgaaatacttttaagagactacaaagaaaaatgccattctggtggaggagaagaaaaaagccatggtacggacgttggagaaacagaaggaggtttcaaaggtataaaagaagaaaacccagaagaagatttaccaggagaagaaatagaacgactgctcgccgccgtagaagacgcagatacaaggtaagaagaaagaaaaaaaaaattcctatctttcagtggcaacctgactctatacttaaatgccacataaaaggaaacggacttctagtactaggatgtgagggcacccaaatgtactgttatactaaagaaaagtttaaatatatacctcctaaagttccatatgggggaggattgggagttgaaaaatttacccttaattacttatatgaagaatacacataccacaacaatatatggacagctagtaatttatacaaagacttaacaagatatctctattgtagatttactttttacagacatccagacactgactttataataaaatacaatagacaaccaccatttgaaataactaagtggacatatccagcatcacatccacacctactactattagaaaaacataaaaaaattattttaagccaacaaagtaaaccaaatggaagatataaagtaaaagttttaattaaaccacccaaacaaatgctaacaaaatggttttttacaaaacaatttgctgactttggattgctactattaactggagcagcactaaaccttagatattcacatttaagtgcttctaatgaaaatttactagttaacataacaagtttaaatcctatgttttacactcatacaaattgggcatctgctcatgcagctacacaaccatacaaaccatggacaaacatatcacaaagcttacagtacaaggcatatgttaggcagcaaggaggcttaattttacaacaatttcccctaccaaaaaacataactacagatgctgaaacagctatatcatatgaaaacgggtggttctctagcaaaattttaaaagctgttgaatgggtatccccaccaacaacacaagcagttaaaaatattatttatggaagatacaaccccacaaaagataaaggaccaggaaacaaaatatacattattagtatattagcagacacttggggaccaccccaacatgataaaatggtactactagaagatttaccactatggttaggcatatatggttacattagctatttacaaactgttaaaccaggagactggctagcatcatctttagtagttttacaaagtgaagccatttactgttacaatatgataggtgcctgcacaacttgggcacctatagatcaaccttatatagatggtaaacaaccctatgatttacccattaaagaagtagacaaaaaaaaaaaatggtatcctaactacaaatggcaattgcaaacactaaatgccattgtagaatcaggaccatttataccacaatataatgaagaaaagtattctacctgggaactaaaataccactatgacttttgttttaagtggggtggaccagctatgccagacaaagatgttaaagacccaaaagaccttaaaatctatgatgtccccgataaacaattcggcagactacaaatctgcaacccagcaaaacaagccacagaaacaatattccatccctgggatagcaggaggggacttattaaagaaacagctcttaaaagaatgtgcgaacacctcgaaactgatacagaatttcaatattcttcagaagaagcttcgccaaaaaagaaaaaggcaagagtgggagcagcccttacaaacccctaccaagaggaggaagaaatccagaagtgtctccagacactctgcgaaaaaaatacctaccaaagccaaaaccaagaaatccaagacctcatcaagcagcagcaggaccaccagcagcagctcaagtatcacatcctcaagctcctcatagacctgaaaaccaaacagagacaaatacaactacacacaggaatggtagagtaactttaacaagatttaaaccaggatatgaatgggacacagaagttgaactagcaaaagcatttaaaagaccacccagactctttaaagaagacacacccttttacccctggttaccccgacctgaaccccttgttaactttcaccttaattttaaattctaggccgacactgttcacttagcggtgtttgtttatataagtttacaccccaaaaaaaatgtaaaataaaaaaaaaaaaaaaa

SEQ ID NO: 4517 - protein, 669 aa, Gammatorquevirus sp.
MPFWWRRRKKPWYGRWRNRRRFQRYKRRKPRRRFTRRRNRTTARRRRRRRYKVRRKKKKIPIFQWQPDSILKCHIKGNGLLVLGCEGTQMYCYTKEKFKYIPPKVPYGGGLGVEKFTLNYLYEEYTYHNNIWTASNLYKDLTRYLYCRFTFYRHPDTDFIIKYNRQPPFEITKWTYPASHPHLLLLEKHKKIILSQQSKPNGRYKVKVLIKPPKQMLTKWFFTKQFADFGLLLLTGAALNLRYSHLSASNENLLVNITSLNPMFYTHTNWASAHAATQPYKPWTNISQSLQYKAYVRQQGGLILQQFPLPKNITTDAETAISYENGWFSSKILKAVEWVSPPTTQAVKNIIYGRYNPTKDKGPGNKIYIISILADTWGPPQHDKMVLLEDLPLWLGIYGYISYLQTVKPGDWLASSLVVLQSEAIYCYNMIGACTTWAPIDQPYIDGKQPYDLPIKEVDKKKKWYPNYKWQLQTLNAIVESGPFIPQYNEEKYSTWELKYHYDFCFKWGGPAMPDKDVKDPKDLKIYDVPDKQFGRLQICNPAKQATETIFHPWDSRRGLIKETALKRMCEHLETDTEFQYSSEEASPKKKKARVGAALTNPYQEEEEIQKCLQTLCEKNTYQSQNQEIQDLIKQQQDHQQQLKYHILKLLIDLKTKQRQIQLHTGMVE

SEQ ID NO: 4518 - protein, 124 aa, Gammatorquevirus sp.
MSKIQSSDFYTATPFNPETKTQIWMSQIADSHDNICHCTHPFAHLLASIFPVGHQDRNKTINEILLRDYKEKCHSGGGEEKSHGTDVGETEGGFKGIKEENPEEDLPGEEIERLLAAVEDADTR

SEQ ID NO: 4519 - protein, 107 aa, Gammatorquevirus sp.
LRKKYLPKPKPRNPRPHQAAAGPPAAAQVSHPQAPHRPENQTETNTTTHRNGRVTLTRFKPGYEWDTEVELAKAFKRPPRLFKEDTPFYPWLPRPEPLVNFHLNFKF

SEQ ID NO: 4520 - DNA, 2566 bp, Betatorquevirus sp.
gaacgggcaagaaacttaaaatattttttattcacagatatgttctcatcatggaagacacccacatcatcaaagagacaacaagaactacagtggattggaataattaactcaactcacgaccaaatttgccactgcgacgacccaactcttcatttgctttactgcctcaacaaattctccggatttcaaaaaccagaaattgatattaataacataaaatgcctccttatcggcaatcctactacttcaaaagaaacttctacaacaatagaagacgccggtttagaagaaggggagttagaaaaccttttcgcagaagatactggagaatacaaagaaaacgaaaacccagatacaaggtaaacaaatttaaattttataaaagaaaagcaaaaaaaataacacttaaacaatttcaaccaagaactattaacaaatgtaaatgtattggatataaatgcttatttcaaggtagtcccttaagagctatgaacaactttgtacaatatgtttattcaattatacctgaaaaacaaccaggaggagggggatggagcattcaagtactcagcttagactcaatatttgaggactatgaacatttacaatgcatatggactaaaggaaacgcaggactgcctcttgttagatacatgggttgcaaatttacattataccaatctgcagaaacagactatgtattttcttatgataactgctggccaatggttgatactatacacacccacgcagactccgcaccatttagaatgctacaaaaaagaaacaaaattgttgttccctcaatgaatacaaaaaaaagacgcaaaccatacaaaaaagtttttgtaaaaccaccaccacaaatgacaaacaaatggtactttcagaaagacatatgtaaaacacctctagtaatgtttactgccactgcagtatctctcggacacccatttgcagaccctagagctaaaagcaacaatgtaactgtacactgtataaacccatacctttttcaaaacccagactttcaacattggggaacacaaggatactcacctaaaatggcagataatacaacaccattatacctatatgcatcacaaatagacaacttaacctaccagaacttaatacagcataaaaataccattatagcactaacaaatacaaaagaccatacacctggaataccacttataaatagtcaaacaacagacatatcaaaactagcaggaaacccctttcacgaagactacacatcaggagatatgtatgtttacatttcaaaaatgacaccaaaacagatgcaagattacttaaaaaacaacacagaaccaccaagtacaaaccgaagtataactcttgctggtgatattatttatacatttagatacaacccagacaacgacgatggttccactaataaacaatatatagtaagcacagcatcaggaaacaaaataaaaccaccagaaaacgaaaactttatattatcaggctttccattcccatacatgttatggggatggacagactggataaaaaaactaggagaaacaccacaatttgacacaaacaaactacttatactggaaacaaaagcatttgatgataaaactataccactgtttatacctattgacttaacatttattcatggatatgacccatatgaacccatagaagacaaaacacacaacataagtgcatacaatgcaaaaaactggtttccaagatatgaatatcaaaaaaaaaccataaatgacatatgcttagcaggacctgcgtgtccaagaccaccatgggatcactatttacaagctatatgtaaatataccatgtattttaaatgggggggttgtcctaaatctttacaaaaagcttataatccctgtttacagtctaaatggcccactcccgataacctctatggaagacctgcggtgcagaatcctaacatcttcccacaaacagaactgtactcctgggactgggaaaatgattatgttacaaaagcagctattgacagaatccgaagatttacagaaattgatccaaaaatgttctcaattacagaaatcaaaaacaacccaccggcgatccaaaaaaagaaaacaacagaagacgaagaagaggagaagaagctcaagctccagctccacaagctccgattcaacaaagtcctcctgcagctccaactccaacagcaattaaaatcactaaaagcaaaataaaagttaatatgtttgaagacccaaaacccaaaaatcgtagaatgactccctgggaaaaagaacaagaaaagcaagacgctgccatttggaaaagaccacaaagagactttattttagatatacctttttaccctggcattcccccaactccgcttgtaaactttgacttaaaatacaaatatgaataaacaaggccaacaataattcacttagtggtgtccatttatttaagtttaacttatataaacatccaccgcctccctataatttgggcgccaaaattcaaaagggggctccgcccccttacacccccaagggggctccgc

SEQ ID NO: 4521 - protein, 672 aa, Betatorquevirus sp.
MPPYRQSYYFKRNFYNNRRRRFRRRGVRKPFRRRYWRIQRKRKPRYKVNKFKFYKRKAKKITLKQFQPRTINKCKCIGYKCLFQGSPLRAMNNFVQYVYSIIPEKQPGGGGWSIQVLSLDSIFEDYEHLQCIWTKGNAGLPLVRYMGCKFTLYQSAETDYVFSYDNCWPMVDTIHTHADSAPFRMLQKRNKIVVPSMNTKKRRKPYKKVFVKPPPQMTNKWYFQKDICKTPLVMFTATAVSLGHPFADPRAKSNNVTVHCINPYLFQNPDFQHWGTQGYSPKMADNTTPLYLYASQIDNLTYQNLIQHKNTIIALTNTKDHTPGIPLINSQTTDISKLAGNPFHEDYTSGDMYVYISKMTPKQMQDYLKNNTEPPSTNRSITLAGDIIYTFRYNPDNDDGSTNKQYIVSTASGNKIKPPENENFILSGFPFPYMLWGWTDWIKKLGETPQFDTNKLLILETKAFDDKTIPLFIPIDLTFIHGYDPYEPIEDKTHNISAYNAKNWFPRYEYQKKTINDICLAGPACPRPPWDHYLQAICKYTMYFKWGGCPKSLQKAYNPCLQSKWPTPDNLYGRPAVQNPNIFPQTELYSWDWENDYVTKAAIDRIRRFTEIDPKMFSITEIKNNPPAIQKKKTTEDEEEEKKLKLQLHKLRFNKVLLQLQLQQQLKSLKAK

SEQ ID NO: 4522 - protein, 108 aa, Betatorquevirus sp.
MFSSWKTPTSSKRQQELQWIGIINSTHDQICHCDDPTLHLLYCLNKFSGFQKPEIDINNIKCLLIGNPTTSKETSTTIEDAGLEEGELENLFAEDTGEYKENENPDTR

SEQ ID NO: 4523 - protein, 59 aa, Betatorquevirus sp.; identical to SEQ ID NO: 2018

SEQ ID NO: 4524 - DNA, 2565 bp, Gammatorquevirus sp.
cgggagcccgaggtgagtgaaaccaccgaggtctaggggcaactcgggctagggcagtctagcggaacgggcaagaaacttaaaatatacactctcttacagatgctatctaccaaagacttctacaaaaaatgtacctacaatcaagacaccaaaaatcaactctggtgttctataattgctgattctcatgattcaacctgtggctgtgacagaccatttgctcatcttctagcaagcatatttccaccaggacacgcagacagaaaccttaccatcaatcaaatccttgaaagagactacaaatcactatgcctttctggtggagcagaagaagaaaattctggtggggtagaaaaggcagatatcaaagaagaaaatactataaaacaagaagacaaagaagacgcagacagtttacaaggagaagatttagaaaaccttctaagcgccgtcgcagacgcagaaaaaaggtaagaagaaaaaaagctgctcttaagcttgtacaatggcaaccagacagtataactaaatgtaaaattaaagggcttggacttctagtaatgggaaccgaaggcagacaattttcttgttatacagtagttaagaacaaatattggccaccaaaagtaccctctggaggtggatttggctgtgagaaatattctttatcgtatgcttatgaggaatataaatttggaaacaacatatggactaaaacaaatgtaagcaaagatctgtgcagatacttactagctaaacttgttttttttagagctcctgagacagattttattgtatcatatactagacaaccaccatttgacttaaatatattaacatatccaagttgccacccacaccagctacttcaatctaaacacaaaaaaataatttacagcaaatttactaagccaaatggaaaatacaaatacaaaatgattattaaacctcctaagcaaatgataaacaaatggtttttcacatctgacttttgtaaacaaggactattccttctaaaaggtgcagcactaaatttaaactactcatatctaggctgctgcaactcaaaccaactagcaaatgttctttctctaaacattaacttttaccaacatgcagcgtgggcacatgtaacacagacaaccccatacaaaccatactctacagcaccagacacaatatgggctaaatacccaaactcaccagacaaaaaagaactaactggcatgaatgcagattattcaagtagtgtaaacttaaaaacaggctggtttagaccagaaatattacaagccagccagttattccaaacaaaatcaggtgctacagctacaagagctgtagcagctgctagatacaatccaaacaaagatgcaggcacaggaaacaaagtttatttaacctctatttttgcagacacatataagccaccagcaacagacaaaatgctagtagtagaagacttacctatctggctagcattatatggatttacagactatgttagaacagttaaaacctcagatttcttaaaacaaagcctactaataattcaaacaaactacatgcattgtgaaccagaaatacagtcttgtaaaacatttataccactagacttgtattttatacaaggcaaaagttacaggggattaacacctacagactatgaagtcagaaactggtatcccagcttagaaagacaaatagatgctattaatgctttagttgaaactggaccctacattccaaaattagcagaaaccagaaacagtacatgggaacttaaatacacttattctctttttttcaagtggggaggcccccaaatacatgatgaacaagtacatgacccatgtacctttccaacataccctgtccccgataaggacagcaagacaatacaaatcaaagacccagcaaaacaaaaaactgaatcccttttacacaaatgggatgtcagaaggggaatcattaaagaacaagctattaaaagaatgttcagcaacatctcaactgatacagaatttcaaccaattacagaagatgctccactcccgaaaaagaaaagaagaggagcccgactcaccgatccccaagaagaaatcaaagagatcaaagcctgtctccagagtctctgcgaagaaagtacataccaagaaatccaagaaacacaagacctcagacagctcatcaagcaacagcagcagcagcaagaccagctcaagtacaacatcctcaagctcctctcagagttgaaagaaaaacaacaacaactacaactacaaacaggcatgtttctataaaatttaacccaggtcatgactgggaaacagaagtacaagtagcagctgcatttaaaagacccccaaggacatacaaaacagaccctcccttttacccatggttaccacctgaaccctttgtaaattttcaccttaactataaaggctaggcccttactgttcacttagtagtgtatgtttatataagcacaacccttaataaaaaaaaaaaaaaaaaaataaaaaaaaaaaaaaaaaaattaaaaaggctgcccaaggg

SEQ ID NO: 4525 - protein, 664 aa, Gammatorquevirus sp.
MPFWWSRRRKFWWGRKGRYQRRKYYKTRRQRRRRQFTRRRFRKPSKRRRRRRKKVRRKKAALKLVQWQPDSITKCKIKGLGLLVMGTEGRQFSCYTVVKNKYWPPKVPSGGGFGCEKYSLSYAYEEYKFGNNIWTKTNVSKDLCRYLLAKLVFFRAPETDFIVSYTRQPPFDLNILTYPSCHPHQLLQSKHKKIIYSKFTKPNGKYKYKMIIKPPKQMINKWFFTSDFCKQGLFLLKGAALNLNYSYLGCCNSNQLANVLSLNINFYQHAAWAHVTQTTPYKPYSTAPDTIWAKYPNSPDKKELTGMNADYSSSVNLKTGWFRPEILQASQLFQTKSGATATRAVAAARYNPNKDAGTGNKVYLTSIFADTYKPPATDKMLVVEDLPIWLALYGFTDYVRTVKTSDFLKQSLLIIQTNYMHCEPEIQSCKTFIPLDLYFIQGKSYRGLTPTDYEVRNWYPSLERQIDAINALVETGPYIPKLAETRNSTWELKYTYSLFFKWGGPQIHDEQVHDPCTFPTYPVPDKDSKTIQIKDPAKQKTESLLHKWDVRRGIIKEQAIKRMFSNISTDTEFQPITEDAPLPKKKRRGARLTDPQEEIKEIKACLQSLCEESTYQEIQETQDLRQLIKQQQQQQDQLKYNILKLLSELKEKQQQLQLQTGMFL

SEQ ID NO: 4526 - DNA, 2565 bp, Gammatorquevirus sp.
cgggagcccgaggtgagtgaaaccaccgaggtctaggggcaattcgggctagggcagtctagcggaacgggcaagaaacttaaaactatactctctttacagatgtcattgttttacaaaccaacaaaatacaatggctgtactaaaaaccaaatgtggatgtccaccataggtgactgccatgacattcactgtggctgtgaaagaccttttgctcatcttctagacagcatttttccagaaggacaccaagacagaaacaaaactatagctgaaattatacaaagagatttaacagaatgcctttctggtggccaagaagaagacggtggtgggctaccactaggttcaagcgccgcaaacctcgctatccaaagagaagaagaagaagaagatacaaaagaaaatatagaagagctcctcgccgccgccgccgccgcagaagaaaggtaagaagaaagagacccaatcttatagtcagacaatggcaaccagactctatagtactctgcaaaattaaattgtttagcagcttagtactaggagcagaaggtactcaatacctgtgttatactaatgaaaaaggagcatggactccaccacaacaaccaggcgggggaggctttggcatagagacatacagcttatcatatttatatgatcaataccttctaaagaaatgtatatggactagatcaaatgattacaaagacctatgcagatatttaaaatgtaaaattgttttctttagacaccccaaaatagactttgttgtaaactatgccagacagccgccatttctccttgaaaagcctacctacatgaactgtcaccctatagctatgctactctcacaacacaaaagagtaatacttagtaaaaaaacagaccctaaaggtaaaaatagagttacattaataattaaaccacctaaacaaatgataaccaaatggttcttcactaaacaatttgcactatttgatttacttcaaatacaagcagcagcctgtactttaaactatccaaaacttggatgctgcaatgaaaacctaattatctcaattttttaccttaacccacagttttaccaagacacaacatgggcacaagctgcagcaggaccatacaaaccttatgccacaattagaactgatttagtttattactataaaataggcactcaaacaggcaaatttacacctaactacctaaatgaacatggcactgaatcctactacaaaagtgtttccatagaccaaggctttttttcaccaagaatactaaatactcaatacatcaccgaaccacccgcaactaccaaacttgccaacatacctataggtgcagctagatataaccctgaaatagatgatggtagaggtaatgaagtttacctagtttctgtagcatcaggtcattaccaaaaacctacagaagacaatttaatatttagaggcctaccactatggcttatgttttttggcctagttagttttataaaaaaaattaaaactgcttcatttttagaactacacatgtttattgtaaaatctgaatatattttgcctaaacaccatgacacatccagacctttctttccactagttgatataaactttatcaatggcaaaaacccatacaactcatacatttccagtacacaaagacaactttggtacccaaatgttacacaccaaatcgaaacaattaattccatagtaaaatgtggcccatttatacctaaattagacaatgatagagacagcacatgggaattaccttttaaagcaactttctattttaaatgggggggtccacagatgccaaaccaaaatgtctcagaccccaaagaaaaagccagctacattgtacccgatacagtccaacaaggactacaaattaccaaccctctcaaacagaaagctgaatcccttttacatgagtgggactacagacgaggactcattaaaacaaaagcttttaagcgaatgctcgaaaaccttagcattgaatcagatgtgtgccaatctacagagacaccaaaaaagagacaaagggtcgagaactcactccactaccaagaagaagaaaaccaagagatcaagacatgtctcctctcactctgcgaaagttcttcctcagaaaaagaggaggaagaaacaaatctcctccagctcatccagcagcagcagcagcagcagaagcaactcaagctacagctcctcacactcatcaaagacctgaaggaaaaacaaaatgctttacaactacaaacaggagtaatttagtagtgctaacccgctttaaaaaaggctttgaagaagacacagaaaaagaactagcagctgcttttcacagaccccccagaacctacaaagaagaccaccctacttatccctggctaccaccagcaccaaaagttaactttaaacttaattttaaattctaggccaacaatgtacacttagtaactgatgtttgtataagcacaacccaaaaaaaataaataaaaaaaaaaaaaaaaaaaaatcgagcgcagcgaggaggtccccggctgcccgtggg

SEQ ID NO: 4527 - protein, 662 aa, Gammatorquevirus sp.; identical to SEQ ID NO: 4309

SEQ ID NO: 4528 - protein, 116 aa, Gammatorquevirus sp.; identical to SEQ ID NO: 4310

SEQ ID NO: 4529 - protein, 113 aa, Gammatorquevirus sp.; identical to SEQ ID NO: 4311

SEQ ID NO: 4530 - DNA, 2565 bp, Gammatorquevirus sp.
cgggagcccgaggtgagtgaaaccaccgaggtctaggggcaactcgggctagggcagtctagcggaacgggcaagaaacttaaaacaatatttgttttacagatgtcaaccctgtttaaaccaacaaaatacaatggctgtactaaaaaccaactatggatgtcaataataagtgattctcatgacattcactgtggttgtgaagtaccttttagccacctactagacagcatctttcctgaaggacaccaggacagaaacaaaaccatagcacaaataattgctagagatacagcacaatgccattctggtggtacagaagaaaaaagccctggttttacagccatcaaagaagaagatataaaaagacatggagaagaaaacccagaagaagaccttatagaagacgccgctttacaagaactaatcgccgcaggagaagacgccataggaaggtaaggaaaaaaagaaaaaccttacctgtcagacaatggcaaccagactctattagaaactgtaaaattagaggcttctcaacacttgtagttggagctgagggaacacaaatgtactgttatacagaagaaaaatttaactatgtaccccctaaagttccctggggagggggtattggagttgaaaactatacacttaaatacttatatgaagagttagttttccataacaacttttggacagcttcaaatattcaaaaagacttatgcagatacttaagatgtaaaattatcttatttagacaccccacacaagactttgtagtagtatatgaaagacagcctccatttaaattaaccaaatggacctacccaagctgtcacccacatcaactgcttttacaaaaacacaaaaaaatcttacttagcttaagctctaaacccaatggaaaatactataaaaagctaattattaaacctccaaaacaaatgctatctaaatggttttttaccaaaagcttttgcactgaatctctatttctccttaaaggagcagtagctaactttagacattcatatttaagtgcaaccaatgaaaatagacttgtaaatttaatgtcacttaacacaaagttttaccaacatggtgactgggcacaaagcagacaaccaaacacaccatacttaccatacacaaatgcatcaacatcaatgcgctacagaattaaaaaaaaagatggtcaaattcaagaattaaaaatggatattaaaacatatcaagaaagtataagttatgagaaaggctggtttaaaagcgctttcttacaagcctatgacataccagtacaatccactcatgcagcaacaatacctatgttaatagctaggtacaatcctaacaaggacacaggagaaggtaataaaatatttattaaatcagtactatcagatggatgggtaccaccatcaacagataaacaactagaaatagacaatgtacctctatggctaggtttactaggatttttatcatatgttaaacaaaccaaaaatatagactacttaaaatcctcagtagttgtccttaaaagccaagctatacactgctcaagccaaataggcagttgtgacttgtactgccccatagatactgaatacattttaggtaaaaaaccatatgaacaagttataactcaaactgaaaaagcactgtggtatcctacaactcaatggcaattaaaaactttaaatgctattgtagaatcaggcccctatataccaaaactatcagaagaaaaacaaagtacatgggaactaaaatacatgtataattttttctttaagtggggaggaccccatactccagacaaagaaatcacaaatccagaaaactttaacacctatgatgtacccgatactatcacaagggcaatacaaattaccaacccagaaaaaaacacaacagaaacaatactacacccctgggacttcagaaggggcattgttaaagaatcagctcttaaaagaatgtgcgaccacctcgacactgatacagaatttcaattctctacagaagaaactccacaaaaaaagagaaagatccacggagcagccctacaacacccccagaaagaaacagaagaaatctacaactgtctccatggtctctgcgaaaaaagttcattcccacaagaagaagaaaagacactcgaagcactcatccagcagcagcagcagcagcaggagctactcaagtacaacatcctccagctcctcatagacctcagggagagacagaaacagctacaactacacacaggaatgttacattaacaagatttaaaaaaggctttgaagaagacacagagaaagaattaagcatagctttttgcagacccccaagaacctataaagaagaccccccattctacccttggctaccaaaattaacaccccttgttaactttcacctaaactttaaaggctaggccaacaatgtacacttagtaaagcatgtttatataagcagcacacttaataaagtaaaaaaaaaaaaataaaaaattgcaaaaattcggcgctcgcgcgcgctgcgcgggctgcccatggg

SEQ ID NO: 4531 - protein, 662 aa, Gammatorquevirus sp.
MPFWWYRRKKPWFYSHQRRRYKKTWRRKPRRRPYRRRRFTRTNRRRRRRHRKVRKKRKTLPVRQWQPDSIRNCKIRGFSTLVVGAEGTQMYCYTEEKFNYVPPKVPWGGGIGVENYTLKYLYEELVFHNNFWTASNIQKDLCRYLRCKIILFRHPTQDFVVVYERQPPFKLTKWTYPSCHPHQLLLQKHKKILLSLSSKPNGKYYKKLIIKPPKQMLSKWFFTKSFCTESLFLLKGAVANFRHSYLSATNENRLVNLMSLNTKFYQHGDWAQSRQPNTPYLPYTNASTSMRYRIKKKDGQIQELKMDIKTYQESISYEKGWFKSAFLQAYDIPVQSTHAATIPMLIARYNPNKDTGEGNKIFIKSVLSDGWVPPSTDKQLEIDNVPLWLGLLGFLSYVKQTKNIDYLKSSVVVLKSQAIHCSSQIGSCDLYCPIDTEYILGKKPYEQVITQTEKALWYPTTQWQLKTLNAIVESGPYIPKLSEEKQSTWELKYMYNFFFKWGGPHTPDKEITNPENFNTYDVPDTITRAIQITNPEKNTTETILHPWDFRRGIVKESALKRMCDHLDTDTEFQFSTEETPQKKRKIHGAALQHPQKETEEIYNCLHGLCEKSSFPQEEEKTLEALIQQQQQQQELLKYNILQLLIDLRERQKQLQLHTGMLH

SEQ ID NO: 4532 - protein, 118 aa, Gammatorquevirus sp.
MSTLFKPTKYNGCTKNQLWMSIISDSHDIHCGCEVPFSHLLDSIFPEGHQDRNKTIAQIIARDTAQCHSGGTEEKSPGFTAIKEEDIKRHGEENPEEDLIEDAALQELIAAGEDAIGR

SEQ ID NO: 4533 - protein, 111 aa, Gammatorquevirus sp.
LSPWSLRKKFIPTRRRKDTRSTHPAAAAAAGATQVQHPPAPHRPQGETETATTTHRNVTLTRFKKGFEEDTEKELSIAFCRPPRTYKEDPPFYPWLPKLTPLVNFHLNFKG

SEQ ID NO: 4534 - DNA, 2565 bp, Gammatorquevirus sp.
aaaaaaaaaataaaaaattgcaaaaattcggtctaggggcaattcgggctagggcagtctagcggaacgggcaagaaactaaaaattatattgtttttacagatgctttgcagcaaagacttctttaacaaatctgaatacaatgctgaaactaaagaacaaatgtggctaagtattataggagactcacatgattcaatatgtaaatgccagttttgttttgcacatttactggcatgcattttcccactaggccactcagatagaaacaaaaccattgaagaaattctacagagagactacaaagcaaaatgcctttcttctggaggaggagacgccgctacttttggcccaagcaaaaatatcaaagaagaaggtactacagaagaaaaagatggccaaatagaagaagaagacgacgcagacctcgcaaacctactcgccgccgtagaagaagaaggaggtacaaggtaagaagaaaaaaacctactttgactgttaaacaatggcagccagatagcattgttaaatgcaaaattaaaggatttactactcttgtactgggagctgaaggcaaacaattagtgtgctacacaaatgtaaaaactgctacaaccccaccaaaagctccaggtggagggggatttggatgtgaacagttttctttagaaagcttatatactgaatttaaatttcaaagaaatatatggactaaaagtaatatactaaaagacttatgtagataccttctatgtaaagtcacattttacagacatccagaaacagactttattgtagcctacagcagacaaccaccatttgacatatctaaagacatatataccagctgtcacccagctcaactactactagctaaacataaaataattataccaagcagatctacaaaccccaaaggcaggctaaaggtgaaaagacttataaaaccacctaaacaaatgctaaacaaatggttttttcaagaacattttgcacactttcctttagtaatgtttaaagctgcagctgcaaactttaattatgcaaatttaggctgctgtaataaaaaccaaataagtacttttttttatataaacactgccttttacaaactaccacactgggcagccagaaagacaacagacccatatgttccatatataggctttccaagtactgtatacacatggaacttaaaagaatatcaatctgcagatgtaaccacagtggcaaaagatactcaaaaatacacaaaacccaacaactacataaactcaattagttacacctcaggattcttttcaaaacaaatactacaagcagtactaataacctcacaaagcaccatagcatcaccaacaggtacaacacctctaaatatatgcagatacaatccttcaattgacagtggaaaaggcaacacaatatggctagttagtacacttgctaacagctggcaaaaaccacctacagacaaaataatcatatacagtggcctaccattatatttaatgctatatggctttcttagctatgtacaatacatgaaaaaaacacctgattttttcaatggatatgtaattgccatggaatcacctgcactactaccatactcacaaataggagctgaaaccaaaataatagtaccactagacaataatatgccagctggcaaagcaccatatgatgaagacctaacagcaaccatgaaaacctactggtaccctaacatatacaatcaactttctgtattaaatacaattgtagaaagtggtccttttgttcccaaatactctgaaactaaaaacagtacttgggaacttgatatgttttacacctttcttttcaagtggggcggcccagaaacacctgaacctgcagttgccgaccctcagctacaagggacttatgaagtgcccgatacaatccaaaatgcagtacaaattagggacccagcaaagcaaaaagctgccagccttttgcacccctgggacatcagacatggttactttacaaagtcagctcttaaaagaatgtatgaaaacctctcgattgactcaactttcgcatcagatacagaacacaggccaaaaaagaaaaagaagcagacaggaccagagctctcacacccacaagaggaggaggaagagctccaagcatctctcctctcactctgcgaagaaaatatctaccaagaaacaacaccacaaaacctcgagcagctcatcagacaacagcagcaacagcagcaggagctcaagtacaacatcctcagaataatatcagacctgaaagacagacagaacctgttaagactacaaacaggtgcactgtactaaccagatttaaaccaggttttgaagcagacacagaaagagaattatccataatttttcgaagaccaatgagaacatataaagaagatcccccattttacccatggttacctcctgaaccctatgttaactttaatcttaatttcaaatgctaggccaacactgtacacttagcagtggatgtttaataaagtatgcaccccaaaaaaaactgtaaaataaaaaaaaa

SEQ ID NO: 4535 - protein, 675 aa, Gammatorquevirus sp.; identical to SEQ ID NO: 4498

SEQ ID NO: 4536 - protein, 127 aa, Gammatorquevirus sp.; identical to SEQ ID NO: 4499

SEQ ID NO: 4537 - protein, 105 aa, Gammatorquevirus sp.; identical to SEQ ID NO: 4500

SEQ ID NO: 4538 - DNA, 2565 bp, Gammatorquevirus sp.
aaaaaaaaaaaaaaaaaaaaaaccaccgaggtctaggggcaattcgggctagggcagtctagcggaacgggcaaaaaacttaaaaatatttctttttacagatgagccatctctgtcctgctgacttttatcacaaaaccacttttaatcttgatacacaaaaccaaatatggatgtctcagctagcagacgggcatgacaatttctgtgactgcaaaactccttttggtcacttgcttgcttctatttttcctcctggtcataaggaccgtgatctcacaattaatcaaattctgctgcgagactacaaagaaacatgccattctggtggaacaggagaaaaaggttctggagaagaaactacaggagaaaacccaggtacaagaaatacaaaactagaagatacagaagaacttacagaacaaaatatagaagagctaatcgccgtggcagacgccgcagaagaagaagacacaaggtaagaagaaaaaaacaaacaataccagttagacaatggcaaccagactctattgttaaatgtaaaattaaaggcttgtctactctagtgctgggtgcagaaggcaaacaacttgtatgctacacaaatgtaaaaaatgcaaatactcctccaaaagcaccagctggaggaggatttggctgtgaacaattttccttagaatcattatatacagactttgtatttagaaaaaatatatggacaaaatcaaatactcttaaagacttatgtagatacctaggagttaaaatggtattttatagagctccagaaacagactttattgtatcttacagcagacaaccaccatttgaaatttctaaagaaatatatacatcctgtcacccactaaacatgatactagataaacacaaaattattatcccaagcagatttaccaatcccagaggtaaactaaaagtaaaaaaatttattaaacctcctaaacaaatgttatctaaatggttcttccaagagcactttgcaaactatccactagtcatgataaaagcagcagcttgcaatcttaactacagtaatttagggtgctgtaacacaaatcaaatggttacttttttttacattaatattaactggtacaccttagctgactggtcagcaagaaaatcaggtacagctatatacacaccatattctaactttccaacatatatatacacatggactaaaaaacaatgggacacacaaaacgaagcaatagagacccaaaaatttgcaaggcctcagacttactttgaatctgtaaatattaaaactggctttttttcaccacaaatattacaatcagtacaaataactaaagacaaaaccaaagtaaccatcaccagaaacaatcccttaaacatatgcagatacaaccccaacttagacagtggaaaaaaaaataagatatggctagtatcaactctcacagccacatgggacgctccacattccgacaaaatactaatatatgaaggctatcctctatacatgatgctatggggatttcttagctatgtacaagccattaaaaaatctcctgacttttttttaggatatgtacttgcaatgcaatcacctgccttattaccctactcacaaccaggagcacaaacagctattatagttccactagactataaaatgccacaaggcaaagctccatatgatgaagaactaacagactccatgaaaacactatggtttccaaccatatacaaccaattagaaatattaaatgccatagtagaatctggtccattagtaccaaaatactctcaaactaaaaacagtacatgggaacttgatatgttttatacctttatttttaagtggggcggcccagaaattacagaacaacaaattgcagatccacacctacaaggaacttatgaagtaccagataccctccaaaaagctatacaaatccatgacccggcaaaacaaaaaattgggagcctcctccatccctgggatattagaaggggatactttacaaaaacagctcttaaaagaatgcatgataacctctcaactgagtcatctttcatcccagatggagaagaaatacctgcaaaaaagaaaagacaacagacaggtccagagctgtcccacccctaccaagaagaagaagaagtccagagctctctcctctcgctctgcgaagaaaatatctacccagaaacacaaacacaaacaccagacatcctccagctcatcaagcagcagcagcagcagcagcaagagctcaagtacaacatcctcagaataatatcagacatcaaagccaaacagaatctactgagacttcaaacaggagcaatgttttaacaaggtttaaaccaggatttgaatgggaaacagaactacaactagcttcagcttttagaagaccccctagactttttaaagaagacacacctttctatccctggcttccaaaacttgtaccaattgtaaactttcacctcaactttaaatgctaggcctacactgttcacttagtggtgtatgtttaataaagtttgcaccccaaaaaaattgta

SEQ ID NO: 4539 - protein, 677 aa, Gammatorquevirus sp.
MPFWWNRRKRFWRRNYRRKPRYKKYKTRRYRRTYRTKYRRANRRGRRRRRRRHKVRRKKQTIPVRQWQPDSIVKCKIKGLSTLVLGAEGKQLVCYTNVKNANTPPKAPAGGGFGCEQFSLESLYTDFVFRKNIWTKSNTLKDLCRYLGVKMVFYRAPETDFIVSYSRQPPFEISKEIYTSCHPLNMILDKHKIIIPSRFTNPRGKLKVKKFIKPPKQMLSKWFFQEHFANYPLVMIKAAACNLNYSNLGCCNTNQMVTFFYININWYTLADWSARKSGTAIYTPYSNFPTYIYTWTKKQWDTQNEAIETQKFARPQTYFESVNIKTGFFSPQILQSVQITKDKTKVTITRNNPLNICRYNPNLDSGKKNKIWLVSTLTATWDAPHSDKILIYEGYPLYMMLWGFLSYVQAIKKSPDFFLGYVLAMQSPALLPYSQPGAQTAIIVPLDYKMPQGKAPYDEELTDSMKTLWFPTIYNQLEILNAIVESGPLVPKYSQTKNSTWELDMFYTFIFKWGGPEITEQQIADPHLQGTYEVPDTLQKAIQIHDPAKQKIGSLLHPWDIRRGYFTKTALKRMHDNLSTESSFIPDGEEIPAKKKRQQTGPELSHPYQEEEEVQSSLLSLCEENIYPETQTQTPDILQLIKQQQQQQQELKYNILRIISDIKAKQNLLRLQTGAMF

SEQ ID NO: 4540 - protein, 126 aa, Gammatorquevirus sp.
MSHLCPADFYHKTTFNLDTQNQIWMSQLADGHDNFCDCKTPFGHLLASIFPPGHKDRDLTINQILLRDYKETCHSGGTGEKGSGEETTGENPGTRNTKLEDTEELTEQNIEELIAVADAAEEEDTR

SEQ ID NO: 4541 - protein, 108 aa, Gammatorquevirus sp.
LRRKYLPRNTNTNTRHPPAHQAAAAAAARAQVQHPQNNIRHQSQTESTETSNRSNVLTRFKPGFEWETELQLASAFRRPPRLFKEDTPFYPWLPKLVPIVNFHLNFKC

SEQ ID NO: 4542 - DNA, 2565 bp, Betatorquevirus sp.
acccccaagggggctccgcccccttacaccctcaaggggcaattcgggctagatcagtctggcggaacgggcaagaaacttaaaacattttattttacagatgtcagactttgtacctccaaactacacaaaaaaagctcttaaccttcagatggttaactgctacgttggaatccacgatcttcactgccactgcaagaaacctttacttcatattattcaacaaattgaacaacaagaaccaacccttaaaaaatgcccagatacttctaccggcgctactggagaccccgttggagacgacgttatcgatggcttcggccccggagaattagaaaaactcttcgataccgacgcagaaaacacccaagggtaagaagaaaattaaaaagacttaaactaacacaatggcaacctaaatacattaacaaactaactgtaaaaggactattttgcttattacaagtacatagaacccgatataatcatgactttaatgcatatataacttcaattcctcaagaaggactctcaaatggaggaggattttctttaaatagatttactttaagtgctttatttgaagaacatgaaaaagcccataatgtatggactaaatctaacaaatatatgccactttttagatatactggtgtaactataaaaatatacagacctatgtatgttgacttacttgtaaaatttcaaacttgttaccctatgtgctgtacaaaactgctatacacaggaacacaaccaggaataatgatgatgactaaaggttgtaaaataattagatgcaaacaaaatgcacctaattcaaaaccctacaaaaaatatagattacctcctccagaacaaatgctcaacaaatggtattttcaacaaaaagaatcaaacacaggcttactattagtacaagcatcagcagcaagcctagaccaatactatacatccaaaaatgctcaaagtagcttactaacattacatacacttaacacactcatatttaaaaatttaaactttgtagaagtacctacatatggatatatgccacacaacaaaatggcactctgggcaattaatggtgcttcaatagatcccacactaggagatctcatatacttaggtcaatctaaactatataactcaggagacacagtaaaatccaaagtgccaaacaaaacagacttcacagaagcactaacaatttacatgcaaaataataaatggtggggaaacatttttcatcaacacaacctataccaacaacatgacatttacttcacaacaaaacaaccattattagctttccaaaaatcatccacaaaaacatttaatacgaacgataaactcacacaacattcagatacaatacataaatttacacaagaatttatgtttaaaataagatacaatccatttgaagacaaaggctacaacaacaacatatatattaaagcaaactttaaagacaataatgaaaacttagaccctgatgatgatatagacttacaaaatccaggttttcctaactggctaagttgcattggctttcaagactacctaataaaattaggaaaaaaatcacaaattaatacacactatattatgatacacaaaagcaattattttcaccccaaacaaacacattacatttttatggacagctactttttaaatagtagttcagaagaactacaaggaagaacagaattcgataacagaaactggtacccatacattacacaccaacaaggagccctaaatgacttagcactggtagggccaggagcacctaaactagacaaaattaatctagcagaagcaaaaatagaatatatgtttcattttaagatcggcggatgtgccccaaatgttgaaaagattaaagatcctacagagcaaccgacttatgttacaccaagtaacatctttgacacaaattcgttacagagtccaacagcaccaatcgaaagcttcttgtaccaatttgattggagacgagaccaaattactgaaacagctgcaaagcgaatcacaaaagacttctcaactacaaaatctttatttacagatacaacaacaactggaacaacagtacccttctaccaaacacacgaaaaagacctgctctcgtcggaggaggaggaagccgaaacggagacactattccagcagctccaactccagcgaaacaagcaaaaacaactccgactcagaatcaagcagctcttagcacaaatgcaaaatatacaataaaacattgtaaagtaaaaataaacctatttggagaccaaccaaataggagactaaacagtaaagaaagagctgaggacaaaattgaagcagctatttggggtagagctgaaaaatactttctaaaagatataccacactattatggctgtgttcctgaaccccgtgtaaactttgatttaaactatcattaaacaaggcccattatttcatacctcggtgtccatttatttaagtttaaaccttaataaacatccaccacttctccctatcaataggcgccaaaagggggctccgcccccttac

SEQ ID NO: 4543 - protein, 668 aa, Betatorquevirus sp.
MPRYFYRRYWRPRWRRRYRWLRPRRIRKTLRYRRRKHPRVRRKLKRLKLTQWQPKYINKLTVKGLFCLLQVHRTRYNHDFNAYITSIPQEGLSNGGGFSLNRFTLSALFEEHEKAHNVWTKSNKYMPLFRYTGVTIKIYRPMYVDLLVKFQTCYPMCCTKLLYTGTQPGIMMMTKGCKIIRCKQNAPNSKPYKKYRLPPPEQMLNKWYFQQKESNTGLLLVQASAASLDQYYTSKNAQSSLLTLHTLNTLIFKNLNFVEVPTYGYMPHNKMALWAINGASIDPTLGDLIYLGQSKLYNSGDTVKSKVPNKTDFTEALTIYMQNNKWWGNIFHQHNLYQQHDIYFTTKQPLLAFQKSSTKTFNTNDKLTQHSDTIHKFTQEFMFKIRYNPFEDKGYNNNIYIKANFKDNNENLDPDDDIDLQNPGFPNWLSCIGFQDYLIKLGKKSQINTHYIMIHKSNYFHPKQTHYIFMDSYFLNSSSEELQGRTEFDNRNWYPYITHQQGALNDLALVGPGAPKLDKINLAEAKIEYMFHFKIGGCAPNVEKIKDPTEQPTYVTPSNIFDTNSLQSPTAPIESFLYQFDWRRDQITETAAKRITKDFSTTKSLFTDTTTTGTTVPFYQTHEKDLLSSEEEEAETETLFQQLQLQRNKQKQLRLRIKQLLAQMQNIQ

SEQ ID NO: 4544 - protein, 105 aa, Betatorquevirus sp.
LAERARNLKHFILQMSDFVPPNYTKKALNLQMVNCYVGIHDLHCHCKKPLLHIIQQIEQQEPTLKKCPDTSTGATGDPVGDDVIDGFGPGELEKLFDTDAENTQG

SEQ ID NO: 4545 - DNA, 2563 bp, Gammatorquevirus sp.
gcaaaaattcggcgctcgcgcgcgctgcgcgtctaggggcaattcgggctagggcagtctagcggaacgggcaagaaacttaaaatatgttttttttttagatgtccagattcttcaacaaaacttcatacaacaaagaaaccctaaatcaactatggatgagcattatagcagatgcacatgatatatgctgtaaatgtgaatgtccatttgctcaccttttagatagtatatttcctgaagggcacaaagacagagaattaactgtacaacaaattattgaaagagattttacatcatgccattttggtggtacagaagaagaaagccatggtttggtaggtggttcagaaagaagagaaccacatggaaacgcagaaaaccaagaagaaaattatatagaagacgaagaactagaagaactcgtggccgccgcagaagacgccactacaaggtaagaagaaaacaaaaaaaaataactgttaaacaatggcaacctgaaagcataaagaaatgtaaaattaaaggacttggacctttagttataggagctgaaggatgccaatacagatgttttactgtatataaatatgagtggaccaaccccaaaacagcagggggtggaggatttggctgtgaactatttacactgcaacacctatacaatgagtacaaagctagaaacaatatttggacagcctctaacctctacaaagactttggcagatacacaggctgtcaatttactttttacagacatgaacatacagactttatcattacctatgatttaaatccacctttcactataaacaaatatacctacatgatgctacatccaattaacctactacaaagcagacacaaaaaaatattactaagcaaagacacaaaaccaaatggcagattaacaaaaaaattaaaaataaggccaccaaaactaatgtccactaaatggttttttcaagaagaattagcaaagtatggcttagtaaccatagcagctacagcatgtaattttagatttccatggatgggctgctgcaatgaaaacctaataattacaatagactacttacaacctggattttataaacactcagaatgggcacaagcatccacaacagaatataaccccttaggccactcaggaggtaaacaaatgtctactcagttatattactattactatgatgatagaggagtagaaaaatcttggcaaatgcaaccatttacatcaggaaacccctacttagcatcactaaactatgaaacaggatggtttaactcaaaggtacttagagcttacttagtttcaacgaaaccaagcaaacaagaggcaatgtcaattacaccctgtggcactgttagatacaacccaatattagacacaggagaaaaaaacaaagtatatgtggtatctacattactttataattggcaagttcccaaagatgatgatttaataatagaaggatatccactatggatggtatttcatggctttacctcctttctaaaacaagtaaaatctaaaacaacaccatttacaggcagcatgatagttgtacaatcacctgccctatatagagtaagaggtgaagatcccactaacttctacccaattatagacagatcttttataaagggcaaaggtaccaactacactgacccaattaaatttccaggaaatgtatggtatccatccatattctcacagagagattctatatctcaaatagttaattgtggcccatatataccaaaatacaatgaaactaaagaaagtacctggcaactaaactacttttataaattttattttaagtggggtggcagccatccaccagatcaaccagcagaaaacccacaaacaaaagctacctatgacatacccgataaaatgcaacaagcacttgaaattgctgacccaattaagcaacaataccactcagtccttaaaccctgggacttcaggcgaggagaaattacaaaaaaggcttttaaaagaatgttcgaacacctcgaagttactgactctatatcaacagattcaagcgactgctcctcaccaaagaaaaagagaaaagcaccactcctccaagacccaaaagaagaaaacaagaagatccaagcatgtctcctctcactctgcgaagagcctacatgcccagaccaaaaggaagaaaacctacacctcctcatccagcagcagcaccaccagcaacagcaaatcaagtacaacctcctccaactcatctcagacctaaaagcaaagcagagaacacttctacacaacacagggctactaaactaacaagatttaaacaaggatttgaatgggaaacagaagttcaacttgcacatgcttttaaaagacccccaagactatttaaagaagacactcccttttatccatggttaccaaaatttacacctcttgtaaactttcaccttaactttaaaggctaggcctacactgttcacttagtggtgtatgtttaataaagtttcacccccaaaaaaattgtaaaacaaaaaaaaaaaaaaaaaataaaaaatt

SEQ ID NO: 4546 - protein, 672 aa, Gammatorquevirus sp.
MPFWWYRRRKPWFGRWFRKKRTTWKRRKPRRKLYRRRRTRRTRGRRRRRHYKVRRKQKKITVKQWQPESIKKCKIKGLGPLVIGAEGCQYRCFTVYKYEWTNPKTAGGGGFGCELFTLQHLYNEYKARNNIWTASNLYKDFGRYTGCQFTFYRHEHTDFIITYDLNPPFTINKYTYMMLHPINLLQSRHKKILLSKDTKPNGRLTKKLKIRPPKLMSTKWFFQEELAKYGLVTIAATACNFRFPWMGCCNENLIITIDYLQPGFYKHSEWAQASTTEYNPLGHSGGKQMSTQLYYYYYDDRGVEKSWQMQPFTSGNPYLASLNYETGWFNSKVLRAYLVSTKPSKQEAMSITPCGTVRYNPILDTGEKNKVYVVSTLLYNWQVPKDDDLIIEGYPLWMVFHGFTSFLKQVKSKTTPFTGSMIVVQSPALYRVRGEDPTNFYPIIDRSFIKGKGTNYTDPIKFPGNVWYPSIFSQRDSISQIVNCGPYIPKYNETKESTWQLNYFYKFYFKWGGSHPPDQPAENPQTKATYDIPDKMQQALEIADPIKQQYHSVLKPWDFRRGEITKKAFKRMFEHLEVTDSISTDSSDCSSPKKKRKAPLLQDPKEENKKIQACLLSLCEEPTCPDQKEENLHLLIQQQHHQQQQIKYNLLQLISDLKAKQRTLLHNTGLLN

SEQ ID NO: 4547 - protein, 118 aa, Gammatorquevirus sp.; identical to SEQ ID NO: 1834

SEQ ID NO: 4548 - protein, 136 aa, Gammatorquevirus sp.
LLLTKEKEKSTTPPRPKRRKQEDPSMSPLTLRRAYMPRPKGRKPTPPHPAAAPPATANQVQPPPTHLRPKSKAENTSTQHRATKLTRFKQGFEWETEVQLAHAFKRPPRLFKEDTPFYPWLPKFTPLVNFHLNFKG

SEQ ID NO: 4549 - DNA, 2563 bp, Alphatorquevirus sp.
gccgtcccagcaggctaacaacaacaacaaccagagatggcctggggatggtggagaaggaggcgccgccggtggttccgtggcctctggagaagaaaacgccgtacccgaagacgacctcgatggacttatcgccgccctagacgacgaagagtaaggaggcgcagactgtggaggagggggagacccagacgcagacgctttaaaaaaagacgtttcagacgcagacgcaaaaagcccaagataattattaaacagtggcagccggggactgttagaaaatgtttaataatagggtacatggctgctcttataagcggacgaggtagcttctctagaaactacagcagccacctagaagacagaatcttaaagggaccctttggcggggggcacagcactatgagattctccttgacagtactgtacaatgactttttaagacacatgaacttttggacaaaaagcaaccaagacttagaacttgctagatactttggggtaacattcaccttttacagacaccccacagaggactttataataacatacaacagaaaaaccccactgggaggaaacatactgacagcaccatcactacacccgggcaactgcatgctcagcaaaagaaagatactactacccagcttagaaaccagacccaagggaaaaaagaccaaaaaactaagaatagggccccccacactctttactgacaagtggtactttcaaaaggacatctgtgaccttacactgttaaacctcaatgtggtgcaagctgacttgcggtttccgttctgctcaccacaaactgacaacatttgcgtaaacttccaggtactaagttccgtttataacggctacttagacatacaccactttgataattcattaatagagaaacaagtagaagaagttaaaaaatttttaaaaacagtatttaaagaccaaggaacaaaactaactagctttaatgcccttaacacatttagaacagaaggctgtgccagccaccctcaattaaaaaagccaagctcaactagtgaaccaagcaacgcagtaaaggctgataaatactttgccactttagatggcctatggggagaccccatttatgccaacagcctaaatgctactcaaggctcaaatacagcaacagcagacagcataattgacatactagtaaaaaatatgaaaacgtaccaccaaaaatttatagatgagtcattcccaagcagctggtacggaaacatagcaaactgccatcttacaggcatatactctccaatatacctaaacgcaggtagaataagtccagaaatacccggactgtacacagaaatactatacaacccatacacagacaaaggcaaaggcaacaaagtatggctagatccccttaccaaaaaagacaacatatacactccaccacaaagcaagtgtttaatagctgacatgcctctgtggtgcgcagtatttggctaccaagactggataaaaaaagaattaaaccactgggacgcaccatttaattacagaatagtatttatatgcccatacacctttccaaaactatacaacgcagcagatgccaattatggatacatacccattagtgatcagttcggggcgggtcagatgccagacggcagcacatacgtacccataaagtggagaggaaagtggtaccccaacctaatacaccaacaaaatgtattagaagacctgtcacgcagcgggcccttcgcacctaaaaaagacatacccagcacacaactaagcatgaaatacaaattcagatttaactggggtggcaatcctattcttgaacagattattagagacccctgcacgcagcccacctacgacatacccggtaccagtaacatgcctccgagagtacaagtcattgacccgagggtcgtcgggcctaacctcacattcaaaagctgggacatcagacgttaccaatttagcgacaaaagtattaagagagtgtcagaacaatcagaaactgctgaaccttttttcgaaggcccaaaaaggccccgcatcgacctcggtccccaaatccaagaagaagaagactcgcgttcgacacgcccgagagaaccgcagccctgggactcggaccaagagatggagagcagccagcaaagcgaagaagagacgacgctcaccgtccgagagcagttgcagcagcaataccaagagcagctcagaatcagacagggaatcaaacacctcttcgagcagctagtaaaaacccagcagggagtacacgtacatccatccctcttgtaggcccaaagcagtacatgttcccagagagggccccaaaaccagctcccacctcgggagactgggagatggagtaccttatgtgcaaaatatttgacaggccccccagaagcaagctcacagacaaccctttctacccctactgcaaaaaccaatacaatgtaacctttcagcttaactacaaataaaacagccattctaactgctaggccgtgggagtttcactggtcggtgtctacctcttaaggtcactaagcactcc

SEQ ID NO: 4550 - protein, 755 aa, Alphatorquevirus sp.
MAWGWWRRRRRRWFRGLWRRKRRTRRRPRWTYRRPRRRRVRRRRLWRRGRPRRRRFKKRRFRRRRKKPKIIIKQWQPGTVRKCLIIGYMAALISGRGSFSRNYSSHLEDRILKGPFGGGHSTMRFSLTVLYNDFLRHMNFWTKSNQDLELARYFGVTFTFYRHPTEDFIITYNRKTPLGGNILTAPSLHPGNCMLSKRKILLPSLETRPKGKKTKKLRIGPPTLFTDKWYFQKDICDLTLLNLNVVQADLRFPFCSPQTDNICVNFQVLSSVYNGYLDIHHFDNSLIEKQVEEVKKFLKTVFKDQGTKLTSFNALNTFRTEGCASHPQLKKPSSTSEPSNAVKADKYFATLDGLWGDPIYANSLNATQGSNTATADSIIDILVKNMKTYHQKFIDESFPSSWYGNIANCHLTGIYSPIYLNAGRISPEIPGLYTEILYNPYTDKGKGNKVWLDPLTKKDNIYTPPQSKCLIADMPLWCAVFGYQDWIKKELNHWDAPFNYRIVFICPYTFPKLYNAADANYGYIPISDQFGAGQMPDGSTYVPIKWRGKWYPNLIHQQNVLEDLSRSGPFAPKKDIPSTQLSMKYKFRFNWGGNPILEQIIRDPCTQPTYDIPGTSNMPPRVQVIDPRVVGPNLTFKSWDIRRYQFSDKSIKRVSEQSETAEPFFEGPKRPRIDLGPQIQEEEDSRSTRPREPQPWDSDQEMESSQQSEEETTLTVREQLQQQYQEQLRIRQGIKHLFEQLVKTQQGVHVHPSLL

SEQ ID NO: 4551 - DNA, 2563 bp, Betatorquevirus sp.
cccccgctgaaggtgagtgaaaccaccgaaatcaaggggcaattcgggctaattcagtctagcggaccgggcaagattcttaatatatttattttacagatgagcaaatttcaaaaaccaaccttatataatggacgcggattagacaaccagtggcttaatacaatcttcaacacccacgatttaatgtgtggctgcaacaaagtaaaagaccaccttctcgacatactcaacattaaacaatgccaccattctacagaaaaagattctaccgccgaaactactggaactggagaacaagaagaaatgcctttcgacgcaaaagatttagaagctttattcgcagaaaaccaagacgacgaagggtaagaagaaaattttattctaaaaactttaaaagaaaaattaaaagactaaatattgtacagtggcaaccatcttacattaacagatgccacatacgagggtggctagaactttttgaagcgggacatggacggttcggaaataactttactaactataaagaaacctacacaccccataacacaccaggaggagggggatggtccctacaagaacttactttatcaaatttatttactcaaaaccaacaattaatgaactactggactaaaactaataatggactaaatcttgtaagatttatgggtggtagactaacattatacagacaaccagaaacagattacatatttatgtatttcacagaagaggcaatacatgcaggaaagtattggtatccttcttttcaccccattaaaatgctggtagctaaaaataaagtagtagttcccagcttaaaaacacaaccaaacaaaagaaagacttacaaaagaattaaaataaaaccaccaaaactactaaaatctaactggtactttcaacaacatatttgtacatttccactattaagatttgcagtaacagctgtagatttaaattacatgttcctatcaccaaaatcaaacaacagtaacataacacttcatatgcttaatacaggcttatttagaagacacaactttcaatactccgacatagaaaaaggttactatccaaaagaaggcacatacttatatggaacatttaacggttcaccaacattatcatcagtgccaagaaaatctacagtatacttaggaggtcccttataccaagaaggcacaccagcacaaacatgggaaaaatacaaaaacaaagaattgtggggaaacattttttattacaaattctttgactttatacaaagatcatttataagtacttcacaaccaaaagacttttacaacaccacaaaaataaatcaaaatgtaggaaccgaaggcataacagaaaaaatagaaccatattacatagatgtgagatacaacccatacaaagacacaggcacaggcaacgtagcttactggttacaagtatcagacgccaccagaggagaaagttgggaaccatattcagacccagacttacaaataagcggatacccattttggttaatgctttggggctgggcagactacacaaaaaaattaggaaaagctaaaaacctagacaatgactggatattagtactaaaatccaccaaatttagtagcccattatacccttatgttccactatcagacagctttattcatggacaagcaccttgggacaatgacgcagaagaaattgtaactaatgacttaaatcattggtttccaaaatggaaatttcaagaacaagccataaataacttactaatgacaggaccaggtacatgcaaagcaccaaaccaagtatcaatacaagctgtactaaaatatgatttttcttttaagtggggaggaaacagctcaaaactggaaaccatcacagatccactggcacaacccattacccccaatcccaataaccagctcctatcagatgaaattactaacccagaacaaagcatccaaaacctcctctacaaatgggacattagacgagacacacttacacaagcagctgaaaagcgaattaaagaaatcgaaactgatgtcagacctttgttcacagatggaatacaaactcaagaaaaaacaacatcacaagagaaagagacccaggaaaaagaaaagcaagcattactcctccagctccagcaactccagcaattcaaccaggagctgcagcagcgattcctcagactcaaacaactaaccatggaactataaactttacattaattaaaagggcttacctatttgacccaccaaaaacaaaactaacacctataagggggagggactgggaagatgaaaaatatttaagtaaatggatgcatagacccatgcgcaaattcctagaggacaccccctactatccatggtgtgtacctgaaccaaaagtaaattttgaacttgtaaaaggatttaataaaggcctgcattaattcacttaacgagtctgtttattaaattaaaacttatataaaccaacaccgcctccctaatacgcaggcgcagaagggggctccgcccccttaaacccccgggggggaaaccccccctaagcc

SEQ ID NO: 4552 - protein, 659 aa, Betatorquevirus sp.
MPPFYRKRFYRRNYWNWRTRRNAFRRKRFRSFIRRKPRRRRVRRKFYSKNFKRKIKRLNIVQWQPSYINRCHIRGWLELFEAGHGRFGNNFTNYKETYTPHNTPGGGGWSLQELTLSNLFTQNQQLMNYWTKTNNGLNLVRFMGGRLTLYRQPETDYIFMYFTEEAIHAGKYWYPSFHPIKMLVAKNKVVVPSLKTQPNKRKTYKRIKIKPPKLLKSNWYFQQHICTFPLLRFAVTAVDLNYMFLSPKSNNSNITLHMLNTGLFRRHNFQYSDIEKGYYPKEGTYLYGTFNGSPTLSSVPRKSTVYLGGPLYQEGTPAQTWEKYKNKELWGNIFYYKFFDFIQRSFISTSQPKDFYNTTKINQNVGTEGITEKIEPYYIDVRYNPYKDTGTGNVAYWLQVSDATRGESWEPYSDPDLQISGYPFWLMLWGWADYTKKLGKAKNLDNDWILVLKSTKFSSPLYPYVPLSDSFIHGQAPWDNDAEEIVTNDLNHWFPKWKFQEQAINNLLMTGPGTCKAPNQVSIQAVLKYDFSFKWGGNSSKLETITDPLAQPITPNPNNQLLSDEITNPEQSIQNLLYKWDIRRDTLTQAAEKRIKEIETDVRPLFTDGIQTQEKTTSQEKETQEKEKQALLLQLQQLQQFNQELQQRFLRLKQLTMEL

SEQ ID NO: 4553 - protein, 120 aa, Betatorquevirus sp.
LKVSETTEIKGQFGLIQSSGPGKILNIFILQMSKFQKPTLYNGRGLDNQWLNTIFNTHDLMCGCNKVKDHLLDILNIKQCHHSTEKDSTAETTGTGEQEEMPFDAKDLEALFAENQDDEG

SEQ ID NO: 4554 - DNA, 2563 bp, Gammatorquevirus sp.
aataaaaaattgcaaaaattcggcgctcgcgcgcgggggcaattcgggctagggcagtctagcggaacgggcaagaaacttaaaactatactttattttacagatgcaaagcctatcagcaacagacttctacaaaaaaactccttttaattcagaaacccaaactcaaatatggatgtctcaaattgctgatgcccatgacaattactgcaactgcgattgtccttttgctcatctgcttgcttctatttttcctcctggtcataaggaccgtgatcttacaattaatcaaatacttcaaagagactaccagcaatgccattctggtggagaaggagaagaaagccatggtatggcaggtggcgccggaggaggtttcaaaaatataaaagaagaaaatacagaagaattcccagaagaagaaatagaaggactactcgccgccgcagaagacgccgccgcaaggtaaggagaaaaagaaaaaccttacctatagttcaatggcagccagactccataagaaaatgtaaaattaaaggatttactgattttatcttaggtgctgaaggcacacaaatgtactgttacacagttcacaaaacagactatgtgccacctaaagtgccctggggtgggggctttgctattgaacaatataaccttaaatacttatatgaagaatatcaattccataacaacatatggacagcaagtaacatacttaaagaccttgtaagatacctgggtgttagaatagaagcttacagacacccagaaaccgactttattttagcctacagcagacagccaccatgggaccttactaaatttacctttatgggatgccacccacatcaaatgctgttagaaaaacacaaaagaatagtatatagcttagccagtaaacctcaaggtaaatactccattaaatttaaaataagaccacctaaacaaatgatttccaaatggttttttagtaaagaattttgccctaagaatttattccaaattaaaggagcagcattaaaccttagatactctttcttaagccctaaaaatgaaaacagactagcaaccatatacagcttaaacacacaatattataaagaaccagactggggagcaacacaccccattggtacagaaacatactataaacccacccatggtctgaaagtgcctcaaaaatatgaaatacaagtaaaaggccaaactgccttacaaaccagagaaattcctacatccgaccaaatcacacattactcatatgcagactctgtaagctatgacaaaggctggtttaaatctgaatttttactagctaaaaatttgctatacaatggaggaagagctatagcattacatcaagtaatagcaggaagatacaatcctacaaaagacagtggtaatggaaacttaatatactgtgtatccattacagcacaaaactggaaagtaccagaaagcaatgaattagttgtagctggagtgccactatggttaggtctacatggctatctctcttatataatagcaactagaaaactatcctttttagagctccatgttatttgcttaaaaagcccagcaatacattgctacccagaaataggaggctgtgatatttgggtacctatagactacacatacatgctaggcaaaatgccttatgaccaaacaccaacagacagacaaaaacaatattggtaccctactataaattggcaactgcaaacactaaacacaatagtagaaacaggaccctttactccacaatactcagaaattaccaacagtacttgggaactaaaacttggctatcaattttactttaagtggggaggcccgcaaactcaagacccagaaattacaaaccctgcagagcttcaaacatatgatgtacccgataaaatcacacagagactacaaattgccaacccagcaaaacttagcacagaaagtatactccatccctgggactggagacggggctttgttaaagaaagagctcttaaaagaatgtgtgaccacctcgaaactgattcagaatttgaaccttctccagcaaaaatgtgcaaagagaaaagcagaaaaggagctctaccccagtgcagagagaaagaggaggaagaaatccaaacctgtctcctctcgctctcagaaaaaaatatctgccaagaagaagacccgacaaccatccagcagctcatcaagcagcagcagcaacagcagctggagctcaaacgaagcatcctcactctcctaatggacttgaaagaaaaacagagaatgctacaactacaaacaggaatgttagaataactttaacaagatttaaagaaggattcgaaagagaaacagaaaaccagttagcacaagcatttaaaagacccccaagactatttaaagaagacactcccttttatccctggttaccccaacctacaccccttgtaaactttcaccttaactacaaattctaggcctacaactttcacttagtggtgtatgtttatataagtctcacccccaaaaaaattgtataataaaaaaaaaaaaaaaa

SEQ ID NO: 4555 - protein, 668 aa, Gammatorquevirus sp.
MPFWWRRRRKPWYGRWRRRRFQKYKRRKYRRIPRRRNRRTTRRRRRRRRKVRRKRKTLPIVQWQPDSIRKCKIKGFTDFILGAEGTQMYCYTVHKTDYVPPKVPWGGGFAIEQYNLKYLYEEYQFHNNIWTASNILKDLVRYLGVRIEAYRHPETDFILAYSRQPPWDLTKFTFMGCHPHQMLLEKHKRIVYSLASKPQGKYSIKFKIRPPKQMISKWFFSKEFCPKNLFQIKGAALNLRYSFLSPKNENRLATIYSLNTQYYKEPDWGATHPIGTETYYKPTHGLKVPQKYEIQVKGQTALQTREIPTSDQITHYSYADSVSYDKGWFKSEFLLAKNLLYNGGRAIALHQVIAGRYNPTKDSGNGNLIYCVSITAQNWKVPESNELVVAGVPLWLGLHGYLSYIIATRKLSFLELHVICLKSPAIHCYPEIGGCDIWVPIDYTYMLGKMPYDQTPTDRQKQYWYPTINWQLQTLNTIVETGPFTPQYSEITNSTWELKLGYQFYFKWGGPQTQDPEITNPAELQTYDVPDKITQRLQIANPAKLSTESILHPWDWRRGFVKERALKRMCDHLETDSEFEPSPAKMCKEKSRKGALPQCREKEEEEIQTCLLSLSEKNICQEEDPTTIQQLIKQQQQQQLELKRSILTLLMDLKEKQRMLQLQTGMLE

SEQ ID NO: 4556 - protein, 121 aa, Gammatorquevirus sp.
MQSLSATDFYKKTPFNSETQTQIWMSQIADAHDNYCNCDCPFAHLLASIFPPGHKDRDLTINQILQRDYQQCHSGGEGEESHGMAGGAGGGFKNIKEENTEEFPEEEIEGLLAAAEDAAAR

SEQ ID NO: 4557 - protein, 113 aa, Gammatorquevirus sp.
LSPLALRKKYLPRRRPDNHPAAHQAAAATAAGAQTKHPHSPNGLERKTENATTTNRNVRITLTRFKEGFERETENQLAQAFKRPPRLFKEDTPFYPWLPQPTPLVNFHLNYKF

SEQ ID NO: 4558 - DNA, 2561 bp, Gammatorquevirus sp.
gcaattcgggctagggcagtctagcggaacgggcaagaaacttaaaactatattttttattacagatgtccaagatacaaagcaaggacttttatactgaaacaccctttaatcccgaaacgaaaactcaaatatggatgtcacaaattgctgattctcacgataatatctgccattgcaaccatccctttgctcatttgcttgccagtatctttcctgtaggtcataaagataggaatctcacaattaatcaaattcttttaagagactataaagaaaaatgcctttctggtggagaaggaggagaaagccatggtttggcagatacaggaggaggtttcaaaggagaaaacagagaagaactagaagaagatttcccagaagacgaggtaggcgcacttatcgccgccgcagaagacgtcgatacaaggtaagaagaaagaaacaaaaaattatactaaaacaatggcaaccagaaagcattaaaaaatgtaaaataaaaggaggaggaacaatagttatgggtgctgaaggctgtcaatttagatgctacacagtatacaaaacagaatggactaatccaaaagtacctggtgggggaggctttggagttgaactctttacattaagatacttatacaaagaatacctagcaaaaaataatatttggacagcatctaatgactacaaagaactttgtagatatactggctgcaaatttaccttttacagacacccagaaacagactttattttatcatatgatatacaacctccttttacaataagcaaatggacatatatgtttatgcaccctgtactaatgttacaaagaagacataaaaaacttttgctaagtactgccacaaaaccaaatggtagacttactaaaagatttaagattaaaccaccaaaacttttatctacaaaatggttttttcaagaagactttgcagaccaaggtctagtaaccattactgctacagcatgcaactttagatacccatggctaggatgctgtaatgaaaataatatgataactttatattacatacagccacaattttacccacacaccacatgggcacaatatcacacagtagcttggaatccacttgatgtaggatcccaaacaaaaatgcaagaaaacttgttttactattactatgaaggaaacacaaaaaaagagtggcaaatgactccatttagtggttcaactgtttatgataaatctgtaagcataaatggaggatggttttgtccccaagtattaagagctgtagaggttaaaaaaaacaagtctgaaccacctatggctctaactccctgtggagtgcttagatataaccccatggaagacacaggaaaaggtaacaaaatttgggtaacagatgttcttagtggcagctatggagaacctaaagacacagatttaataatggaaggattcccattatatatgatggtatatgggtatacttcttacttaaaacaagtaaaacacgactcagtttcctttaagggtaaaatgctagtttttaaaagcccagcatttagaagaataagaggatctgacaaacatgactggtacccactagttgataaaagcttttgctttggaaaaggaccaggaatgacggatcccataacatttacaaacaatatatggtaccctacactatatgcacaaagagactcaatagcaaacattgtaggatgtggcccatacacacctaaatacaatgaaactaaacaaagtacatggcaatgcaattatttttatgatttttattttaagtggggcggagcatatccaccagaccaagaaattgaagacccaactactaaaggaaaataccctgtccccaataaccagcctgaaacaatacaaattgcagacccttataaacaaaaatacaacacaatctttaaaccctgggattacagaaggggatgtcttacaaaaaaagctattaaaagaatgcaagaaaacctcccatctgatgactctttgtcaacagattcaacaaaatgcagctcacccaaaaagagaagaacattacccacactccaagacccgaaaaaagaaaatcaggaaatccaaacatgtctcctctcgctctgcgaaaagcctacctaccaagaagaggagcaagagcacaacctcctcaagctcatacagcagcagcagcagcagcaggagcagctcaagtacaacctcttgacattaatttcagacttaaaagtgaaacaaaggaatttactacatcaaacaggattcctcagctaacaagatttaaacctggatttgaacaacaaactgaaaaagaactagcaaccatttttaaaagacctgtcagaacatttaaagaagactcccccttttacccctggttaccaattactccaattgtacaatttaaccttaactacaagtgctaggccaacaatgtacacttagtggtgtttgtttaataaagtttgcaccccaaaaaaatagtaaaataaaaaaaaaaaaaaaaaataaaaaattgcaaaaattcggcgctcgcgcgcgctgc

SEQ ID NO: 4559 - protein, 669 aa, Gammatorquevirus sp.
MPFWWRRRRKPWFGRYRRRFQRRKQRRTRRRFPRRRGRRTYRRRRRRRYKVRRKKQKIILKQWQPESIKKCKIKGGGTIVMGAEGCQFRCYTVYKTEWTNPKVPGGGGFGVELFTLRYLYKEYLAKNNIWTASNDYKELCRYTGCKFTFYRHPETDFILSYDIQPPFTISKWTYMFMHPVLMLQRRHKKLLLSTATKPNGRLTKRFKIKPPKLLSTKWFFQEDFADQGLVTITATACNFRYPWLGCCNENNMITLYYIQPQFYPHTTWAQYHTVAWNPLDVGSQTKMQENLFYYYYEGNTKKEWQMTPFSGSTVYDKSVSINGGWFCPQVLRAVEVKKNKSEPPMALTPCGVLRYNPMEDTGKGNKIWVTDVLSGSYGEPKDTDLIMEGFPLYMMVYGYTSYLKQVKHDSVSFKGKMLVFKSPAFRRIRGSDKHDWYPLVDKSFCFGKGPGMTDPITFTNNIWYPTLYAQRDSIANIVGCGPYTPKYNETKQSTWQCNYFYDFYFKWGGAYPPDQEIEDPTTKGKYPVPNNQPETIQIADPYKQKYNTIFKPWDYRRGCLTKKAIKRMQENLPSDDSLSTDSTKCSSPKKRRTLPTLQDPKKENQEIQTCLLSLCEKPTYQEEEQEHNLLKLIQQQQQQQEQLKYNLLTLISDLKVKQRNLLHQTGFLS

SEQ ID NO: 4560 - protein, 122 aa, Gammatorquevirus sp.
MSKIQSKDFYTETPFNPETKTQIWMSQIADSHDNICHCNHPFAHLLASIFPVGHKDRNLTINQILLRDYKEKCLSGGEGGESHGLADTGGGFKGENREELEEDFPEDEVGALIAAAEDVDTR

SEQ ID NO: 4561 - protein, 136 aa, Gammatorquevirus sp.
MQLTQKEKNITHTPRPEKRKSGNPNMSPLALRKAYLPRRGARAQPPQAHTAAAAAAGAAQVQPLDINFRLKSETKEFTTSNRIPQLTRFKPGFEQQTEKELATIFKRPVRTFKEDSPFYPWLPITPIVQFNLNYKC

SEQ ID NO: 4562 - DNA, 2561 bp, Gammatorquevirus sp.
aaattcggcgctcgcgcgcgctgcaccgaggtctaggggcaattcgggctagggcagtctagcggaacgggcaagaaatttaaaactatactgttttttagaatgaacaaccttactgcaacagacttctacaaacctacaccatacaatccagaaaccctgaatcaaatatggatgtctgagataagtgattcccatgacatttggtgcgactgcaaaagtccttttgctcacctgcttgcttctatttttcctcctggtcataaggaccgccatcttacagttgatcaaattattaagagagactaccaagaagcatgccattctggtggaaccggcgccgcaaaccttggtttggcagatggaaaagatacagaccaaggtataaaaagagaagatggcccagaagaagacgtagaagagctccttttcgccgccgccgccgccgccgcagaagaaaaggaaaggtaagaagaaaaagacaaaaaataactgttaaacaatggcagcctgactctatagttaaatgcaaaataataggctttggatgtttagttgctggtgctgaaggcagacaatctttctgctacacaaacgaagtagctgaatatcctcaacctaaagcacctggaggtggtgggtttggagctgaactatattctttacaatacttatatgaacaatggattggtagaagaaatatatggactaaatctaatgactataaagatttagtaagatatttatggtgtactataaagctatacagacacccaacaacagactttgtagttgcttacaatagacaaccaccatttttaattgaaaaagactactacaatgatattcaccctttaatgcttatgctagccaaacatcataaagtagtacctagtcttaaaagaaaaccctatggaaagccttatgttaaaatgaaaattaaaccacctaaacaaatgctaactaaatggttttttcaacaagactttgctaaacaaggcttatttacaatacaagcttcagcttgcaatttaggatgggcttactatggacctaacagtcaaagtagatgtattacaggatattctttaaacatacaattttaccaaatacaacaatgggcagccacgttaggcagtcaaccatacctaccatactctgcatacccacatacaaaaccactaaaatactggacaaaaaatgacaaaggtcaaacatcattcacactagtagatataaaggattatgaaaaaagtgtaggctactcatcaggattttttcaacctggagttttgcaagcaattaaaattacagaaggtacagactccaagtttgaaagtccaccagcacaaagcaatttacctataacagcctttagatacaacccagacatagatgatggccatggaaatgcagtatggttagtaagcacactttcaggccaccactgggaaaaaccaggtgactctaacctaattatatcaggaaaaccactttggttagcattttatggtttctacaactttatacaaaaaactaaaaaagacaaaggctggctactaacaggatttttttgtgtacagagccctgctataaaattactaacaccacacaaacaaactatatttcctatattagatttagattttatacaaggaaaactaccttatggagaaacaattacaacagcaaaaaaaaatttatggtatcccaatgtagaaaatcaagttattacaataactaactttgtacaaacaggcccatacatacctaaatatgcttacctaaaagaaagcacatgggaactaacttataaatacatttttcattttaagtggggaggcccatatgtctctgatcaaccagtacaaaatccaaaagaccaaggaaaatatgatgtacccgatacaatcacacaaacagtacaagttagcgacccgctcaaacaaacctgtaaaacaatgcttagagactgggactacagaaggggcattgttacaacaacagctcttaaaagaatgtcagaacacctccaaattgattcatctctccaatctgatggctcagaaactccaaaaaagaaaaggaaaatcacagcagaaataccacaccatcaagaaaaagcacaagaaatgcaagcctgtctcctctcactcttcgaagaaagtacatgccaagacccccaagacctccaccagctcatccagttccagcagcagcagcagcacaagctcaagatcaacctcgtcaaactcctaatggacctaaaacaccaacaaagaattctacaacaccacacaggaatagattaaccaggtttaaacctggatttgaatgggaaactgaaaaacagttagcacaagcatttaacagaccacccagactctttaaagaagatacccccttttacccctggctacccaaatttacacctattgttaactttcaccttaactttaaaggctaggcctacacttatcacttagcggtgtttgtttatataagtttcacccccaaaaaaattgtaaaataaaaaaaaaaaaaaaaataaaaaattgcaa

SEQ ID NO: 4563 - protein, 664 aa, Gammatorquevirus sp.
MPFWWNRRRKPWFGRWKRYRPRYKKRRWPRRRRRRAPFRRRRRRRRRKGKVRRKRQKITVKQWQPDSIVKCKIIGFGCLVAGAEGRQSFCYTNEVAEYPQPKAPGGGGFGAELYSLQYLYEQWIGRRNIWTKSNDYKDLVRYLWCTIKLYRHPTTDFVVAYNRQPPFLIEKDYYNDIHPLMLMLAKHHKVVPSLKRKPYGKPYVKMKIKPPKQMLTKWFFQQDFAKQGLFTIQASACNLGWAYYGPNSQSRCITGYSLNIQFYQIQQWAATLGSQPYLPYSAYPHTKPLKYWTKNDKGQTSFTLVDIKDYEKSVGYSSGFFQPGVLQAIKITEGTDSKFESPPAQSNLPITAFRYNPDIDDGHGNAVWLVSTLSGHHWEKPGDSNLIISGKPLWLAFYGFYNFIQKTKKDKGWLLTGFFCVQSPAIKLLTPHKQTIFPILDLDFIQGKLPYGETITTAKKNLWYPNVENQVITITNFVQTGPYIPKYAYLKESTWELTYKYIFHFKWGGPYVSDQPVQNPKDQGKYDVPDTITQTVQVSDPLKQTCKTMLRDWDYRRGIVTTTALKRMSEHLQIDSSLQSDGSETPKKKRKITAEIPHHQEKAQEMQACLLSLFEESTCQDPQDLHQLIQFQQQQQHKLKINLVKLLMDLKHQQRILQHHTGID

SEQ ID NO: 4564 - protein, 126 aa, Gammatorquevirus sp.
LFFRMNNLTATDFYKPTPYNPETLNQIWMSEISDSHDIWCDCKSPFAHLLASIFPPGHKDRHLTVDQIIKRDYQEACHSGGTGAANLGLADGKDTDQGIKREDGPEEDVEELLFAAAAAAAEEKER

SEQ ID NO: 4565 - protein, 108 aa, Gammatorquevirus sp.; identical to SEQ ID NO: 2586

SEQ ID NO: 4566 - DNA, 2561 bp, Gammatorquevirus sp.
aaaattgcaaaaattcggcgctcgcgcgcgctgcgcgcgcaattcgggctagggcagtctagcggaacgggcaagaaacttaaaactatgctttccttacagatgttatctgcaaaagacttttttaaacctcaaaacaaatacaaccaagaaacaaaaaaccagctttggtgcagtgtaattgcagattcacatgacagtatttgctcctgtgaactgccctttgctcaccttttagcaagcatttttccacctggccatcaagacagaaataaaactattgatcaaatacttaaaagagactacaaagaactatgcctttctactggtggaaaagaagaaacagatagtggcaaagaagaccccgaagaaacaaatattacaagcgccgccgctttacaaacagatacaaaagaaaaagactacatagaagacgcagaccttacagagctaatcgccgccgcagaagaagaaaacaaaaggtaaggagaaaaagaaaaaccttacctattaaacaatggcaaccagacagtataactaactgctacataaaaggatccgatgttttaattttaggagcacaaggaaaacaatttatctgttatactgatgtaaaagcagactatgtgccaccaaaagcacctatgggagggggatttgcagcagaagtatttactttatatgacttatatacagactataaatttcataaaaacatatggagtgctaccaatataaataaagatttagttagatacttaagatgcaaactaacattttttagaagcttaaaaacagactttatagtttcctatcaaagacagccaccatttgaaattaataaatatacataccctagcatacatccccatgttttactacaagacagacataaaaaactcatactaagtaaattaactaaaccaaatggaaaacttaaaactaaaatgtacattaaaccccctaaacaaatgctttcaaaatggtttttttcaaaagactttgctacagctaacctatttttactaaaagcctctgtatgcaactttaatttttcttacctaggatgctgtaactcaagtaaccaaataagttttttttacttaaaccgagacttttacaaaaatgctaactggggagcagaaactggtgcaataccctataggccatatgacacagtacctacaggcaacttaacctttatatatcaagatggtaacaaacaaactacagcaaaaatgcaatcaccttcagcaccagacaaaaaatatgcagacagtgttaactatgagacaggatggttcacctcaaaaatacttagaatagtaaaatggactgaccccgctatgtctaacatacctgtcaatgtagctagatacaatcctacaacagattcaggaaaaggaaacttagtatacctcaccagcatacacacaaagtcctacacacctccaacaacagatgagactatactattaagagacttaccaatttggctagcaatatggggattcttagaatatgttgttaaagaaaaaaaagacaaacactttttaaacacacactgtattattatttctagcactagcattctaccagcaccacaaacaggtattacaccttactatttacctttagacaaatcatttataaatggacaagctccttatggtgaatatgtaactcaaaacatgaaagttaactggtttccatctgtaaactgtcaaatggaaacactaaatgcaatagcacaatgtggaccctatgtacctaaatatggagatgatagagaaagcaactgggaattaaaatacatatacaattttttttttaagtttggtggcccacttatcacagataaagaagttacagatccatccaaacaacaagtctaccctgttcccggtggagtgtcaaacacaatacagatacaaaacccccttaaacaagacacaaacagctttttacacagctgggacttcaggaggggaatcattacagacaaagcttttaaaagaatgtgcaaacacctccaacctgactcagattttcaatcagatgcagaagaaattattcccaaaaagaaagcgagactgggaagagcactccaaacatcagaagaaaaagtccaagagatgcagagctgtctccaggaactctgcaaagaaaatatctaccaagaaacacaagacaacaacctcgagcagttcatcgccttccagcaagagcagcagctcaacatcaagcgaaacatcttagcacttctgatggatttgaaacaacaacaacagagtctacagcttcaaacaggtctttttcattaacccggtttaaacctggatttgaacaacaaacagagtatgaactagcctgtgctttttgcagacccatgagaacctacaaagaagaccccccatactacccctggctacccccagcaccccttgtacaatttaaccttaactttaaaggctaggccgtccctatacacttgttcaagcatgtttatataagtttaaccccaataaagtgtaacaaaaaaaaacaaaaaaaaaaaataa

SEQ ID NO: 4567 - protein, 559 aa, Gammatorquevirus sp.
MGGGFAAEVFTLYDLYTDYKFHKNIWSATNINKDLVRYLRCKLTFFRSLKTDFIVSYQRQPPFEINKYTYPSIHPHVLLQDRHKKLILSKLTKPNGKLKTKMYIKPPKQMLSKWFFSKDFATANLFLLKASVCNFNFSYLGCCNSSNQISFFYLNRDFYKNANWGAETGAIPYRPYDTVPTGNLTFIYQDGNKQTTAKMQSPSAPDKKYADSVNYETGWFTSKILRIVKWTDPAMSNIPVNVARYNPTTDSGKGNLVYLTSIHTKSYTPPTTDETILLRDLPIWLAIWGFLEYVVKEKKDKHFLNTHCIIISSTSILPAPQTGITPYYLPLDKSFINGQAPYGEYVTQNMKVNWFPSVNCQMETLNAIAQCGPYVPKYGDDRESNWELKYIYNFFFKFGGPLITDKEVTDPSKQQVYPVPGGVSNTIQIQNPLKQDTNSFLHSWDFRRGIITDKAFKRMCKHLQPDSDFQSDAEEIIPKKKARLGRALQTSEEKVQEMQSCLQELCKENIYQETQDNNLEQFIAFQQEQQLNIKRNILALLMDLKQQQQSLQLQTGLFH

SEQ ID NO: 4568 - DNA, 2560 bp, Gammatorquevirus sp.
aaaaattcggcgctcgcgcgcgctgcgcgcgcgcgagcgcaattcgggctagggcagtctagcggaacgggcaagaaacttaaaacaatactttattttacagatgcaaaacttatctgccaaagacttttactctgcaaccaaatttaatcaagacaccaaaaatcaactatggatgtctttaatagctgactcccatgactgttcctgtgactgtgatactccttttgctcatttgcttgctagtatatttcctcctggtcacaaagatcgtgatcttacaattaatcaaatactggcaagagactacacagaaaaatgcctttctggtggagcaggaggagaaagcactggtggggtcgcttcaaatataaaaagagaagaccctacagaagaaggagacgcagactccctcgcaggagaagatatagaaaatctacttaccgccgccgcagaagaaaacgcaaggtaagaagaaaactgaaaaaactaactgttaaagtatggcagccagaaagtattagaaggtgtaaaataataggttatgggactctagttttaggagctgaaggaagacaatctttttgctggacaaatgaagctgatgaatacatacagccaaaagcaccaggagggggaggttttggatgtgaagttataactcttaaatacttataccaagaatacaaaagacacaactgcatatggactgaatctaataactataaagacttatgcagatatacaggctgtcaaattagactatacagacatcctactatagactttatagccagctacaatatacagccaccatttgacatagagaaatttacatatacagctatacaaccacaaaacatgctactagctagacaccacaaagtaattttatgcactaaaaaaactccaaaatctaaaccatgggttaccttaaaaataaaaccaccaaaacttatgtctaccagatggttttttcaaaaagacttttccaaataccctttactactactccaagctactgcagcagatatggggcatccaaaaatcggaccactaagtcaaagtcaaatgataaccatatattatttaaatactgtattttacccagagccagactgggcagttaaattaggaactccatacaaacctgtaaaaacaatctctttacctttaactgttaaatatagagatgctaaaggtgtagctcaagaatttaaactaggtgaaaactggccagaaactgaatcaggatactaccaaagcattaattatacaggtggctggtttgacaaaagactattaaatgcatatgaaatacatggtagaacaggccaagcacaaggtgctctacctatagctgtagctagatacaatccaaatgtagatacaggagaagaaaatttagtatattttatatcacttactaaaaatgactacaaaccaccaacatttacacctgattttattattaaaggcctacccctctggatggccttttttggatactggaattttattaaacacacaacacaagacaaaaccattatgaaaagccacatgtttgtagtaaaatctccagccatacaaagactttcaactacaacagaacaaacttactatccaattatagacaaagaatttgtagaaggaaaactaccatttgatgaatacttaagtgacaatattaaaaagttttggtacccaacagctgagagacaaactacaactataaatgctattgtagagagtggaccatatgtacctaaattaactaacttaaaagaaagtacttgggaactgccatacaaatataaatttttttttaaatggggtggtccccagattacagaaaaaccagttgatgatccagcaaaacaaggagactggcctatgcccaattcagtctaccaaacattacaaattgctgacccagaaaaacaaagtccagaaaccatgtttcatgactgggactacagaagggggattattacacaaacagctattaaaagaatgtcagaaaacctccaaactgattcagatctcgaatctgttcaatcagacccgccaacgaaaaagagaaaatacacaaaagagatcccatgcaaaaagaaagcccaagaaaaaatcaagagctgtctcctctctctctgcgaagaagatacatgccaagaccagaaccaagacatcctccaactcatccacaaccagcagcagcagcagcagcagctcaagcgaaacatctacacactcctcacagagctgaagaaacagcaaagatttttacaactccagacaggagcactagagtaaagccatttgctcctggacatgaatgggaaactgaagtacagtgtgcaaaagcatttcatagaccccctagatattataaaacagaccctcctttttacccttggctaccaataactccaaaagttatctttaaccttaactttaaagactaggcccttactgttcacttagtaaaggatgtttatataagtttgtacccccaaaaaaattgtaaaataaaaacaaataaataaaaataaaaaattgc

SEQ ID NO: 4569 - protein, 664 aa, Gammatorquevirus sp.; identical to SEQ ID NO: 3743

SEQ ID NO: 4570 - protein, 122 aa, Gammatorquevirus sp.; identical to SEQ ID NO: 3744

SEQ ID NO: 4571 - protein, 120 aa, Gammatorquevirus sp.; identical to SEQ ID NO: 3745

SEQ ID NO: 4572 - DNA, 2560 bp, Gammatorquevirus sp.
cgggagcccgaggtgagtgaaaccaccgaggtctaggggcaactcgggctagggcagtctagcggaacgggcaagaaacttaaaacaaaactttgttttacagatgtctagattctacaaaccaacaccttacaatggatgtacaaaaactcaaatgtggatgtccatgatatcagatggccatgatatgcattgtggatgttgtcaaccatttgcacatcttctagattctatttttcctgaaggacacactgacagagataaaccaatatcatatataattaaaagagatcttcaacaatgcctttctggtggaatagacgaagaaaaccatggtatacaacttggagaaagcgccgccgccttttctggaataaaagaagaaaaagaactcacagaagaagaaaacctagacgctttactcgccgccgccgcagaagaagaagaactaaaaaggtaagaagaaaaagaaaacaaattcttattaaacaatggcaaccagactctattgttaaatgtaaaattaaaggactaggatgtttagtggcaggtgctgaaggtagacagtcttactgctacacaaatgaaataccaaactaccctcaaccaaaagcaccaggtggaggaggatttggttgtgaagttttttcattaaaatacttatatgatgaatgggtagcacatagaaatatatggacaaaatctaatgaatacaaagacttatgtagatatactggaactaaaataattttatactcacacccaacaacagactttgtatttgcttacacaagaatgccaccatttaacatagagaaatacacatattcagactttcatcctattaaactgctactaagcagacatcataaaataatactaagtaagaggtcaaaccctacaggaaaacttagacataaaataaaaattggaccacctaaacaaatgctcaccaaatggttttttcaaaaagaatttgctacagcaggtttatttcaaatgcaagcatctgcaataaacttaggctttgcttactttggtccaaacacacagagtgcactgctaaccctgtactctcttaatactaagttttacaccaatgcatcatatggtaaaactacagatcacccatacaaaccatacagcacatatcccacaccaggactagacttttactatgacagatctaaaccatcactaaaaacaacaataacagtgaaaggagacactagatatctggacacagtaaactatagtaccggcttctttcaaaaacctgtacttaatgcctggaaagttacacaaaaagacagtccaacacctacattaaacactccagtaactgttataagatacaatccacaaacagacacaggagaaaatacaagaatatggctaacaagcatacactctgacacctgggaagcaccacaagacaaagatttaataatggcaggcagaccactatggctagccttttttggcttctggaattggatagaaaaagttaaaatgacaaaagactactttaaaactcacatatttgtagtacaatcagatgctattagaagaatttctaacacagaccaaaaagtattcccacttattgattttgacttcacacaaggtaaactaccatatgatgaatttttaacagaccaaaagaaaacattttggtacccaacagctgaaaaccaagtagtatcaataaattcacttgtagagagtggaccatatatacctaaatattccaatttaaaagagagcacttgggaacttaaatacacttatacctccttttttaagtggggcggcccagaaatccaagacacaccaatacaaaacccaggaacacagggagaatatgatgttcccgataagcagcttgaaacaatacaagttagcaacccgctcaaagaatcctgccaagcaatgcttagagcctgggactacagaaggggcattattacaacaacagctcttaaaagaatgcaaagcaacctctcagttactgaaacttaccaatctgattcagaaacaccaaagaaaaagagaaagatcacagcacaactcagaaacccccaggaagaaaacaaagaaatccaaacatgtctccactcgctcttcgaagaaagtacctgccaagacccgcaagcaagcctccagcagctcatccagcaccagcaacagcagcaagaaaagctcaagctcaacatcatacacctcctcacagacctgaagagaaaacaaagaatgatacaactacaaacaggtttcgagtagaaccattcaaagaaggctttgaaaaagacacagaaagagaactagcaatagctttttgcagaccccccagaatgtacaaaaatgaccctcccttttatccatggttacctatatgtcccaaagtacaatttaacctaaactttaaaggctaggccaacaatgtacacttagtaaagcatgtttatatatgtttgcaccccaaaaaaaagagtttaccccgctagacggtgcagggaccggatcgagcgcagcgaggaggtcccgggctgcccatggg

SEQ ID NO: 4573 - protein, 660 aa, Gammatorquevirus sp.
MPFWWNRRRKPWYTTWRKRRRLFWNKRRKRTHRRRKPRRFTRRRRRRRRTKKVRRKRKQILIKQWQPDSIVKCKIKGLGCLVAGAEGRQSYCYTNEIPNYPQPKAPGGGGFGCEVFSLKYLYDEWVAHRNIWTKSNEYKDLCRYTGTKIILYSHPTTDFVFAYTRMPPFNIEKYTYSDFHPIKLLLSRHHKIILSKRSNPTGKLRHKIKIGPPKQMLTKWFFQKEFATAGLFQMQASAINLGFAYFGPNTQSALLTLYSLNTKFYTNASYGKTTDHPYKPYSTYPTPGLDFYYDRSKPSLKTTITVKGDTRYLDTVNYSTGFFQKPVLNAWKVTQKDSPTPTLNTPVTVIRYNPQTDTGENTRIWLTSIHSDTWEAPQDKDLIMAGRPLWLAFFGFWNWIEKVKMTKDYFKTHIFVVQSDAIRRISNTDQKVFPLIDFDFTQGKLPYDEFLTDQKKTFWYPTAENQVVSINSLVESGPYIPKYSNLKESTWELKYTYTSFFKWGGPEIQDTPIQNPGTQGEYDVPDKQLETIQVSNPLKESCQAMLRAWDYRRGIITTTALKRMQSNLSVTETYQSDSETPKKKRKITAQLRNPQEENKEIQTCLHSLFEESTCQDPQASLQQLIQHQQQQQEKLKLNIIHLLTDLKRKQRMIQLQTGFE

SEQ ID NO: 4574 - protein, 118 aa, Gammatorquevirus sp.
MSRFYKPTPYNGCTKTQMWMSMISDGHDMHCGCCQPFAHLLDSIFPEGHTDRDKPISYIIKRDLQQCLSGGIDEENHGIQLGESAAAFSGIKEEKELTEEENLDALLAAAAEEEELKR

SEQ ID NO: 4575 - protein, 108 aa, Gammatorquevirus sp.
MSPLALRRKYLPRPASKPPAAHPAPATAARKAQAQHHTPPHRPEEKTKNDTTTNRFRVEPFKEGFEKDTERELAIAFCRPPRMYKNDPPFYPWLPICPKVQFNLNFKG

SEQ ID NO: 4576 - DNA, 2559 bp, Gammatorquevirus sp.
gggcaattcgggctagggcagtctagcggaacgggcaagaaacttaaaactatatttgttttacagatgtcacacattcaagctaaagatttctacaaaccaacaccatacaatcaggacacgaaaaatcaaatttggctttctcaaattggtgattctcacgacaatttctgccattgtaacactccctttgctcatctgcttgctagtatctttcctgtgggtcacaaagaccgtactctcaccattgatcaaattctacttagagattataaacaactatgcctttctggtggagaagacgcaggagatactggtggggccgctacagaaataaaagaagagccagatggccaaaaagaagaagaagaagaccaagatatagaagaaagactagacgctttactcgcagaggccgcagaaaacgccgaaaggtaagaagaaaaagaaaagctattaacattaaacaatggcaacctgaaagtatagttaattgtaaaataaaaggctatacagccacaatagtaggagctcaaggaagacaaatgttttgctacaccgcccataaaactgaatctgtagcaccaaaaactccatatggaggaggctttgcatatgatgtattcagcttaaaatacctatttgaagaatgggtttttcataacaatatctggactgcttccaatttacttaaagaactttgcagatatctaagagtaagaatgactttttacagagacccaaaaacagactttattatagcctttgacatacagcctccatttaacttaaccaaatggacataccctgctctacatccacatcaaatgcttcttcaaaaacacaaaattattttactctctaaatcccataaccctaaaggtaaactatataaaagaatctctgttagaccccctaaacaaatgataaacaaatggtttttttctagttcattttcaccttacccacttatagctattaaagccacctcatgcaacctacaatactcctttataggctgctgcaatgaaaacccacaggtagggttttactacataaatcatagcttttttcaaaatgctaactggggtcaagcaagcacttcttactatctacccaaagaccacttaaaaatcccacaagagtacaaagatgataaaggtaactttgacgttccagacacagaccatgcacgtgaatttccaggtccatcctcacaatactacttaagtataagttatgcatatggatggtttaacaaaagagcaacacactccaaagtatatataggagaagtagaagcaggcatacaaccatttaatgtagcattttataatccttatttagacaaaggagatcaaaatgaaatatacttaactagcattttaaccaaaacatgggacccaccaaaaacagacacatcactatacttatcaggacttccactatggatgggcctatatggctttgtttcatatgtaaaacaaattaaagataaagaaaatgtactagatgaatatgtacttgtaatgagatcacctgcaatatttccatactctcaaataggagcaggaaacttttacatgcccatatctcaaaactttatggatggctatggaccaagcagacagccaccaactgcaaaaatgaaaaagttttggtatccaacacttagacaccaaatagacatacttaacatatttgtaacagcaggaccttatatacaaaaatacaatgaccaaaaagaatctaactgggaactaaaatcaaaatattgtttttactttaagtggggaggcagttaccatacagaaaaagaagtgcaagatccaaccaagcaggacacttatgatgtccccgataaattcacttcagcaatacaaattaccaacccagaaatacaaacaacagaaacaattatccacccttgggactacagacggggatatattaaagaatcagctattaaaagaatgtgcgaaaacttctcagttgattcagatatctcaacagatgcagaggagccacagaaaaagaaaccaaaaagagagggacctcagctatgcatccccggccaaaaggacccggaaacacaaaaatgtctccgctatctcttcgaagaaagtacatgccaagacccgaaaacacaagaagaaatgcaagccctcatcctccagcagcagcaccagcagttggagctcaaaagaaacctcctacacctcctcacagagttaaaacaacaacagaaaatgctacaactacaaacaggcatgttaccttaaccagatttaaagaaggcttcgaaagagaaacagaaaatgaacttgcttttgcctttttaagacctccaagactgtttaaagaagacaccccattttatccatggctaccaactcttgtaccccgtgtaaactttcacctaaactttaaattctaggcctgcactgttcacttagtggtgtatgtttaataaagttttcaccccaaaaaaattgtaaaaacaacaaaaaaaaaaaaaaaataaaaaattgcaaaaattcggcgctcgcgcgcgctgcg

SEQ ID NO: 4577 - protein, 666 aa, Gammatorquevirus sp.
MPFWWRRRRRYWWGRYRNKRRARWPKRRRRRPRYRRKTRRFTRRGRRKRRKVRRKRKAINIKQWQPESIVNCKIKGYTATIVGAQGRQMFCYTAHKTESVAPKTPYGGGFAYDVFSLKYLFEEWVFHNNIWTASNLLKELCRYLRVRMTFYRDPKTDFIIAFDIQPPFNLTKWTYPALHPHQMLLQKHKIILLSKSHNPKGKLYKRISVRPPKQMINKWFFSSSFSPYPLIAIKATSCNLQYSFIGCCNENPQVGFYYINHSFFQNANWGQASTSYYLPKDHLKIPQEYKDDKGNFDVPDTDHAREFPGPSSQYYLSISYAYGWFNKRATHSKVYIGEVEAGIQPFNVAFYNPYLDKGDQNEIYLTSILTKTWDPPKTDTSLYLSGLPLWMGLYGFVSYVKQIKDKENVLDEYVLVMRSPAIFPYSQIGAGNFYMPISQNFMDGYGPSRQPPTAKMKKFWYPTLRHQIDILNIFVTAGPYIQKYNDQKESNWELKSKYCFYFKWGGSYHTEKEVQDPTKQDTYDVPDKFTSAIQITNPEIQTTETIIHPWDYRRGYIKESAIKRMCENFSVDSDISTDAEEPQKKKPKREGPQLCIPGQKDPETQKCLRYLFEESTCQDPKTQEEMQALILQQQHQQLELKRNLLHLLTELKQQQKMLQLQTGMLP

SEQ ID NO: 4578 - protein, 123 aa, Gammatorquevirus sp.; identical to SEQ ID NO: 4409

SEQ ID NO: 4579 - protein, 124 aa, Gammatorquevirus sp.; identical to SEQ ID NO: 4410

SEQ ID NO: 4580 - DNA, 2559 bp, Gammatorquevirus sp.
aaaaaaataaaaaattgcaaaaattcggcgctcgcgcgccaattcgggctagggcagtctagcggaacgggcaagaaacttaaaactatactttattttacagatgcaaagcctatcagcaacagacttctacaaaaaaactccttttaattcagaaacccaaactcaaatatggatgtctcaaattgctgatgcccatgacaattactgcaactgcgattgtccttttgctcatctgcttgcttctatttttcctcctggtcataaggaccgtgatcttacaattaatcaaatacttcaaagagactaccagcaatgccattctggtggagaaggagaagaaagccatggtatggcaggtggcgccggaggaggtttcaaaaatataaaagaagaaaatacagaagaattcccagaagaagaaatagaaggactactcgccgccgcagaagacgccgccgcaaggtaaggagaaaaagaaaaaccttacctatagttcaatggcagccagactccataagaaaatgtaaaattaaaggatttactgattttatcttaggtgctgaaggcacacaaatgtactgttacacagttcacaaaacagactatgtgccacctaaagtgccctggggtgggggctttgctattgaacaatataaccttaaatacttatatgaagaatatcaattccataacaacatatggacagcaagtaacatacttaaagaccttgtaagatacctgggtgttagaatagaagcttacagacacccagaaaccgactttattttagcctacagcagacagccaccatgggaccttactaaatttacctttatgggatgccacccacatcaaatgctgttagaaaaacacaaaagaatagtatatagcttagccagtaaacctcaaggtaaatactccattaaatttaaaataagaccacctaaacaaatgatttccaaatggttttttagtaaagaattttgccctaagaatttattccaaattaaaggagcagcattaaaccttagatactctttcttaagccctaaaaatgaaaacagactagcaaccatatacagcttaaacacacaatattataaagaaccagactggggagcaacacaccccattggtacagaaacatactataaacccacccatggtctgaaagtgcctcaaaaatatgaaatacaagtaaaaggccaaactgccttacaaaccagagaaattcctacatccgaccaaatcacacattactcatatgcagactctgtaagctatgacaaaggctggtttaaatctgaatttttactagctaaaaatttgctatacaatggaggaagagctatagcattacatcaagtaatagcaggaagatacaatcctacaaaagacagtggtaatggaaacttaatatactgtgtatccattacagcacaaaactggaaagtaccagaaagcaatgaattagttgtagctggagtgccactatggttaggtctacatggctatctctcttatataatagcaactagaaaactatcctttttagagctccatgttatttgcttaaaaagcccagcaatacattgctacccagaaataggaggctgtgatatttgggtacctatagactacacatacatgctaggcaaaatgccttatgaccaaacaccaacagacagacaaaaacaatattggtaccctactataaattggcaactgcaaacactaaacacaatagtagaaacaggaccctttactccacaatactcagaaattaccaacagtacttgggaactaaaacttggctatcaattttactttaagtggggaggcccgcaaactcaagacccagaaattacaaaccctgcagagcttcaaacatatgatgtacccgataaaatcacacagagactacaaattgccaacccagcaaaacttagcacagaaagtatactccatccctgggactggagacggggctttgttaaagaaagagctcttaaaagaatgtgtgaccacctcgaaactgattcagaatttgaaccttctccagcaaaaatgtgcaaagagaaaagcagaaaaggagctctaccccagtgcagagagaaagaggaggaagaaatccaaacctgtctcctctcgctctcagaaaaaaatatctgccaagaagaagacccgacaaccatccagcagctcatcaagcagcagcagcaacagcagctggagctcaaacgaagcatcctcactctcctaatggacttgaaagaaaaacagagaatgctacaactacaaacaggaatgttagaataactttaacaagatttaaagaaggattcgaaagagaaacagaaaaccagttagcacaagcatttaaaagacccccaagactatttaaagaagacactcccttttatccctggttaccccaacctacaccccttgtaaactttcaccttaactacaaattctaggcctacaactttcacttagtggtgtatgtttatataagtctcacccccaaaaaaattgtataataaaaaaaaaaaa

SEQ ID NO: 4581 - protein, 668 aa, Gammatorquevirus sp.; identical to SEQ ID NO: 4555

SEQ ID NO: 4582 - protein, 121 aa, Gammatorquevirus sp.; identical to SEQ ID NO: 4556

SEQ ID NO: 4583 - protein, 113 aa, Gammatorquevirus sp.; identical to SEQ ID NO: 4557

SEQ ID NO: 4584 - DNA, 2558 bp, Gammatorquevirus sp.
aaaattgcaaaaattcggcgctcgcgcgcgctgtaggggcaattcgggctagggcagtctagcggaacgggcaagaaacttaaaatatgttttttttttagatgtccagattcttcaacaaaacttcatacaacaaagaaaccctaaatcaactatggatgagcattatagcagatgcacatgatatatgctgtaaatgtgaatgtccatttgctcaccttttagatagtatatttcctgaagggcacaaagacagagaattaactgtacaacaaattattgaaagagattttacatcatgccattttggtggtacagaagaagaaagccatggtttggtaggtggttcagaaagaagagaaccacatggaaacgcagaaaaccaagaagaaaattatatagaagacgaagaactagaagaactcgtggccgccgcagaagacgccactacaaggtaagaagaaaacaaaaaaaaataactgttaaacaatggcaacctgaaagcataaagaaatgtaaaattaaaggacttggacctttagttataggagctgaaggatgccaatacagatgttttactgtatataaatatgagtggaccaaccccaaaacagcagggggtggaggatttggctgtgaactatttacactgcaacacctatacaatgagtacaaagctagaaacaatatttggacagcctctaacctctacaaagactttggcagatacacaggctgtcaatttactttttacagacatgaacatacagactttatcattacctatgatttaaatccacctttcactataaacaaatatacctacatgatgctacatccaatcaacctactacaaagcagacacaaaaaaatattactaagcaaagacacaaaaccaaatggcagattaacaaaaaaattaaaaataaggccaccaaaactaatgtccactaaatggttttttcaagaagaattagcaaagtatggcttagtaaccatagcagctacagcatgtaattttagatttccatggatgggctgctgcaatgaaaacctaataattacaatagactacttacaacctggattttataaacactcagaatgggcacaagcatccacagcagcatataaccccttaggccactcaggaggtaaacaaatgtctactgagttattttactattactatgatgatagaggagcagataaatcttggcaaatgcaaccatttaaaacaggaaacccctacttggcatcactaaactatgaaacaggatggtttaactcaaaggtacttagagcttacttagtttcaacgaaaccaggcaaacaagaggcaatgtcaattacaccctgtggcactgttagatacaacccaatattagacacaggagaaaaaaacaaagtatatgtggtatctacattactttataattggcaagttcccaaagatgatgatttaataatagaaggatatccactatggatggtatttcatggctttacctcctttctaaaacaagtaaaatctaaaacaacaccatttacaggcagcatgatagttgtacaatcacctgccctatatagagtaagaggtgaagatcccactaacttctatccaattatagacagatcttttataaagggcaaaggtaccaactacactgacccaattaaatttccaggaaatgtatggtatccatccatattctcacagagagattctatatctcaaatagttaattgtggcccatatataccaaaatacaatgaaactaaagaaagtacctggcaactaaactacttttataaattttattttaagtggggtggcagccatccaccagatcaaccagcagaaaacccacaaacaaaagctacctatgacatacccgataaaatgcaacaagcacttgaaattgctgacccaattaagcaacaataccactcagtccttaaaccctgggacttcaggcgaggagaaattacaaaaaaggcttttaaaagaatgttcgaacacctcgaagttactgactctatatcaacagattcaagcgactgctcctcaccaaagaaaaagagaaaagcaccactcctccaagacccaaaagaagaaaacaagaagatccaagcatgtctcctctcactctgcgaagagcctacatgcccagaccaaaaggaagaaaacctacacctcctcatccagcagcagcacaagcagcaacagcaaatcaagtacaacctcctccaactcatctcagacctaaaagcaaagcagagaacacttctacacaacacagggctactaaactaacaagatttaaacaaggatttgaatgggaaacagaagttcaacttgcacatgcttttaaaagacccccaagactatttaaagaagacactcccttttatccatggttaccaaaatttacacctcttgtaaactttcaccttaactttaaaggctaggcctacactgttcacttagtggtgtatgtttaataaagtttcacccccaaaaaaattgtaaaacaaaaaaaaaaaaaaaaaaataa

SEQ ID NO: 4585 - protein, 672 aa, Gammatorquevirus sp.
MPFWWYRRRKPWFGRWFRKKRTTWKRRKPRRKLYRRRRTRRTRGRRRRRHYKVRRKQKKITVKQWQPESIKKCKIKGLGPLVIGAEGCQYRCFTVYKYEWTNPKTAGGGGFGCELFTLQHLYNEYKARNNIWTASNLYKDFGRYTGCQFTFYRHEHTDFIITYDLNPPFTINKYTYMMLHPINLLQSRHKKILLSKDTKPNGRLTKKLKIRPPKLMSTKWFFQEELAKYGLVTIAATACNFRFPWMGCCNENLIITIDYLQPGFYKHSEWAQASTAAYNPLGHSGGKQMSTELFYYYYDDRGADKSWQMQPFKTGNPYLASLNYETGWFNSKVLRAYLVSTKPGKQEAMSITPCGTVRYNPILDTGEKNKVYVVSTLLYNWQVPKDDDLIIEGYPLWMVFHGFTSFLKQVKSKTTPFTGSMIVVQSPALYRVRGEDPTNFYPIIDRSFIKGKGTNYTDPIKFPGNVWYPSIFSQRDSISQIVNCGPYIPKYNETKESTWQLNYFYKFYFKWGGSHPPDQPAENPQTKATYDIPDKMQQALEIADPIKQQYHSVLKPWDFRRGEITKKAFKRMFEHLEVTDSISTDSSDCSSPKKKRKAPLLQDPKEENKKIQACLLSLCEEPTCPDQKEENLHLLIQQQHKQQQQIKYNLLQLISDLKAKQRTLLHNTGLLN

SEQ ID NO: 4586 - protein, 118 aa, Gammatorquevirus sp.; identical to SEQ ID NO: 1834

SEQ ID NO: 4587 - protein, 136 aa, Gammatorquevirus sp.; identical to SEQ ID NO: 1835

SEQ ID NO: 4588 - DNA, 2558 bp, Gammatorquevirus sp.
ttcggcgctcgcgcgcgctgcgcgcgcgcggtctaggggcaattcgggctagggcagtctagcggaatgggcaagaaacttaaaatgtatgtttttttagatgttttgcagcaaagactttatgaacagacaaagaaaatacaacaatgaaaccctagaacaactttggctgtccattgtgaatgactcccatgaatgcatctgccaatgtgattatccttttgcccatattctatcagctatatttccacttggacacgcagacagaaaattaactatagaacaaatacttgccagagactttaaacaaaaatgcctttctggtggcgcaggagacgccgctactttaacccctacaacaggtatcaaaagagaagaagaaaaacctttagaagaaaaccaagaagaagaacctacagacgaagacctcgccgctttactcgccgccgcagacgccgccgccgaggcaaggtaagaagaaaaaaagctaaaattcatattcaacaatggcagccagatagcattgttaaatgtagaattaaaggactgggcactttagtactaggagcagaaggaactcaaatgtactgctacacaactgaaaaaaacaaatatgtccctcctaaatacccatatggaggaggactaggagctgaaacttttaccttaagatacctatatgaacaatacactctacataacaatatatggacaaagagcaacttggaaaaagatctatgcagatacctctattgtaaatttaccttttttagacatccagacacagactttatagtatactatacaagaaccttacctgaactatttactaagtacacattcccagctatacacccacatcaagccttactacaaaaacaccacaaagttatttttagtaaggcaagtaaacctacagggccttacactgtaacattaaaagtaaaacctcccagacaaatgataaccaaatggttttttactaaagaattctccaaataccctttagtagccattaaaggagcagcatgcaattttagatattcacacttaagtgctagtaatcaaaacctactaataaatatttacagtattaacacaagattttatcaaaattcagactgggaccaagccaaacaaacagaacatgcatatgaaccatatagcaacattaactatcctgttacatatagaatattactaaaaacaggagccattgaagaaagaacactgttttcaaaaaaaccaaacgcaaaagaagccattaactattcagggtggttttcatcaccaatactacaatgcatagaaatattaggccatggcaccatacaagctataaaaccatggctgctaggtagatacaatcctgtaaaagacgatggggtaggtaaccaagtatatattgttagcacaatagcagacacatgggatcctcccacaaaagacacttcactactaataacaggccttcctatttggctagcagtttatggcctacccagctacttaaaaacaattaaaccaacagatgacttttttaacacacacatctgtgttataaaaagtaaatacatatactgctttcctcaaataggaggctgtgacaaatactgccccatagactatgactacataacaggcaaaaaatcatgggatcaaccactaacaagcgcagataaagctcactggacacccaaccttaattggcaactaaaaacattaaatgccctagcagaatctggcccctttattcctaaatacagtgaagaaaaagacagtacttgggaactaaaatacaaatatcaattcttttttaagtggggagggccaccaggccccgatgccacagttaaagacccccaagaactacctacctttgatgtccccgatacaatccaacaaagaatacaaattaggaacccagaaaaccaagaaacagaaacaattctgcatccctggaacctccgcaggggatacattacaaacacaactcttaaaagaatgtgcgaagaccaaacaactgatacagaatttgaaccttttacagactcacaacccccaaaaaagaaaagcagacaaggagctgcataccaaaacccatatcaagaaacacaagaaatccagagctgtctccactcactctgcgaagaaaatacctaccaagaaatcccgcaaacaatacacgagctcatccagcagcagcagcagcagcagcaactcagacacagcatcctcaagctcctcatagatttgaaacaacaacaaagacatctacaacttcaaacaggcctactatcttaacaagattcaaagaaggctttgaaagagaaacagaaaatgaactagcaaatgccttttcaagaccacctagattgtttaaagaagacaccccattctatccctggctaccccaaattgtaccccgagtaaactttcaccttaattttaaattctaggcctacaactttcacttagtggtgtatgtttatataagtcacacccccaaaaaaataataaaattgtaaaaaataaaaaaaaataaaaaattgcaaaaa

SEQ ID NO: 4589 - protein, 663 aa, Gammatorquevirus sp.
MPFWWRRRRRYFNPYNRYQKRRRKTFRRKPRRRTYRRRPRRFTRRRRRRRRGKVRRKKAKIHIQQWQPDSIVKCRIKGLGTLVLGAEGTQMYCYTTEKNKYVPPKYPYGGGLGAETFTLRYLYEQYTLHNNIWTKSNLEKDLCRYLYCKFTFFRHPDTDFIVYYTRTLPELFTKYTFPAIHPHQALLQKHHKVIFSKASKPTGPYTVTLKVKPPRQMITKWFFTKEFSKYPLVAIKGAACNFRYSHLSASNQNLLINIYSINTRFYQNSDWDQAKQTEHAYEPYSNINYPVTYRILLKTGAIEERTLFSKKPNAKEAINYSGWFSSPILQCIEILGHGTIQAIKPWLLGRYNPVKDDGVGNQVYIVSTIADTWDPPTKDTSLLITGLPIWLAVYGLPSYLKTIKPTDDFFNTHICVIKSKYIYCFPQIGGCDKYCPIDYDYITGKKSWDQPLTSADKAHWTPNLNWQLKTLNALAESGPFIPKYSEEKDSTWELKYKYQFFFKWGGPPGPDATVKDPQELPTFDVPDTIQQRIQIRNPENQETETILHPWNLRRGYITNTTLKRMCEDQTTDTEFEPFTDSQPPKKKSRQGAAYQNPYQETQEIQSCLHSLCEENTYQEIPQTIHELIQQQQQQQQLRHSILKLLIDLKQQQRHLQLQTGLLS

SEQ ID NO: 4590 - protein, 124 aa, Gammatorquevirus sp.
MFCSKDFMNRQRKYNNETLEQLWLSIVNDSHECICQCDYPFAHILSAIFPLGHADRKLTIEQILARDFKQKCLSGGAGDAATLTPTTGIKREEEKPLEENQEEEPTDEDLAALLAAADAAAEAR

SEQ ID NO: 4591 - protein, 109 aa, Gammatorquevirus sp.
LSPLTLRRKYLPRNPANNTRAHPAAAAAAATQTQHPQAPHRFETTTKTSTTSNRPTILTRFKEGFERETENELANAFSRPPRLFKEDTPFYPWLPQIVPRVNFHLNFKF

SEQ ID NO: 4592 - DNA, 2557 bp, Gammatorquevirus sp.
attgcaaaaattcggcgctcgcgcgcgctgctctaggggcaattcgggctagggcagtctagcggaacgggcaagaaacttaaaactatatttgttttacagatgagcaagttttttaaaccaacaaaatacaacaatgaaactaaaaaccaactatggatgtccatgattgctgacagtcatgacatttgctgtgactgtcccacaccatttgctcacctactagattcaatatttccagaaggacacagagacagacacaaaccaattgactatattattaaaagagattggaaagaatgccattctggtggagaaggcgaagaaagccatggtggggacgctggagaagaaagagatataccacccgtcaaaaacgaagaagaagatttaacaacagaagatacaaacgtagaagaactgctcgccgccgtcgccgccgcagaggcaaggtaagaaaaaagaaagctaaacttaccttgcaacaatggcaaccagacagaattgttttatgcaaaattaaaggctttggtgaacttgtcctaggagcagaaggaactcaatttcaatgctataccaatgaaaagtacaatctacctttaccactgtgtccagggggaggtggttttggggttgaaagatttacattagaatggctatacaaacagcatattttcagaaataacatttggacaaaaagtaactactggacagacctatgtagataccttagagtagtgttttacctatacagacaccctacacaaagctttatagtacaatacagcagacaatcaccatttaacatagacaaaactacataccccaactttcatcctctactaatgcttttaaaaaaacaccataaaatagtaccaagcctacaaagaaaaccaagaggtaaaccctatgttaaacttactataaaaccaccaaaacaaatgttaacaaagtggttttttcaaaaagaattttgtgaatatgatttatgccaactagcaggatcagtaatatcattagactatcccagactaggatgctgcacagaaaacagagttataaccatatggtacataaatcctagcttttaccaaaactctgactgggcacaaactaaagacaacgcatatgaaccagttacaggaattgctgaaactaaatatacatttaaaggaggcaaaaatccagcagcaggttatactcctaactttgaaaaccctaaaaccaaggaaccaggcactaaatacaaatactacaacagtataaactgggacaaaggctggttttcagctcagatattatcttccactagctacacaaaaaatggtcagccgactttaccattgccattagctgtagctagatacaaccctgctgaagatgatggtaaaggcaatgaagtatggttaacatcagtagcaacaggacagtatgctaaaccacaggacgatatcctactttttaacaatacaccactatggctagtgttctggggatatacaaactttttacagaaaattaaaaacaagtcttttttttcactatacatgtttgtaattaaaagcccctacattaaacctggaaacacagtacaaacaaaaaacttttttccatttgtagatgttaaatttacagaaggcaaaaactcacatgacagctatcttacatacacagataaaaaactctggtacccaacagtgtggagacaattagacaccataaatgcaatagtagaatgtggaccatatgttcctaaattaggctttgatagacttagcacatgggaacttgcttacaaatacattttttcctttaagtggggtggaccactcctcacagaacaagaagttgcagatccaaaatctaaagacaagtatcctacacccgatacaatgcaagaaacaatacaaatctgcaacccaaaacaccaagatacaaataccattttccatgagtgggactacagaaggggatacattaccaacccagctattaaaagaatgtcagaaaacctcatcattgattcagatgtctcaacagattcagaaacttcacagaaaaagagaaagagagttactacagagctcagaaacccagaggaaaagatcaagaaaatcaaaaaatgtctcctctcactctgcgaagaagatatctgccaagaggaggaagagggctcggacctccaccagctcatccgcaagcagcagcagcagcagcagctcctcaagcacaacatcctaacactattaaaagacatgaaagcaaaacaaaagatgctacagcttcaaacgggagtactagaataaaacttactccctttaaacctggctttgaaagagatactgaagatgaattagctaaagcattttataggcctgctagactatttaaagaagacacccccttctatccatggttacctaaattcacaccccttgtaaacttccacttaaactttagaggctaggcatgcactgttcacttggtggagtttgtttaataaagtttgcaccccaaaaaaattataaaataataaaaaaaaaaaaaaaaataaaaa

SEQ ID NO: 4593 - protein, 671 aa, Gammatorquevirus sp.
LERMPFWWRRRRKPWWGRWRRKRYTTRQKRRRRFNNRRYKRRRTARRRRRRRGKVRKKKAKLTLQQWQPDRIVLCKIKGFGELVLGAEGTQFQCYTNEKYNLPLPLCPGGGGFGVERFTLEWLYKQHIFRNNIWTKSNYWTDLCRYLRVVFYLYRHPTQSFIVQYSRQSPFNIDKTTYPNFHPLLMLLKKHHKIVPSLQRKPRGKPYVKLTIKPPKQMLTKWFFQKEFCEYDLCQLAGSVISLDYPRLGCCTENRVITIWYINPSFYQNSDWAQTKDNAYEPVTGIAETKYTFKGGKNPAAGYTPNFENPKTKEPGTKYKYYNSINWDKGWFSAQILSSTSYTKNGQPTLPLPLAVARYNPAEDDGKGNEVWLTSVATGQYAKPQDDILLFNNTPLWLVFWGYTNFLQKIKNKSFFSLYMFVIKSPYIKPGNTVQTKNFFPFVDVKFTEGKNSHDSYLTYTDKKLWYPTVWRQLDTINAIVECGPYVPKLGFDRLSTWELAYKYIFSFKWGGPLLTEQEVADPKSKDKYPTPDTMQETIQICNPKHQDTNTIFHEWDYRRGYITNPAIKRMSENLIIDSDVSTDSETSQKKRKRVTTELRNPEEKIKKIKKCLLSLCEEDICQEEEEGSDLHQLIRKQQQQQQLLKHNILTLLKDMKAKQKMLQLQTGVLE

SEQ ID NO: 4594 - protein, 117 aa, Gammatorquevirus sp.; identical to SEQ ID NO: 3351

SEQ ID NO: 4595 - protein, 114 aa, Gammatorquevirus sp.; identical to SEQ ID NO: 3352

SEQ ID NO: 4596 - DNA, 2557 bp, Gammatorquevirus sp.
aaaattgcaaaaattcggcgctcgcgcgcgctgtaggggcaattcgggctagggcagtctagcggaacgggcaagaaacttaaaatatactttttattttagatgtccaaaatacaagcaaaagacttctttactccaacaccgtataatcaggatacgaagaatcaaatttggatgtctcaaattgctgattctcacgataatatctgcagttgtaaccatccctttgctcatctcattgccaatatctttcctgtgggtcacaaagatcgtgatctcacaattaacaaaattcttttaagagattacagagaaaaatgcctttctggtgggccagaaggcgcaagccatggtatggcagatggaggtaccgccgcaacaagtactacaggcgcagaaaaaagccaagaagaagaagacttcccagaagacgaggtagacgctttactcgccgccgccatagaagaaggcgcaaggtaagaagaaaacttaaaaaaattaatatacaacaatggcaaccagatagaattaaaaaatgtaagattaaaggatactcctgcctagtactaggcagtgaaggcagacaaatgtactgttatactaatgaagcctctgaatacttacaacctaaagctccaggagggggaggttttggaacagaagttttttctttaaaatggctataccaagaatggttagctcacaacaacatatggactgccagtaatgaaaatactgatctttgcagatatacaggcactaaaatcacagtatacagacacccaactgtagactttattttctcctttgacagaatgccaccatttaatattaataaatttacctacccagaattacaaccacaaaacatgctactccacaaacataaaaaaattattttaagcagaagaactaatcctaaaggaaaaattaaacacacatttaaaataggccctccaaagcaaatggtaactaaatggttttttcaaagagactttgcacctgcacatctctttagaatatctgctacagcagccacttttgaataccctagatatggaaagggcaatgccagtaacatactaacagtacctgcattaaacacttttttttttgcaaacagtgactgggcacaaacaaaagcaggaccatacacaaacatacatacagcccctgcaaaatacttttttaaatatagagatagcagaggcaatgaaattaaaggccaatatacaaaacctacaaagcctaccacggaaggttactacgaatccatagactacagcacaggtattttccaaacaggaatgctacaagcatttttcattagttcacaaagtcatgaagccacttcacaggcagcattacctgttatttacttaagatacaatccacatgaagatacaggccatggtaatgaagtttatttaacctctgttttcaatgggcaatacaacaagccaggtgcaactgcacctgacttgcaatttaacaatgtccctctttggatggccttttggggatactacaactacctactaataagtacagctaataaaggcctatacttaacacatatgtttgtagtaaaaagcccagcactaaaaccattatcacaagctacagaccaatcacactatccaatactagaccaagattttatactaggtaaactaccatggggtgaatacctgtcaaaaaatgaaaaaaaactatggtaccctacagcacaaaaacaaacacaaattataaatcaaatagttagcactggcccttatgttcctaaactaaacaatcagccagacagcacatgggaattaccttacaaatatatttcttattttaagtggggaggaccacaagttcaagacccaaatgttgaagacccaacaagcagaaacaaatacaatgtccccgatacagtccaacaatcagtacaaatcgctgacccgtcaaaattacacccagaaaccattttccatgactgggactacagaaggggtattattacacaaacagctattaaaagaatgtcagaaaacctcgaaattgattcaattatctcatctgatgactcagaatcgccacccaagaaaagaaaagtcaccaaggaactcccatgcatcaaccaaaaagagaaaaaaatcaaggactgtctcctctcgctctgcgaagagcctacctgccaagaaaccccacaaacacttcagcagcacatcgagcagcagcagcagcagcagcacaagctcagaaaaaacatcttgtacctcctaaccagcttaaagaaaacacagagacacatggagctacaaacaggaatattagactaactagatttaaacctggctttgaagaacaaactgaaaaagaactatctataattttcaaaagaccaccaagaacctacaaagaagacgcccctttttacccctggcttccaattgaacccaaagttaactttaacctcaactataatttctaggccaacaatgtacacttagtaaaacatgtttaataaagtttgcacccaaaaaaaaaaaaaaaaaaaaaaaaataa

SEQ ID NO: 4597 - protein, 670 aa, Gammatorquevirus sp.
MPFWWARRRKPWYGRWRYRRNKYYRRRKKPRRRRLPRRRGRRFTRRRHRRRRKVRRKLKKINIQQWQPDRIKKCKIKGYSCLVLGSEGRQMYCYTNEASEYLQPKAPGGGGFGTEVFSLKWLYQEWLAHNNIWTASNENTDLCRYTGTKITVYRHPTVDFIFSFDRMPPFNINKFTYPELQPQNMLLHKHKKIILSRRTNPKGKIKHTFKIGPPKQMVTKWFFQRDFAPAHLFRISATAATFEYPRYGKGNASNILTVPALNTFFFANSDWAQTKAGPYTNIHTAPAKYFFKYRDSRGNEIKGQYTKPTKPTTEGYYESIDYSTGIFQTGMLQAFFISSQSHEATSQAALPVIYLRYNPHEDTGHGNEVYLTSVFNGQYNKPGATAPDLQFNNVPLWMAFWGYYNYLLISTANKGLYLTHMFVVKSPALKPLSQATDQSHYPILDQDFILGKLPWGEYLSKNEKKLWYPTAQKQTQIINQIVSTGPYVPKLNNQPDSTWELPYKYISYFKWGGPQVQDPNVEDPTSRNKYNVPDTVQQSVQIADPSKLHPETIFHDWDYRRGIITQTAIKRMSENLEIDSIISSDDSESPPKKRKVTKELPCINQKEKKIKDCLLSLCEEPTCQETPQTLQQHIEQQQQQQHKLRKNILYLLTSLKKTQRHMELQTGILD

SEQ ID NO: 4598 - protein, 125 aa, Gammatorquevirus sp.; identical to SEQ ID NO: 3524

SEQ ID NO: 4599 - protein, 120 aa, Gammatorquevirus sp.; identical to SEQ ID NO: 3525

SEQ ID NO: 4600 - DNA, 2557 bp, Gammatorquevirus sp.
aattcggcgctcgcgcgcgctgcgcgcgcggtctaggggcaattcgggctagggcagtctagcggaatgggcaagaaacttaaaatgtatgtttttttagatgttttgcagcaaagactttatgaacagacaaagaaaatacaacaatgaaaccctagaacaactttggctgtccattgtgaatgactcccatgaatgcatctgccaatgtgattatccttttgcccatattctatcagctatatttccacttggacacgcagacagaaaattaactatagaacaaatacttgccagagactttaaacaaaaatgcctttctggtggcgcaggagacgccgctactttaacccctacaacaggtatcaaaagagaagaagaaaaacctttagaagaaaaccaagaagaagaacctacagacgaagacctcgccgctttactcgccgccgcagacgccgccgccgaggcaaggtaagaagaaaaaaagctaaaattcatattcaacaatggcagccagatagcattgttaaatgtagaattaaaggactgggcactttagtactaggagcagaaggaactcaaatgtactgctacacaactgaaaaaaacaaatatgtccctcctaaatacccatatggaggaggactaggagctgaaacttttaccttaagatacctatatgaacaatacactctacataacaatatatggacaaagagcaacttggaaaaagatctatgcagatacctctattgtaaatttaccttttttagacatccagacacagactttatagtatactatacaagaaccttacctgaactatttactaagtacacattcccagctatacacccacatcaagccttactacaaaaacaccacaaagttatttttagtaaggcaagtaaacctacagggccttacactgtaacattaaaagtaaaacctcccagacaaatgataaccaaatggttttttactaaagaattctccaaataccctttagtagccattaaaggagcagcatgcaattttagatattcacacttaagtgctagtaatcaaaacctactaataaatatttacagtattaacacaagattttatcaaaattcagactgggaccaagccaaacaaacagaacatgcatatgaaccatatagcaacattaactatcctgttacatatagaatattactaaaaacaggagccattgaagaaagaacactgttttcaaaaaaaccaaacgcaaaagaagccattaactattcagggtggttttcatcaccaatactacaatgcatagaaatattaggccatggcaccatacaagctataaaaccatggctgctaggtagatacaatcctgtaaaagacgatggggtaggtaaccaagtatatattgttagcacaatagcagacacatgggatcctcccacaaaagacacttcactactaataacaggccttcctatttggctagcagtttatggcctacccagctacttaaaaacaattaaaccaacagatgacttttttaacacacacatctgtgttataaaaagtaaatacatatactgctttcctcaaataggaggctgtgacaaatactgccccatagactatgactacataacaggcaaaaaatcatgggatcaaccactaacaagcgcagataaagctcactggacacccaaccttaattggcaactaaaaacattaaatgccctagcagaatctggcccctttattcctaaatacagtgaagaaaaagacagtacttgggaactaaaatacaaatatcaattcttttttaagtggggagggccaccaggccccgatgccacagttaaagacccccaagaactacctacctttgatgtccccgatacaatccaacaaagaatacaaattaggaacccagaaaaccaagaaacagaaacaattctgcatccctggaacctccgcaggggatacattacaaacacaactcttaaaagaatgtgcgaagaccaaacaactgatacagaatttgaaccttttacagactcacaacccccaaaaaagaaaagcagacaaggagctgcataccaaaacccatatcaagaaacacaagaaatccagagctgtctccactcactctgcgaagaaaatacctaccaagaaatcccgcaaacaatacacgagctcatccagcagcagcagcagcagcagcaactcagacacagcatcctcaagctcctcatagatttgaaacaacaacaaagacatctacaacttcaaacaggcctactatcttaacaagattcaaagaaggctttgaaagagaaacagaaaatgaactagcaaatgccttttcaagaccacctagattgtttaaagaagacaccccattctatccctggctaccccaaattgtaccccgagtaaactttcaccttaattttaaattctaggcctacaactttcacttagtggtgtatgtttatataagtcacacccccaaaaaaataataaaattgtaaaaaataaaaaaaaaataaaaaattgcaaa

SEQ ID NO: 4601 - protein, 663 aa, Gammatorquevirus sp.; identical to SEQ ID NO: 4589

SEQ ID NO: 4602 - protein, 124 aa, Gammatorquevirus sp.; identical to SEQ ID NO: 4590

SEQ ID NO: 4603 - protein, 109 aa, Gammatorquevirus sp.; identical to SEQ ID NO: 4591

SEQ ID NO: 4604 - DNA, 2557 bp, Betatorquevirus sp.
gggggggtgaaggtgagtgaaaccaccgaaatcaaggggcaattcgggctaattcagtctggagtaacgggcaagattcttaaaataattctcttttacagatgagcaaatttcttgtaccaccaatttacaatggaagaggccttgaaaatcaatggctaaacaacactgttcaggcccacgactgcatttgtggctgcaacaaaccttttgaacatcttcaatacctaattaaccaacaaaaatgcgaccattctaccgccgacgatacttctacaaaagaaattactggaattacccctacaaacgaagatattttagacgacgtagacctagaaaaactcttcgcacaagaaacagaagaaaaaactgggtaagaaaaaaattctattttaaaaacttgaaaaagaaactgaaaaaaattaaactaactgaatggcaaccatcttacataaaaaaatgtagaataaaaggatacttgcttctctttgaagctggacatggaatgtttgcaaacaacttttgtagctataaagaaagttatactcctgaaaaaactccaggaggaggaggatggagcattcaacaactatctttaggcaatttatttgttcagaactcatatttaatgaacaaatggactagatctaatatttccttaaatatgtgtagatattttggtgttagtataacattgtacagacaaccaactgttgactatatatttatgtactatagagaagagccaaaaaaggcgggaaaatattggtacccctcatttcacccaatacaactaattttagaaaaaaacaggataatagtacctagtatgcaaactaaaccacttaaaagaaaaaactacaaaaaaatttggatacatccaccaaaattatttaaatcagaatggtattttcaacaacatatatcaaactatccactagtatactttgtagcaactgcttgtagcctacaacatatgtttttaagctccaaatctgccaacagtaatgtaacagtgccaactttaaatacaaacttttggaaaaaaccagcatttcaatacactgctggagacgaaggatattatccaaaagaaggtgtatatatatacggacttagaaatggcacaataggtgatctaaaagacgaatataaaaaaaatgtaatatacctgggtgacacccactataatttcccaggaaatccaataggaataaaaaaatttacagattacaaaaaagaacaatggggaaacccattttactttgaatatttaaatttaatcagaacagtatttttaactaactccccaaaaacatttttagaaaatgtacaaacaactgaaaaaattggggacactgctataaaaaagcaagaacccatgctatactatgccagatataacccttacaaagataaaggagacggcaacatggcatactggctatctgtttcagatgtaacaaaaaataactgggatcccccatcagatgaggacctaataatttctggataccctttttggctcatgctctggggatgggaagactacactaaaaaactaggaaaaatatcacaaatagatgacaactatatattagtacttagatctaaatatttatctgaaggcttaccagcttatgtaccactcaatgaatcctttataaatggtagagcaacatgggacagagagacagaatatataagcacatatgatcaaagaaactggtttccaaaatggaaatttcaaaaagaagccataaacaatatacttatgtcaggacctggtgtatgtaaagctgaaaacacacaatcaatacaggctttcttacaatataacttttattttaagtggggaggagacccagcaaccatggaaaaaattgcagaccccaacagccagcctaccacagccatacccagtgaattcaacctacaaaatgaaattattgacccacaaaccagccttgaaaactacatctacaagtgggatgttagaagggacattcttacacaagcagctcaacaaagaatatcagaaagcccaactaatgactactctatgttcacagatggaatccaaactacaacagacgtcccactccaaaaggcaccacaaaagaaaaagaccaaggaaacacaagaagaaacattactcctcaacatcgagcagctccagcaatacaaccaacaactccaacagcgactcaagcgactaaagaatttaatggaacaataacttttaatctaataaaacgagcatatttgtttgaacccccaaaaacaaaactaacaccaattagagggcgggattgggaagatgagttatatctcgctcgccactttaaaagaccaatgagaaaatacttagaagacaaaccatattacccatggtgtgtacctgaacccattgtcaattttgaccttgtaaaaaacttcaataaaggccagcattaattcacttaacaagcctgtttattattattaaactttaataaaccaacaccgtctccctaatacgcaggcgcaaaagggggctccgcccccttaaaccccc

SEQ ID NO: 4605 - protein, 664 aa, Betatorquevirus sp.
MRPFYRRRYFYKRNYWNYPYKRRYFRRRRPRKTLRTRNRRKNWVRKKFYFKNLKKKLKKIKLTEWQPSYIKKCRIKGYLLLFEAGHGMFANNFCSYKESYTPEKTPGGGGWSIQQLSLGNLFVQNSYLMNKWTRSNISLNMCRYFGVSITLYRQPTVDYIFMYYREEPKKAGKYWYPSFHPIQLILEKNRIIVPSMQTKPLKRKNYKKIWIHPPKLFKSEWYFQQHISNYPLVYFVATACSLQHMFLSSKSANSNVTVPTLNTNFWKKPAFQYTAGDEGYYPKEGVYIYGLRNGTIGDLKDEYKKNVIYLGDTHYNFPGNPIGIKKFTDYKKEQWGNPFYFEYLNLIRTVFLTNSPKTFLENVQTTEKIGDTAIKKQEPMLYYARYNPYKDKGDGNMAYWLSVSDVTKNNWDPPSDEDLIISGYPFWLMLWGWEDYTKKLGKISQIDDNYILVLRSKYLSEGLPAYVPLNESFINGRATWDRETEYISTYDQRNWFPKWKFQKEAINNILMSGPGVCKAENTQSIQAFLQYNFYFKWGGDPATMEKIADPNSQPTTAIPSEFNLQNEIIDPQTSLENYIYKWDVRRDILTQAAQQRISESPTNDYSMFTDGIQTTTDVPLQKAPQKKKTKETQEETLLLNIEQLQQYNQQLQQRLKRLKNLMEQ

SEQ ID NO: 4606 - protein, 91 aa, Betatorquevirus sp.
MSKFLVPPIYNGRGLENQWLNNTVQAHDCICGCNKPFEHLQYLINQQKCDHSTADDTSTKEITGITPTNEDILDDVDLEKLFAQETEEKTG

SEQ ID NO: 4607 - protein, 63 aa, Betatorquevirus sp.
LFEPPKTKLTPIRGRDWEDELYLARHFKRPMRKYLEDKPYYPWCVPEPIVNFDLVKNFNKGQH

SEQ ID NO: 4608 - DNA, 2556 bp, Gammatorquevirus sp.
ggggcaattcgggctagggcagtctagcggaacgggcaagaaacttaaaactattctttttttagatgctgtgttccaaagacttttttaacaaaagtgaatacaacaatgaaactaaagaacaaatgtggctgagtattattggagacgcccatgactccatttgtagatgtcagttttgctttgctcacctcctggcttgcatattcccaataggacacacagacagaaaattaaccatagatcaaatactacaaagagattataaagaaaaatgcctttctggtggcgccggagacgccgtttcttctttcctaaaaacagatacaacagatacacccgcagatacagaaagaaaagatggccaagaagaagaagacgccgccctcgcagaaatgctcgccgccgcagaagaagaagaaaatacaaggtaagaagaaaaaagaaaaagattaacatacaacaatggcaaccagacagcatagttcactgtaaaattaaaggacttacaactctagtactaggtgctgaaggaaaacagcttgtatgttatactaatgttaaacagagcaatacacctgcaaaagcaccaggaggtggtggctttggctgtgaacaattttctttggactacttatacagagaatatacttttagaaaaaatatatggactaaaagtaacatacttaaagacctagttaggtacctgggagttaaatgtactttctatagacacccagaaacagactttatagtatcctacagtagacaacctccctttgaatattcaaaagaactatatacacaatgccatccactaaacctacttcttagcaaacacaaaataatcattcccagcaaattcacaaaccccagaggtaagctaaaaattaaaagatttatcaaaccaccaaaacaaatgctaacaaagtggttttttcaagaacattttacacactatcctttactactcatacaagcagctgcatgcaacctaaattataacaatttaggctgctgcaacacaaatcaaatgtgcacttttttttacataaacccaggcttctatgtcatgccaaattggtgggcaaaaacacaaaggtatgtaccctaccaaccatttcctaccaagggagtatacacatggacacaaaaacaaatggacacacttaaaaccgcaggacccacacaacactttaccacgcccgcaaattacaatgaatcagtatcatataacaaaggcttttttactaaacaactgttagaagcagttctactcacatcagcagaatccatagacactccaacaggcactacacccttaaatgtatgcagatacaaccctaacttagacaatggaaaaggcaacagcatatggcttgtcagtggctttgccaacagctacagagaacctccttcagacaaaactttaatctaccaaggccttccattatatcaaatgttatatggttttcttagctatgtacaagccattaaaaaaggctcatttttacaaacctacatactagcaatgagatctccagctttattaccagcatcacaagtaggtgcagaaaaaaacattattataccaatagacaataaatttccacatggtaaagctccatatgacgaggacataacagtaagcatgaaagcaacatgggtaccaaatgtttacaatcaattagaagtactaaatacaattgttgaaagtgggcctttagtcccaaagtactcacaaactaaaaacagcacatgggagcttgacatgttttatactttccattttaagtggggcggccctgaagtcacagaacccaatgttgcagacccagctttacaaggacattatgaagtacccgatactttccaaagagcagtacaaatcgctaacccggggaagcaaaaagctgccagcttattgcacccctgggacatcagacatggcttctttacaaaaacagctcttaaaagaatgtacagcaacctctcaattgatacagatttccaaccagatcaggaagaatctccccaaaaaaagagaaagagaacaggaccagaactctcctacccgcaagaggaggaggaagagatccagagctgtctcctctctctctgcgaaaaaagtacatggcaagagcaagaagagaacaacctgctacacctcatcaagcagcagcagcagcagcagcaagagctcaagtacaacctcctcagaataatttcagatatcaaagacaaacagaacctactgagactacaaacaggatttgtagtctaacaagatttagaccaggttttgaacttgaaactgaaagagaattatcaattatctttcacagaccacctagaacctataaagaagaccctccattttatccctggctaccacctgaaccctatgtaaactttaaccttaactacaaattctaggccaacactgttcacttagtggtgtatgtttatataagtttcaccccaaaaaaaacaataaaatttaaaaaaaaaaaaaaaaataaaaaattgcaaaaattcggcgctcgcgcgcgctgc

SEQ ID NO: 4609 - protein, 669 aa, Gammatorquevirus sp.
MPFWWRRRRRFFFPKNRYNRYTRRYRKKRWPRRRRRRPRRNARRRRRRRKYKVRRKKKKINIQQWQPDSIVHCKIKGLTTLVLGAEGKQLVCYTNVKQSNTPAKAPGGGGFGCEQFSLDYLYREYTFRKNIWTKSNILKDLVRYLGVKCTFYRHPETDFIVSYSRQPPFEYSKELYTQCHPLNLLLSKHKIIIPSKFTNPRGKLKIKRFIKPPKQMLTKWFFQEHFTHYPLLLIQAAACNLNYNNLGCCNTNQMCTFFYINPGFYVMPNWWAKTQRYVPYQPFPTKGVYTWTQKQMDTLKTAGPTQHFTTPANYNESVSYNKGFFTKQLLEAVLLTSAESIDTPTGTTPLNVCRYNPNLDNGKGNSIWLVSGFANSYREPPSDKTLIYQGLPLYQMLYGFLSYVQAIKKGSFLQTYILAMRSPALLPASQVGAEKNIIIPIDNKFPHGKAPYDEDITVSMKATWVPNVYNQLEVLNTIVESGPLVPKYSQTKNSTWELDMFYTFHFKWGGPEVTEPNVADPALQGHYEVPDTFQRAVQIANPGKQKAASLLHPWDIRHGFFTKTALKRMYSNLSIDTDFQPDQEESPQKKRKRTGPELSYPQEEEEEIQSCLLSLCEKSTWQEQEENNLLHLIKQQQQQQQELKYNLLRIISDIKDKQNLLRLQTGFVV

SEQ ID NO: 4610 - protein, 122 aa, Gammatorquevirus sp.
MLCSKDFFNKSEYNNETKEQMWLSIIGDAHDSICRCQFCFAHLLACIFPIGHTDRKLTIDQILQRDYKEKCLSGGAGDAVSSFLKTDTTDTPADTERKDGQEEEDAALAEMLAAAEEEENTR

SEQ ID NO: 4611 - protein, 110 aa, Gammatorquevirus sp.
LSPLSLRKKYMARARREQPATPHQAAAAAAARAQVQPPQNNFRYQRQTEPTETTNRICSLTRFRPGFELETERELSIIFHRPPRTYKEDPPFYPWLPPEPYVNFNLNYKF

SEQ ID NO: 4612 - DNA, 2555 bp, Gammatorquevirus sp.
taggggcaattcgggctagggcagtctagcggaacgggcaagaaacttaaattatacccttgtttttagatgagccatctatgtccagctgacttttaccacagaactacatttaaccttgatactcaaaaccaaatatggatgtctcagctagcagacgggcatgacaatttctgtgactgcaaaactccttttggccatttgcttgcttctatttttcctcctggtcataaagaccgtgatctcacaattaatcaaattttgctgcgagactaccaagaacaatgccattctggtggaaaagaagaaggcggccatggtatggcaccttcaggagacgctggagacgcagacaatataaaacaagaaaaagaagaagaagatatcccagaagaagaactagaaaaacttatggccgccgtagaagaagaagaaaacacaaggtaagaagaaaaattcaaaaactaactcttaaagtatggcaaccagactctgttagaaaatgtaaaattaaactactcgggactctagtaaatggagcccaaggaagacaaatgtactgctatacaaatgaaataggtaattacttacctcctaaatcacctgggggagggggatttggctgtgaaataattaccctagaatacttatatgaacaatacttacaaagaaactgcatatggactagaagtaatcaatacagtgacctttgtagatatacaggtggaaaaataacattgtacagacatccaacaatagactttgttttctcatacaacatacaaccaccatttactatagaaaaagacacttatttaaacctacaaccacaactacaattactgagcagaagacacagagtaatactcagcaaagctactaatccaaaaggcagaataaaacacacaataaaatttaaaccacccaaagaaatgtccactaaatggttttttcaaaatgatttttcacatacacccctaatacaattaaatgctagtgcagcagacttccaatatgtaactatgggctgctgcaatgtaagccaaatgtctacattttatgcacttaactcagcacacttctttaaacaatccacatggggagagttcactagcaatccttacgagccatacccaacaataaatttacctttaacatttgtatacactgaaaaaggaggtagggaaggcagatatgttattacaacaactacatttggaacaggaacaggctcatacacaaaaagtgttagcagactagcgggatggtttaataacagagtactactagcaaaagcagtttaccaaggaaactttccacaaggaaacctaccagaagcatcaaaacttggtaccttacccatagttacagctagatataacccaatagaagacactggtcaaggcaatgaagtatggctaacatccatatttcatggagcctatgacaaaccaacagttactcctgactacttaatacaaggatacccactatacattgcattctttggctactataactttttacttcaaaaatctaatgataaaggtatcatgtacagccatatgtttgtagttaaaagcaaagcacttagacctttacaatcatctacaggccaaacatattaccctatagtagactgggactttttaaatggcaaactaccctatgatgaatacattggagacaatgacagcagaaaatggtttcccacagtagaatctcaactgatatccattaataactttgtacaatcaggaccatacatacctagactagacaatgttaaaaacagtacctgggaacttagatacaaacttaccatgtactttaaatgggggggtcctcaggttacagacccaccaattgatgacccacaacacaaacaagactaccccactccaggtactttccaagaaacattacaaattgctgacccgaaaaaacaaaaacctgaaaccatgtttcatgaatgggactacagaagggggattattacaacagcagctattaaaagaatgtcagaaaacctcgaaactgattcatctatccaatctgatgcttcagaaccaccaaaaaagaaaaaaagaacaaccaaagaactcccctgcctccaaaagaaggaagaaagaatcaagaaatgtctccaggaactctgcgaagaaaatatcttccaagaatcacaagacctccagctcctcatccaacagcagcaccagcaacagcaacagctcaagtcaaacatcctggagctcctcaaagacctcaaacagcagcagagatacctaagtttgcaaacaggaaacctacattaacaagatttaaaccaggctttgaatgggacacagaaatacaagtagcaaaagcatttaacagaccccctagattatttaaagaagataaacccttttacccatggcttcctaaaccagaacccattgtaaactttcaccttaattttaaattctaggcctacaatgttcacttagtggagtatgtttatataagttacacccccaataaactgtacataaaaaaaaaaaaaaaaaaaaaaa

SEQ ID NO: 4613 - protein, 676 aa, Gammatorquevirus sp.
MPFWWKRRRRPWYGTFRRRWRRRQYKTRKRRRRYPRRRTRKTYGRRRRRRKHKVRRKIQKLTLKVWQPDSVRKCKIKLLGTLVNGAQGRQMYCYTNEIGNYLPPKSPGGGGFGCEIITLEYLYEQYLQRNCIWTRSNQYSDLCRYTGGKITLYRHPTIDFVFSYNIQPPFTIEKDTYLNLQPQLQLLSRRHRVILSKATNPKGRIKHTIKFKPPKEMSTKWFFQNDFSHTPLIQLNASAADFQYVTMGCCNVSQMSTFYALNSAHFFKQSTWGEFTSNPYEPYPTINLPLTFVYTEKGGREGRYVITTTTFGTGTGSYTKSVSRLAGWFNNRVLLAKAVYQGNFPQGNLPEASKLGTLPIVTARYNPIEDTGQGNEVWLTSIFHGAYDKPTVTPDYLIQGYPLYIAFFGYYNFLLQKSNDKGIMYSHMFVVKSKALRPLQSSTGQTYYPIVDWDFLNGKLPYDEYIGDNDSRKWFPTVESQLISINNFVQSGPYIPRLDNVKNSTWELRYKLTMYFKWGGPQVTDPPIDDPQHKQDYPTPGTFQETLQIADPKKQKPETMFHEWDYRRGIITTAAIKRMSENLETDSSIQSDASEPPKKKKRTTKELPCLQKKEERIKKCLQELCEENIFQESQDLQLLIQQQHQQQQQLKSNILELLKDLKQQQRYLSLQTGNLH

SEQ ID NO: 4614 - protein, 125 aa, Gammatorquevirus sp.; identical to SEQ ID NO: 2128

SEQ ID NO: 4615 - protein, 120 aa, Gammatorquevirus sp.; identical to SEQ ID NO: 2129

SEQ ID NO: 4616 - DNA, 2555 bp, Gammatorquevirus sp.
ggcaattcgggctagggcagtctagcggaacgggcaagaaacttaaaactatactttcttttacagatgcaacatatttgcactaaagactttcacaaagatacccactataatcaagatacaaaaaatcaactatggatgtctattatttctgattctcatgactccatttgcaactgctggcatccttttgctcatttgcttgctaatatatttcctcctggtcataaagatagggatttatccattaatcaaattctgcaaagagatttactgcaaccatgccattctggtggagaaggagacgcaaaccatggtttggcagatggagcagatttagaaagagaagaaattataaacccagaagaaaaagaaggagagtatatagaagacgaagaacttacagagcttataaaggccgcagacgacgccgctacaaggtaagaagaaaacaaaaaaaaattattgtaagacaatggcaacctgaaagcatcaaaaaatgtaaagttaaaggtgtaggaactcttgtattaggagctgaaggaacacaatacagatgctacactgactatattaatgaatggactaatcccaaagtgcctggagggggaggatttggttgtgaactgtttactttacaatacttgtataaattgtatgtagctaaaaaaaatatatggacttctagtaataagtatagagaccttactagatatactggttgtagatttacaatgtacagacacccagaaacagacttcattgtagcatatgatacacaaccaccattttatataacaaagcacacctatatgtctttgcacccacaaatgctactactaaggaaaaataaaaaaataatattaagtactgctacaaaaccaaatggcaaaattactaaaaaacttaaaattaaacctccaaaacaactatcaacaaaatggttttttcaaaaagactttgctaaatatggacttgttgctattgctgcctcagcctgtaactttagatacccttggttaggctgttgtaatgaaaatttaataattacactatactacttacaagcagacttttaccacaacagtgcctgggctcaaactacatcaaaatacaacccagtctatggcccaaaaccaatgaaacaggaattaacattcaaatattacctagatggcaaaaagggtgaatataagatgaaatgtacagacgtagacacctatgatagctctgtttcaataagcactgggtggtttaacaaacaagtattaaatgcttatgaagtgtatgacaacggaactaaactatcactaacacctactggaactataagatacaatccagcagatgatgatggagtgggcaataaattgtgggtagtaaacaccttaacatacaattggaaaatacccacagatgatgaccttattttagaaaactacccactatggctaatgttttatggatatacatcttttttataccaagttaaagcagacaaaaatcctttttcatcttccttaatagttgtaaaaagtaaagcaattcaaagagtatttggaacagatactagaggctggtatccactaatagacaagtcatttatgaatggtaaaggcccaggaaacactgcacctatacttttacacaaaaaatactggtatccatcactttatggccaaagagatagcatctcacaaattgttaattgtggaccatatgtacctaagtataatgaaacaaaaaacagtacatggcaattaaactatcattataatttttattttaagtggggtggcacttatccaccaatgccagaagccgaaaacccagaaaataaaacaacataccctgtgcccgataagcaacaagaaacaatatcaattgctgacccaatatcagaaaagtatgaaacagtctttaaatcctgggactatagaagaggcagccttacaaaaacagctcttaaaagaatgcaggaaaacatccaaactgatgactctttgtcaacagattcaacaggctgctcctctccaaaaaagaaaaagttcctcccaacactccaaaacccgaaaaaagaaaacaagaaaatccagagttgtctcctctcactctgcgaagaaaatacatggcaagagccgacaccagacacaaacatctaccagctcctccagcagcaacaccagcagcagcagtcactcaagctcaacctcctaactttaatagcagacttgaaatccaatcaaagaaatcttctacatcaagcaggatatttagcttaactagatttaaacctggatttgaatgggacacagaaaaacagttagcacaagcattttctagacctcccagactttttaaagaagacacccctttctatccctggctaccaaaacctgaaccccttgtaaactttcaccttaactacaaattctaggcctacactattcacttagtggtgtatgtttatataagttcacaccccaaaaaaattgtaaaataaaaaaaaaaaaaaaaaaaaataaaaaattgcaaaaattcggcgctcgcgcgcg

SEQ ID NO: 4617 - protein, 666 aa, Gammatorquevirus sp.
MPFWWRRRRKPWFGRWSRFRKRRNYKPRRKRRRVYRRRRTYRAYKGRRRRRYKVRRKQKKIIVRQWQPESIKKCKVKGVGTLVLGAEGTQYRCYTDYINEWTNPKVPGGGGFGCELFTLQYLYKLYVAKKNIWTSSNKYRDLTRYTGCRFTMYRHPETDFIVAYDTQPPFYITKHTYMSLHPQMLLLRKNKKIILSTATKPNGKITKKLKIKPPKQLSTKWFFQKDFAKYGLVAIAASACNFRYPWLGCCNENLIITLYYLQADFYHNSAWAQTTSKYNPVYGPKPMKQELTFKYYLDGKKGEYKMKCTDVDTYDSSVSISTGWFNKQVLNAYEVYDNGTKLSLTPTGTIRYNPADDDGVGNKLWVVNTLTYNWKIPTDDDLILENYPLWLMFYGYTSFLYQVKADKNPFSSSLIVVKSKAIQRVFGTDTRGWYPLIDKSFMNGKGPGNTAPILLHKKYWYPSLYGQRDSISQIVNCGPYVPKYNETKNSTWQLNYHYNFYFKWGGTYPPMPEAENPENKTTYPVPDKQQETISIADPISEKYETVFKSWDYRRGSLTKTALKRMQENIQTDDSLSTDSTGCSSPKKKKFLPTLQNPKKENKKIQSCLLSLCEENTWQEPTPDTNIYQLLQQQHQQQQSLKLNLLTLIADLKSNQRNLLHQAGYLA

SEQ ID NO: 4618 - protein, 125 aa, Gammatorquevirus sp.
MQHICTKDFHKDTHYNQDTKNQLWMSIISDSHDSICNCWHPFAHLLANIFPPGHKDRDLSINQILQRDLLQPCHSGGEGDANHGLADGADLEREEIINPEEKEGEYIEDEELTELIKAADDAATR

SEQ ID NO: 4619 - protein, 137 aa, Gammatorquevirus sp.
LLLSKKEKVPPNTPKPEKRKQENPELSPLTLRRKYMARADTRHKHLPAPPAATPAAAVTQAQPPNFNSRLEIQSKKSSTSSRIFSLTRFKPGFEWDTEKQLAQAFSRPPRLFKEDTPFYPWLPKPEPLVNFHLNYKF

SEQ ID NO: 4620 - DNA, 2555 bp, Gammatorquevirus sp.
cagtaacatgttttgtggttgtagttcagcatctaggggcaattcgggctagggcagtctagcggaacgggcaagaaacttaaaatatactttatgttacagatgtccaagattcaagcaaaagacttctttactccaacaccctacaatcaggacacgaaaaatcaaatttggatgtctcaaattgctgattctcacgacaatatctgcagttgtaaccatccctttgctcatctcattgccaatatctttcctgtgggtcacaaagatcgtgatctcacaattaataaaattcttttaagagattacagagaaaaatgcctttctggtggaaccgcagacgcaagccatggtatggcagatggaggtaccgccgcaacaagtactacaggcgcagaaaaaggcccagaagaagaagaatacccaggagaagaaatagacgcattactcgccgccgccatagaagaaggggcaaggtaagaagaaaacttagaaaaattcatatacaacaatggcaaccagatagaattagaaaatgtaaaattaaaggattttcttgccttgtactcggtagtgaaggcagacaaatgtactgttatacaaatgaagctagtgaatacctacaacctaaagcaccaggaggtggagggtttggaactgaagtatttaccttaaaatggctatacacacaatggctagcacataacaatatttggactgccagtaatgaaaacacagacttatgcagatacacaggaacaaaaatagtactgtacagacaccctactgtagactttattgttagttatgatagaatgcctccttatagcataaacaaatttacctatgctgaactacaaccacaaaacatgttactgcatagacacaaaaaaattattttaagtagaagaactaaccccagaggtaaaataaaacatataataaaaataggacctcccaaacaaatgataactaaatggttttttcaaagagactttgctgcagcacatttgtttagaatatctgccactgcatgctcatttgaatatcctagatatggaaaaggtaatgcaagcaatatattaacagtaccagcacttagcacattcttttttgcaaacagcgactgggcccaaacaagagatggaccctacttaaacatacacacagcaccaactcattactactataaatacaaagatgctagaggcaatatacaaaatggcgtatacacaaaaagtacaaaactaaataaacagggttactatgaatccatagactatacctctggcatatttacttccaatttactacaagccttttcaattagcagtgttagtgcaacagaaccttcacaagcagaacttccaattatttatttaagatataatccacatgaagacgatggccatggaaatgaagtttatttaacttcagtatttaatggaaattacaacaaaccaggaagcacagccccagatcttcaatttaacaatgtaccactatggatggcattctggggttactacaattacttactaattagtactgctaacaaaggcatatacttaacacacatgtttgtagtgaaaagtcctgcactacgccctctatcacaagctacttctcaaagccactacccaatattagacatggactttgttctaggtaaactcccatggggagaatacctagataaaaaccaaaagaaactatggtatccaacagcagaaaaacaaacacaaataataaaccaaattgttagtactggcccatatgtacctaaactaaataaccaaccagacagcacatgggaactaccttataaatatatttcttatttcaagtggggaggaccacaagtacaagaccccaatgttgaagacccaacaagcagaaacaaatacaatgttcccgatacagtccaacaatcagtacaaatctctgacccgtcaaagcttcacccagaaaccatattccatgactgggactacagaaggggtattattacacaaacagctattaaaagaatgtcagaaaacctcgaaattgattcaattgtctcatctgatgactcagactcgccaccaaagaaaagaaaagtcaccaaagagctaccctgtatcaaccaaaaggagaaaaaaatcaaagaatgtctcctctcgctctgcgaagagcctacctgccaagaaaccccacaaacacttcagcagcacatcgagcagcagcagcagcagcagcacaagctcagaaaaaacctcctctacctcttaaccagcctgaagaaaactcagagacacatggagctacaaacaggcatattagactaacaagatttaaacctggcttcgaagaacaaacagaaaaagaactagcagcaattttcaaaagaccacctagaacatacaaagaagaccctcccttctacccctggctacccatagaacccaaagttaactttaacctcaattacaatttctaggccaacaatgtacacttagtaaaacatgtttaataaagtttaacccccaaaaaataatttttttgtgtctatg

SEQ ID NO: 4621 - protein, 670 aa, Gammatorquevirus sp.
MPFWWNRRRKPWYGRWRYRRNKYYRRRKRPRRRRIPRRRNRRITRRRHRRRGKVRRKLRKIHIQQWQPDRIRKCKIKGFSCLVLGSEGRQMYCYTNEASEYLQPKAPGGGGFGTEVFTLKWLYTQWLAHNNIWTASNENTDLCRYTGTKIVLYRHPTVDFIVSYDRMPPYSINKFTYAELQPQNMLLHRHKKIILSRRTNPRGKIKHIIKIGPPKQMITKWFFQRDFAAAHLFRISATACSFEYPRYGKGNASNILTVPALSTFFFANSDWAQTRDGPYLNIHTAPTHYYYKYKDARGNIQNGVYTKSTKLNKQGYYESIDYTSGIFTSNLLQAFSISSVSATEPSQAELPIIYLRYNPHEDDGHGNEVYLTSVFNGNYNKPGSTAPDLQFNNVPLWMAFWGYYNYLLISTANKGIYLTHMFVVKSPALRPLSQATSQSHYPILDMDFVLGKLPWGEYLDKNQKKLWYPTAEKQTQIINQIVSTGPYVPKLNNQPDSTWELPYKYISYFKWGGPQVQDPNVEDPTSRNKYNVPDTVQQSVQISDPSKLHPETIFHDWDYRRGIITQTAIKRMSENLEIDSIVSSDDSDSPPKKRKVTKELPCINQKEKKIKECLLSLCEEPTCQETPQTLQQHIEQQQQQQHKLRKNLLYLLTSLKKTQRHMELQTGILD

SEQ ID NO: 4622 - protein, 128 aa, Gammatorquevirus sp.
MLQMSKIQAKDFFTPTPYNQDTKNQIWMSQIADSHDNICSCNHPFAHLIANIFPVGHKDRDLTINKILLRDYREKCLSGGTADASHGMADGGTAATSTTGAEKGPEEEEYPGEEIDALLAAAIEEGAR

SEQ ID NO: 4623 - protein, 120 aa, Gammatorquevirus sp.
LYQPKGEKNQRMSPLALRRAYLPRNPTNTSAAHRAAAAAAAQAQKKPPLPLNQPEENSETHGATNRHIRLTRFKPGFEEQTEKELAAIFKRPPRTYKEDPPFYPWLPIEPKVNFNLNYNF

SEQ ID NO: 4624 - DNA, 2555 bp, Gammatorquevirus sp.
aaaaaattgcaaaaattcggcgctcgcgcgcgctgggggcaattcgggctagggcagtctagcggaacgggcaagaaacttaaaactattctttttttagatgctgtgttccaaagacttttttaacaaaagtgaatacaacaatgaaactaaagaacaaatgtggctgagtattattggagacgcccatgactccatttgtagatgtcagttttgctttgctcacctcctggcttgcatattcccaataggacacacagacagaaaattaaccatagatcaaatactacaaagagattataaagaaaaatgcctttctggtggcgccggagacgccgtttcttctttcctaaaaacagatacaacagatacacccgcagatacagaaagaaaagatggccaagaagaagaagacgccgccctcgcagaaatgctcgccgccgcagaagaagaagaaaatacaaggtaagaagaaaaaagaaaaagattaacatacaacaatggcaaccagacagcatagttcactgtaaaattaaaggacttacaactctagtactaggtgctgaaggaaaacagcttgtatgttatactaatgttaaacagagcaatacacctgcaaaagcaccaggaggtggtggctttggctgtgaacaattttctttggactacttatacagagaatatacttttagaaaaaatatatggactaaaagtaacatacttaaagacctagttaggtacctgggagttaaatgtactttctatagacacccagaaacagactttatagtatcctacagtagacaacctccctttgaatattcaaaagaactatatacacaatgccatccactaaacctacttcttagcaaacacaaaataatcattcccagcaaattcacaaaccccagaggtaagctaaaaattaaaagatttatcaaaccaccaaaacaaatgctaacaaagtggttttttcaagaacattttacacactatcctttactactcatacaagcagctgcatgcaacctaaattataacaatttaggctgctgcaacacaaatcaaatgtgcacttttttttacataaacccaggcttctatgtcatgccaaattggtgggcaaaaacacaaaggtatgtaccctaccaaccatttcctaccaagggagtatacacatggacacaaaaacaaatggacacacttaaaaccgcaggacccacacaacactttaccacgcccgcaaattacaatgaatcagtatcatataacaaaggcttttttactaaacaactgttagaagcagttctactcacatcagcagaatccatagacactccaacaggcactacacccttaaatgtatgcagatacaaccctaacttagacaatggaaaaggcaacagcatatggcttgtcagtggctttgccaacagctacagagaacctccttcagacaaaactttaatctaccaaggccttccattatatcaaatgttatatggttttcttagctatgtacaagccattaaaaaaggctcatttttacaaacctacatactagcaatgagatctccagctttattaccagcatcacaagtaggtgcagaaaaaaacattattataccaatagacaataaatttccacatggtaaagctccatatgacgaggacataacagtaagcatgaaagcaacatgggtaccaaatgtttacaatcaattagaagtactaaatacaattgttgaaagtgggcctttagtcccaaagtactcacaaactaaaaacagcacatgggagcttgacatgttttatactttccattttaagtggggcggccctgaagtcacagaacccaatgttgcagacccagctttacaaggacattatgaagtacccgatactttccaaagagcagtacaaatcgctaacccggggaagcaaaaagctgccagcttattgcacccctgggacatcagacatggcttctttacaaaaacagctcttaaaagaatgtacagcaacctctcaattgatacagatttccaaccagatcaggaagaatctccccaaaaaaagagaaagagaacaggaccagaactctcctacccgcaagaggaggaggaagagatccagagctgtctcctctctctctgcgaaaaaagtacatggcaagagcaagaagagaacaacctgctacacctcatcaagcagcagcagcagcagcagcaagagctcaagtacaacctcctcagaataatttcagatatcaaagacaaacagaacctactgagactacaaacaggatttgtagtctaacaagatttagaccaggttttgaacttgaaactgaaagagaattatcaattatctttcacagaccacctagaacctataaagaagaccctccattttatccctggctaccacctgaaccctatgtaaactttaaccttaactacaaattctaggccaacactgttcacttagtggtgtatgtttatataagtttcaccccaaaaaaaacaataaaatttaaaaaaaaaaaaaaaaat

SEQ ID NO: 4625 - protein, 669 aa, Gammatorquevirus sp.; identical to SEQ ID NO: 4609

SEQ ID NO: 4626 - protein, 122 aa, Gammatorquevirus sp.; identical to SEQ ID NO: 4610

SEQ ID NO: 4627 - protein, 110 aa, Gammatorquevirus sp.; identical to SEQ ID NO: 4611

SEQ ID NO: 4628 - DNA, 2554 bp, Gammatorquevirus sp.
aaaattgcaaaaattcggcgctcgcgcgcgctgtaggggcaattcgggctagggcagtctagcggaacgggcaagaaacttaaaacaaattctttttttttagatgtcaaagattcaagctaaagacttttatactcccacacccttcaatcaagagacaaaaaatcaaatatggatgtctcaaattgctgatgctcacgataatatctgccattgtaaccatccctttgctcatctgcttgccaatatctttcctgtgggtcacaaagatcgcgatctcacaattaatcaaattcttttgagagactacaaacaaaaatgccattctggtggaacagaagaagaaagccatggtacggacgctggaggcacaggcggaggtttcaaaggtataaaagaagaaagccacgaagaagatttgccagaagacgaactagaaggcttactcgccgccgcagaagaaagcgcaaggtaagaagaaaaagaaaaaaaattaatatacaacaatggcaaccagaaagcattgttaaatgtaaaattaagggcttctctactttagtactgggggcagaaggcagacagtatatttgttggactaatgaagcccttgactacactcagccaaaagcaccagggggaggaggatttggctgtgaaaatataactttagaatggttatatcatgaacatagagcacacaactgtatatggaccaaaagcaatcaatacaaagatctatgcagatatacaggttgtaaaataactttatttagacacccaaatatagactttatttttcaatacaacctacaaggtccatttaacataacaaaattcacatatacagacatacaaccacagaacatgctactacaaccccataacagactaattcttagccaaaaaacaaaaccccatggcaaacttgctgttaaagttaaaataaaaccaccaaaacaaatgactaccagatggttttttgctaaagaattttcagaagctgtactagtacaactaaaagctgtagcctgttcatttacatttcctagaatagcacctaaggcacaaagtcaaatggtaacagtttactacttaaatgaaagcttttatccatctccaatttggggacaagtacacccaggtggctacatacctattagtacaagaacaggtatatataaattctcaaatacaaaaaccaaacctgcatactcagactttacaattaacacaaacacctttgaaagaggagaagcaggatattatgcctccattaactattccacaggcttttttaatgccaaagtactaaatgcatccaaagttacaataaataatgtagaatttggctcactacctttactaactgcaagatacaatcccaacgatgacacaggagatggaaatgtagtttatgcactttctattctacaaaattcatataacccaccaacagtacaatcagactatgttattagaggtcaaccactatggatggcatttcatggcttttggagctggattaaatatttatcaaaagacaaagcattttacacacactatatgtttgttgttcagagccgtgccataaaacccatctcacaaaacacagcacaaaaaagatttgcatttcttgacttatcttttatatctggcaaactaccttttgatgaatatttatctgacaatgaaaagaagctgtggtatccaaaagcacaataccagactgaaactataaattcttttgttcaatctggaccatttatacctaaactttcaaacataccagaaagcacttgggaattagactacaaatataacttttactttaaatggggtggtccacagattacagacagaccagttgacgaccctcaataccaaccagactaccctgttcccggtaaccgcacagaagcagtacagatatccaatcccaaaacccttgcgacagaaactctgctccatgaatgggacttcagaaggggcattgttacacacacagctcttaaaagaatgtcagaaaactttgaatctgaaacagatatctactctgatgactcaggaacaccaaaaaagaaaagaaagatcaccaaagaactcccataccaaagaccacagcaagaagccctcaaaacatgtctccaggagctctgcgaagaaaatacctgccaagaaacaccacaaacattacaagagctcatccagcagcagcagcagcagcagcagctcaaacacaacatcctccagctcctcacaaagctaaagaaggaccaacgctttttgggacttcaaacaggccttctagaatgacaccctttaaaaaaggctttgaaatggacacagaaagacagttagcacaagcattcaaaagaccccctagactgtttaaagaagacactcccttttacccctggttacccagaccagtgccccttgttaactttcaccttaattttaagttctaggcctccaaatttcacttagtggtggatgtttatataagtttgcaccccaaaaaaattgtaaaataaaaaaaaaaaaaaaaaaataa

SEQ ID NO: 4629 - protein, 664 aa, Gammatorquevirus sp.; identical to SEQ ID NO: 3619

SEQ ID NO: 4630 - protein, 123 aa, Gammatorquevirus sp.
MSKIQAKDFYTPTPFNQETKNQIWMSQIADAHDNICHCNHPFAHLLANIFPVGHKDRDLTINQILLRDYKQKCHSGGTEEESHGTDAGGTGGGFKGIKEESHEEDLPEDELEGLLAAAEESAR

SEQ ID NO: 4631 - protein, 109 aa, Gammatorquevirus sp.; identical to SEQ ID NO: 1017

SEQ ID NO: 4632 - DNA, 2554 bp, Gammatorquevirus sp.
aaaaattgcaaaaattcggcgctcgcgcgcgtctaggggcaattcgggctagggcagtctagcggaacgggcaagaaacttaaaactatatttgttttacagatgagcaagttttttaaaccaacaaaatacaacaatgaaactaaaaaccaactatggatgtccatgattgctgacagtcatgacatttgctgtgactgtcccacaccatttgctcacctactagattcaatatttccagaaggacacagagacagacacaaaccaattgactatattattaaaagagattggaaagaatgccattctggtggagaaggcgaagaaagccatggtggggacgctggagaagaaagagatataccacccgtcaaaaacgaagaagaagatttaacaacagaagatacaaacgtagaagaactgctcgccgccgtcgccgccgcagaggcaaggtaagaaaaaagaaagctaaacttaccttgcaacaatggcaaccagacagaattgttttatgcaaaattaaaggctttggtgaacttgtcctaggagcagaaggaactcaatttcaatgctataccaatgaaaagtacaatctacctttaccactgtgtccagggggaggtggttttggggttgaaagatttacattagaatggctatacaaacagcatattttcagaaataacatttggacaaaaagtaactactggacagacctatgtagataccttagagtagtgttttacctatacagacaccctacacagagctttatagtacaatacagcagacaatcaccatttaacatagacaaaactacataccccaactttcatcctctactaatgcttttaaaaaaacaccataaaatagtaccaagcctacaaagaaaaccaagaggtaaaccctatgttaaacttactataaaaccaccaaaacaaatgttaacaaagtggttttttcaaaaagaattttgtgagtatgatttatgccaactagcaggatcagtaatatcattagactatcccagactaggatgctgcacagaaaacagagttataaccatatggtacataaatcctagcttttaccaaaactctgactgggcacaaactaaagacaacccatacgaaccagttacaggaattcctgaaaataaatatacatttaaaggaggcaaaaatccaacagcaggttatactcctaactttgacatccctaaaacccaggaaccaggcactaaatacaaatactacaacagtataaactgggacaaaggctggttttcagctcagatattatcttccactagctacacaaaaaatggtcagcagactttaccattgccattagctgtagctagatacaaccctgctgaagatgatggtaaaggcaatgaagtatggttaacatcagtagcaacaggacagtatgctaaaccacaggacgatatcctactttttaacaatacaccactatggctagtgttctggggatatacaaactttttacagaaaattaaaaacaagtcttttttttcactatacatgtttgtaattaaaagcccctacattaaacctggaaacacagtacaaacaaaaaacttttttccatttgtagatgttaaatttacagaaggcaaaaactcacatgacagctatcttacatacacagataaaaaactctggtacccaacagtgtggagacaattagacaccataaatgcaatagtagaatgtggaccatatgttcctaaattaggctttgatagacttagcacatgggaacttgcttacaaatacattttttcctttaagtggggtggaccactcctcacagaacaagaagttgcagatccaaaatctaaagacaagtatcctacacccgatacaatgcaagaaacaatacaaatctgcaacccaaaacaccaagatacaaataccattttccatgagtgggactacagaaggggatacattaccaacccagctattaaaagaatgtcagaaaacctcatcattgattcagatgtctcaacagattcagaaacttcacagaaaaagagaaagagagttactacagagctcagaaacccggaggaaaagatcaagaaaatcaaaaaatgtctcctctcactctgcgaagaagatatctgccaagaggaggaagagggctcggacctccaccagctcatccgcaagcagcagcagcagcagcagctcctcaagcacaacatcctaacactattaaaagacatgaaagcaaaacaaaagatgctacagcttcaaacgggagtactagaataaaacttactccctttaaacctggctttgaaagagatactgaagatgaattagctaaagcattttataggcctgctagactatttaaagaagacacccccttctatccatggttacctaaattcacaccccttgtaaacttccacttaaactttagaggctaggcatgcactgttcacttggtggagtttgtttaataaagtttgcaccccaaaaaaattataaaataaaaaaaaaaaaaaaaaaaaata

SEQ ID NO: 4633 - protein, 671 aa, Gammatorquevirus sp.
LERMPFWWRRRRKPWWGRWRRKRYTTRQKRRRRFNNRRYKRRRTARRRRRRRGKVRKKKAKLTLQQWQPDRIVLCKIKGFGELVLGAEGTQFQCYTNEKYNLPLPLCPGGGGFGVERFTLEWLYKQHIFRNNIWTKSNYWTDLCRYLRVVFYLYRHPTQSFIVQYSRQSPFNIDKTTYPNFHPLLMLLKKHHKIVPSLQRKPRGKPYVKLTIKPPKQMLTKWFFQKEFCEYDLCQLAGSVISLDYPRLGCCTENRVITIWYINPSFYQNSDWAQTKDNPYEPVTGIPENKYTFKGGKNPTAGYTPNFDIPKTQEPGTKYKYYNSINWDKGWFSAQILSSTSYTKNGQQTLPLPLAVARYNPAEDDGKGNEVWLTSVATGQYAKPQDDILLFNNTPLWLVFWGYTNFLQKIKNKSFFSLYMFVIKSPYIKPGNTVQTKNFFPFVDVKFTEGKNSHDSYLTYTDKKLWYPTVWRQLDTINAIVECGPYVPKLGFDRLSTWELAYKYIFSFKWGGPLLTEQEVADPKSKDKYPTPDTMQETIQICNPKHQDTNTIFHEWDYRRGYITNPAIKRMSENLIIDSDVSTDSETSQKKRKRVTTELRNPEEKIKKIKKCLLSLCEEDICQEEEEGSDLHQLIRKQQQQQQLLKHNILTLLKDMKAKQKMLQLQTGVLE

SEQ ID NO: 4634 - protein, 117 aa, Gammatorquevirus sp.; identical to SEQ ID NO: 3351

SEQ ID NO: 4635 - protein, 114 aa, Gammatorquevirus sp.; identical to SEQ ID NO: 3352

SEQ ID NO: 4636 - DNA, 2554 bp, Gammatorquevirus sp.
aaaaaaataaaaaattgcaaaaattcggcgctcgcgcggcaattcgggctagggcagtctagcggaacgggcaagaaacttaaaactatattttttattacagatgtccaagatacaaagcaaggacttttatactgaaacaccctttaatcccgaaacgaaaactcaaatatggatgtcacaaattgctgattctcacgataatatctgccattgcaaccatccctttgctcatttgcttgccagtatctttcctgtaggtcataaagataggaatctcacaattaatcaaattcttttaagagactataaagaaaaatgcctttctggtggagaaggaggagaaagccatggtttggcagatacaggaggaggtttcaaaggagaaaacagagaagaactagaagaagatttcccagaagacgaggtaggcgcacttatcgccgccgcagaagacgtcgatacaaggtaagaagaaagaaacaaaaaattatactaaaacaatggcaaccagaaagcattaaaaaatgtaaaataaaaggaggaggaacaatagttatgggtgctgaaggctgtcaatttagatgctacacagtatacaaaacagaatggactaatccaaaagtacctggtgggggaggctttggagttgaactctttacattaagatacttatacaaagaatacctagcaaaaaataatatttggacagcatctaatgactacaaagaactttgtagatatactggctgcaaatttaccttttacagacacccagaaacagactttattttatcatatgatatacaacctccttttacaataagcaaatggacatatatgtttatgcaccctgtactaatgttacaaagaagacataaaaaacttttgctaagtactgccacaaaaccaaatggtagacttactaaaagatttaagattaaaccaccaaaacttttatctacaaaatggttttttcaagaagactttgcagaccaaggtctagtaaccattactgctacagcatgcaactttagatacccatggctaggatgctgtaatgaaaataatatgataactttatattacatacagccacaattttacccacacaccacatgggcacaatatcacacagtagcttggaatccacttgatgtaggatcccaaacaaaaatgcaagaaaacttgttttactattactatgaaggaaacacaaaaaaagagtggcaaatgactccatttagtggttcaactgtttatgataaatctgtaagcataaatggaggatggttttgtccccaagtattaagagctgtagaggttaaaaaaaacaagtctgaaccacctatggctctaactccctgtggagtgcttagatataaccccatggaagacacaggaaaaggtaacaaaatttgggtaacagatgttcttagtggcagctatggagaacctaaagacacagatttaataatggaaggattcccattatatatgatggtatatgggtatacttcttacttaaaacaagtaaaacacgactcagtttcctttaagggtaaaatgctagtttttaaaagcccagcatttagaagaataagaggatctgacaaacatgactggtacccactagttgataaaagcttttgctttggaaaaggaccaggaatgacggatcccataacatttacaaacaatatatggtaccctacactatatgcacaaagagactcaatagcaaacattgtaggatgtggcccatacacacctaaatacaatgaaactaaacaaagtacatggcaatgcaattatttttatgatttttattttaagtggggcggagcatatccaccagaccaagaaattgaagacccaactactaaaggaaaataccctgtccccaataaccagcctgaaacaatacaaattgcagacccttataaacaaaaatacaacacaatctttaaaccctgggattacagaaggggatgtcttacaaaaaaagctattaaaagaatgcaagaaaacctcccatctgatgactctttgtcaacagattcaacaaaatgcagctcacccaaaaagagaagaacattacccacactccaagacccgaaaaaagaaaatcaggaaatccaaacatgtctcctctcgctctgcgaaaagcctacctaccaagaagaggagcaagagcacaacctcctcaagctcatacagcagcagcagcagcagcaggagcagctcaagtacaacctcttgacattaatttcagacttaaaagtgaaacaaaggaatttactacatcaaacaggattcctcagctaacaagatttaaacctggatttgaacaacaaactgaaaaagaactagcaaccatttttaaaagacctgtcagaacatttaaagaagactcccccttttacccctggttaccaattactccaattgtacaatttaaccttaactacaagtgctaggccaacaatgtacacttagtggtgtttgtttaataaagtttgcaccccaaaaaaatagtaaaataaaaaaaaaa

SEQ ID NO: 4637 - protein, 669 aa, Gammatorquevirus sp.; identical to SEQ ID NO: 4559

SEQ ID NO: 4638 - protein, 122 aa, Gammatorquevirus sp.; identical to SEQ ID NO: 4560

SEQ ID NO: 4639 - protein, 136 aa, Gammatorquevirus sp.; identical to SEQ ID NO: 4561

SEQ ID NO: 4640 - DNA, 2554 bp, Gammatorquevirus sp.
aaaaaaaataaaaaattgcaaaaattcggcgctcgcgcgcaattcgggctagggcagtctagcggaacgggcaagaaacttaaaactatattttttattacagatgtccaagatacaaagcaaggacttttatactgaaacaccctttaatcccgaaacgaaaactcaaatatggatgtcacaaattgctgattctcacgataatatctgccattgcaaccatccctttgctcatttgcttgccagtatctttcctgtaggtcataaagataggaatctcacaattaatcaaattcttttaagagactataaagaaaaatgcctttctggtggagaaggaggagaaagccatggtttggcagatacaggaggaggtttcaaaggagaaaacagagaagaactagaagaagatttcccagaagacgaggtaggcgcacttatcgccgccgcagaagacgtcgatacaaggtaagaagaaagaaacaaaaaattatactaaaacaatggcaaccagaaagcattaaaaaatgtaaaataaaaggaggaggaacaatagttatgggtgctgaaggctgtcaatttagatgctacacagtatacaaaacagaatggactaatccaaaagtacctggtgggggaggctttggagttgaactctttacattaagatacttatacaaagaatacctagcaaaaaataatatttggacagcatctaatgactacaaagaactttgtagatatactggctgcaaatttaccttttacagacacccagaaacagactttattttatcatatgatatacaacctccttttacaataagcaaatggacatatatgtttatgcaccctgtactaatgttacaaagaagacataaaaaacttttgctaagtactgccacaaaaccaaatggtagacttactaaaagatttaagattaaaccaccaaaacttttatctacaaaatggttttttcaagaagactttgcagaccaaggtctagtaaccattactgctacagcatgcaactttagatacccatggctaggatgctgtaatgaaaataatatgataactttatattacatacagccacaattttacccacacaccacatgggcacaatatcacacagtagcttggaatccacttgatgtaggatcccaaacaaaaatgcaagaaaacttgttttactattactatgaaggaaacacaaaaaaagagtggcaaatgactccatttagtggttcaactgtttatgataaatctgtaagcataaatggaggatggttttgtccccaagtattaagagctgtagaggttaaaaaaaacaagtctgaaccacctatggctctaactccctgtggagtgcttagatataaccccatggaagacacaggaaaaggtaacaaaatttgggtaacagatgttcttagtggcagctatggagaacctaaagacacagatttaataatggaaggattcccattatatatgatggtatatgggtatacttcttacttaaaacaagtaaaacacgactcagtttcctttaagggtaaaatgctagtttttaaaagcccagcatttagaagaataagaggatctgacaaacatgactggtacccactagttgataaaagcttttgctttggaaaaggaccaggaatgacggatcccataacatttacaaacaatatatggtaccctacactatatgcacaaagagactcaatagcaaacattgtaggatgtggcccatacacacctaaatacaatgaaactaaacaaagtacatggcaatgcaattatttttatgatttttattttaagtggggcggagcatatccaccagaccaagaaattgaagacccaactactaaaggaaaataccctgtccccaataaccagcctgaaacaatacaaattgcagacccttataaacaaaaatacaacacaatctttaaaccctgggattacagaaggggatgtcttacaaaaaaagctattaaaagaatgcaagaaaacctcccatctgatgactctttgtcaacagattcaacaaaatgcagctcacccaaaaagagaagaacattacccacactccaagacccgaaaaaagaaaatcaggaaatccaaacatgtctcctctcgctctgcgaaaagcctacctaccaagaagaggagcaagagcacaacctcctcaagctcatacagcagcagcagcagcagcaggagcagctcaagtacaacctcttgacattaatttcagacttaaaagtgaaacaaaggaatttactacatcaaacaggattcctcagctaacaagatttaaacctggatttgaacaacaaactgaaaaagaactagcaaccatttttaaaagacctgtcagaacatttaaagaagactcccccttttacccctggttaccaattactccaattgtacaatttaaccttaactacaagtgctaggccaacaatgtacacttagtggtgtttgtttaataaagtttgcaccccaaaaaaatagtaaaataaaaaaaaaa

SEQ ID NO: 4641 - protein, 669 aa, Gammatorquevirus sp.; identical to SEQ ID NO: 4559

SEQ ID NO: 4642 - protein, 122 aa, Gammatorquevirus sp.; identical to SEQ ID NO: 4560

SEQ ID NO: 4643 - protein, 136 aa, Gammatorquevirus sp.; identical to SEQ ID NO: 4561

SEQ ID NO: 4644 - DNA, 2554 bp, Gammatorquevirus sp.
attgcaaaaattcggcgctcgcgcgcgctgcgctaggggcaattcgggctagggcagtctagcggaacgggcaagaaacttaaaatatttttatttttagatgtacaaattctacaagcaaaccacttacaatggagacaccctaaaccaaatgtggatgtctcttattgctgactctcatgacattcactgcaaatgtgaagctccctttgctcacctactgcaaagcatttttccaccaggacacaaagacagacaactaacaattgaacaaataactaccagagatttcctacaatgccattctggtggaacagaagacgaaagccatggtatacaacttggagaaagcgccgctactttagcagaaagaaaagaaaacccagatacaaaagaagatatagaagaccttatactcgccgccgccgccgccgcaggagaaagagaaaggtaagaagaaaacttcaaaaaattactgttaaacaatggcagcctgacagcatagtaaaatgtaaaataaaaggcttaggttgtttagtagcaggagcacaaggaagacaaccttactgctacactaacagtaaatatgactacccacaaccaaaagcaccaggcggcggtgggtttggagctgaactattttccttacaatacttatatgaagaatgggtagccagaaaaaacatttggactaaaagtaatgactacaaagatttagttagatttactggtgcaactttttatttttttaaacatgcaaccacagattttattgtaagctacataagacaaccaccatttttactagaaaaggacttttttaatgacatacacccaatgcaactactattaaacagacaccacaaagtagttcctagccttcaaagaaagcctttaggcaaatcatatgtaaaaattaaaattagacctcctaaacaaatgctaactaaatggtttttccaacaagactttgcaacccaaggtttacttatactgcaaggagcagcagccaacttgtcatgggcttactggggaccagatacacaaagcagatgcttaactttatactctttaaacaccacttttttctataactcagattattcagctacccatgacccacaaaccatgtacataccatacaatcactacccagtcactaacggacttacatactggacagaagataacaaaggaaatccaacaccacacacactaaaaccttcaaactattctgattcagtttcttatgaaaaaggttttttctcacaagcagtattacaagcaaaaaaaattactagatataacgaaacacaaagagacctgtataaaacatatccacaagctatggcaagcttaccaatagctgtatacagatataacccagaagaagatacaggggtaggtaatgtagtttggctagcaactacaattaccaacaaccactggcaaagacctgaattatcagacaaagttatagttggaaaacccctttggttatcattttatggatttgaaagctacatagccaaaacaactaaagacaaaggctggcttctaagtggcatgtttgtattcaaatgtccatacttaaaatctgtatctggagtaactacacaaaacacatttgtgttagttgatttagactttatacaaggtaaaatgccttattcagaaactcttactatacacaaaaaggcattatggtacccaaatgtagaaaaccaagtaaactcaatatcatcactagtacaagtaggcccttacatacctaaatatgcctatcaagatgagagcagctgggaactaacatacaaatatattttttattttaagtggggaggcccatatgtcacagatgaaccagttcaaaatcccaaaaagcaaggaaaatatcccgttcccgatactatcacacaagcaatacaagttagcaacccgctcaaacaaacctgtaaaacaatgcttagagactgggactacagaaggggtattattacaacaacagctcttaaaagaatgtcagcaaacctccaatctgattcatctgtccaatctgatgactcagaaactccaaagaaaaagaaaaaaatcacagcagagatcccccactatcaagaaaagacacaagaaatgcagagctgtctcctctcgctcttcgaagaagatacctgccaagaaacagaagacctccagcaactcatccaccagcagcagcagcagcagcaaaagctcaagtacaacctcctcaagctcctaatggacttaaaacaccaacaaagaatactacaacaccacacaggaatagactaacttgttttaaacctggatttgaacaagaaacagaagaacagttagcacaagcatttaaaagacccattagaaaatttaaagaagacccacccttttacccttggctacccactgctgtacccattgtaaactttcaccttagatttaaagactaggccgacactgttcacttagcggtgtttgtttatataagtttgcaccccaaaaaaattgtaaaataaaaaaaaaaaaaaaataaaaa

SEQ ID NO: 4645 - protein, 671 aa, Gammatorquevirus sp.
MPFWWNRRRKPWYTTWRKRRYFSRKKRKPRYKRRYRRPYTRRRRRRRRKRKVRRKLQKITVKQWQPDSIVKCKIKGLGCLVAGAQGRQPYCYTNSKYDYPQPKAPGGGGFGAELFSLQYLYEEWVARKNIWTKSNDYKDLVRFTGATFYFFKHATTDFIVSYIRQPPFLLEKDFFNDIHPMQLLLNRHHKVVPSLQRKPLGKSYVKIKIRPPKQMLTKWFFQQDFATQGLLILQGAAANLSWAYWGPDTQSRCLTLYSLNTTFFYNSDYSATHDPQTMYIPYNHYPVTNGLTYWTEDNKGNPTPHTLKPSNYSDSVSYEKGFFSQAVLQAKKITRYNETQRDLYKTYPQAMASLPIAVYRYNPEEDTGVGNVVWLATTITNNHWQRPELSDKVIVGKPLWLSFYGFESYIAKTTKDKGWLLSGMFVFKCPYLKSVSGVTTQNTFVLVDLDFIQGKMPYSETLTIHKKALWYPNVENQVNSISSLVQVGPYIPKYAYQDESSWELTYKYIFYFKWGGPYVTDEPVQNPKKQGKYPVPDTITQAIQVSNPLKQTCKTMLRDWDYRRGIITTTALKRMSANLQSDSSVQSDDSETPKKKKKITAEIPHYQEKTQEMQSCLLSLFEEDTCQETEDLQQLIHQQQQQQQKLKYNLLKLLMDLKHQQRILQHHTGID

SEQ ID NO: 4646 - protein, 117 aa, Gammatorquevirus sp.
MYKFYKQTTYNGDTLNQMWMSLIADSHDIHCKCEAPFAHLLQSIFPPGHKDRQLTIEQITTRDFLQCHSGGTEDESHGIQLGESAATLAERKENPDTKEDIEDLILAAAAAAGERER

SEQ ID NO: 4647 - protein, 108 aa, Gammatorquevirus sp.
LSPLALRRRYLPRNRRPPATHPPAAAAAAKAQVQPPQAPNGLKTPTKNTTTPHRNRLTCFKPGFEQETEEQLAQAFKRPIRKFKEDPPFYPWLPTAVPIVNFHLRFKD

SEQ ID NO: 4648 - DNA, 2554 bp, Gammatorquevirus sp.
aaaaaaaaaaaaaaaaataaaaaattcgaggtctaggggcaattcgggctagggcagtctagcggaacgggcaagaaactaaaatttatttttactttacagatgcaaaacctgtctcacaaggacttttttaaaccaacaccttacaatacagataccaaaaatcaaatatggatgtcacaaatttctgattctcatgacaatatctgtcactgcaacagtccttttgggcacctgcttgcttctatttttcctcctggtcataaagaccgtgatcttacaattaatcaaatactacaaagagactaccaagcactatgcctttctggtggagacgcagaagaaagccatggtttcgcagattcaaatataaaaccagaaaaaggtttagaagaagaagaagaagattccctagacgcagaagatatagaaaatttactcgccgccgccgcaaaagaaaggtaagaagaaaacttcaaaaaataactcttaaacaatggcaacctgaatgtataaaaaaatgtaaaataataggattttcatgcttagtactaggagctaatggaagacaaatgtactgttatacaaatgtagctgatcaatatacaatagcaaaagcacctggaggagggggctttggctgtgaacttataaacttaaaatggttatatgaccaatatactgcacataacaatgtgtggactaaatctaatgagtacacagacttagtgagatatacaggctgtactataactgttttcagacatgcatatgttgactttatttttcaatattcactgcaaggtccatttacattaaacaaatatacatacccacaacttcaaccacaaaatgctcttctatccaaacataaaagaattattttaagcagacaaaatgctccaaataaaaagcaagctgtaaagattaaaattaaaccacctaaactaatgtcaaccaagtggttttttcaaaaagatttctgtgactatgctctagtacaaatatgtgccactgcatgctcactatcatttcctagaatacaaccaaatgcacaaaaccaaatcataactctatatgccttaaatcctactttctactttaacagtaactggctagccaatactgaactaggctatagaaatataactacgcaaacttttccactttattttgaacacaacataagaggcattatttccccatatgaactaaaccccaacagcattcctaaatctgtagaagaaccatatcaatcaaataagtatctctacacaacttcatacaaatatggattcttttcaccacaagtaatgacagcaactaaagtatatacagacaagacagacccagacaaaactaaaattgctagtttaccacttatagttcttagatacaacccaaacacagatgatggctatggcaatgaaatttacttaacaagcctacacaaaggacactatgacaaaccctcagttacaccagattatatgtttccaggtgtccctctctggatgggactatatggctatggaaactatcttatacaatccagcaaagacaaaggcctactaactacacacatgttcatattaaaatcaaggtcactacacccaatatcacaagttaccaaagatgtatactacccaataattaatacagatatggcttttggaaaactcccatttgatgaatatataactactgccaaaaaaaatgcatggtatcctacaggagaaatgcaagatgatgctttaaataacatagtaatgacagggccattccaaccaaaattcaacaatatgactaacagcacctgggaacttgactacaaatacaaattttttttcaagtggggcggtccatacacagcagaccccgtcgcagaagacccatgtaaaaaaggaaccttccctacactcagtgcactgcaacaaacaatacaggttaagaacccagaaaaacttagtccagaatccattctacaccagtgggacttcagaagggggattgttacagcaacagctcttaaaagaatgtcagaaaacctcgaaactgatacatctttcgaatctgatgactcagaaacaccgaaaaagaaaagaaaagtcaccaaagagatgccatgcttcaatcaaaaggaagagaaaatcaaaaaatgtctcctctcactctgcgaagaacctacctcccaagaaaccccggaaaacctacaccagctcatccagcagcagcagcagcagcagtaccagctcaagagaaacatctacaagctcctcaaacacctgaaacatggacaacaacaagtacaactccaaacgggagttttagagtagagccattcaaacctggatttgaatgggaaacagagcgtgaatgtgcaaaagcattttgcagaccacccagacattataaaaatgatcccccattttacccctggcttcctcctgcacccaaagtaatttttaaactcaattttaaagactaggccaacaatgtacacttagtagagtctgtttatataagttacatccccaaaaaaattgttaaaata

SEQ ID NO: 4649 - protein, 672 aa, Gammatorquevirus sp.
MPFWWRRRRKPWFRRFKYKTRKRFRRRRRRFPRRRRYRKFTRRRRKRKVRRKLQKITLKQWQPECIKKCKIIGFSCLVLGANGRQMYCYTNVADQYTIAKAPGGGGFGCELINLKWLYDQYTAHNNVWTKSNEYTDLVRYTGCTITVFRHAYVDFIFQYSLQGPFTLNKYTYPQLQPQNALLSKHKRIILSRQNAPNKKQAVKIKIKPPKLMSTKWFFQKDFCDYALVQICATACSLSFPRIQPNAQNQIITLYALNPTFYFNSNWLANTELGYRNITTQTFPLYFEHNIRGIISPYELNPNSIPKSVEEPYQSNKYLYTTSYKYGFFSPQVMTATKVYTDKTDPDKTKIASLPLIVLRYNPNTDDGYGNEIYLTSLHKGHYDKPSVTPDYMFPGVPLWMGLYGYGNYLIQSSKDKGLLTTHMFILKSRSLHPISQVTKDVYYPIINTDMAFGKLPFDEYITTAKKNAWYPTGEMQDDALNNIVMTGPFQPKFNNMTNSTWELDYKYKFFFKWGGPYTADPVAEDPCKKGTFPTLSALQQTIQVKNPEKLSPESILHQWDFRRGIVTATALKRMSENLETDTSFESDDSETPKKKRKVTKEMPCFNQKEEKIKKCLLSLCEEPTSQETPENLHQLIQQQQQQQYQLKRNIYKLLKHLKHGQQQVQLQTGVLE

SEQ ID NO: 4650 - protein, 120 aa, Gammatorquevirus sp.
MQNLSHKDFFKPTPYNTDTKNQIWMSQISDSHDNICHCNSPFGHLLASIFPPGHKDRDLTINQILQRDYQALCLSGGDAEESHGFADSNIKPEKGLEEEEEDSLDAEDIENLLAAAAKER

SEQ ID NO: 4651 - protein, 120 aa, Gammatorquevirus sp.
MLQSKGRENQKMSPLTLRRTYLPRNPGKPTPAHPAAAAAAVPAQEKHLQAPQTPETWTTTSTTPNGSFRVEPFKPGFEWETERECAKAFCRPPRHYKNDPPFYPWLPPAPKVIFKLNFKD

SEQ ID NO: 4652 - DNA, 2553 bp, Gammatorquevirus sp.
agtatctgcataggtccttgtatatgttacttctaggggcaactcgggctagggcagtctagcggaacgggcaagaaacttaaaatatattttattttacagatgcaaaacatctccagcaaagatttttttgtaccaacaccatacaaccaggaaacgaaaacacaaatatggatgtctcaaattgctgactctcacgataatatctgcaattgcagtcatccatttgctcaccttttgtcttccatatttcctcctggccaccaagatagggacctcactattaatcaaatactcgcaagggattaccaggataaatgcctttctggtggaagcgccgccggaggccatggtatggcaaattcaggtaccggaggcggtttcaaaccaaaagaagaagatacagaagaagatttaccaggagaagaaatagaccaattactcgccgccgccgccgcaggcgaagacaccacaaggtaagaagaaaaaaaactaaaattcctgtactgcagtggcaaccagacagtattagaaaatgccacataaaaggacaaggtactctagtagttggagcagaaggaactcaaatgttctgctacacaaaagacaaatttaaatatgtacctcctaaaactccttatggtggaggctttggagcagaaaaatttactttagcctatctgtacgaagaatattctttccacaataatatatggactgctagtaacatatacaaggacctatgcagatacttatactgcaaaattattttttttagacatccagacacagactttgtaattaactacagcagacaaccaccatgggaactaaataaatacacatacccaagttgtcacccacaacaaatgctactagacaaacacaaagttgttatatttagtcaggctagtaaaccccatggaaaatataagtacacactcaaaataaaaccaccaaaacaactaatcacaaaatggttttttgcaaagcccttttcaaactatggcttactatttctaaaaggctcatccatgaatttaagatacagttacttaagtgcctctaatgaaaatatgctagttaacataagttctttaaatcctagttggtatataaatacagactgggcaacagctaggcaagacacacaagcttacctaccacaaactaatatgaaaagaacgctagcttacaaaaacaaaacaaaaactggaagtgaaataaccacagaaatgaaaccagctgcattcacttcatatgatgtgagtgtaagctatcaagacggatggtttaataaaaactttcttagagcaatagaattagaatcacccaaaggtaccaaactagctcaactacctttaaactatggtagatacaaccccactagagataaaggccaaggtaacaaaatatatattattagtacaatagcagatggctggggaccacctaccacagacaaaaatgtacttatagaagatttaccactttggcttggtttatatggctatgtttcttacttagaaaccattaaaccacctgattggctaaaatcatcagtaatagtactagtatctgatgctatttaccactcaggaacaccagttccttccactaaatgggtacccatagactcagactatatagatggcaataaaccatatgaccaatacataacaactacagaaaaaagcagatggtatccaagttacaaatggcaattaaaaactttaaatgctattgtagaatgtggcccatatgtacaacaatatagtgaagaaaaaaacagtacatgggaactaaaataccattataatttttactttaagtggggtggaccacaagttccaggacaagacattaaaaatccacaagaccttaacacctatgatgtacccgataagttcacaggcagaatacaaattaccaacccagccaaacaagctccagaaacaattttacagccgtgggactacagaaggggacagcttaaagaaacagctcttaaaagaatgctccaacacctcgaaactgattcagagtttgaatattttacagaagagagtccaaaaaagaaaaaacaaagacttggagcagccctcagagatccccaagaagcacagaaagaaacccaagcttgtctcctctcactctgcgaagaaaatacatgccaagacccacaagagaagacactcgagcagctcatccaccagcagcagcaacagcagcagcacctcaaattcaacatcatcaaactcctcctagacctaaaggaacaacagagaatgttacaactacagacaggaatattagagtaaccctaacaagatttaaatcaggatttgaaagagacacagaaaatgaattagctagagcatttttaagaccccctagactatttaaagaagacagcccattctatccctggctaccccaacctgtaccccttgtaaactttcaccttaattacaaattctaggcctacaatgttcacttagtggtgtatgtttaataaagtttacaccccaaaaaaaataattttgcagtata

SEQ ID NO: 4653 - protein, 667 aa, Gammatorquevirus sp.
MPFWWKRRRRPWYGKFRYRRRFQTKRRRYRRRFTRRRNRPITRRRRRRRRHHKVRRKKTKIPVLQWQPDSIRKCHIKGQGTLVVGAEGTQMFCYTKDKFKYVPPKTPYGGGFGAEKFTLAYLYEEYSFHNNIWTASNIYKDLCRYLYCKIIFFRHPDTDFVINYSRQPPWELNKYTYPSCHPQQMLLDKHKVVIFSQASKPHGKYKYTLKIKPPKQLITKWFFAKPFSNYGLLFLKGSSMNLRYSYLSASNENMLVNISSLNPSWYINTDWATARQDTQAYLPQTNMKRTLAYKNKTKTGSEITTEMKPAAFTSYDVSVSYQDGWFNKNFLRAIELESPKGTKLAQLPLNYGRYNPTRDKGQGNKIYIISTIADGWGPPTTDKNVLIEDLPLWLGLYGYVSYLETIKPPDWLKSSVIVLVSDAIYHSGTPVPSTKWVPIDSDYIDGNKPYDQYITTTEKSRWYPSYKWQLKTLNAIVECGPYVQQYSEEKNSTWELKYHYNFYFKWGGPQVPGQDIKNPQDLNTYDVPDKFTGRIQITNPAKQAPETILQPWDYRRGQLKETALKRMLQHLETDSEFEYFTEESPKKKKQRLGAALRDPQEAQKETQACLLSLCEENTCQDPQEKTLEQLIHQQQQQQQHLKFNIIKLLLDLKEQQRMLQLQTGILE

SEQ ID NO: 4654 - protein, 125 aa, Gammatorquevirus sp.
MQNISSKDFFVPTPYNQETKTQIWMSQIADSHDNICNCSHPFAHLLSSIFPPGHQDRDLTINQILARDYQDKCLSGGSAAGGHGMANSGTGGGFKPKEEDTEEDLPGEEIDQLLAAAAAGEDTTR

SEQ ID NO: 4655 - protein, 113 aa, Gammatorquevirus sp.; identical to SEQ ID NO: 4148

SEQ ID NO: 4656 - DNA, 2553 bp, Gammatorquevirus sp.
ctgcgcgcgcgcgagcgccgtcacgcgccggtctaggggcaattcgggctagggcagtctagcggaacgggcaagaaacttaaaacaatatttgttttacagatggttagcatttcctccagtgatttttttcaaaaaacgaaatttaatcaagaaacgcaaacacaagtatggatgtcccaaattgctgacggccacgataatttctgcagttgctggcatccatttgctcaccttcttgcttccatatttccacctgggcacaaagatcgtgatttcactattaaccaaattcttttaagagactataaagaaaaatgccattctggtggagaaggagaaagcgcttctggtttaacaaaaggtttgcctataaaaaaagaagatacagaaaaagatggcccagaaggcgacgcaggagaagaccatacagacgccctcttcgccgccgccgtcgaaagcttcgaaaggtaaagaaaaaaaaaaaagctttaataattagacaatggcaaccagacagtattagaacttgtaaaattataggacagtcagcaattgttgtaggagcagaaggaaaacaaatgtactgttatactgttaacaaacttattaatgtaccaccaaaaaccccctatggtgggggatttggagtagatcaatacacactgaaatacttatatgaagaatacagatttgcacaaaacatatggacacaaagtaacatactgaaagacttgtgcagatacatcaacaccaaacttattttttacagagacaacaaaacagactttgttctttcctatgacagaaaccctccttttcaactaacaaaattcacatacccaggagctcacccacaacaaatcatgctacaaaaacaccacaaattcattctttcacaaatgacaaaaccaactggaaaactcactaaaaaatttaaaatacaaccacctaaacaaatgctatctaaatggtttttctccaaacaatttagcaaataccctctactatcaattaaagctgctgcactagacttaagacattcatacctaggctgctgcaatgaaaatccacaagtttttttttactatcttaaccatggctactacatcaagacaaattggggagcacaatcagcaacagcatacaggccaaatgcatccacaactgaaaccacatactatgattacaaaggtcaaacagaaaaaatatacataagatcagatgagtatactaaaagcatatcatatgcagatggctattttaaatcacacttcttacaaacaaactgcataaaaacaagtggcgcagcatctgctacctgcatagcacttaagccactaggtctagctatctacaatccagtaaaagacaatggtgaaggtaatatgatttaccttgttagcactctagcaaacacttgggatacgccaccaaaagacagtgctattcttatacaaggagtgcccctttggctaggcttatttggatactttgactactgcagacaaattaaagcagataaaacctggttagacagtcatgtacttgtaatacaaagccctgctatcttcacatacccagacccaggagctggaaaatggtactgtccattatcacagtcctttataaatggtaatggaccctttaaccaaccaccaacacaactacaaaaagctaaatggtttccacaaatacaatatcaacaagaaatagttaactcctttgtagagtcaggtccatttatacctaaatatgctaaccaaacagaaagtaactgggaactaaaatacaaatatatttttacatttaagtggggtggaccacaattccatgaaccagaaattgcagatccaacaaaacaggaacagtatgatgttcccgatactttccaacaaacagtacaaattgaagatccagaaagacaagaccccagatctctcatccatgattgggattacagacgaggctacattaaagaaagatctcttaaaagaatgtcaaattacctctcaactcctacagatcaacaaacagctacagaggaagacattccaaaaaagaaaaagagacttggaccccaactcacagtcccacaagagaaagaagaagagacactctcttgtctcctctctctctgcaaaaaagataccttccaagaagcagagacacaagaagacctccagcagctcatcaaccaccagcaggagcagcagctcctcctcaagagaaacatcctccagctcatccacaaattaaaagaaaatcaacaaatgcttcaactacacacagggatgttaccttaactagatttaaaccaggctttgaagaacaaacagaaaaagaattagctattatttttcacagaccccctcgaacatataaagaagatcttcccttctatccctggcttcctccagcaccccttgtacaatttaaccttaacttcaaaggctaggccaacaatgtacacttagtaaagcatgtttaataaagtttgcacccaaaaaaaaaaaaaaataaaaaagcgcaaaaattcggcgctcgcgcgcg

SEQ ID NO: 4657 - protein, 662 aa, Gammatorquevirus sp.
MPFWWRRRKRFWFNKRFAYKKRRYRKRWPRRRRRRRPYRRPLRRRRRKLRKVKKKKKALIIRQWQPDSIRTCKIIGQSAIVVGAEGKQMYCYTVNKLINVPPKTPYGGGFGVDQYTLKYLYEEYRFAQNIWTQSNILKDLCRYINTKLIFYRDNKTDFVLSYDRNPPFQLTKFTYPGAHPQQIMLQKHHKFILSQMTKPTGKLTKKFKIQPPKQMLSKWFFSKQFSKYPLLSIKAAALDLRHSYLGCCNENPQVFFYYLNHGYYIKTNWGAQSATAYRPNASTTETTYYDYKGQTEKIYIRSDEYTKSISYADGYFKSHFLQTNCIKTSGAASATCIALKPLGLAIYNPVKDNGEGNMIYLVSTLANTWDTPPKDSAILIQGVPLWLGLFGYFDYCRQIKADKTWLDSHVLVIQSPAIFTYPDPGAGKWYCPLSQSFINGNGPFNQPPTQLQKAKWFPQIQYQQEIVNSFVESGPFIPKYANQTESNWELKYKYIFTFKWGGPQFHEPEIADPTKQEQYDVPDTFQQTVQIEDPERQDPRSLIHDWDYRRGYIKERSLKRMSNYLSTPTDQQTATEEDIPKKKKRLGPQLTVPQEKEEETLSCLLSLCKKDTFQEAETQEDLQQLINHQQEQQLLLKRNILQLIHKLKENQQMLQLHTGMLP

SEQ ID NO: 4658 - protein, 123 aa, Gammatorquevirus sp.
MVSISSSDFFQKTKFNQETQTQVWMSQIADGHDNFCSCWHPFAHLLASIFPPGHKDRDFTINQILLRDYKEKCHSGGEGESASGLTKGLPIKKEDTEKDGPEGDAGEDHTDALFAAAVESFER

SEQ ID NO: 4659 - protein, 111 aa, Gammatorquevirus sp.
LSPLSLQKRYLPRSRDTRRPPAAHQPPAGAAAPPQEKHPPAHPQIKRKSTNASTTHRDVTLTRFKPGFEEQTEKELAIIFHRPPRTYKEDLPFYPWLPPAPLVQFNLNFKG

SEQ ID NO: 4660 - DNA, 2553 bp, Gammatorquevirus sp.
cgggagcccgaggtgagtgaaaccaccgaggtctaggggcaattcgggctagggcagtctagcggaacgggcaagaaacttaaaatgtattattttacagatggttagcatttgctccagtgacttctttaagaaaacgaaattcaacccggaaacacaaacacaaatatggatgtctcaaattgctgattctcatgataatatctgcagctgctggcatccatttgctcaccttctagcttccatatttcctcctgggcatcaagatcgtgaccttactattaaccaaatccttttgagagattataaagaaaaatgccattctggtggagaaggagaagaaaaccatggtttggcaggtggagaaggcgccgctttacctacagaaccaaaagaagaaaatacagaagaaaacaatatagaagacctgcttttcgccgccgccgccgccgcagaagaaaacaaaaggtaagaagaaagaaacaaaaacttccaatacaacaatggcagccagactctataacaaaatgtaaaattaaaggatatgggtgtctagtagctggtgcagaaggaagacaattttactgctacacaaatgaattaggagagtacatacaaccaaaagccccgggtggagggggttttggagctgaaatgttttcactagaatacctatacaaacaatgggtagctagaaaaaacatttggacacacagcaatgactacaaagacttagtcagatacactgggtcaaaaattaaactatttaggcaccctaccactgactttatagctgcatacaacagacaaccaccttttctactagaaaaagactactacaatgacatacacccttctaacatgctacttagaaaacacagaaaaataattcctagtttaaaaagaaaaccacttggcaaaccctacattacaatgaaaataaaaccacctaaacaaatgataacaaagtggttttttcaaagagaatttgcacagcatggactttttacaattgaagcagctgcttgcaatttagggtggtcatactatggcccaaattcacaaagcagactattaacattttatgccttaaatgacaagttttttcaaactacagactgggctaaatattcagcagtaccttggtatccttacccacactatccaacaacaaaccctttagaatttacttacccaaaactaggaaataacccaccaggtaaatacacgcctaatccacataattataatgaatctgtaaacatagaaacaggctttttttcatggaaggtactaactgctacatcagttaaccaaccttcaggtaaacactatgcctacttacctataacaacttgtagatacaaccctgaaaatgacacaggacaaggcaatgctgtttggcttacttctgtaatatcaaacaataactgggaaaaaccacatgacccagatttaataattattggaaaaccactatggatggcattttatggcttttacaattacctacaaaaagttaaaaatgacaaaggatgggtactatcaggaatgctagtttgtcaatctccagctataaaacttatcacaccacatgtacaaacaatatttccacttattgaccttgacttcataacaggcaaactaccatatggagaaactatcgcaccaggcaaaaaaaatacatggtaccccacagtagaacaccaactaataactataaataactttgtagagacaggtccttatattcctaaatactcatacttaaaagaaagtacatgggaactaacatatgcttatacttgttattttaagtggggaggccctcatgtctacaatgaacaagttcaaaatccacaaacacaaggaaaatatgatgtccccgatacaatcacaaaaacattacaaattgctgacccgctcaaacaaagctatgaaaccatgcttagagcctgggactacagaaggggcattattacaacaacagctcttaaaagaatgtcaaaacacctccaaactgatcaatctgtccaatctgatgactcagaacctgcaaagaaaaagaaaaagacaacaggagaaataccatactacaaagaagagacacaagaaatccagagctgtctcctctcgctctgcgaagaagataccttccaagaaacagaggacctcagacagctcattcagcagcagcagcagcagcagctcaagctcaagcaaaacctcatcaagctaatgatagacctaaagcaacaacagagagcacttcaacttcaaacaggattctattaacaaggtttaaacctggatttgaacaagaaacagaaaaagaacttgcaagaatctttaaaagaccccccagaacatacaaacaagaccctccattttatccctggttacccatagaacctaaagttaactttcaacttaactataaattctaggccaacaatgttcacttagtaaagcatgtttaataaagtttaccccaaaaaaaaaaaaaaaaaaaaaaaatcgagcgcagcgaggaggtccccggctgcccatggg

SEQ ID NO: 4661 - protein, 659 aa, Gammatorquevirus sp.
MPFWWRRRRKPWFGRWRRRRFTYRTKRRKYRRKQYRRPAFRRRRRRRRKQKVRRKKQKLPIQQWQPDSITKCKIKGYGCLVAGAEGRQFYCYTNELGEYIQPKAPGGGGFGAEMFSLEYLYKQWVARKNIWTHSNDYKDLVRYTGSKIKLFRHPTTDFIAAYNRQPPFLLEKDYYNDIHPSNMLLRKHRKIIPSLKRKPLGKPYITMKIKPPKQMITKWFFQREFAQHGLFTIEAAACNLGWSYYGPNSQSRLLTFYALNDKFFQTTDWAKYSAVPWYPYPHYPTTNPLEFTYPKLGNNPPGKYTPNPHNYNESVNIETGFFSWKVLTATSVNQPSGKHYAYLPITTCRYNPENDTGQGNAVWLTSVISNNNWEKPHDPDLIIIGKPLWMAFYGFYNYLQKVKNDKGWVLSGMLVCQSPAIKLITPHVQTIFPLIDLDFITGKLPYGETIAPGKKNTWYPTVEHQLITINNFVETGPYIPKYSYLKESTWELTYAYTCYFKWGGPHVYNEQVQNPQTQGKYDVPDTITKTLQIADPLKQSYETMLRAWDYRRGIITTTALKRMSKHLQTDQSVQSDDSEPAKKKKKTTGEIPYYKEETQEIQSCLLSLCEEDTFQETEDLRQLIQQQQQQQLKLKQNLIKLMIDLKQQQRALQLQTGFY

SEQ ID NO: 4662 - protein, 123 aa, Gammatorquevirus sp.
MVSICSSDFFKKTKFNPETQTQIWMSQIADSHDNICSCWHPFAHLLASIFPPGHQDRDLTINQILLRDYKEKCHSGGEGEENHGLAGGEGAALPTEPKEENTEENNIEDLLFAAAAAAEENKR

SEQ ID NO: 4663 - protein, 107 aa, Gammatorquevirus sp.
LSPLALRRRYLPRNRGPQTAHSAAAAAAAQAQAKPHQANDRPKATTESTSTSNRILLTRFKPGFEQETEKELARIFKRPPRTYKQDPPFYPWLPIEPKVNFQLNYKF

SEQ ID NO: 4664 - DNA, 2552 bp, Gammatorquevirus sp.
ataaaaaaaaaaaaaaaaaataaaaacgaggtctaggggcaattcgggctagggcagtctagcggaacgggcaagaaactaaaatttatttttactttacagatgcaaaacctgtctcacaaggacttttttaaaccaacaccttacaatacagataccaaaaatcaaatatggatgtcacaaatttctgattctcatgacaatatctgtcactgcaacagtccttttgggcacctgcttgcttctatttttcctcctggtcataaagaccgtgatcttacaattaatcaaatactacaaagagactaccaagcactatgcctttctggtggagacgcagaagaaagccatggtttcgcagattcaaatataaaaccagaaaaaggtttagaagaagaagaagaagattccctagacggagaagatatagaaaacttactcgccgccgccgcaaaagaaaggtaagaagaaagcttcaaaaaataactcttaaacaatggcaacctgaatgtataaaaaaatgtaaaataataggattttcatgcttagtactaggagctaatggaagacaaatgtactgttatacaaatgtagctgatcaatatacaatagcaagagcacctggaggagggggctttggctgtgaacttataaacttaaaatggttatatgaccaatatactgcacataacaatgtgtggactaaatctaatgagtacacagacttagtaagatatacaggctgtactataactgttttcagacatgcatatgtagactttatttttcaatattcactgcaaggtccatttacattaaacaaatatacatacccacaacttcaaccacaaaatgctcttctagccaaacataaaagaattattttaagcagacaaaatgctccaaataaaaagcaagctgtaaaaattaaaattaaaccacctaaactaatgtcaaccaagtggttttttcaaaaagatttctgtgattatgctctagtacaaatatgtgccagtgcatgctcactatcatttcctagaatacaaccaaatgcacaaaaccaaatcataactctatatgccttaaatccttctttctactttaacagtaactggctagccacaagtatagaaggctatagaaatataagtacacaaagttttccactttattttgatcacaacataaaaggcattcctacaccatatgaactaaaccccaacaacattcctgctactgtagaactaccatatagaacagataagtatctctacacaacttcatacaaatatggattcttttcaccacaagtaatgacagcaactaaagtatatacagacaaggaccacccagacaaaactaaaattgctaacttaccacttatagttcttagatacaacccaaacacagatgatggctatggcaatgaaatttacttaacaagcatacacaaaggacactatgacaaaccctcagttacaccagattatatgtttccaggtgtccctctctggatgggactatatggctacggaaactatcttatacaatccagcaaagacaaaggcctactaactacacacatgttcatattaaaatcaaggtcactacacccactatcacaagctaccaaagatgtatactacccaataattaatacagatatggcttttggaaaactcccatatgatgaatatataactactgccaaaaaaaatgcatggtatcctacaggagaaatgcaagatgatgctttaaataacatagtaatgacagggccattccaaccaaaattcaacaatatgactaacagcacctgggaacttgactacaaatacaaattttttttcaagtggggcggtccatacacagcagaccccgtcgcagaagacccatgtaaaaaaggaaccttccctacactcagtgcactgcaacaaacaatacaggttaagaacccagaaaaacttagtccagaatccattctacaccagtgggacttcagaagggggattgttacagcaacagctcttaaaagaatgtcagaaaacctcgaaactgatacatctttcgaatctgatgactcagaaacaccgaaaaagaaaagaaaagtcaccaaagagatgccatgcttcaatcaaaaggaagagaaaatcaaaaaatgtctcctctcactctgcgaagagcctacctaccaagaaaccccggaaaacctacaccagctcatccagcagcagcagcagcagcagcaccagctcaagagaaacatctacaagctcctcaaacacctgaaacatggacaacaacaagtacaactccaaacaggagttttagagtagagccattcaaacctggatttgaatgggaaacagagtgtgaatgtgcaaaagcattttgcagaccacccagacattataaaaatgatcccccattttacccctggcttcctcctgcacccaaagtaatttttaaactcaattttaaagactaggccaacaatgtacacttagtagagtctgtttatataagttacatccccaaaaaaaactgttaaa

SEQ ID NO: 4665 - protein, 672 aa, Gammatorquevirus sp.
MPFWWRRRRKPWFRRFKYKTRKRFRRRRRRFPRRRRYRKLTRRRRKRKVRRKLQKITLKQWQPECIKKCKIIGFSCLVLGANGRQMYCYTNVADQYTIARAPGGGGFGCELINLKWLYDQYTAHNNVWTKSNEYTDLVRYTGCTITVFRHAYVDFIFQYSLQGPFTLNKYTYPQLQPQNALLAKHKRIILSRQNAPNKKQAVKIKIKPPKLMSTKWFFQKDFCDYALVQICASACSLSFPRIQPNAQNQIITLYALNPSFYFNSNWLATSIEGYRNISTQSFPLYFDHNIKGIPTPYELNPNNIPATVELPYRTDKYLYTTSYKYGFFSPQVMTATKVYTDKDHPDKTKIANLPLIVLRYNPNTDDGYGNEIYLTSIHKGHYDKPSVTPDYMFPGVPLWMGLYGYGNYLIQSSKDKGLLTTHMFILKSRSLHPLSQATKDVYYPIINTDMAFGKLPYDEYITTAKKNAWYPTGEMQDDALNNIVMTGPFQPKFNNMTNSTWELDYKYKFFFKWGGPYTADPVAEDPCKKGTFPTLSALQQTIQVKNPEKLSPESILHQWDFRRGIVTATALKRMSENLETDTSFESDDSETPKKKRKVTKEMPCFNQKEEKIKKCLLSLCEEPTYQETPENLHQLIQQQQQQQHQLKRNIYKLLKHLKHGQQQVQLQTGVLE

SEQ ID NO: 4666 - protein, 120 aa, Gammatorquevirus sp.
MQNLSHKDFFKPTPYNTDTKNQIWMSQISDSHDNICHCNSPFGHLLASIFPPGHKDRDLTINQILQRDYQALCLSGGDAEESHGFADSNIKPEKGLEEEEEDSLDGEDIENLLAAAAKER

SEQ ID NO: 4667 - protein, 120 aa, Gammatorquevirus sp.
MLQSKGRENQKMSPLTLRRAYLPRNPGKPTPAHPAAAAAAAPAQEKHLQAPQTPETWTTTSTTPNRSFRVEPFKPGFEWETECECAKAFCRPPRHYKNDPPFYPWLPPAPKVIFKLNFKD

SEQ ID NO: 4668 - DNA, 2551 bp, Gammatorquevirus sp.
actgccctagccgtgagtgaaaccaccgaggtctaggggcaactcgggctagggcagtctagcggaatgggcaagaaacttaaaaaactttattgttttaaatacagatgcagaatatcagctcacaagacttttaccaagaaacccattttaatcccgaaactaagaatcaaatatggatgtctcaaattgctgactctcatgataatatctgcaattgcaatcatccatttgctcaccttcttgcttccatatttcctcctggccaccgagatcgcgattataccattaatcagatacttttcagagactaccaagaaaaatgccattctggtggggtagaagaaagaaaccttggtttggcaggtggcgataccgccgccgccgctggaacatcaggagaaaaaagaaaagaagaagaagactacccagaagaagaactagacgctatgctcgccgccgctatggaagaaaacgcaaggtaagaagaaaacttagaaaaattaagatacaacaatggcaaccagactctattaaaaaatgtaaaattaaaggctactctattatgatactaggtggtgaaggaactcaaatgttctgttatactaatacagctaaagactacccacaaccgaaagcccctggcggaggaggctttggttatgaagttataagtttaaaatggctatatcaagaatttttaaagcacaacaatatatggacaagatcaaatgaatatacagaccttgttagatatacaggaggcaaaattactttttttgcacatccatatattgactttataatagcatatgacctacaacctccttttgaccttaacaaattttcatatccagaaattcaaccacaaaatatgctacttagaaaacataaaagagttttactaagcagacaatctaacccaaaaggaagacataaagttacaattaagtttcatcctcctaaacaaatgacaaccaaatggttttttcaaaaagacttttgcccatatggcctaattaaaatttctgcagctgcagcagacttttcatacccaataataggacctaaatcacaaagcactattttaaccatatatgcacttaatacaaacttttaccaagttagtgactgggcacaaacaaaaactagggagccctatatgaacattccaacacaaaccttaccactatacttttggtataaagaaaaaggacaagaaaaatcttacaaatataacccaggtgatcaagaagcacaaaacaaatactattactctatagcatgggacacaggcctattttgcagtaaagtactactagcttataaaatttccacagatcccgcaggtaaaacagtaattgcaggcacacccattatacctctaagatataacccacaagaagatgatggttttggcaatgaagtatatctaactagcattctaagtggcagatataacaaaccatcatatacaacagactatcaatttaacaatgtacctttatatattgcattttatggctattacagctacttaaaaatttacagcaacgacaaaaacataatgaaatcatatatgtttgttgttaaatgcaaagctattaaaccactaactcaaacaacagcacaaaactattaccctatcttagatgcagactttgtttttggtaaactaccatgggatgaatacctttccactgaaataaaaaagttttggtatcccacagcagaaaaacaagagggtattataaatgctatagtagaatcaggaccatatgtaccaaaactttccaacatgacatatagtacatggtcactaatgtacaactataaatttttttttaagtggggtggaccacatgttacagatccaaaagttgaagacccctgcacccgaaacaaataccctgtacccgatacaatgcaaccaacagtacaaattgtcaacccagaaaaaaataaagttgaatccatattacatgactgggactttagaagggggttcattacaaacacagctcttaaaagaatgtcagaaaacctcccatctgaaacatctctctcatctgatgattcagaatcacctgcaaaaaagaggaaaattacaaaggaagtcccatgccaccaagaaagccaagaaaaaatccagaactgtctcctctcactctgcgaagaaaatacctgccaagaaacaccagaaaacctccagcagctcatcaagcagcagcagcaggagcagcacaagctcaagagaaacatcctcaagctcctcacacacctgaaaaaagggcagagatgtgtagaactacaaacaggccttttagagtagagcccttcaaacctggatttgaagaagaaactgagagagaactagctattgcctttaaaagaccccctagaaaatataagaatgaccctccattttacccatggctacctttaactcccaaagttatttttaaccttaactttcaagactaggccaacactgtacacttagtaaagcatgtttaataaagttttttaagtttcttgcccattccgctag

SEQ ID NO: 4669 - protein, 669 aa, Gammatorquevirus sp.
MPFWWGRRKKPWFGRWRYRRRRWNIRRKKKRRRRLPRRRTRRYARRRYGRKRKVRRKLRKIKIQQWQPDSIKKCKIKGYSIMILGGEGTQMFCYTNTAKDYPQPKAPGGGGFGYEVISLKWLYQEFLKHNNIWTRSNEYTDLVRYTGGKITFFAHPYIDFIIAYDLQPPFDLNKFSYPEIQPQNMLLRKHKRVLLSRQSNPKGRHKVTIKFHPPKQMTTKWFFQKDFCPYGLIKISAAAADFSYPIIGPKSQSTILTIYALNTNFYQVSDWAQTKTREPYMNIPTQTLPLYFWYKEKGQEKSYKYNPGDQEAQNKYYYSIAWDTGLFCSKVLLAYKISTDPAGKTVIAGTPIIPLRYNPQEDDGFGNEVYLTSILSGRYNKPSYTTDYQFNNVPLYIAFYGYYSYLKIYSNDKNIMKSYMFVVKCKAIKPLTQTTAQNYYPILDADFVFGKLPWDEYLSTEIKKFWYPTAEKQEGIINAIVESGPYVPKLSNMTYSTWSLMYNYKFFFKWGGPHVTDPKVEDPCTRNKYPVPDTMQPTVQIVNPEKNKVESILHDWDFRRGFITNTALKRMSENLPSETSLSSDDSESPAKKRKITKEVPCHQESQEKIQNCLLSLCEENTCQETPENLQQLIKQQQQEQHKLKRNILKLLTHLKKGQRCVELQTGLLE

SEQ ID NO: 4670 - protein, 125 aa, Gammatorquevirus sp.; identical to SEQ ID NO: 4205

SEQ ID NO: 4671 - protein, 120 aa, Gammatorquevirus sp.; identical to SEQ ID NO: 4206

SEQ ID NO: 4672 - DNA, 2551 bp, Gammatorquevirus sp.
aaattcggcgctcgcgcgcgctgcgccgaggtctaggggcaactcgggctagggcagtctagcggaacgggcaagaaacttaaaatatatttgttttctagatgctgtcacacaaagactttgccagaaaaactaaatacaatattgatacccaaaatcaaatatggatgtctggcattgctgactctcatgacacttggtgtgattgtgatactccattcgcgcatcttctagcaagtatttttccacctggccacaaagatagaaattctactataaaccaaatactatacagagactataaacaaaaatgcctttctggtggcgccgcagacaaagatactggagacccagaagattctggaaaaataaaacaagaaaatacaacagaagaagatggcctcgcaggcgcagaagaagaactcgcagaactactcgccgccgcagaagaaggagaaaatacaaggtaaaaagaaaaagacaaactttaccagtaagacaatggcaacctgataaaattgttaaatgtaaaattaaaggagtagatgtactagttttaggtggggagggtaaacagcttgtatgttatactaatgtaaaagatgcatggacaccacctaaagcaccagggggtggagggtttggctgtcagcaatatagcttaagctggttatatgaacaatatgtttttagaaacaatatatggacaaagagtaacataggattagacctttgtagatacttgcattgtagacttacattttatagacacccagacacagactttattatatcctatgaaagacaaccaccatttgacatagacaaatggacttatcctagctgtcacccaaaaaacttgctactaggaaaacacaaaatattgttattaagcaaagcaactaaaccaaatggaaaactaaccaaaagaattttaattaaaccacccaagcaaatgctaaccaaatggttctttcaagaacactttgcacatgcaggattatttttaattaaagctgcagcatgcaacttcagatacagccacttaggctgctgtaacaccaacagaattactactctattttatttaaacccaggcttttaccaacaaggtaactggtctgcacacacctctacaggttatcagccatatttaacagtaccaaaagaactatatttttggagcaaagacaacaaacccactaaatatacaaagccagaaacttatgatagatcaattgactattccacaggctggtttaaaaaagacatattatctgctgttaaagtaaccacagacgaagtgggaaaaacaccaactgccagtactccagtaaacatatgcaggtacaatcctgcagtagacagtggcaaaggcaacaccatatggttagtctccactttaacaaataactaccataaaccaacaagtgacaaatatattattatttcaggcctgcctttatatgaaatgctatatggctttttaagctttgtgcaaatgattaaaaagacacctcagtttttacaaacacacatactagccatagaatcaccagcactcaaaccttattcacaaataggagcagaaggcccaataatacctctagacaacacctttgtaaatggacaagcaccatacaatgaagtactaactaccagtatgaaagctaactggtggccaaatgtatataatcaactacaaatattaaattttatagtagagagtggaggctatgtaccaaagtatagccaaacaaaagaaagtacatgggaattacaatatatgtacaattttctttttaagtggggaggtccagaaatttcagaacagcctgttgcagatccaacattacaggggacatatgaagtacccgatactttcacaggaacaatacaaattagggacccagctaaacaaagtgcaatgtcaatcctccatccctgggacatcagacatggaatgtttacaaaaacagctcttaaaagaatgcaatcaaacatctcaactgattcaactttccaagcagatacagaagaagttcccaggaaaaaaaagaaagttacaggtccccagatgtcagtcccacaagaagagcaagaagagatccagagatgtctccactcactcttcgaaagcgatacctaccaagaaacggaggacccacaaaaaatcaaagacctcatcaagcagcagcacctcaagcagagagagctcaagtacaacatcctcagactcatctcagacctcaaagagcagcaaaacatcctgaaacttcaaacaggctatgtcacttaaccagatttaaaaaaggttttgaatgggacactgaaagacaactagcacatgcatttaacagaccccccagactttttaaagaagacccacctttctatccatggctaccccgctttgaacccattgtaaactttcaccttaattataaattctaggcctacaactttcacttagtggtgtatgtttatataagtctcacccccaaaaaaataataaaattgtaaaaaaaaaaaaaaaaataaaaaattgcaa

SEQ ID NO: 4673 - protein, 662 aa, Gammatorquevirus sp.
MPFWWRRRQRYWRPRRFWKNKTRKYNRRRWPRRRRRRTRRTTRRRRRRRKYKVKRKRQTLPVRQWQPDKIVKCKIKGVDVLVLGGEGKQLVCYTNVKDAWTPPKAPGGGGFGCQQYSLSWLYEQYVFRNNIWTKSNIGLDLCRYLHCRLTFYRHPDTDFIISYERQPPFDIDKWTYPSCHPKNLLLGKHKILLLSKATKPNGKLTKRILIKPPKQMLTKWFFQEHFAHAGLFLIKAAACNFRYSHLGCCNTNRITTLFYLNPGFYQQGNWSAHTSTGYQPYLTVPKELYFWSKDNKPTKYTKPETYDRSIDYSTGWFKKDILSAVKVTTDEVGKTPTASTPVNICRYNPAVDSGKGNTIWLVSTLTNNYHKPTSDKYIIISGLPLYEMLYGFLSFVQMIKKTPQFLQTHILAIESPALKPYSQIGAEGPIIPLDNTFVNGQAPYNEVLTTSMKANWWPNVYNQLQILNFIVESGGYVPKYSQTKESTWELQYMYNFLFKWGGPEISEQPVADPTLQGTYEVPDTFTGTIQIRDPAKQSAMSILHPWDIRHGMFTKTALKRMQSNISTDSTFQADTEEVPRKKKKVTGPQMSVPQEEQEEIQRCLHSLFESDTYQETEDPQKIKDLIKQQHLKQRELKYNILRLISDLKEQQNILKLQTGYVT

SEQ ID NO: 4674 - protein, 122 aa, Gammatorquevirus sp.; identical to SEQ ID NO: 3332

SEQ ID NO: 4675 - protein, 112 aa, Gammatorquevirus sp.; identical to SEQ ID NO: 969

SEQ ID NO: 4676 - DNA, 2550 bp, Gammatorquevirus sp.
aaaataaaaaattgcaaaaattcggcgctcgcgcgggggcaattcgggctagggcagtctagcggaacgggcaagaaacttaaaatatactttttattttagatgtccaaaatacaagcaaaagacttctttactccaacaccgtataatcaggatacgaagaatcaaatttggatgtctcaaattgctgattctcacgataatatctgcagttgtaaccatccctttgctcatctcattgccaatatctttcctgtgggtcacaaagatcgtgatctcacaattaacaaaattcttttaagagattacagagaaaaatgcctttctggtgggccagaaggcgcaagccatggtatggcagatggaggtaccgccgcaacaagtactacaggcgcagaaaaaagccaagaagaagaagacttcccagaagacgaggtagacgctttactcgccgccgccatagaagaaggcgcaaggtaagaagaaaacttaaaaaaattaatatacaacaatggcaaccagatagaattaaaaaatgtaagattaaaggatactcctgcctagtactaggcagtgaaggcagacaaatgtactgttatactaatgaagcctctgaatacttacaacctaaagctccaggagggggaggttttggaacagaagttttttctttaaaatggctataccaagaatggttagctcacaacaacatatggactgccagtaatgaaaatactgatctttgcagatatacaggcactaaaatcacagtatacagacacccaactgtagactttattttctcctttgacagaatgccaccatttaatattaataaatttacctacccagaattacaaccacaaaacatgctactccacaaacataaaaaaattattttaagcagaagaactaatcctaaaggaaaaattaaacacacatttaaaataggccctccaaagcaaatggtaactaaatggttttttcaaagagactttgcacctgcacatctctttagaatatctgctacagcagccacttttgaataccctagatatggaaagggcaatgccagtaacatactaacagtacctgcattaaacacttttttttttgcaaacagtgactgggcacaaacaaaagcaggaccatacacaaacatacatacagcccctgcaaaatacttttttaaatatagagatagcagaggcaatgaaattaaaggccaatatacaaaacctacaaagcctaccacggaaggttactacgaatccatagactacagcacaggtattttccaaacaggaatgctacaagcatttttcattagttcacaaagtcatgaagccacttcacaggcagcattacctgttatttacttaagatacaatccacatgaagatacaggccatggtaatgaagtttatttaacctctgttttcaatgggcaatacaacaagccaggtgcaactgcacctgacttgcaatttaacaatgtccctctttggatggccttttggggatactacaactacctactaataagtacagctaataaaggcctatacttaacacatatgtttgtagtaaaaagcccagcactaaaaccattatcacaagctacagaccaatcacactatccaatactagaccaagattttatactaggtaaactaccatggggtgaatacctgtcaaaaaatgaaaaaaaactatggtaccctacagcacaaaaacaaacacaaattataaatcaaatagttagcactggcccttatgttcctaaactaaacaatcagccagacagcacatgggaattaccttacaaatatatttcttattttaagtggggaggaccacaagttcaagacccaaatgttgaagacccaacaagcagaaacaaatacaatgtccccgatacagtccaacaatcagtacaaatcgctgacccgtcaaaattacacccagaaaccattttccatgactgggactacagaaggggtattattacacaaacagctattaaaagaatgtcagaaaacctcgaaattgattcaattatctcatctgatgactcagaatcgccacccaagaaaagaaaagtcaccaaggaactcccatgcatcaaccaaaaagagaaaaaaatcaaggactgtctcctctcgctctgcgaagagcctacctgccaagaaaccccacaaacacttcagcagcacatcgagcagcagcagcagcagcagcacaagctcagaaaaaacatcttgtacctcctaaccagcttaaagaaaacacagagacacatggagctacaaacaggaatattagactaactagatttaaacctggctttgaagaacaaactgaaaaagaactatctataattttcaaaagaccaccaagaacctacaaagaagacgcccctttttacccctggcttccaattgaacccaaagttaactttaacctcaactataatttctaggccaacaatgtacacttagtaaaacatgtttaataaagtttgcacccaaaaaaaaaaaaaaaaaaaaa

SEQ ID NO: 4677 - protein, 670 aa, Gammatorquevirus sp.; identical to SEQ ID NO: 4597

SEQ ID NO: 4678 - protein, 125 aa, Gammatorquevirus sp.; identical to SEQ ID NO: 3524

SEQ ID NO: 4679 - protein, 120 aa, Gammatorquevirus sp.; identical to SEQ ID NO: 3525

SEQ ID NO: 4680 - DNA, 2550 bp, Gammatorquevirus sp.
aattcgggctagggcagtctagcggaacgggcaagaaacttaaaactatgcttgttttacagatgcaaaatattactgcaagagacttttacagaccaactccattcaatactgatacaaaaaatcagatatggatgtctcaaatatctgattcccatgacaatttctgcaactgctggcatccttttgctcacctgcttgcttctatttttcctcctggccataaggatcgtgatcttaccattaatcaaatcctcaaaagagattacaaagaactatgccattctggtggaggcgcagaaaaaagtggtggagaggcaggagaaggcccttctacaagagaagaaaatacaacaaatataaaagaagaagaagatttaccagaagacgagctggcagaacttataagcgccgcagaagacgctcaaaaaaggtaagaagaaaaaagaaattaattaacattaaacaatggcaaccagagactattagaaaatgtaaaattaaaggaattggtgtgcatgtactaggagtgcaaggaactcaatttagatgctatacagaccacaaacaggactatactgtatccaaaggctatggagggggtggttttggtgtagaaaaatttacattacaatatttataccaagaaaacaaagctggaaataatatatggacacaaagcaatgtaatgcttgacctagtaagatacacaggttgtgaatttagattttggagacaccccaaaatagattttgttggcaaatacagcagaagctatcctatgaaccttgttaaatatgcctatgctgaaactcatccacaacaaatactactatctaaacacaagttcattataccaagtttagctacacaacctaaaggaaaaagatatgtaaaggttaaaattaagccaccaagacaaatgtccaccaaatggttctttcaagaatctagtgcacctacaggattagttcaactacaaacagcagcctgtgacttaagatatgcacacctaggctgctgtaatcaaaaccagctagctactttcctatgcttaaacacagacttttatcaatgggctggctggggaaacatgcacaacccacatgtacccacaagcagccaatggtatgaaccatataatagagcacaagatatcactctggtagaagatgttaaaggtaacaaaatagccattgaaacaacatctcaaaattataatgaatcaattagtattcaaaaaggttggtggcaacccaaattattatcagctgtaaaaatacttgaaccacaagaaagaagtattccagttagagttatgagatacaatccaacaagagatacaggagttggaactgcagtatggctagtaaatgtagtgaatgaatcctacaatccaccaaaaacagacttagatttatacttagaaggcctaccactatggcaactactatttggatttacagattgggttagaaaagcaaaaccagaccctacatttttaagtacctactacttatgctttaaaacctcagcactagagtctcaaccaggcacaaataaaatagttattccaatagactactcttttgttaaaggaaccggaccttttggaactgccacaacagaataccaaaaatcacattggtatcccacactaacacaccaatatgaatgcataaatgcaattgttcaaacaggtccatttatgcctagactagaaaatcaaactgctagtacttgggaattatactcaaactacaaattttactttaagtttggaggtgcagaaatgccagatccccaaacaacagatccaacaaagcaaggccaatatgatgttcccgataagctcacaaagagaatacaaattgctaacccgacaaaacaaatcccaggaagcattttacaccactgggactacagaagaggaattattacaagctcagcttggaaaagaatgtgcgaaaacgcagaaactgattcagatatctcaatttttacagaacccaaaaagaaaaagaaaaagacagagtacacaaatgctctacagcccacaacacaagaagcacaagaagtccagagctgtctcctctcactctacgaagaaaataccttccaagaagaaacacaaacactcaccacacaacaactcattctccagcagcagcagcagcagctcagaatcaaagacaacctcctcaagctcatcaaccacctaaagaacaagcaaagactactacaactacagtcaggacttctagactaactagatttgcaccaggacatgaatgggaaactgaactacaagtagcacaagcatttaacagaccccctagactgtttaaagaagacacccccttttatccatggctgcccaaatttgaacccatagttaactttcaccttaattttaagttctaggccgacactgttcacttagcggtgtatgtttatataagttacacccccaaaaaaattgtaaaactgtaaaataaaaaaaaaataaaaaattgcaaaaattcggcgctcgcgcgcgctgcgcgcgcg

SEQ ID NO: 4681 - protein, 663 aa, Gammatorquevirus sp.
MPFWWRRRKKWWRGRRRPFYKRRKYNKYKRRRRFTRRRAGRTYKRRRRRSKKVRRKKKLINIKQWQPETIRKCKIKGIGVHVLGVQGTQFRCYTDHKQDYTVSKGYGGGGFGVEKFTLQYLYQENKAGNNIWTQSNVMLDLVRYTGCEFRFWRHPKIDFVGKYSRSYPMNLVKYAYAETHPQQILLSKHKFIIPSLATQPKGKRYVKVKIKPPRQMSTKWFFQESSAPTGLVQLQTAACDLRYAHLGCCNQNQLATFLCLNTDFYQWAGWGNMHNPHVPTSSQWYEPYNRAQDITLVEDVKGNKIAIETTSQNYNESISIQKGWWQPKLLSAVKILEPQERSIPVRVMRYNPTRDTGVGTAVWLVNVVNESYNPPKTDLDLYLEGLPLWQLLFGFTDWVRKAKPDPTFLSTYYLCFKTSALESQPGTNKIVIPIDYSFVKGTGPFGTATTEYQKSHWYPTLTHQYECINAIVQTGPFMPRLENQTASTWELYSNYKFYFKFGGAEMPDPQTTDPTKQGQYDVPDKLTKRIQIANPTKQIPGSILHHWDYRRGIITSSAWKRMCENAETDSDISIFTEPKKKKKKTEYTNALQPTTQEAQEVQSCLLSLYEENTFQEETQTLTTQQLILQQQQQQLRIKDNLLKLINHLKNKQRLLQLQSGLLD

SEQ ID NO: 4682 - protein, 129 aa, Gammatorquevirus sp.
MLVLQMQNITARDFYRPTPFNTDTKNQIWMSQISDSHDNFCNCWHPFAHLLASIFPPGHKDRDLTINQILKRDYKELCHSGGGAEKSGGEAGEGPSTREENTTNIKEEEDLPEDELAELISAAEDAQKR

SEQ ID NO: 4683 - protein, 112 aa, Gammatorquevirus sp.
LSPLTLRRKYLPRRNTNTHHTTTHSPAAAAAAQNQRQPPQAHQPPKEQAKTTTTTVRTSRLTRFAPGHEWETELQVAQAFNRPPRLFKEDTPFYPWLPKFEPIVNFHLNFKF

SEQ ID NO: 4684 - DNA, 2548 bp, Betatorquevirus sp.
gctctatgtggaggaaaccatggtactcacccagacaacaagaacaaaattggcttaatggtatttagcaaacccacgacaatttttgcagctgcggagacacttggcttcatcttttatactgcattaacaaagattctccattcagaaagcccctaaaggatattaaaaatatacaatgcctacttattggaaaagaagacgtgccaactacttcaaaagaagaagacgaccctggttttctacctggagagctagacgcacttttcgacgaaagttctacaaaaagagataccgaagacgccgatacaaggtaaaaaaaaagaaacattatcgtaaaagacaaaaaataattataaaacaatttaatcctaaatgtatgagaaaatgcaaaataattggaactaaatgcactattcaaggtagccctttaagatgccaccacaactttatacaatactataacagtaaagtacctgaaaaatatccaggaggaggtggatggagtcaactaatatttacactagattctttatatgatgactttgaaaaaatgcaaaatatatggactgcttcaaactgtactttacctcttgctaaatataaaggttgtactatgaaattttatcaaacaaattatattgattacattgttatatatgatacttgttggcctatggtagacacatacttatcacacccagatgccgcaccatctatgatgcacttaaaaaaaaataaaatatgtatacctagcagacaaacacaactaagaaaaaaaccatacaaaaaggtttttatacaacctccttcacaaatgtacaataaatggtattttcaaaaagaaatatgtaaaacaccattactaatgattacaacaacagcaacatcatttacatttccatactgctcaccaaaagcagaaaacaataacatatccattcactttatagacccaacaacctttagaaacttaaactttcaaaactacccaataacacaaggctattggtgtaaacaagcaaaacttgaacatgaagacagagaattacctatgtacttatatgccataagaaacccagaaagcctaatacaacagtcaaaaataaacaaaaacaatgtagacaaattaggcataataccactatgtaacagtaacacatttcaactaggacaagaagtaatattaggaaccacacaaaacaatccaaaacattggggaaacccattctatcactcaattattgatgaagacagttatactatatatatctcattaatgactccagcagaacttcacaatctagatgcaacaccatcaaaagaatactatgtaacaaagctaacacaaccactagtacatacattaagatataaccctgaaacagacaaaggattaaaaaacaaagcatggatattaaaaacaaatgagtacaataacacaaatgaaccagaaaacataaatttacaaatagaaggctttccactatatgtactcttttggggatggacagactgggttaaaaaaacaggtttaattaataatcttgatgataatggaattgttgtatttcaaacagaccaatttaatgaacagttaccactgtatattccaatagactttgactttttacatggctatgacccttatgttgaacatagttatgacggacaaccagcattaccttctagttacagtcaaaaacattggtaccctaaactaaaatttcaagaccaaagcatagaaaaaatttgtatgtccggtcctggttgtcctagactactaaataaagaatatatgcaagcatttgtaaaatacaaatttcactttacttggggaggctgtcctaaacaattagaaaaagcatgtaatccttgttcacagccaacatggaccacgcccgataacttccatggacgacttgaaatccagaacccaaacaccaatccacttacagaacttttcagctgggactgggacggtgactatgttacaacaggggctatcgaaagaatccagacatacacaaaaactgataaatcatcttttatctcaacagcaaacaaaaacaacaccaaagcagcaatacagaaggaacaaaaagcgacacaagaggaggaggagaagaaactcctcaaccagctccagctcctccaacaacagcgacaacaactccacagcctcctgctcaacagaataattataaaataaaaggctgtaaaataaaagcatacctatttcctcctaaaaaaccaaaagttagaaaactaacacccagagaacaagaagaagaaaacctaatagccgctatatttcacagacctcctagaaaattttttggagatactcccatatatccatggttaccccctgaaccttatgtaaactttgaattaaactacaaaaaataaacaaggccaacaatattcacttagtggtgtcagtttatttaactttaacttatataaacatccaccgcctccctaaaattcaggcgccaaaattcaaaagggggctccgcccccttacacccccaagggggctccg

SEQ ID NO: 4685 - protein, 677 aa, Betatorquevirus sp.
MPTYWKRRRANYFKRRRRPWFSTWRARRTFRRKFYKKRYRRRRYKVKKKKHYRKRQKIIIKQFNPKCMRKCKIIGTKCTIQGSPLRCHHNFIQYYNSKVPEKYPGGGGWSQLIFTLDSLYDDFEKMQNIWTASNCTLPLAKYKGCTMKFYQTNYIDYIVIYDTCWPMVDTYLSHPDAAPSMMHLKKNKICIPSRQTQLRKKPYKKVFIQPPSQMYNKWYFQKEICKTPLLMITTTATSFTFPYCSPKAENNNISIHFIDPTTFRNLNFQNYPITQGYWCKQAKLEHEDRELPMYLYAIRNPESLIQQSKINKNNVDKLGIIPLCNSNTFQLGQEVILGTTQNNPKHWGNPFYHSIIDEDSYTIYISLMTPAELHNLDATPSKEYYVTKLTQPLVHTLRYNPETDKGLKNKAWILKTNEYNNTNEPENINLQIEGFPLYVLFWGWTDWVKKTGLINNLDDNGIVVFQTDQFNEQLPLYIPIDFDFLHGYDPYVEHSYDGQPALPSSYSQKHWYPKLKFQDQSIEKICMSGPGCPRLLNKEYMQAFVKYKFHFTWGGCPKQLEKACNPCSQPTWTTPDNFHGRLEIQNPNTNPLTELFSWDWDGDYVTTGAIERIQTYTKTDKSSFISTANKNNTKAAIQKEQKATQEEEEKKLLNQLQLLQQQRQQLHSLLLNRIIIK

SEQ ID NO: 4686 - DNA, 2547 bp, Gammatorquevirus sp.
gcgctcgcgcgcgtgagtgaaaccaccgaggtctaggggcaattcgggctagggcagtctagcggaatgggcaagaaacttaaaataatatttcttttacagatgagcaaattctacaaaccagctacatacaatggagacaccagacaacaaatgtggatgtctaccatttctgattttcatgattgtttttgcaaatgctggcatcctttaactcatgcactagattgtatttttcctgaaggccacaaagacagatatcaaacaattgacagcattatacaaagagacctacaatgccattctggtggagacggagaagaaagccatggtatggcagatggaggtaccgctacaatagaagatataaaaagagaagaagaccatatagaagacgcagacctagaaaacctactcgccgccgtcgaagaagaagacgcaaggtaagaagaaaaaaaatacaaaaaattactcttaaacaatggcaaccagaaagcattcataaatgtaaaataactggcttttctactttagtacttggtgctgaaggtacccaatacttatgctggacaaatgaacttaaagaatatacccagcctaaagcacctggaggagggggggggtttggtagtgaactaatatccttagaatggctatatgatcaatggagagcacataactgcatatggacaaaatctaacaaaaacaaagacttagttagatatacaggaggcagcataacactgtttagacaccctaccacagactttgttttttcctacagtttgtcaccaccctttgaactcactaaatttacatacccagatatgcaagtacaaaacatgttacttagacctcacaaaagagtagtacttagtttactctctaagccatttggtagaagaaaaataaaaattaaatttaaaccaccaaaacttatgtcaactaaatggttttttcaatctgaatttgctgacaaaggccttgttttatttcaagctactgcagcaaacttcagatatccttctataggaccaaaagctcaaaaccaaatggttacactgtactatatagacccaggtttatataatcatccaagctgggcagcagcttccacacaagcatggaaaccattaggtacagcaactacttggaaattttacacaaagtcaaaaggaggagggacagacattattacaactatgccaccacccaatcctattaaaccttatactaatttatatcaaatgagtataagcagagaatatggctggtggtccaaacaagttttaaatgcatacaaatttgaaatagggtcagaagtagtagcaaacagaccaatatatttagccaggtacaacccaaatgaagactcaggagatggtaacctagtatatgcagtttctttactacaaagcaaatggacaccaccagcataccaaactgacttagctatagctggtcaaccactttggatggccttacatggactatatagcttttttaaatacacacttaaagacaaagcttttgatgaacactatgctatagtgttaaaaagcccagcaattcatcctgttacagtagcaaagcaagacttttactgtattgtagattttgattttattaatggacaattgccatgggaagaatatatatctcctcaaattgcagccacttggtaccccaaagctagattccaaacaacaactattaactcaatagtagaaacaggcccctttgtacccaaatactcacaagtagcagacagcacatggcaattaatatataaatataacttttattttaaatggggtggtccacaggcaccagatgagccagttgatgatcccaaaggcaaacatcactggcctgaacccgatacaatgcatgaaacaatacaaattggagaccctaaaaaacaaacagcccaaagtatcctacaccagtgggactttagaagggatatcattacaccaagagctcttaaaagaatgcaagaaaacctccaaactgatacatctttccaatctgatgaatcagaaccaccaaaaaagaaaaagaaaacaaccaaagaaatgccatacaagccactgcaagaaagcaaaatacacaaatgtctcctctcactctgcgaagaaagtacctgccaagaaacaccactcaacttccagcagctcatcgagcaccagcaccagcagcaaagacacctcaagcaaaacctcatccagctcctcactcacctgaaaaaacagcaaagatatttgagcctacaaacaggtcacctagagtaaaaagatttaaacctggttttgaaactgaaacagaatatcagcttgctattgcttttaaaagaccccctagaacctatgctacagaccctcctttttacccctggctacctataacccccaaagtacaatttaaccttaattactcctgctaggccaacaatgtacacttagtaaagcatgtttaataaagtttacacccaaaacaaatgtataaaaaaaaaaaaaaaaaaaaataaaaaattgcaaaaattcg

SEQ ID NO: 4687 - protein, 665 aa, Gammatorquevirus sp.
MPFWWRRRRKPWYGRWRYRYNRRYKKRRRPYRRRRPRKPTRRRRRRRRKVRRKKIQKITLKQWQPESIHKCKITGFSTLVLGAEGTQYLCWTNELKEYTQPKAPGGGGGFGSELISLEWLYDQWRAHNCIWTKSNKNKDLVRYTGGSITLFRHPTTDFVFSYSLSPPFELTKFTYPDMQVQNMLLRPHKRVVLSLLSKPFGRRKIKIKFKPPKLMSTKWFFQSEFADKGLVLFQATAANFRYPSIGPKAQNQMVTLYYIDPGLYNHPSWAAASTQAWKPLGTATTWKFYTKSKGGGTDIITTMPPPNPIKPYTNLYQMSISREYGWWSKQVLNAYKFEIGSEVVANRPIYLARYNPNEDSGDGNLVYAVSLLQSKWTPPAYQTDLAIAGQPLWMALHGLYSFFKYTLKDKAFDEHYAIVLKSPAIHPVTVAKQDFYCIVDFDFINGQLPWEEYISPQIAATWYPKARFQTTTINSIVETGPFVPKYSQVADSTWQLIYKYNFYFKWGGPQAPDEPVDDPKGKHHWPEPDTMHETIQIGDPKKQTAQSILHQWDFRRDIITPRALKRMQENLQTDTSFQSDESEPPKKKKKTTKEMPYKPLQESKIHKCLLSLCEESTCQETPLNFQQLIEHQHQQQRHLKQNLIQLLTHLKKQQRYLSLQTGHLE

SEQ ID NO: 4688 - protein, 126 aa, Gammatorquevirus sp.
MGKKLKIIFLLQMSKFYKPATYNGDTRQQMWMSTISDFHDCFCKCWHPLTHALDCIFPEGHKDRYQTIDSIIQRDLQCHSGGDGEESHGMADGGTATIEDIKREEDHIEDADLENLLAAVEEEDAR

SEQ ID NO: 4689 - protein, 109 aa, Gammatorquevirus sp.
MSPLTLRRKYLPRNTTQLPAAHRAPAPAAKTPQAKPHPAPHSPEKTAKIFEPTNRSPRVKRFKPGFETETEYQLAIAFKRPPRTYATDPPFYPWLPITPKVQFNLNYSC

SEQ ID NO: 4690 - DNA, 2546 bp, Gammatorquevirus sp.
taattgtacattagagaccatgtactatatgtctaggggcaactcgggctagggcagtctagcggaatgggcaagaaacttaaaaaagtttattattttaaaaacagatgcagaatatcagctcacaagacttctaccaagaaactcattttaatcccgagactaagactcaaatatggatgtctcaacttgctgattctcatgataatatctgcaactgctatcatccatttgctcaccttcttgctaccatatttcctcctggtcacacagaccgtgatcttaccattaatcaaatacttagtagagattacacagaaaaatgcctttctggtggagtagaagaaaaaagccatggttcgggagatggagataccgcaggcgccgctggaacctcaggagaaaaaagaaaagaagaagaagactacccagaagaagaactagacgctatactcgccgccgctatgcaagaaaacgcaaggtaagaagaaagcttaaaaaaattaagatacagcaatggcaacctgactctattagaaaatgtaaaattaaaggctactcatgcctaatactaggaggtgaaggaactcaaatgttttgctatacaaatacagccagtgactatccacaaccaaaagccccaggtggcggaggctttggctatgaagttataaccttaaaatggctgtaccaagagtttttaaaacataataatatctggactcgctctaatgaatacacagacttggttagatatactggaggtagaataactttctttgctcatccatacattgactttattatagcatatgacctacaacctccatttaacataaacaagtggtcatacccagaaattcagccacaaaacttactgctaagaaaacataaaagaatattacttagcagacaaagcaatccaagaggaagacacaaagtaacaattaaatttcatcctccaaaacaaatgacaactaaatggtttttccaaaaagacttttgcccctatggattaataaaactaacagcagctgcagcagacttttcatacccaattatagcacctaaagctcaaagtactatactaacaatatatgcattaaacacaaacttttatcaaaatagtgactgggcacatgtaaaaacaacagaaccttacatgaacatttcaacccaaaaactacccctttactttacatacaaagaaaaaggtgcagacaaagtctttaagtaccttccaacagacaacccaaccaaatactattattctgtttcatgggagaatggattatttaatcccaaagtactgctagcatataaaatatcaactgatgaacgaggcactgagataatagcaggtacacctataataccattaagatataacccacaagaagatgatggttttggaaatgaagtatatctttccagcatactaaatggcagatataacaaaccatcatacacaactgattatcaatttaacaatgtaccattgtacatagcattctatggctactataactatttaaaaatatacagtaaagataaaaacataatgaagtcttacatatttgtagttaaaagtaaagcaattaaacctatatctcagacaacagcacaaacatattatcccatactagacagtgactttgtttttggcaaactaccatgggatgaatacatgtctacagaggcaaaaaaactatggtatcctactgcagaaaaacaagaaggtataataaatagcatagtagaatctggcccatttgtaccaaagctaagcaacatgacatatagtacatggtctctaatgtacaattataaatttttttttaagtggggtggaccacatgtcacagatccaaaagttgaagacccttgcaccagaaacaaataccctgtacccgatacaatgcaacagggagtacagattgtcaacccagaaaaaaataaagttgaatccttactacatgactgggactttagaagggggttcgttacaaacacagctcttaaaagaatgtcagaaaacctcccatctgaaacatctctctcatctgatgattcagaatcacctgcaaagaagagaaagatctcaaaagaagtcccatgccagcaagaaagcaaagagaaaatccaagcttgtctcctctcactctgcgaaaaagatacctgccaagaaacaccacaaaacctccagcagctcatccagcagcagcagcaacagcagcagcaactcaaaagaaacatactcaagctcctcacacacctgaaaaaaggccaaagatgtgtggaactacaaacaggccttttagagtagaaccatttaaaccaggctttgaacaacaaacagaaatggaacttgcagcagctttttgcagacctccaagaaaatataaaaatgacccccctttttacccctggttaccaattaccccaaaagtagtgtttaacctaaacttcaaaggctaggccaacactgtacacttagtggagtttgtttaataaagtttgctcctaaacaaaataaaaaaaattta

SEQ ID NO: 4691 - protein, 667 aa, Gammatorquevirus sp.
MPFWWSRRKKPWFGRWRYRRRRWNLRRKKKRRRRLPRRRTRRYTRRRYARKRKVRRKLKKIKIQQWQPDSIRKCKIKGYSCLILGGEGTQMFCYTNTASDYPQPKAPGGGGFGYEVITLKWLYQEFLKHNNIWTRSNEYTDLVRYTGGRITFFAHPYIDFIIAYDLQPPFNINKWSYPEIQPQNLLLRKHKRILLSRQSNPRGRHKVTIKFHPPKQMTTKWFFQKDFCPYGLIKLTAAAADFSYPIIAPKAQSTILTIYALNTNFYQNSDWAHVKTTEPYMNISTQKLPLYFTYKEKGADKVFKYLPTDNPTKYYYSVSWENGLFNPKVLLAYKISTDERGTEIIAGTPIIPLRYNPQEDDGFGNEVYLSSILNGRYNKPSYTTDYQFNNVPLYIAFYGYYNYLKIYSKDKNIMKSYIFVVKSKAIKPISQTTAQTYYPILDSDFVFGKLPWDEYMSTEAKKLWYPTAEKQEGIINSIVESGPFVPKLSNMTYSTWSLMYNYKFFFKWGGPHVTDPKVEDPCTRNKYPVPDTMQQGVQIVNPEKNKVESLLHDWDFRRGFVTNTALKRMSENLPSETSLSSDDSESPAKKRKISKEVPCQQESKEKIQACLLSLCEKDTCQETPQNLQQLIQQQQQQQQQLKRNILKLLTHLKKGQRCVELQTGLLE

SEQ ID NO: 4692 - protein, 125 aa, Gammatorquevirus sp.
MQNISSQDFYQETHFNPETKTQIWMSQLADSHDNICNCYHPFAHLLATIFPPGHTDRDLTINQILSRDYTEKCLSGGVEEKSHGSGDGDTAGAAGTSGEKRKEEEDYPEEELDAILAAAMQENAR

SEQ ID NO: 4693 - protein, 120 aa, Gammatorquevirus sp.
MPARKQRENPSLSPLTLRKRYLPRNTTKPPAAHPAAAATAAATQKKHTQAPHTPEKRPKMCGTTNRPFRVEPFKPGFEQQTEMELAAAFCRPPRKYKNDPPFYPWLPITPKVVFNLNFKG

SEQ ID NO: 4694 - DNA, 2546 bp, Gammatorquevirus sp.
cgccggcgctcgcgcgccgcgcgtatgtgctaacacacgcaattcgggctagggcagtctagcggaacgggcaagaaacttaaaactatgcttgcttttagatgtccagattctacaaacacagcaactacaattcagacaccaaaaaccaactatggatgtcttcaattggagatacacatgatatgttttgtggatgtgatcaaccttttgctcacctgcttgataatatatttccagaaggccacattgatagaggtaaaaccatacaatcaattattcaaagagattttaaacaatgccattttggtggagaagaagacgaaagccatggtataccactgggtggaagcgccgctacagaaggccattctggaagaggagaaggaccaccagaagacgcagacgtagaccagcttttcgccgccgccgccgcctgcgtagaagaaatcgcaaggtaagaagaaaaaataagaaaatttttataactcaatggcaaccagacagtgttgttaactgtaaaattaaaggtgtaggaactattgtagcaggagcacatggcagtcaatacagatgctacactgataacaaagatgaatatactattcctaaagccccaggaggtggactaataggatatgaaacttattcattacaatacttatataatgaatggaaagcaagacacaatatctggacaagatcaaatgactataaagatctgtgcagatacatgcgtgcaaaattcaccttttttgctcatccaaccactgactttattatacaatatagtagacagccaccatttagactagaacctgatacatacatggacttacacccacagcaaatgcttttatctaaacacaaaagaacattacacagtatcaaatctaatcctaatggtaaaaaaaaactaaccttaacaataagacccccaaaactcatgcaaaacaaatggtattttcaagaaacatttgcacctgctcaactactatctatatcagcaacagcagcaaacttaggctactcactatatgcacaaaacactcaaagcccatgtataaccctatacagcttaaacacaggcttttatcaattacatgactggagtaacaataaaacaaggtacctaccctacagtgcataccctggatacaattttacaggccctaaaggcactgtgaaagtaggcaaaacaggtgactatccaacctctgttagtctagaaacaggattctttcaaccaaaagtactgcaagccactgaagtaactacagacagtggacaaaaaatacacaaccatccagtaactattagtagatacaacccttctgctgacacaggagaaggcaatgctatctggctagttgacacatttgccacaacaggctggactcaaccaagtccatccaactttcaaatagtaggagtacccctttatatagcatttttaggtataagagactacatactaagaactacccaagacaaaggtatatttacacacacaatctttgtatgtaaaagcaaagcaattaaactacttacaccacatgaacaaacagttttcccatttttagattatagtttcatagatggaaaactaccatataatgaacaactaaccctacaagccaaagcaaattggtaccccacagcagacaaacaaatagaaaccctaaacaactttgttacttgtggaaactttgttccaaagtacagtaatttaccttccagcacatggcaactaaactataaatatattttttattttaagtggggaggacccaagattacagactacacagtccaaaatccaaaagagcaaggaacctatgttatacccgataagctgttcaaaacaatacaagttgctaacccactcaaacaagcctataaagcaatgtttagagagtgggatatcagaaggggctgccttacaaaaacagctattaaaagaatgtcagaaaacctcagatctgatacatctatccaatctgatgactcagaacccgaaacaaagaaaaagaaaattacagctcaagtgcctgcctacaaccaagaagaggaggacatcaagagctgcttccagagcttattccaagaagaagcggagccacaaacagaagacatgcaccagctcatccagttccaccagcaacaacagctcaaactcaagcacaacatcatccagctcctaacagatttaaaacaaaaacagagacacctacaaatgcaaacaggcctactttaacaagattcaaaccaggatttgaacaacaaacagaatatgagctatcaataatattctgtagacccatgagaacctacaaagaagacctacccttttatccctaccttgtaccagaaccccgtgtaaactttaaccttaattacaaaggctaggccgtccctgtacacttagtaaagcatgtttatataagcagcacacttttaaataaataaataaaaaaaaaaaaaaaaacaaaaaaaaataaaaattcggcgctcgcgcgcgctgcgcgcgcgcgatcgccgtcacg

SEQ ID NO: 4695 - protein, 652 aa, Gammatorquevirus sp.
MPFWWRRRRKPWYTTGWKRRYRRPFWKRRRTTRRRRRRPAFRRRRRLRRRNRKVRRKNKKIFITQWQPDSVVNCKIKGVGTIVAGAHGSQYRCYTDNKDEYTIPKAPGGGLIGYETYSLQYLYNEWKARHNIWTRSNDYKDLCRYMRAKFTFFAHPTTDFIIQYSRQPPFRLEPDTYMDLHPQQMLLSKHKRTLHSIKSNPNGKKKLTLTIRPPKLMQNKWYFQETFAPAQLLSISATAANLGYSLYAQNTQSPCITLYSLNTGFYQLHDWSNNKTRYLPYSAYPGYNFTGPKGTVKVGKTGDYPTSVSLETGFFQPKVLQATEVTTDSGQKIHNHPVTISRYNPSADTGEGNAIWLVDTFATTGWTQPSPSNFQIVGVPLYIAFLGIRDYILRTTQDKGIFTHTIFVCKSKAIKLLTPHEQTVFPFLDYSFIDGKLPYNEQLTLQAKANWYPTADKQIETLNNFVTCGNFVPKYSNLPSSTWQLNYKYIFYFKWGGPKITDYTVQNPKEQGTYVIPDKLFKTIQVANPLKQAYKAMFREWDIRRGCLTKTAIKRMSENLRSDTSIQSDDSEPETKKKKITAQVPAYNQEEEDIKSCFQSLFQEEAEPQTEDMHQLIQFHQQQQLKLKHNIIQLLTDLKQKQRHLQMQTGLL

SEQ ID NO: 4696 - protein, 119 aa, Gammatorquevirus sp.
MSRFYKHSNYNSDTKNQLWMSSIGDTHDMFCGCDQPFAHLLDNIFPEGHIDRGKTIQSIIQRDFKQCHFGGEEDESHGIPLGGSAATEGHSGRGEGPPEDADVDQLFAAAAACVEEIAR

SEQ ID NO: 4697 - protein, 107 aa, Gammatorquevirus sp.
LLPELIPRRSGATNRRHAPAHPVPPATTAQTQAQHHPAPNRFKTKTETPTNANRPTLTRFKPGFEQQTEYELSIIFCRPMRTYKEDLPFYPYLVPEPRVNFNLNYKG

SEQ ID NO: 4698 - DNA, 2545 bp, Gammatorquevirus sp.
aaaaataaaaaattgcaaaaattcggcgctcgcgaggggcaattcgggctagggcagtctagcggaacgggcaagaaacttaaaactatatttgttttacagatgagcaagttttttaaaccaacaaaatacaacaatgaaactaaaaaccaactatggatgtccatgattgctgacagtcatgacatttgctgtgactgtcccacaccatttgctcacctactagattcaatatttccagaaggacacagagacagacacaaaccaattgactatattattaaaagagattggaaagaatgccattctggtggagaaggcgaagaaagccatggtggggacgctggagaagaaagagatataccacccgtcaaaaacgaagaagaagatttaacaacagaaggtacaaacgtagaagaactgctcgccgccgtcgccgccgcagaggcaaggtaagaaaaaagaaagctaaacttaccttgcaacaatggcaaccagacagaattgttttatgcaaaattaaaggctttggtgaacttgtcctaggagcagaaggaactcaatttcaatgctataccaatgaaaagtacaatctacctttaccactgtgtccagggggaggtggttttggggttgaaagatttacattagaatggctatacaaacagcatattttcagaaataacatttggacaaaaagtaactactggacagacctatgtagataccttagagtagtgttttacctatacagacaccctacacaaagctttatagtacaatacagcagacaatcaccatttaacatagacaaaactacataccccaactttcatcctctactaatgcttttaaaaaaacaccataaaatagtaccaagcctacaaagaaaaccaagaggtaaaccctatgttaaacttactataaaaccaccaaaacaaatgttaacaaagtggttttttcaaaaagaattttgtgaatatgatttatgccaactagcaggatcaataatatcattagactatcccagactaggatgctgcacagaaaacagagttataaccatatggtacataaatcctagcttttaccaaaactctgactgggcacaaactaaagacaacgcatatgaaccagttacaggaattgctgaaactaaatatacatttaaaggaggcaaaaatccagcagcaggttatactcctaactttgaaaaccctaaaaccaaggaaccaggcactaaatacaaatactacaacagtataaactgggacaaaggctggttttcagctcagatattatcttccactagctacacaaaaaatggtcagcagactttaccattgccattagctgtagctagatacaaccctgctgaagatgatggtaaaggcaatgaagtatggttaacatcagtagcaacaggacagtatgctaaaccacaggacgatatcctactttttaacaatacaccactatggctagtgttctggggatatacaaactttttacagaaaattaaaaacaagtcttttttttcactatacatgtttgtaattaaaagcccctacattaaacctggaaacacagtacaaacaaaaaacttttttccatttgtagatgttaaatttacagaaggcaaaaactcacatgacagctatcttacatacacagataaaaaactctggtacccaacagtgtggagacaattagacaccataaatgcaatagtagaatgtggaccatatgttcctaaattaggctttgatagacttagcacatgggaacttgcttacaaatacattttttcctttaagtggggtggaccactcctcacagaacaagaagttgcagatccaaaatctaaagacaagtatcctacacccgatacaatgcaagaaacaatacaaatctgcaacccaaaacaccaagatacaaataccattttccatgagtgggactacagaaggggatacattaccaacccagctattaaaagaatgtcagaaaacctcatcattgattcagatgtctcaacagattcagaaacttcacagaaaaagagaaagagagttactacagagctcagaaacccagaggaaaagatcaagaaaatcaaaaaatgtctcctctcactctgcgaagaagatatctgccaagaggaggaagagggctcggacctccaccagctcatccgcaagcagcagcagcagcagcagctcctcaagcacaacatcctaacactattaaaagacatgaaagcaaaacaaaagatgctacagcttcaaacgggagtactagaataaaacttactccctttaaacctggctttgaaagagatactgaagatgaattagctaaagcattttataggcctgctagactatttaaagaagacacccccttctatccatggttacctaaattcacaccccttgtaaacttccacttaaactttagaggctaggcatgcactgttcacttggtggagtttgtttaataaagtttgcaccccaaaaaaattataaaataaaaaaaaaaaaaa

SEQ ID NO: 4699 - protein, 671 aa, Gammatorquevirus sp.
LERMPFWWRRRRKPWWGRWRRKRYTTRQKRRRRFNNRRYKRRRTARRRRRRRGKVRKKKAKLTLQQWQPDRIVLCKIKGFGELVLGAEGTQFQCYTNEKYNLPLPLCPGGGGFGVERFTLEWLYKQHIFRNNIWTKSNYWTDLCRYLRVVFYLYRHPTQSFIVQYSRQSPFNIDKTTYPNFHPLLMLLKKHHKIVPSLQRKPRGKPYVKLTIKPPKQMLTKWFFQKEFCEYDLCQLAGSIISLDYPRLGCCTENRVITIWYINPSFYQNSDWAQTKDNAYEPVTGIAETKYTFKGGKNPAAGYTPNFENPKTKEPGTKYKYYNSINWDKGWFSAQILSSTSYTKNGQQTLPLPLAVARYNPAEDDGKGNEVWLTSVATGQYAKPQDDILLFNNTPLWLVFWGYTNFLQKIKNKSFFSLYMFVIKSPYIKPGNTVQTKNFFPFVDVKFTEGKNSHDSYLTYTDKKLWYPTVWRQLDTINAIVECGPYVPKLGFDRLSTWELAYKYIFSFKWGGPLLTEQEVADPKSKDKYPTPDTMQETIQICNPKHQDTNTIFHEWDYRRGYITNPAIKRMSENLIIDSDVSTDSETSQKKRKRVTTELRNPEEKIKKIKKCLLSLCEEDICQEEEEGSDLHQLIRKQQQQQQLLKHNILTLLKDMKAKQKMLQLQTGVLE

SEQ ID NO: 4700 - protein, 147 aa, Gammatorquevirus sp.
LQKFGAREGQFGLGQSSGTGKKLKTIFVLQMSKFFKPTKYNNETKNQLWMSMIADSHDICCDCPTPFAHLLDSIFPEGHRDRHKPIDYIIKRDWKECHSGGEGEESHGGDAGEERDIPPVKNEEEDLTTEGTNVEELLAAVAAAEAR

SEQ ID NO: 4701 - protein, 114 aa, Gammatorquevirus sp.; identical to SEQ ID NO: 3352

SEQ ID NO: 4702 - DNA, 2545 bp, Alphatorquevirus sp.
gtggtggagaaagcggtggacccgtggccgacttcgcagacgatggcctagacgatctcgtcgccgccctcgacgaagaagagtaaggaggcggaggaggtggaggagagggcgacccagacggagactgtacagacgcggcagacggtacagacgaaagcgaaagcgggctaagataactataagacaatggcagcccgccatgacgagacgctgttttataaggggttacatgcccgctctcatatgtggctggggggcttatgccagcaactacaccagccacttagaggacaaaataattaaaggaccgtacggtgggggacacgccacttttaggttctccctacaagtactgtacgaggagcacctaaaacatcacaactactggactagaagcaaccaggacctagagctggccctgtactatggctgcacaattaaattttacaggagcccagacacagactttatagtaacataccagagaaagtcccccctggggggcaacatactgacaggcccatcactacacccagcagaagccatgctgagcaaaaacaaaatactaatacccagcctgctaacaaaacccaagggaaaaaagactgtaaagattaacatagcacccccaactctctttgtacataaatggtactttcagaaagacatatgtgacctaacactgttcaacttgaacgttgttgcggctgacttgcggtttccgttctgctcaccacaaactgacaacgtttgcatcaccttccaggtgctagccgcagagtacaaccagttcctctctataactgaacctgcagctagtaaacaagcggaagagtcatttattaacaaattcttagaaaaagccattccagacaaccctgttagacatgcaaatatactaaacacatttagaacagaaggatgtatgtcacatccccaactaaaaaaatataatgcaaactcaaaaccactagacaactcaacatactttcacactccagacggcctatggggagatccaatatacatttacgaacagcatacacagggaacaacaacaatatcacaacaaactcctagtgaaataagaaagaaaatagcacaaaacatgtccagctactttaaaaaaataacagaagaaagtacaataataactaaaggctgcaaagcgcactgccacctaacaggcatattttcaccaccattcctaaacataggcagagtagcaagagagtttccaggcctatacaatgacattatatataacccatggacagacaaaggcaaaggcaacaaaatatggatggattcactaagtaaaggagacaacatatataaagaaggacaaagcatactattaatgcaagacatgccactatacatactactaaatggctatgtagactgggcaaaaaaagaaagaaacaactggggcctagccacacaatacagagtaatgctagtatgcccatacacataccctagactatatgtagaaacaaacccatggcacggatatgttatttattcagaatcatttggagcaggccaaatgccagacaaaaacccatacgtaccagtaacatggagaggaaagtggtacccccacatacttcaccaagagtcagtaataaatgacatagtaatgtcagggccttttgcaccaaaagacacaaagccagtaatgcagttaaacatgaaatactccttcagattcacatggggcggcaatcctatctccacacagattgttaaagacccctgcacccagcccacctttgaaatacccggtggcggtaacatccctcgcagagtacaagtcatcaatccgaaagtcctcggacccagctacagtttcagatcctttgacctcagacgtgacatgtttagcggcccgagtcttaaaagagtctcagaacaacaagagacttctgagtttttattctcaggtggcaaacgccccaggatcgacctacccaagtacgtcccgccagaagaagacttcagtatccaagagagacaacaaagagaacagaaaccgtggacgagcgaaagcgaaagcgaagcagaagcccaagaagagacgcaggcgggctcggtccgagagcagctccagcagcagctccaagagcagcttcaactccgaagagggctccagtgcctcttcgagcagctagtgagaacacagcagggagtccacgtagacccctgccttgcgtaggccccaagcagtggctgtttccagagagaaagcccaaaccccctcctacttccggggactgggccatggagtacctaatgtgtaaaataatgaacaggcctccccgcactcacctcacagacccccctttctacccttactgcaaaaacaattacaatgtaacctttcagcttaactacaaataaaaggcatcctctctgtgcaaggccgtgggagtttcacttgtcggtgtctacctctaaaggtcactaagcactccgagcgccagcgaggagtgcgacccttccccctgactcaacttcttcggagccgcgcgctacg

SEQ ID NO: 4703 - protein, 698 aa, Alphatorquevirus sp.
LYRRGRRYRRKRKRAKITIRQWQPAMTRRCFIRGYMPALICGWGAYASNYTSHLEDKIIKGPYGGGHATFRFSLQVLYEEHLKHHNYWTRSNQDLELALYYGCTIKFYRSPDTDFIVTYQRKSPLGGNILTGPSLHPAEAMLSKNKILIPSLLTKPKGKKTVKINIAPPTLFVHKWYFQKDICDLTLFNLNVVAADLRFPFCSPQTDNVCITFQVLAAEYNQFLSITEPAASKQAEESFINKFLEKAIPDNPVRHANILNTFRTEGCMSHPQLKKYNANSKPLDNSTYFHTPDGLWGDPIYIYEQHTQGTTTISQQTPSEIRKKIAQNMSSYFKKITEESTIITKGCKAHCHLTGIFSPPFLNIGRVAREFPGLYNDIIYNPWTDKGKGNKIWMDSLSKGDNIYKEGQSILLMQDMPLYILLNGYVDWAKKERNNWGLATQYRVMLVCPYTYPRLYVETNPWHGYVIYSESFGAGQMPDKNPYVPVTWRGKWYPHILHQESVINDIVMSGPFAPKDTKPVMQLNMKYSFRFTWGGNPISTQIVKDPCTQPTFEIPGGGNIPRRVQVINPKVLGPSYSFRSFDLRRDMFSGPSLKRVSEQQETSEFLFSGGKRPRIDLPKYVPPEEDFSIQERQQREQKPWTSESESEAEAQEETQAGSVREQLQQQLQEQLQLRRGLQCLFEQLVRTQQGVHVDPCLA

SEQ ID NO: 4704 - DNA, 2545 bp, Gammatorquevirus sp.
cgggagcccgaggtgagtgaaaccaccgaggtctaggggcaattcgggctcgggcagtctagcggaacgggcaagaaacttaaatataaccttattttacagatgcaaaacctgtctcacaaagacttttttaaaccaacaccttacaacacagataccaaaaatcaaatatggatgtcacaaattgctgactctcatgacaatatctgtcactgcaacagtccttttgggcacctgcttgcttctatatttcctcctggtcataaggatcgtgatcttacagttaatcaaatactacaaagagactacaaagcactatgcctttctggtggaggcggagaaacaagccatggtttcggagattcaagtacaaaactagaaaaagatttagaagaagaaaaagaagattccctagacggagaagatatagaaaaactactcgccgccgccgcagaagaaaggtaagaagaaaacttaaaaaaataactcttaaacaatggcagccagaaagcataaaaaaatgtaaaataataggcttttcatgccttgtactaggagccaatggaagacaaatgtactgttatacaaatgtagctgatcaatatacaatagcaaaagcacctgggggaggtgggtttgggtgtgaagttataaacttaaaatggctctatgatcagtatactgcacataataatatatggactaaatcaaatgaatacacagacttagtaagatacacaggctgtaccataactgtttttagacatgcatatgtagactttatatttcaatactcattacaaggcccatttacattaaacaaatacacatatccacaacttcaaccacaaaatgcattactctccaaacacaaaagaatcattctcagcagacaaaacgctccaaacaaaaaacaagctgttaaaattaaaataaaaccacctaaactaatgtccacaaaatggttttttcaaaaagaattttgtgactatgcactagtacaaatatgtgccacagcatgttcattttcatttccaagaatacaaccaaatgctcaaaacctcattattactttatatgctttaaatccaagtttttactttaacagtaattggctagccaatgcagcagaaggctatagaaatataaccacacaacactttccactgtattttgatcacaatataaaaggcatacaaacaccatatgaactaaatcctgacaacattccatcaacagtagaagaaccatataaaagcaacaaatacttatacacaacttcatacagatatggctttttttcaccacaagtaatgactgctaccaaagtatacacaaacaaacaatcaccagatactagtaaaatagcaaatttaccactcatagtacttagatacaatccaaacactgatgatggctatggcaatgaaatatacctaacaagcctacacaaaggtcactatgacaaaccaacagtaacacctgattacatgtttccaggagtccctctatggatggggctatatggctatggaaactatcttatacaatccagcaaggacaaaggattattaactacacacatgtttattttaaaatcaagatcactacatccaatatcacaagctacaaaagatgtatactacccaataattaatacagatatggcttttggtagactaccatatgatgaatacataacctctgcaaaaaaaaatgcatggtatccaacaggtgaaatgcaagatgatgctctaaacaacatagttatgacagggccatttcaacctagatttaataatataactaacagcacatgggaacttgactataaatacaaatttttttttaagtggggaggcccatacacacaggaccccgtggcagaagacccatgtaaaaaaggaaccttccctacactcaatacactccaacaaacaatacaaattaagaacccagaaaaacttagtccagaatcccttttacaccagtgggacttcagaaggggcattgttacagcaacagcttttaaaagaatgtcagaaaacctcgaaactgatacatctctcgaatctgatgactcagagacaccaaaaaaaaagagaaaagtcagcaaggagatgccatgcttcaaccaaaaggaagagaaaatcaaaaaatgtctcctctcactctgcgaagaacctacctgccaagaaaccccgcaaaacctccagcagctcatccagcagcagcaacagcagcagtaccagctcaagagaaacatctacaagctcctcaaacacctaaaacatggacaacaacaagtgcaactacaaacaggaattttagagtagaaccttttaaacctggatttgaatgggaaacagagtgtgaatgtgcaaaagcattttgcagaccacccagacattataaaaatgatcccccattttacccctggcttccacctgcacccaaagtaatttttaacctaaactttaaagactaggccaacaatgtacacttagtaaaggatgtttatataagtaacaccccaataaatggg

SEQ ID NO: 4705 - protein, 672 aa, Gammatorquevirus sp.
MPFWWRRRNKPWFRRFKYKTRKRFRRRKRRFPRRRRYRKTTRRRRRRKVRRKLKKITLKQWQPESIKKCKIIGFSCLVLGANGRQMYCYTNVADQYTIAKAPGGGGFGCEVINLKWLYDQYTAHNNIWTKSNEYTDLVRYTGCTITVFRHAYVDFIFQYSLQGPFTLNKYTYPQLQPQNALLSKHKRIILSRQNAPNKKQAVKIKIKPPKLMSTKWFFQKEFCDYALVQICATACSFSFPRIQPNAQNLIITLYALNPSFYFNSNWLANAAEGYRNITTQHFPLYFDHNIKGIQTPYELNPDNIPSTVEEPYKSNKYLYTTSYRYGFFSPQVMTATKVYTNKQSPDTSKIANLPLIVLRYNPNTDDGYGNEIYLTSLHKGHYDKPTVTPDYMFPGVPLWMGLYGYGNYLIQSSKDKGLLTTHMFILKSRSLHPISQATKDVYYPIINTDMAFGRLPYDEYITSAKKNAWYPTGEMQDDALNNIVMTGPFQPRFNNITNSTWELDYKYKFFFKWGGPYTQDPVAEDPCKKGTFPTLNTLQQTIQIKNPEKLSPESLLHQWDFRRGIVTATAFKRMSENLETDTSLESDDSETPKKKRKVSKEMPCFNQKEEKIKKCLLSLCEEPTCQETPQNLQQLIQQQQQQQYQLKRNIYKLLKHLKHGQQQVQLQTGILE

SEQ ID NO: 4706 - protein, 120 aa, Gammatorquevirus sp.
MQNLSHKDFFKPTPYNTDTKNQIWMSQIADSHDNICHCNSPFGHLLASIFPPGHKDRDLTVNQILQRDYKALCLSGGGGETSHGFGDSSTKLEKDLEEEKEDSLDGEDIEKLLAAAAEER

SEQ ID NO: 4707 - protein, 120 aa, Gammatorquevirus sp.
MLQPKGRENQKMSPLTLRRTYLPRNPAKPPAAHPAAATAAVPAQEKHLQAPQTPKTWTTTSATTNRNFRVEPFKPGFEWETECECAKAFCRPPRHYKNDPPFYPWLPPAPKVIFNLNFKD

SEQ ID NO: 4708 - DNA, 2544 bp, Gammatorquevirus sp.
cgctcgcgcgcggtgagtgaaaccaccgaggtctaggggcaattcgggctagggcagtctagcggaatgggcaagaaacttaaaataatatttcttttacagatgagcaaattctacaaaccagctacatacaatggagacaccagacaacaaatgtggatgtctaccatttctgattttcatgattgtttttgcaaatgctggcatcctttaactcatgcactagattgtatttttcctgaaggccacaaagacagatatcaaacaattgacagcattatacaaagagacctacaatgccattctggtggagacggagaagaaagccatggtatggcagatggaggtaccgctacaatagaagatataaaaagagaagaagaccatatagaagacgcagacctagaaaacctactcgccgccgtcgaagaagaagacgcaaggtaagaagaaaaaaaatacaaaaaattactcttaaacaatggcaaccagaaagcattcataaatgtaaaataactggcttttctactttagtacttggtgctgaaggtacccaatacttatgctggacaaatgaacttaaagaatatacccagcctaaagcacctggaggaggggggtttggtagtgaactaatatccttagaatggctatatgatcaatggagagcacataactgcatatggacaaaatctaacaaaaacaaagacttagttagatatacaggaggcagcataacactgtttagacaccctaccacagactttgttttttcctacagtttgtcaccaccctttgaactcactaaatttacatacccagatatgcaagtacaaaacatgttacttagacctcacaaaagagtagtacttagtttactctctaagccatttggtagaagaaaaataaaaattaaatttaaaccaccaaaacttatgtcaactaaatggttttttcaatctgaatttgctgacaaaggccttgttttatttcaagctactgcagcaaacttcagatatccttctataggaccaaaagctcaaaaccaaatggttacactgtactatatagacccaggtttatataatcatccaagctgggcagcagcttccacagaagcatggaaaccattaggtacagcaactacttggaaattttacacaaagtcaaaagcaggagggacagacattattacaactatgccaccagaaaaaattactccaccttattctaatttatatcaaatgagtataagcagagaatatggctggtggtccaaacaagttttaaatgcatacaaatttcaaatagggtcacaagtagtagcaaacagaccaatatatttagccaggtacaacccaaatgaagactcaggagatggtaacctagtatatgcagtttctttactacaaagcaaatggacaccaccagcataccaaactgacttagctatagctggtcaaccactttggatggccttacatggactatatagcttttttaaatacacacttaaagacaaagcttttgatgaacactatgctatagtgttaaaaagcccagcaattcatcctgttacagtagcaaagcaagacttttactgtattatagattttgattttattaatggacaattgccatgggaagaatatatatctcctcaaattgcagccacttggtaccccaaagctagattccaaacaacaactattaactcaatagtagaaacaggcccctttgtacccaaatactcacaagtagcagacagcacatggcaattaatatataaatataacttttattttaaatggggtggtccacaggcaccagatgagccagttgatgatcccaaaggcaaacatcactggcctgaacccgatacaatgcatgaaacaatacaaattggagaccctaaaaaacaaacagcccaaagtatcctacaccagtgggactttagaagggatatcattacaccaagagctcttaaaagaatgcaagaaaacctccaaactgatacatctttccaatctgatgaatcagaaccaccaaaaaagaaaaagaaaacaaccaaagaaatgccatacaagccactgcaagaaagcaaaatacacaaatgtctcctctcactctgcgaagaaagtacctgccaagaaacaccactcaacttccagcagctcatcgagcaccagcaccagcagcaaagacacctcaagcaaaacctcatccagctcctcactcacctgaaaaaacagcaaagatatttgagcctacaaacaggtcacctagagtaaaaagatttaaacctggttttgaaactgaaacagaatatcagcttgctattgcttttaaaagaccccctagaacctatgctacagaccctcctttttacccctggctacctataacccccaaagtacaatttaaccttaattactcctgctaggccaacaatgtacacttagtaaagcatgtttaataaagtttacacccaaaacaaatgtataaaaaaaaaaaaaaaaaaaataaaaaattgcaaaaattcgg

SEQ ID NO: 4709 - protein, 664 aa, Gammatorquevirus sp.
MPFWWRRRRKPWYGRWRYRYNRRYKKRRRPYRRRRPRKPTRRRRRRRRKVRRKKIQKITLKQWQPESIHKCKITGFSTLVLGAEGTQYLCWTNELKEYTQPKAPGGGGFGSELISLEWLYDQWRAHNCIWTKSNKNKDLVRYTGGSITLFRHPTTDFVFSYSLSPPFELTKFTYPDMQVQNMLLRPHKRVVLSLLSKPFGRRKIKIKFKPPKLMSTKWFFQSEFADKGLVLFQATAANFRYPSIGPKAQNQMVTLYYIDPGLYNHPSWAAASTEAWKPLGTATTWKFYTKSKAGGTDIITTMPPEKITPPYSNLYQMSISREYGWWSKQVLNAYKFQIGSQVVANRPIYLARYNPNEDSGDGNLVYAVSLLQSKWTPPAYQTDLAIAGQPLWMALHGLYSFFKYTLKDKAFDEHYAIVLKSPAIHPVTVAKQDFYCIIDFDFINGQLPWEEYISPQIAATWYPKARFQTTTINSIVETGPFVPKYSQVADSTWQLIYKYNFYFKWGGPQAPDEPVDDPKGKHHWPEPDTMHETIQIGDPKKQTAQSILHQWDFRRDIITPRALKRMQENLQTDTSFQSDESEPPKKKKKTTKEMPYKPLQESKIHKCLLSLCEESTCQETPLNFQQLIEHQHQQQRHLKQNLIQLLTHLKKQQRYLSLQTGHLE

SEQ ID NO: 4710 - protein, 126 aa, Gammatorquevirus sp.; identical to SEQ ID NO: 4688

SEQ ID NO: 4711 - protein, 109 aa, Gammatorquevirus sp.; identical to SEQ ID NO: 4689

SEQ ID NO: 4712 - DNA, 2544 bp, Gammatorquevirus sp.
cgcgcgcgcgagcgccgtcacgcgccggcggtctaggggcaattcgggctagggcagtctagcggaacgggcaagaaacttaaaacaatatttgttttacagatgtccagattctacaaagaagtaccatacaacaaagataccaaatgtcaaatgtggatgtctatgattagtgatggtcatgatattcactgtggatgttgtcaaccatttgcacacctactagacagcatttttccagagggacacgcagacagaaacaaaaccattgaacaaataatacaaagagatttacagctatgccattctggtggaacagaagaagaagaccatggtatcccacttggaggaagcgccgctacagaaagacccgctacagaaaatataaaagaagaagaagacctagacgccctacttatcgccgccgccgccgccgtagaagatacaaggtaaggagaaaaaaaaaaagaataactatacaacaatggcagccagacaaaatagttaaatgtaaaattataggatatggatacctggtggcaggaactgaaggaaaccaatttagatgttatacaaatgataaacataactatggacaaccaaaagctccaggcggtggcggttttggctgtgaacaatatacacttgaatatttatataaagaatgggaagctcatagatgcatatggactagatctaatgactacctagacctagtaagatacacaggctgcatattttatttttatagacatcctaaaacagactttatcatatggtatgacagacaaccaccatttaaatttacaactactacttacttagaaacacatccactatccatgttactaaaaagacaccataaagtaataagatctctagaacataacccaaaaagcaaaccatatgttaaagtaaaaataccaccaccaaaacaaatgataaccaaatggtttttccaaccagacttagcagatgtaccattatttaaactctgtggatctgccagcaactttggatactcactctatggacccaatacacaaagccccaacttaaccatatatgccttaaacacagatttctatgttatacacaattgggcagatgcaagcttaactagtggatatcaaccatactcaggtgtcgctacaaatattagatttaaatataaaataggcaacagaacaggtgaagtaggacctcctgcaaagaactatgaaacatccatttcatatgacaacggctggtttaggccagaaatattaaatgcatatgaagttcatcagggtgacacaaccatatacaacagaccagtgtcaataggcagatacaatcctgaagaagacaatggtaaaggcaatagaatatggctcacaagcattatagcaaacaaaggctgggccccacctactgacaaagatttaattataggtgaaattcctctatatatggcattttggggtttgtgggactatattgctcagtctagaaaaacagaagaatacttagcagtatcaatgtttgtagttaaatctgactacataaaaataattttaggaggcccacaccaaaaagtatggccaataatagactggtcctttatacaaggtaaaatgccatgggatgaatcccttactatacaagaaaagtccaaatggtaccctacatgctacaagcaaacccaaactataaacaattttgtagagtgtggaccatactgtccaaaatatgcaaacttacctgtttctacttggcaactaccttacaaatataaattttactttaaatggggtggaccccagacaggagagaacattgttcaagatcccaaagaccaagaaaaatatcccgttcccgatactttcacagaagcaatacaaatcagagacccgctcaggcaacacccaaaaacactccttagatcctgggacttcagaagggacattgttacaaaatcagctcttaaaagaatgcaagaaaacttatcaactgatgaatctgaacaatctgatttctcagaaacaccaaaaaagaaaaagaaagtcacaacagagatcccatgcagcgaccaagaagagaaggacctccaaacatgtctcctctcactctgcgaaaaagataccttcccagaagagacagaagacctcaagcagctcatctaccagcagtatcacaagcagcaacagctcaagaacaacctctacaagctcctcaaaaacctaaagaaaacccaagcacaccttcaaatgcaaacaggcatgcattaacccgctttaaaaaaggctttgaatgggacactgaactagaactagcttcagcatttaacagaccacccagactttttaaagaagactcccctttctacccctggttacccaaaccaacacctattgtaaactttcaccttaattacaaattctaggcctacactgttcacttagtggtatatgtttatataagtcacacccccaaaaaaattgtaaaataaaaaaaaaaaaaaaaaaataaaaaattgcaaaaattcggcgctcgcgcgcgctg

SEQ ID NO: 4713 - protein, 656 aa, Gammatorquevirus sp.; identical to SEQ ID NO: 1007

SEQ ID NO: 4714 - protein, 116 aa, Gammatorquevirus sp.; identical to SEQ ID NO: 1008

SEQ ID NO: 4715 - protein, 120 aa, Gammatorquevirus sp.; identical to SEQ ID NO: 1009

SEQ ID NO: 4716 - DNA, 2542 bp, Gammatorquevirus sp.
tgcaaaaattcggcgctcgcgcgcgctgcgcgctaggggcaattcgggctagggcagtctagcggaacgggcaagaaacttaaaacaatactttgtcttacagatgaacaacctttcagcaaatgacttttttactgcaaccacatttaataatgataccaaaaatcaactatggatgtccataattgctgattctcatgacagtatctgcaactgctggcatccttttgctcatatgcttgctagtatttttcctcctggccatcaagataggaataaaaccattgaagaaattctgcaaagagactttaaagaaaaacaatgccattctggtggaggaggcgccgcaaaccatggtatggcaggtggagaagaagacagaggtttaccagatataaaggcagaagaagaagaatacccaggagacgaggtagaaaaacttatcgccgccgcagaaagcgccgctacaaggtaagaagaaaaaagagaaaaattccagtaatgcaatggcagcctcaaagcattagaaaatgcaaaattaaaggacatggtactttagtattaggggctgaaggtactcaaatgtactgctacacaacagaaaaaatgaaatatgtacctccaaaagtaccatatgggggaggttttggagtagaaaaatatacactagactacttatatgaagaatatacttttacaaacaatatatggacagcttcaaacattttaaaagacctatgtagatttttacatgctagatttatattctttagacatccagacacagactttgtaatatcatacaacaaccaaccaccctttgatataaacaaatttacttttcctgcaacacatccacaccaaatgctattagataaacataagaaagttctaagaagccttgcaagcaaaccaaatggaaaatacagtataaaaattaatgttaaacctcccaaacaaatgataacaaaatggttttttactaaacaattttgtaaatatggcttactactactaaaagcttctgcagctaatcttagatacagccaccttagtgccactaatgaaaacatgttaataaacattatttcacttaacccttcattctacataaacaccaactgggctaaaaaagtttcagatacacaaggataccttccacaacaacacttaagtgagaacctatggtatgaagtgaaaacaggtaatactacccaaaaaataaaaatgtcacaggaagcatataaaacttatgcagccagtatagactacagcaaaggatggtttaacaataacttactaagagctattaaactctatagccccaaagaatcaactcccctaggcatgttaaacatgatatatggtagatacaatcccacaagagacaatggtaaaggtaataaaatttatattattagcacacttacagacacttggcacccaccttctacagacaaaatggtagtactagaagaaattcccctttggctaggactatatggttatatatcatacctacatacagtaaaacctgaagactggttactatcttcttgtgtagtcctccagtcagactatatatataactggggaattccaggaacaggcaaacaatggctacccatagacccagaatatgcagcaggaaaaaaaccatatgaccaagtcattacagaacaagaaaaaaaactatggttcccaacatataagtggcaacttaaaacacttaatgctattgtagaaagtggcccatttgtacctcagtataatgaagaaactagaagtacttgggaactaaaatatacttatcaattttactttaagtgggggggacctgaaacccctgaagctgaagttaaaaaccccaaagaattgggagactatgatgtccccgataaccaacttaaaacaatacaaattgtcaacccagcaaaacaaagtactgaatccattatacatccctgggacatcagaaggggcatcattaaagaaaaagctattaaaagaatgtgctctcacctcgaaactgacacagaatttgaacattctgcaggagagagcccacaaaaaaagaaacagagagtgggagcagctctcagaaacccccaagaagaaatccaagaagtgcaagcctgtctccaggcgctctgcgaaaaaagtacctcccaagaagaggagacacaaagcctccagcaactcatcaagcagcagcagcacaagcagcaacagctcaagtacaacatcctcaagctcctaatggaaatgaaagaaaagcaaaacatgctgagcctacaaacaggaatgtgggaatgagaaaatttcaaccaggatttgaatatgatacagaaaaagaactatctatagcatttaaaagacccatgagaacatttaaagatgatacccctttttatccctggttaccccctgaacccactgtaaactttcacctcaactttaatttctaggccaacaatgttcacttagtcactgatgtttaataaagtttgccccccccaagaaaaaaaaaaaaataaaaaat

SEQ ID NO: 4717 - protein, 664 aa, Gammatorquevirus sp.
MPFWWRRRRKPWYGRWRRRQRFTRYKGRRRRIPRRRGRKTYRRRRKRRYKVRRKKRKIPVMQWQPQSIRKCKIKGHGTLVLGAEGTQMYCYTTEKMKYVPPKVPYGGGFGVEKYTLDYLYEEYTFTNNIWTASNILKDLCRFLHARFIFFRHPDTDFVISYNNQPPFDINKFTFPATHPHQMLLDKHKKVLRSLASKPNGKYSIKINVKPPKQMITKWFFTKQFCKYGLLLLKASAANLRYSHLSATNENMLINIISLNPSFYINTNWAKKVSDTQGYLPQQHLSENLWYEVKTGNTTQKIKMSQEAYKTYAASIDYSKGWFNNNLLRAIKLYSPKESTPLGMLNMIYGRYNPTRDNGKGNKIYIISTLTDTWHPPSTDKMVVLEEIPLWLGLYGYISYLHTVKPEDWLLSSCVVLQSDYIYNWGIPGTGKQWLPIDPEYAAGKKPYDQVITEQEKKLWFPTYKWQLKTLNAIVESGPFVPQYNEETRSTWELKYTYQFYFKWGGPETPEAEVKNPKELGDYDVPDNQLKTIQIVNPAKQSTESIIHPWDIRRGIIKEKAIKRMCSHLETDTEFEHSAGESPQKKKQRVGAALRNPQEEIQEVQACLQALCEKSTSQEEETQSLQQLIKQQQHKQQQLKYNILKLLMEMKEKQNMLSLQTGMWE

SEQ ID NO: 4718 - protein, 123 aa, Gammatorquevirus sp.
MNNLSANDFFTATTFNNDTKNQLWMSIIADSHDSICNCWHPFAHMLASIFPPGHQDRNKTIEEILQRDFKEKQCHSGGGGAANHGMAGGEEDRGLPDIKAEEEEYPGDEVEKLIAAAESAATR

SEQ ID NO: 4719 - protein, 110 aa, Gammatorquevirus sp.
LSPGALRKKYLPRRGDTKPPATHQAAAAQAATAQVQHPQAPNGNERKAKHAEPTNRNVGMRKFQPGFEYDTEKELSIAFKRPMRTFKDDTPFYPWLPPEPTVNFHLNFNF

SEQ ID NO: 4720 - DNA, 2540 bp, Betatorquevirus sp.
cgggagccgaaggtgagtgaaaccaccgtagtctaggggcaattcgggctaggccagtctagcggaaagggcaagaaacttaaatatatttattttacagatgcaaaaaccactatacacagaaaaagcattaaaaaaccaatggattaaccacctagtttctgctcacgaccttgtttgcggctgccctgaaccacttcaacacacagtaaaagaaatcttgaaaaaagaaccagaaattaaaaaatgccttactacagaagaagatacccttaccgctggagacgccgtcgatggtttaagtcccggagacctcgatttgcttttcgcagacgatactggagaagatacagggtaagaaactcttataaaaaaagaaaacttactaaaataagcttaaaacaatttcaacctctaactattagaagaagctatataaaaggaatgtatccatgctttttaactaactctcacagactggaccataacatgactcaatttatagactctatagctccatatcattttaatggaggaggaggatttgctataactcaatttactcttgacggactttacgaactatttctaaaaggaatgaactggtggactcatagtaattgtaacttacctttagtaagatacaatggatgtagtattaagttttacaaagctgaaaactatgactatgtagctataattcacagatgtttacctttaaaagcaactaatgaattatatatgtcttcacaacctcaaataatgatgctaacaaaacactgtatacacataccttgtagaaaagctaacagaaacaaaaaaaactataaaaaagtatttgtaaaaccccctacacaatttacaaacaaatggatgtttcaggcagacatttgcaaacaaccactacttgtaatacaaacatgcatagcaagctttgatagaatgtttttagcagcagacgctcaaagcacaacaatgggttttatatctttaaacacacaatcatttttactacacaactggaattcaccaccaacaacaggatacaaaccacaagaaaaacaatacttatttggaacacaaaacggacaacacaaccctaacaaagaacatattaaaaatttaatatacttagggggcacaggacctgctaaaacaggcatacctataaccagcaaagaaggtttagacaaactacccacagaaaccgcaatgtggggaaatatatttgtaccacactattttagtggtgaaggatccgtttatatttcatcaaaaagtccttcagaaattaaaacttactacactacacaaaccacaaaaattacccaagacttagtagaaaacgttaactttattacaccaaaatcaactgccaattttattaactgtagatataatccccttgcagacaaaggcacaggaaacaaagtttacttagtatcaaattctagagatcaagaaccctgggcaccaccaacatcacctttactaataagacaagacttacctttatggataatactatggggatttgtagactgggaaaaaaaattagcagaaacatcacaaatagacactacaaaaattgtagtaatagaatccccctatattacaccaaaactagcaaaatatgttccactagaccaatgctttatagatggacacagcccacatataacagacatgacaaattatgatgaacaacactggtatcctaaagttgcatttcaatatgaaagtataacaaatatatgcaactcaggaccaggtacagctaaattaccaaaagaaacatcagcagaagctcactataaatacacttttcatttaaagttcggaggatgcccacctcctatggaaaaaatttgcaacccgaccaaccaagctgtgtatcccgtccccaataaccagccatcaacaccttcgttacagagtccaacaaacccaatacaaacctacttgtacgacttcgacgaaagacgtggacaaattacagcaaaagctgcaaaacgcctcaaaaaagactttgaaactgaaaaaactcttttacaaattacaggatcaagcccaatggacctcgaagcccacgtcgagacacagacatcagaacaggaggactcggaagaagaggaagagaccctccacctcaagctccagcgactccgaagaaagcaaaaattactccgacagcggatcctccagctgttagacacacaaaacttagaatgataaaatgtaactttagagtaaacatgtttggtgataaccctccaaacaggagattaacaccaaaagaatttgaagaagaattagaaaacagtaaaatatggaaacatagacctagacaatatttgtatgatatacctttctatgactttttaccacctacacctataatcccacgtattaattttgaccttggatggaaaaaataaaggcctgcatacttcaacttgaggtgtccatttattttagtttaaacttatataaacatccaccactctcccaaatacgcaggcgcaaaagggggctccggg

SEQ ID NO: 4721 - protein, 661 aa, Betatorquevirus sp.
MPYYRRRYPYRWRRRRWFKSRRPRFAFRRRYWRRYRVRNSYKKRKLTKISLKQFQPLTIRRSYIKGMYPCFLTNSHRLDHNMTQFIDSIAPYHFNGGGGFAITQFTLDGLYELFLKGMNWWTHSNCNLPLVRYNGCSIKFYKAENYDYVAIIHRCLPLKATNELYMSSQPQIMMLTKHCIHIPCRKANRNKKNYKKVFVKPPTQFTNKWMFQADICKQPLLVIQTCIASFDRMFLAADAQSTTMGFISLNTQSFLLHNWNSPPTTGYKPQEKQYLFGTQNGQHNPNKEHIKNLIYLGGTGPAKTGIPITSKEGLDKLPTETAMWGNIFVPHYFSGEGSVYISSKSPSEIKTYYTTQTTKITQDLVENVNFITPKSTANFINCRYNPLADKGTGNKVYLVSNSRDQEPWAPPTSPLLIRQDLPLWIILWGFVDWEKKLAETSQIDTTKIVVIESPYITPKLAKYVPLDQCFIDGHSPHITDMTNYDEQHWYPKVAFQYESITNICNSGPGTAKLPKETSAEAHYKYTFHLKFGGCPPPMEKICNPTNQAVYPVPNNQPSTPSLQSPTNPIQTYLYDFDERRGQITAKAAKRLKKDFETEKTLLQITGSSPMDLEAHVETQTSEQEDSEEEEETLHLKLQRLRRKQKLLRQRILQLLDTQNLE

SEQ ID NO: 4722 - protein, 85 aa, Betatorquevirus sp.
MQKPLYTEKALKNQWINHLVSAHDLVCGCPEPLQHTVKEILKKEPEIKKCLTTEEDTLTAGDAVDGLSPGDLDLLFADDTGEDTG

SEQ ID NO: 4723 - DNA, 2540 bp, Gammatorquevirus sp.
aaaaaattgcaaaaattcggcgctcgcgcgcgctgggggcaattcgggctagggcagtctagcggaacgggcaagaaacttaaaacaaacctttgttttacagatgcaaaacctctgctcttctgacttttttaaaacaactaactttaatccagaaactaaaactcaaatatggatgtctattattgctgatggacatgacactatctgcaactgctggcatccttttgctcacttgcttgctactatttttcctcctggccatcaagacagggatcttaccattaatcaaatacttgcaagagattaccttgaatcatgccgttctggtggagaagaaggaacaaaaactggtggggcagagcctacaggagaaaaagatacaacacatataaaagaagaaaaccaagaagaagaaactatagaagacgcccttatggccgccgccgccgccgccgcagaagaaccaaacgcaaggtaagaaagaagctacaaaaaataactattaaacaatggcaaccagactctatagtaaaatgtaaaattaaaggctttgatacacttgtagcaggagctgaaggtagacaaatgttttgctacacaaatgaaaaagccatttacactcagccaaaagcacctgggggaggaggttttggaataaaggtttacaatctacagtacttatttcaagaatggcttaaaaaaaataatatttggacaaagtcaaatgactataaagacttggtcagatttactggagcttcttttacattttttagaagtccaactacagactttgtgattcaatacagcagacagcctccatttatagtacaaaaagacacatacatgaactgtcacccacaagctttattactttcaaagaaccatagagttattttaagtaccaaaacaaaacccactggtaaaataaaaaccaaaataaaaataagaccaactaaacaaatgataactaaatggtttttccaagatgaatttagtacctttgatttactacaaatacaagcagcagctgcagactttacttatccacaatggggccctaacacacaaagcacaaatctaaccttttatgctttgaacacaaacttttaccacaacaccaactgggcttcagcacaccagggcacacaaggttacaaaccatactcaggttacagtgattctacagtacaatttcaatatcccaacacacaaggatctacttcaacatttaccacaaacacaaccacctatgacgactcaattagctatgaaacaggcatgtttgctaaacaagtattaaatgcaactaaaatattaggaacaaaaggatatgtacatgaaagaccaattactatagccagatataatccagacgaagacacaggtaaaggaaacattgtttggtttacctcagtaatagcagatacaggctgggacccaccaaaagactcagacttagttatcaaagatgtacccttatattttgctttatttggcttttggaacaccattattaaattaaaaggagacaaacaatacatgaagtatggcatgtttgttataaaatctactgcacttaaactagtaactaacacacaacaaaaagtgtttccactgttagactggtcatttatacaaggcaaaatgccatatgaagaatatctgttagacacagataaaaagttttggtacccaacagcatacaaacaacaagaaatcttaaatgccatagttgaatgtggacaatttatacctaagtatgcaaatttaaaatccagttcctggcaactaaatgttaaatacacattttattttaagtggggtggcccacatgtcacagatcaacttgcagccaatcctaaagacaaagaaaaataccccgttcccgatacagtctttcaagcagtacaaattgctgacccacaaaagcaagcatgcaaagacatgcttagagcctgggactacagaaggggcctcattacaagcacagctcttaaaagaatgtcagaaaacatccaatctgattcatctttccaatctgatgaaggagaaacaccaaaaaagaaaaagagaatcacaggagaagtcccatcagcacaagaaaagaatcaaaagatccagaaacatctcctctcactcttcgaagaaagtacctgccaagaagaggaggacctccacaagctcatccagcaccagcagcaacagcagtacaagctcaaacaaaacatcatccacctcctcatagacctgaaaaaacaacagagattcctacaactacaatcaggagtaaattaaccaggtttaaacctggatttgaatgggaaactgagtgtgaactagcacaagcatttagaagaccccctagactgttcaaagaagatacccctttttacccctggttacccacaattgtaccccgtgttaactttcaccttaactataaattctaggccgacactgttcacttagcggagtctgtttatataagtttacaccccaaaaaaattgtaacattaaaaaaaaaaaaaaaaaat

SEQ ID NO: 4724 - protein, 660 aa, Gammatorquevirus sp.
MPFWWRRRNKNWWGRAYRRKRYNTYKRRKPRRRNYRRRPYGRRRRRRRRTKRKVRKKLQKITIKQWQPDSIVKCKIKGFDTLVAGAEGRQMFCYTNEKAIYTQPKAPGGGGFGIKVYNLQYLFQEWLKKNNIWTKSNDYKDLVRFTGASFTFFRSPTTDFVIQYSRQPPFIVQKDTYMNCHPQALLLSKNHRVILSTKTKPTGKIKTKIKIRPTKQMITKWFFQDEFSTFDLLQIQAAAADFTYPQWGPNTQSTNLTFYALNTNFYHNTNWASAHQGTQGYKPYSGYSDSTVQFQYPNTQGSTSTFTTNTTTYDDSISYETGMFAKQVLNATKILGTKGYVHERPITIARYNPDEDTGKGNIVWFTSVIADTGWDPPKDSDLVIKDVPLYFALFGFWNTIIKLKGDKQYMKYGMFVIKSTALKLVTNTQQKVFPLLDWSFIQGKMPYEEYLLDTDKKFWYPTAYKQQEILNAIVECGQFIPKYANLKSSSWQLNVKYTFYFKWGGPHVTDQLAANPKDKEKYPVPDTVFQAVQIADPQKQACKDMLRAWDYRRGLITSTALKRMSENIQSDSSFQSDEGETPKKKKRITGEVPSAQEKNQKIQKHLLSLFEESTCQEEEDLHKLIQHQQQQQYKLKQNIIHLLIDLKKQQRFLQLQSGVN

SEQ ID NO: 4725 - protein, 125 aa, Gammatorquevirus sp.
MQNLCSSDFFKTTNFNPETKTQIWMSIIADGHDTICNCWHPFAHLLATIFPPGHQDRDLTINQILARDYLESCRSGGEEGTKTGGAEPTGEKDTTHIKEENQEEETIEDALMAAAAAAAEEPNAR

SEQ ID NO: 4726 - protein, 98 aa, Gammatorquevirus sp.
LPRRGGPPQAHPAPAATAVQAQTKHHPPPHRPEKTTEIPTTTIRSKLTRFKPGFEWETECELAQAFRRPPRLFKEDTPFYPWLPTIVPRVNFHLNYKF

SEQ ID NO: 4727 - DNA, 2539 bp, Gammatorquevirus sp.
aattcggcgctcgcgcgcgctgcgcgcgcgctctaggggcaattcgggctagggcagtctagcggaacgggcaagaaacttaaaatgtattttattttacagatgcaaaacctatgtggagaagatttttatgttaaaacaccatacaatgcagtaactaaaacacaaatttggctaagtcaagttggagattctcacgacaatttctgtcactgccaaactgcttatgctcatttgcttgcttctatatttcctcctggccatcaagataggaataaaactattgaagaaatacttcaaagagactacaaagaaagatgccattcttctggagacgcagaaacaagaactggtatggcagatttagaagacaaaggtttagaaaatataaaagaagaagatggcccagaagaagatatagaaggcctgctcgccgccgccgccgccgtagaagaagaagacacaaggtaagaagaaagaaacaaactataactcttaaacaatggcaaccagactctattagaaaatgtaaaattaaagggtttaactgcattgtagcaggagctgaaggcagacaattcttctgctatactaatgaaaagactaactatatacaacctaaagcaccaggagggggaggctttggtgtagaactttattctcttgactacctatactctcaatggttaaaaaagcaaaacatatggacacatactaatgaatacaaagacctagttagataccaaggctgcagaataacattttttagacatgaaaaagtagactttgtagttcaataccaaagacaacctccatttttaattcaaaaacatacatacatgcaatgccatccacaaaacttactgttaactaaacaccataaagttattctatccaaaaaacataaacctactggtaaaaacactgtttccatatttataaaaccgccaaaacaaacagtatctaagtggttttttcaagatgaattcagtaaatatggcttatttcaattgcaagctgcagctgcaacatttggatacccaacatatgggccaaacacacaaagtacaaacttaacattctatgccttaaacaccagattttatcataacacagactgggcacaagaaaaaagtcagcaacacggatacaaaccctacacaaactttgatgataacattaaattttactatccaacacaaagtggaacctctgccattacacatgcaaacacaaccacctataccaaatcaatagactacaccacaggagtattccaaagcaaaatacttttatctactaaaatagaaggcacaacaacattcgtccatgaaagacccattacaatagctagatataatccagaagatgacaatggaataggcaactctgtttaccttgtatctataatatctgacacagggtgggctgaaccaaaagacaaagacttagtactacacaatgtaccattatatatagctttttatggcttctggaactatatactaaaagtaaaaggagacaaaaatttccttaaataccatatgtttgttgttaagagtgaagccataaaacttgttgttaacacagaacaaaaagagttccccatacttgactggagctttataactggcaaaatgccttatggtgaactactaacagagtcagacaaaaaattttggtaccccacatcctataaacaacaagaaataataaatgccatagtagaatgtgggccttatatacctaaactgtcaaatcaaccatcaagtacatggcaactttattacaaatactgtttttattttaaatggggcggtccacagattacagaccaacttgcagaaaacccaaaagaaaaaggcaaatatgatgttcccgatacagtctttgaaacagtacaaattactaacccaaacaaacaaagctgcaaatctatgcttagagcctgggactacagaagggggattattacacaaagagctcttaaaagaatgtcagaagacatccaaactgattcatctttcgaacctgatgatgcagaaacaccaaagaaaaagaaaaaggcaactggagaactccccgcagcccaagaagaaaaccagaaaatgcaggcctgtctcctctcgctcttcgaagaaagtacctgccaagaccaagaaaacctacagcagctcatccagcaccagcagcagcagcagcaaaagatcaagcacaacatcctcaacctcctcctagacttaaaaaagaaacagagaataatacaaatgcaatcaggcctggactaacaagattcaaaccaggatttgaatgggacactgaatgtgagatagcacaagcatttagaagaccccctagactgtttaaagaagacaaacccttttatccatggctacccaaattagaaccccttgttaactttcacctcaattttaagttctaggccgacactgttcacttagcggagtctgtttatataagtttgcaccccaaaaaaattgtaaaaaaaaaaaaataaaaaaaaataaaaaattgcaaa

SEQ ID NO: 4728 - protein, 656 aa, Gammatorquevirus sp.; identical to SEQ ID NO: 3375

SEQ ID NO: 4729 - protein, 128 aa, Gammatorquevirus sp.
MYFILQMQNLCGEDFYVKTPYNAVTKTQIWLSQVGDSHDNFCHCQTAYAHLLASIFPPGHQDRNKTIEEILQRDYKERCHSSGDAETRTGMADLEDKGLENIKEEDGPEEDIEGLLAAAAAVEEEDTR

SEQ ID NO: 4730 - protein, 108 aa, Gammatorquevirus sp.; identical to SEQ ID NO: 3377

SEQ ID NO: 4731 - DNA, 2539 bp, Gammatorquevirus sp.
ggcagtctagcggaacgggcaagaaacttaaaacaatgctttgttttacagatgcaaaacctatgcactaaagacttccacagagatactcactacaacacagacacaaaaaatcaactatggatgtctattattgctgattcccatgacatcatttgcaactgctggcatccttttgctcatatgcttgctaatatttttcctcctggtcataaagacagggatctttccattaatcaaattcttgaaagagattacacagaaaaatgccattctggtggagacgtcgcagaaagccatggtttggaaggtggaggagatacagaaggagggcccattataaacccagaagaaggagacgcagaatatataagagacgaagaactcacagagcttataaaggccgcagaagacgccgctacaaggtaagaagaaagcaaaagaaaattatagttaaacaatggcaaccagaatgcattagaaaatgcaaaattaaaggactaggaactattgttttaggagctcatgggactcaatacagatgttatactgactatttaaatgaatggactaatcctagagtttcaggaggtgggggatttggatgtgaactgtttactcttaaatacttatatcaaatgtaccaacaaagaaaaaacatttggacattttcaaacaaatacaaagaattagttagatacacaggcagctcctttacattttacagacatccagaaacagactttgtactaacatatgatatacaaccaccattttatataaccaaatacacttatatgtctctacatcctcaaatgcttttattaaaaaaacataaaaaaatactacttagtacagctactaaacccaatggaaaacttactaagaaatttaaaattaaaccaccaaaacagcttattacaaagtggttttttcaaaaagaatttgctacatatggccttgtagctatagcagcatctgcatgcaactttagatacccctggctcagctgttgtaatgaaaatttaataataactttaagatacttatcaccacaattttatcacaacagtgcctgggcacaaacaacttccaatgcatacaatccaatatatggaaaacaacaaatgaaaacaacattaacatacaactacataatagacaataagaaaggcacctatgacatgaaaaacgaagatgttgacacctatgaacattcagtatcatactcaacaggctggtttcaaccaaaagtactcaatgcttatgaagtaaaagagggaaccattttacaagcacttacaccttgtgggtcacttagatacaacccagcagatgatgatggcataaacaataaactctgggttgttaacacacttacatataactggaaaataccaactgatgaagacctaatactagaaaactatccactctggcttatgttctatgggtatacatcatacttataccaagtaaaatccacaaaataccctttctcatccagtatgatagtagttaaatctaaagctttaagaagaacatttggaaaagacagcacagacttttacccactaatagacttttcatttatgaatggaaaaggcccagaaaacacaaaccctatactaatacacacaaaattttggtacccatcactatatgcacaaagagactctatatcacaaattgtaaactgtggaccatatgtacctaaatatgctgaaactaaaaacagcacatggcaatgtaactatcattatacctttcattttaagtggggtggctcctatccaccaacaccggaggcagaaaatcctgaaaaaaagaatgtctaccctgtgcccgataaacaacaagaaacagtatcaattgcagacccaatatcagaaacatatgaaaaaatttttaaaacatgggactatagacgagggtgccttacaaaaacagctattaaaagaatgcaacaagacctctcgtctgatgactctttgtcaacagattcaacaggctgctcctccaagaaaaggagaaaaaaactcccgacactccaagacccgaaaaaagaaaacaaagagatccaggactgtctcctctcactctgcgcagaaagtacatggcaagagccgccaccaggcagcaacatcttccagctcctcgaacagcagcaccagcagcagcagcagctcaagcacaacctcttaactctcatagcagacctgaaagcaaaccaaagaactcttctacatcaaacaggatacttagcttaacaagatttaaaccaggatttgaatgggaaacagaacaagacctagcaagagctttttgcagaccacctagacactttaaagaagacccaccattttacccatggctacccagacttgtaccccttgtaaactttaaacttaactttaaaggctaggccaacactgttcacttagtggtgtttgtttaataaagtttgcaccccaaaaaaattttaaaaataaaaaaaaaaaaaaaaaataaaaaattgcaaaaattcggcgctcgcgcg

SEQ ID NO: 4732 - protein, 667 aa, Gammatorquevirus sp.
MPFWWRRRRKPWFGRWRRYRRRAHYKPRRRRRRIYKRRRTHRAYKGRRRRRYKVRRKQKKIIVKQWQPECIRKCKIKGLGTIVLGAHGTQYRCYTDYLNEWTNPRVSGGGGFGCELFTLKYLYQMYQQRKNIWTFSNKYKELVRYTGSSFTFYRHPETDFVLTYDIQPPFYITKYTYMSLHPQMLLLKKHKKILLSTATKPNGKLTKKFKIKPPKQLITKWFFQKEFATYGLVAIAASACNFRYPWLSCCNENLIITLRYLSPQFYHNSAWAQTTSNAYNPIYGKQQMKTTLTYNYIIDNKKGTYDMKNEDVDTYEHSVSYSTGWFQPKVLNAYEVKEGTILQALTPCGSLRYNPADDDGINNKLWVVNTLTYNWKIPTDEDLILENYPLWLMFYGYTSYLYQVKSTKYPFSSSMIVVKSKALRRTFGKDSTDFYPLIDFSFMNGKGPENTNPILIHTKFWYPSLYAQRDSISQIVNCGPYVPKYAETKNSTWQCNYHYTFHFKWGGSYPPTPEAENPEKKNVYPVPDKQQETVSIADPISETYEKIFKTWDYRRGCLTKTAIKRMQQDLSSDDSLSTDSTGCSSKKRRKKLPTLQDPKKENKEIQDCLLSLCAESTWQEPPPGSNIFQLLEQQHQQQQQLKHNLLTLIADLKANQRTLLHQTGYLA

SEQ ID NO: 4733 - protein, 125 aa, Gammatorquevirus sp.
MQNLCTKDFHRDTHYNTDTKNQLWMSIIADSHDIICNCWHPFAHMLANIFPPGHKDRDLSINQILERDYTEKCHSGGDVAESHGLEGGGDTEGGPIINPEEGDAEYIRDEELTELIKAAEDAATR

SEQ ID NO: 4734 - protein, 137 aa, Gammatorquevirus sp.
LLLQEKEKKTPDTPRPEKRKQRDPGLSPLTLRRKYMARAATRQQHLPAPRTAAPAAAAAQAQPLNSHSRPESKPKNSSTSNRILSLTRFKPGFEWETEQDLARAFCRPPRHFKEDPPFYPWLPRLVPLVNFKLNFKG

SEQ ID NO: 4735 - DNA, 2539 bp, Gammatorquevirus sp.
aaattcggcgctcgcgcgcgctgcgcgcgcgtctaggggcaattcgggctagggcagtctagcggaacgggcaagaaacttaaaataatttttattttacagatgagcaagttttataaaccagctacatacaatggagataccagagaacaaatgtggatgtcaacaatttctgattttcatgattgtttttgcaaatgctggcatccattaactcatgctttagcttgcatttttcctgaaggtcacaaagacagaaatttaaccattaaagaaattattgaaagagatttacaatgccattctggtggagacggagaagaaagccatggtatggcagatggaagtatcgcaccaatagaaaatataaaaagagaagaagaacctacagaagacgcagacctagaaaaactactcgccgaagtagaagaagaagacgcaaggtaagaagaaaaaaaatacaaaaaataactcttaaacaatggcaacctgagagtatacataaatgtaaaattactggattttctacattagttttaggggctgaaggcacacagtatctatgctggacaaatgaactaaaagaatatacccagccaaaagccccagggggagggggatttggaagtgaacttattactcttgaatggttatatgatcaatggagagcacataactgtatttggactaaatctaacaaaaacaaagacttagttagatacacaggaggatccattactttatttagacacccaactacagactttgtattttcctatagcttatctcctccatttgagttaacaaaatttacatacccagacatgcaagtacaaaatatgctgttaagacccaaaaaaaaaattgttcttagcttattatcaaaacctggaggtaaaagaagaattaaaatcaaatttaaacctcctaaacttatgtcaaccaaatggttttttcaatcagaatttgcagacaaaggtttaatattatttcaagctacagcagctaactttagatttgcttccattggccctaaagcacaaaaccagatggttacaatatattatatagacactgggctatacaaccaccctagctgggcagctgccaccacagatgcatggtctccactaggtacacacaccacatatactttttatactaaaaaagctggcggaggtgcagacattgtaactacattaccacctaacgaagtaaaaagcccctatataaataaatatcaaatgagcatcagtagagaatatggttggtggagcaaacaagtattaaatgcttataaatttgataaaggctctcaaaaatatgcaaatagaccagtatatacagctagatacaatcctaatgttgactcaggagatggtaatttagtatatgcagtatctttactgcaatctaaatggacacctcctactatacaaacagacttaatgattgctggccaacctctttggatggccttacatggcctatacagctttttaaaatacacacttaaagacaacaattttgaagaacactatgctatagttattaagagcccagctataattccagttacagtagcaaaacaagacttttactgtgtaattgactgggactttataaatggtgttttaccttgggaagaatatataacccctcaaatttcagcagcatggtatcctaaagctaggtttcaaactacaactataaatgcaattgttgaatgtggaccatttgttcccaagtacacaaacataccagagagtacatggcagctaacttataaatatgccttttattttaaatggggtggtccacaggcgccagatgagccagttgatgaccccaaaggaaaacatcactggcctgaacccgatactatgcatgaaacagtacaaattggagacccaaaaaagcaaacagcccaaagcattttacaccactgggactttagaagggacatcattacaccaagagctcttaaaagaatgcaagaaaacctccaaactgatacatctttccaatctgatgactcagaaccaccaaaaaagaaaaagaaagcaaccaaagaaatgccatacaagccactccaagaaagcaaaatccacaaatgtctcctctcgctctgcgaagaaagtacctgccaagaaacaccactcaacctccagcagctcatcgagcagcagcaccagcagcaaagacacctcaagcagaacctcatccagctcctcactcacctgaaaaaacagcaaagatatttgagtctacaaacaggtcacctagagtaaaaagatttaaacctgggtttgaaacacaaacagaacttgaacttgctattgcttttaaaagaccaccaagaacatatgctacagacacccctttttacccctggctaccaatcactcccaaagtacaatttaaccttaattaccctatctaggcctacaatgtacacttagacaagcatgtttaataaagtttgcaccccaaaaaaattgtaaaataaaaaataaaaaaaaaaaataaaaaattgcaa

SEQ ID NO: 4736 - protein, 664 aa, Gammatorquevirus sp.
MPFWWRRRRKPWYGRWKYRTNRKYKKRRRTYRRRRPRKTTRRSRRRRRKVRRKKIQKITLKQWQPESIHKCKITGFSTLVLGAEGTQYLCWTNELKEYTQPKAPGGGGFGSELITLEWLYDQWRAHNCIWTKSNKNKDLVRYTGGSITLFRHPTTDFVFSYSLSPPFELTKFTYPDMQVQNMLLRPKKKIVLSLLSKPGGKRRIKIKFKPPKLMSTKWFFQSEFADKGLILFQATAANFRFASIGPKAQNQMVTIYYIDTGLYNHPSWAAATTDAWSPLGTHTTYTFYTKKAGGGADIVTTLPPNEVKSPYINKYQMSISREYGWWSKQVLNAYKFDKGSQKYANRPVYTARYNPNVDSGDGNLVYAVSLLQSKWTPPTIQTDLMIAGQPLWMALHGLYSFLKYTLKDNNFEEHYAIVIKSPAIIPVTVAKQDFYCVIDWDFINGVLPWEEYITPQISAAWYPKARFQTTTINAIVECGPFVPKYTNIPESTWQLTYKYAFYFKWGGPQAPDEPVDDPKGKHHWPEPDTMHETVQIGDPKKQTAQSILHHWDFRRDIITPRALKRMQENLQTDTSFQSDDSEPPKKKKKATKEMPYKPLQESKIHKCLLSLCEESTCQETPLNLQQLIEQQHQQQRHLKQNLIQLLTHLKKQQRYLSLQTGHLE

SEQ ID NO: 4737 - protein, 114 aa, Gammatorquevirus sp.
MSKFYKPATYNGDTREQMWMSTISDFHDCFCKCWHPLTHALACIFPEGHKDRNLTIKEIIERDLQCHSGGDGEESHGMADGSIAPIENIKREEEPTEDADLEKLLAEVEEEDAR

SEQ ID NO: 4738 - protein, 109 aa, Gammatorquevirus sp.
MSPLALRRKYLPRNTTQPPAAHRAAAPAAKTPQAEPHPAPHSPEKTAKIFESTNRSPRVKRFKPGFETQTELELAIAFKRPPRTYATDTPFYPWLPITPKVQFNLNYPI

SEQ ID NO: 4739 - DNA, 2539 bp, Gammatorquevirus sp.
taaattgtaaaagtaaaaaaaaaaaaaaaaaactaggggcaattcgggctagggcagtctagcggaacgggcaagaaacttaaatttatttttactttacagatgcaaaacctgtctcacaaggacttctttaaaccaacaccttacaatacagataccaaaaatcaaatatggatgtcacaaattgctgactctcatgacaatatctgtcactgcaacagtccttttgggcacctgcttgcttctatttttcctcctggtcataaggaccgggatcttacagttaatcaaatactacaaagagactacaaagcactatgcctttctggtggagacgcagaaacaagccatggtttcgcagattcaaatacaaaactagaaaaaggtttagaagaagaaaaagaaaattccctagacggagaagatatagaaaagttactcgccgccgccgcagaagaaaggtaagaagaaaacttaaaaaaataactcttaaacaatggcaacctgaatctataaagaaatgtaaagtaataggattttcatgcttagtactaggagctaatggaagacaaatgtactgttatacaaatgtagctgatcaatatacaatagcaaaatctccagggggaggaggctttggctgtgaacttataaacttaaaatggttatatgaccaatatactgcacacaataatatatggactcgatctaatgagtacacagacttagtaagatatacaggctgtaccataactgtttttagacatccatatgttgattttatttttcaatatgcactgcaaggtccattcacattaaacaaatatacatacccacagcttcaaccacaaaatgctcttctagctaaacataaaagaattatcttaagcagacaaaatgctccaaataaaaaacaagctgtaaaaattaagataaaaccgcctaaactaatgtctaccaagtggttttttcaaaaagatttctgtgaatatgctctagtacaaatatgtgccactgcatgctcactaacatttcccagaatacaaccaaatgcacaaaaccaaataataactttatatgccttaaatccttccttttactttaacagtaactggctagccacgacttcacaaggctataaaaatataactgcacaaacttttccactgtattttgatcacaacataaaaggcattccatctccatatgaactaaaccccaatagcattccagcatcagtagaagaaccatataaaagtaatacatatctctacacaacttcatacaaatatggattcttttcacctcaagtaatgacagcaactagggtatatacaagaaaggataacccagagggtagtaaaattgctaatttaccactaatagtccttagatacaacccaaacacagatgatggctatggcaatgaaatttacttaacaagcctacacaagggacactatgacaaaccctcagttacaccagattatatgtttccaggcgtccctctctggatgggactatatggctatggaaactatcttatacaatccagcaaagacaaaggcctactaactacacacatgttcatattaaaatcaagatcactacacccaatatcacaagttacaaaagatacatactatccaataattaacacagatatggcttttggaaaactaccatatgatgaatatataactactaccaaaaaaaatgcatggtatcctacaggtgaaatgcaagatgatgctttaaacaacatagtaatgacaggaccatttcaaccaaaatttaacaatataactaacagcacctgggaacttgactataaatacaaatttttttttaagtggggcggtccatacacatcagaccccgtggcagaagacccatgtaaaaaaggaaccttccctacactcagtgcactgcaacaaacaatacaaattaagaacccagagaaacttagtccagaatccattctacaccagtgggacttcagaaggggcattgttacagcaacagctcttaaaagaatgtcagaaaacctcgaaactgatacatctctcgaatctgatgactcagaaacaccaaaaaagaaaagaaaagtcagcaaagagatgccatgcttcaatcaaaaggaagagaaaatcaaaaaatgtctcctctctctctgcgaagagcctacctaccaagaaaccccgcaaaacctcgagcagctcatccagcagcagcagcagcagcagcaccagctcaagagaaacatctacaagctcctcaaacacctgaaacatggacaacaacaagttcaactccaaacaggagttttagagtagaaccattcaaaccagggtttgaatgggaaacagaatgtgaatgtgcaaaagcattttgcagaccacccagacattataaaaatgatcccccattttacccctggcttcctgttacacccaaagtaattttcaaccttaattttaaagactaggccaacaatgtacacttagtggagtctgtttatataagttacatccccaaa

SEQ ID NO: 4740 - protein, 672 aa, Gammatorquevirus sp.
MPFWWRRRNKPWFRRFKYKTRKRFRRRKRKFPRRRRYRKVTRRRRRRKVRRKLKKITLKQWQPESIKKCKVIGFSCLVLGANGRQMYCYTNVADQYTIAKSPGGGGFGCELINLKWLYDQYTAHNNIWTRSNEYTDLVRYTGCTITVFRHPYVDFIFQYALQGPFTLNKYTYPQLQPQNALLAKHKRIILSRQNAPNKKQAVKIKIKPPKLMSTKWFFQKDFCEYALVQICATACSLTFPRIQPNAQNQIITLYALNPSFYFNSNWLATTSQGYKNITAQTFPLYFDHNIKGIPSPYELNPNSIPASVEEPYKSNTYLYTTSYKYGFFSPQVMTATRVYTRKDNPEGSKIANLPLIVLRYNPNTDDGYGNEIYLTSLHKGHYDKPSVTPDYMFPGVPLWMGLYGYGNYLIQSSKDKGLLTTHMFILKSRSLHPISQVTKDTYYPIINTDMAFGKLPYDEYITTTKKNAWYPTGEMQDDALNNIVMTGPFQPKFNNITNSTWELDYKYKFFFKWGGPYTSDPVAEDPCKKGTFPTLSALQQTIQIKNPEKLSPESILHQWDFRRGIVTATALKRMSENLETDTSLESDDSETPKKKRKVSKEMPCFNQKEEKIKKCLLSLCEEPTYQETPQNLEQLIQQQQQQQHQLKRNIYKLLKHLKHGQQQVQLQTGVLE

SEQ ID NO: 4741 - protein, 120 aa, Gammatorquevirus sp.; identical to SEQ ID NO: 4507

SEQ ID NO: 4742 - protein, 120 aa, Gammatorquevirus sp.
MLQSKGRENQKMSPLSLRRAYLPRNPAKPRAAHPAAAAAAAPAQEKHLQAPQTPETWTTTSSTPNRSFRVEPFKPGFEWETECECAKAFCRPPRHYKNDPPFYPWLPVTPKVIFNLNFKD

SEQ ID NO: 4743 - DNA, 2539 bp, Gammatorquevirus sp.
caactcgggctagggcagtctagcggaacgggcaagaaacttaaaactatacttgttttacagatgcaaaatataacagctaatgacttctttactgctaccacctacaacaatgacacaaaaactcaactatggatgtccataattgctgattcacatgacaatatctgcaactgctggcatccttttgctcatctgcttgctagtatttttcctcctggccatcaagacagggataaaaccattaatcaaattctgcaaagagactatcaagaaaaaacatgccattctggtggagacgccgccgcaggccctggtttggcaggtggagaagaaagagaagatttaccagatacagaggcaagagaagaagaattcccaggagaagaactagaaaaacttatcgccgacgcagaaggcgcagaaacaaggtaagaagaaaaaaaaagaaaattcctgtaatgcaatggcaaccacaatcaataagaaaatgtaaaattaagggacatggtaccttagtactaggagctgaaggaacacaaatgtactgttatactacagaaaaaatgaaatatgttcctcctaaagtaccttatgggggggggtttggtgtggaaaaatataccctagactatttatatgaagaatatacttttactaacaacatatggacagccagcaacatactaaaagatctatgtagatttttatatgttaaattcaccttttttagacatccagatacagacttcattatttcctacaacaatcaacctccttttaacattaacaaatacacatttccatctacacacccccaccaaatgctattagacaaacacaaaaaagtgttaaagagcttagcaagtaaacccaatggtaaatactcacttaaaatcaatgtaaaaccaccaaaacaaatgataactaaatggttctttaccaaacaattttcaaaatatggcttattattactaaaaggatcagcactaaacctcagatatagccatcttagtgctagtaatgaaaacatgctaataaacatagtttccttaaacccttctttctatgttagtactcactgggccagaaagggctcagaaacacaaccttacaaaccccaagaacacataaaccaaaatttatggtatgacgtcaaaacatcagcaggaataacaaaattacaaatgcctgctgattcatttaccatctactcaaaaagtgtagactatgacactggctggtttaacagtaaatttttaagagctgtagccttatacagcccaactcaacacgcaaaactagccacactaaatatgatatatgggagatacaatcctactagagacaatggaaaaggtaataaaatatacatcataagcactatagctgactcttggcacccacctacagtagacaaaatgatactacttgaggaaattccactatggctaggcctttggggatacatatcatatctccacacagttaaacctgaagactggctactttcatcctgtgtagttttacagtcagattttatatacaactggggaataccaggcacaggcaagcaatggctacctatagatcaagactacctacaaggtaaaaaaccatatgaccaagtaattacagaccaagaaaaaaaactatggtaccctacatacaaatggcaattaaaaactttaaatgctatagtagagagtggtccatttgtaccacaatataatgaagaaaaaaacagtacatgggaactaaaatatacctatgacttttactttaagtgggggggacctgaaacccctgaagctgaagttaaaaaccccaaagaactgggagactatgatgtccccgataacaaacttaaaacaatacaaattgtcaacccagccaagcaaagtactgaatccatactacatccctgggacctcagaagaggcctcattaaagaaaaagctcttaaaagaatgtgctctcacctcgaaactgacacagaatttgaatattctgcaggagagagcccaaaaaagaaaaaacagagagtgggagcagctctcagagacccccaagaagaaatccaagaagtgcaagcctgtctccaagcgctctgcgaaaaaagttcctgccaagaagaagagacacaaagtctccagcagctcatcaagcagcagcaccacaagcagcaagagctcaagtacaacatcatcaagctcctagtagagatgaaagaaaaacaaaacatgctacaactacaaacagggatgtgggaatgagaagatttaaaccaggatttgaacttgatacagaaaaagaactatcaatagcctttaaaagacctatgcgaacttttaaagatgatacccccttttacccctggttaccccctgaacccactgtaaactttcaccttaatttccatttctaggccaacaatgtacacttagtcactgatgtttaataaagtttgcccccccaaaaaaacaaaaaaaataaaaaattgcaaaaattcggcgctcgcgcgcgctgcgcgcgcgcg

SEQ ID NO: 4744 - protein, 664 aa, Gammatorquevirus sp.
MPFWWRRRRRPWFGRWRRKRRFTRYRGKRRRIPRRRTRKTYRRRRRRRNKVRRKKKKIPVMQWQPQSIRKCKIKGHGTLVLGAEGTQMYCYTTEKMKYVPPKVPYGGGFGVEKYTLDYLYEEYTFTNNIWTASNILKDLCRFLYVKFTFFRHPDTDFIISYNNQPPFNINKYTFPSTHPHQMLLDKHKKVLKSLASKPNGKYSLKINVKPPKQMITKWFFTKQFSKYGLLLLKGSALNLRYSHLSASNENMLINIVSLNPSFYVSTHWARKGSETQPYKPQEHINQNLWYDVKTSAGITKLQMPADSFTIYSKSVDYDTGWFNSKFLRAVALYSPTQHAKLATLNMIYGRYNPTRDNGKGNKIYIISTIADSWHPPTVDKMILLEEIPLWLGLWGYISYLHTVKPEDWLLSSCVVLQSDFIYNWGIPGTGKQWLPIDQDYLQGKKPYDQVITDQEKKLWYPTYKWQLKTLNAIVESGPFVPQYNEEKNSTWELKYTYDFYFKWGGPETPEAEVKNPKELGDYDVPDNKLKTIQIVNPAKQSTESILHPWDLRRGLIKEKALKRMCSHLETDTEFEYSAGESPKKKKQRVGAALRDPQEEIQEVQACLQALCEKSSCQEEETQSLQQLIKQQHHKQQELKYNIIKLLVEMKEKQNMLQLQTGMWE

SEQ ID NO: 4745 - protein, 123 aa, Gammatorquevirus sp.
MQNITANDFFTATTYNNDTKTQLWMSIIADSHDNICNCWHPFAHLLASIFPPGHQDRDKTINQILQRDYQEKTCHSGGDAAAGPGLAGGEEREDLPDTEAREEEFPGEELEKLIADAEGAETR

SEQ ID NO: 4746 - protein, 110 aa, Gammatorquevirus sp.
LSPSALRKKFLPRRRDTKSPAAHQAAAPQAARAQVQHHQAPSRDERKTKHATTTNRDVGMRRFKPGFELDTEKELSIAFKRPMRTFKDDTPFYPWLPPEPTVNFHLNFHF

SEQ ID NO: 4747 - DNA, 2538 bp, Gammatorquevirus sp.
acattgtaaaaaaaaaaaaaaaaaaaaaaaatctaggggcaattcgggctagggcagtctagcggaacgggcaagaaacttaaaactatgctttgttttacagatgcaaaatatttgcagctcagacttttttcaacacacccacttcaacacagacacaaaaaatcaactatggatgtccataattgctgattcccatgacagtatctgcaactgctggcatccttttgctcatctgcttgctaatatttttcctcctggtcataaagacagggaccttaccattaatcaaattctgcaaagagatcttacagaaaaatggcattctggtggaggcgccgcagaagaaactggtatgggaccttccggtacaggaggagatataaagccagacccagaagaaagaggagaagattttccagaagaagaaatagaaggtctactcgccgccgccgctacagaagaaaaagaaaggtaaaaagaaaacttaaaaaaattactataaaacaatggcaaccagactccataaaaaaatgtactataaaaggcttctctacaatagtactaggtgcaaatggtagacaaatgttttgttatacaaatgtagctgaacaatatacagttagcaaagcagcaggggggggggggtttggctgtgaaaatattaacttgaaatggctatacaaagaatacacaagacacaataacatatggacaaggtctaatgaatatacagaactagtaaggtacacaggttgtgaattaaccttttttaggcacccatatgtgtcttttgcagtagtatatcacctacaaggcccctttatgctaaacaaatacacatatgctgaaatgcaacctcaaaatgcactattagcaagacacaaaagactcatacttagccaagcagaaaaaccacacggaaaactaagagtaaaaatcaaaattaaatgtcctaaactaatgtcaacaaaatggttttttcaaaaagaattttgtgaccacacgttagtacaagtttgtgctacagcaataagcttctcttttcctagaatacaacccaatgcacaaaacattatcataacaatttatgcactgaacacatccttttaccacaacagtgactgggctcaaactaaatcagatgcatacagaaacataaccacacaaacttacccactattttttacacacaacataaaaggcatacaaaatccatatgaatacaatccagacaactccactttcacacagggatatacaagcaaatatgagtacagcatttcttatgaaaaaggattattttcaccacaaattttaacctcaactgcagtaagaccaggtagtgcaactgcacagccactagccctactgcctgtcatagtacttagatacaatccaacaacagatgatggatatggcaatgaaatataccttgccagcactatgagaggctcctttaacaagccaacagtaacaccagactatatgtttccaggtgttcctttatggatgggcctttttggctactatgattttcttatacaaaaatctaatgacaaaggtcttatgcaataccacatgttagtattaaaatctacagcattacatccaattagtcaaagtacagaacaagtatactatccagttattgacatagactttgcctttggaaaattaccatatgatgaatacataacaaaactgcaaaagaaaaaatggtatccctcaggagaaatgcaagaacaaacacttaacaacatagtaatgacagggccatatgtacctaaatttaacaacatcacaaacagtacatgggaacttgactacttttataaatttttttttaagtggggaggtccacaaaccacagatccagttgcagaagacccatgcaaaaagggcacttatcccactctcagtgccctcgaaaaaacaatacaaattaagaacccagaaaaacttgatccaaaatccatactacatgagtgggacttcagaaggggcattgttacaacaacagctcttaaaagaatgtcagaaaacatccaaactgatacatctctcgaatctgatgactcagaatcgccacccaaaagaaggaaagtcaccaaagaaatcccatgcgaaatccaagagcaaaagaaaatccaaaaatgtctcctctctctctgcgaagaaaatatctgccaagaagagccggagacactgcaccagctcatcgagcagcagcagcagcagcagcaccacctcaaaagaaacatcctccagctcctcacacacctgagaaagacccaagcaaaaatgcaacttcaaacaggttatttagagtaataccttttaaacctggctttgaacaagaaacagaagaagagctagctaaaatttttaaaagacctgttagaaaatacaaaaatgatcccccattttacccatggttaccccctgctccccttgtacaatttaacctaaacttcaaaggctaggccgacaatgtacacttagtggtggatgtttaataaagtttgccccccaaaa

SEQ ID NO: 4748 - protein, 671 aa, Gammatorquevirus sp.
MAFWWRRRRRNWYGTFRYRRRYKARPRRKRRRFSRRRNRRSTRRRRYRRKRKVKRKLKKITIKQWQPDSIKKCTIKGFSTIVLGANGRQMFCYTNVAEQYTVSKAAGGGGFGCENINLKWLYKEYTRHNNIWTRSNEYTELVRYTGCELTFFRHPYVSFAVVYHLQGPFMLNKYTYAEMQPQNALLARHKRLILSQAEKPHGKLRVKIKIKCPKLMSTKWFFQKEFCDHTLVQVCATAISFSFPRIQPNAQNIIITIYALNTSFYHNSDWAQTKSDAYRNITTQTYPLFFTHNIKGIQNPYEYNPDNSTFTQGYTSKYEYSISYEKGLFSPQILTSTAVRPGSATAQPLALLPVIVLRYNPTTDDGYGNEIYLASTMRGSFNKPTVTPDYMFPGVPLWMGLFGYYDFLIQKSNDKGLMQYHMLVLKSTALHPISQSTEQVYYPVIDIDFAFGKLPYDEYITKLQKKKWYPSGEMQEQTLNNIVMTGPYVPKFNNITNSTWELDYFYKFFFKWGGPQTTDPVAEDPCKKGTYPTLSALEKTIQIKNPEKLDPKSILHEWDFRRGIVTTTALKRMSENIQTDTSLESDDSESPPKRRKVTKEIPCEIQEQKKIQKCLLSLCEENICQEEPETLHQLIEQQQQQQHHLKRNILQLLTHLRKTQAKMQLQTGYLE

SEQ ID NO: 4749 - protein, 124 aa, Gammatorquevirus sp.; identical to SEQ ID NO: 3857

SEQ ID NO: 4750 - protein, 120 aa, Gammatorquevirus sp.; identical to SEQ ID NO: 3858

SEQ ID NO: 4751 - DNA, 2538 bp, Gammatorquevirus sp.
ctctaaaacaatggcaaccagactctgttagtctaggggcaattcgggctagggcagtctagcggaacgggcaagaaacttaaaattgtttatttttcagatgtcagaaatatctttcaaagacttctactgtccaacaccttacaataaagaaactaaaaatcaaatttggatgtcccagattgctgattctcatgacaatatctgcgactgcaagtttcctttttgccatctgcttgcttctatttttcctcctggccatcaagaccgcgatctctcaattaaccaaatactgtttagagattacagagagaaatgcctttctggtggaaacgcagacaaaagagatggtatggcaggtttaggtggaaaagaagaccctataaagcaagaagaagaaaatatagaagaagaagacctagatggcctactcgccgccgccgcagacgccgccgaaggcacaaggtaagaaaaaagaaacaaaaaataactctaaaacaatggcaaccagactctgttaggagatgtaagattaaagccatatctactcttgttatgggagcagatggagcccaatataaatgctacacaaacgaagccacatcttaccctccaccaaaagagccttctggaggtggttttggagtagaaatttttactttacaacacatgtacaatttatataaagctcacaaatgcatatggactacttccaatgaatatatggacttagccagatacactggctgtaggtttattttttacagacatagagccacagactttattctttcatttgacttgcagcctccatttactatagacaaattcacatatccacaagctcacccacttaatcaatttctacaaagaaaaaaaagaatactatacagtcttaaaactaaaccatacggcccatctaaagttgttttaaaaattaagcctccaaaactgctatcaactaaatggttttttcaaaaagaacttgctaaaataccactagtaaaaattcaagcagctgcttgtgatcttagctatgctaacatgggaaaaacatggcaaagtaacatgttatctatatattttttaaacacagcattttatcaagaaagcaattggggtaactcaggcctcagtcattacctaccatataaaacaattagtaccaacttatggtactggtctaaagacagcagaggaaataaaactaaaatacaagtaaaaacagaaagttactattccacagttaattattctggtggatactttgataccagagttttaaatgcttattctataacaaacaatgataaatcagacacgccaccagctatggctcttacccctgtttctgtaggcagatacaatccattaacagacacaggagaaggcaatgaactgtgggctgtttccagcctcactgaacactatgaccatccagctacagacaaaactttaatttttaaaggctatccactgtggttaatgctttttggctttaaaaactacatagagcaagaaaaaggagataaaagatttttagactcctacttttttgtttttagatgtccaagcatgcaaatactacaatctgtagtaaaacaggattactttccatttatagaccaaagttttctaaatggaaacatgccatatggtgaatacttagatgaaaacaaaaaaaaattttggtatccaacaataagaaaacaactagaaacaattaacactcttgttacattaggcccatttataccaaagtttaaagatgacagagacagtacatgggaattaaactataaatgttcattttattttaagtggggaggacaacaaattacagaaaaacttgcaatggatcccagcaaacaagaccaatttgataacccctataacatgcaacagggaatacagatatccaacccacaaacacaaacatgggaaacaacactgcaccactgggactacaggagagacatacttacaaagtcagctattaaaagaatgcgagacaacctcgaaactgatacagatgtcacgccaattattacaggcaagccaccaaaacagagaaagatcacaggagaaatacaagcactccaacaagaaaacaaagagatccaagcatgtctccactcactcttcgaagaagataccttccaagaagaggagagtctccgagagctcatcaagcagcaacacaacaagcaacagcagctcaagcaaaacctcctacacctcatctcagacctaaaaaaacaacaacaacaccttcaaatgcaaacagggattctacattaactagatttaaaccaggttttgaacaaacaacagaaagagaacttgcaattgcttttaaaagacctataagaacttttaaagaagaccctccattttacccatggctgccccctgctccccttgttgtaaactttaacctcaactttaaaggctaggccaacactgtacacttagtggtgtttgtttaataaagtttgctccccaaaaaaattgtaagaaaaaagaaacaaaaaataa

SEQ ID NO: 4752 - protein, 661 aa, Gammatorquevirus sp.
MPFWWKRRQKRWYGRFRWKRRPYKARRRKYRRRRPRWPTRRRRRRRRRHKVRKKKQKITLKQWQPDSVRRCKIKAISTLVMGADGAQYKCYTNEATSYPPPKEPSGGGFGVEIFTLQHMYNLYKAHKCIWTTSNEYMDLARYTGCRFIFYRHRATDFILSFDLQPPFTIDKFTYPQAHPLNQFLQRKKRILYSLKTKPYGPSKVVLKIKPPKLLSTKWFFQKELAKIPLVKIQAAACDLSYANMGKTWQSNMLSIYFLNTAFYQESNWGNSGLSHYLPYKTISTNLWYWSKDSRGNKTKIQVKTESYYSTVNYSGGYFDTRVLNAYSITNNDKSDTPPAMALTPVSVGRYNPLTDTGEGNELWAVSSLTEHYDHPATDKTLIFKGYPLWLMLFGFKNYIEQEKGDKRFLDSYFFVFRCPSMQILQSVVKQDYFPFIDQSFLNGNMPYGEYLDENKKKFWYPTIRKQLETINTLVTLGPFIPKFKDDRDSTWELNYKCSFYFKWGGQQITEKLAMDPSKQDQFDNPYNMQQGIQISNPQTQTWETTLHHWDYRRDILTKSAIKRMRDNLETDTDVTPIITGKPPKQRKITGEIQALQQENKEIQACLHSLFEEDTFQEEESLRELIKQQHNKQQQLKQNLLHLISDLKKQQQHLQMQTGILH

SEQ ID NO: 4753 - protein, 127 aa, Gammatorquevirus sp.
LFIFQMSEISFKDFYCPTPYNKETKNQIWMSQIADSHDNICDCKFPFCHLLASIFPPGHQDRDLSINQILFRDYREKCLSGGNADKRDGMAGLGGKEDPIKQEEENIEEEDLDGLLAAAADAAEGTR

SEQ ID NO: 4754 - protein, 109 aa, Gammatorquevirus sp.
MSPLTLRRRYLPRRGESPRAHQAATQQATAAQAKPPTPHLRPKKTTTTPSNANRDSTLTRFKPGFEQTTERELAIAFKRPIRTFKEDPPFYPWLPPAPLVVNFNLNFKG

SEQ ID NO: 4755 - DNA, 2538 bp, Gammatorquevirus sp.
aaaaaaaaaaaataaaaaattgcaaaaaaggtctaggggcaattcgggctagggcagtctagcggaacgggcaagaaacttaaaactatatttgttttacagatgagcaagttttttaaaccaacaaaatacaacaatgaaactaaaaaccaactatggatgtccatgattgctgacagtcatgacatttgctgtgactgtcccacaccatttgctcacctactagattcaatatttccagaaggacacagagacagacacaaaccaattgactatattattaaaagagattggaaagaatgccattctggtggagaaggcgaagaaagccatggtggggacgctggagaagaaagagatataccacccgtcaaaaacgaagaagaagatttaacaacagaagatacaaacgtagaagaactgctcgccgccgtcgccgccgcagaggcaaggtaagaaaaaagaaagctaaacttaccttgcaacaatggcaaccagacagaattgttttatgcaaaattaaaggctttggtgaacttgtcctaggagcagaaggaactcaatttcaatgctataccaatgaaaagtacaatctacctttaccactgtgtccagggggaggtggttttggggttgaaagatttacattagaatggctatacaaacagcatattttcagaaataacatttggacaaaaagtaactactggacagacctatgtagataccttagagtagtgttttacctatacagacaccctacacaaagctttatagtacaatacagcagacaatcaccatttaacatagacaaaactacataccccaactttcatcctctactaatgcttttaaaaaaacaccataaaatagtaccaagcctacaaagaaaaccaagaggtaaaccctatgttaaacttactataaaaccaccaaaacaaatgttaacaaagtggttttttcaaaaagaattttgtgaatatgatttatgccaactagcaggatcagtaatatcattagactatcccagactaggatgctgcacagaaaacagagttataaccatatggtacataaatcctagcttttaccaaaactctgactgggcacaaactaaagacaacgcatacgaaccagttacaggaattgctgaaactaaatatacatttaaaggaggcaaaaatccagcagcaggttatactcctaactttgaacaccctaaaacctcggaaccaggcactaaatacaaatactacaacagtataaactgggacaaaggctggttttcagctcagatattatcttccactagctacacaaaaaatggtcagcagactttaccattgccattagctgtagctagatacaaccctgctgaagatgatggtaaaggcaatgaagtatggttaacatcagtagcaacaggacagtatgctaaaccacaggacgatatcctactttttaacaatacaccactatggctagtgttctggggatatacaaactttttacagaaaattaaaaacaagtcttttttttcactatacatgtttgtaattaaaagcccctacattaaacctggaaacacagtacaaacaaaaaacttttttccatttgtagatgttaaatttacagaaggcaaaaactcacatgacagctatcttacatacacagataaaaaactctggtacccaacagtgtggagacaattagacaccataaatgcaatagtagaatgtggaccatatgttcctaaattaggctttgatagacttagcacatgggaacttgcttacaaatacattttttcctttaagtggggtggaccactcctcacagaacaagaagttgcagatccaaaatctaaagacaagtatcctacacccgatacaatgcaagaaacaatacaaatctgcaacccaaaacaccaagatacaaataccattttccatgagtgggactacagaaggggatacattaccaacccagctattaaaagaatgtcagaaaacctcatcattgattcagatgtctcaacagattcagaaacttcacagaaaaagagaaagagagttactacagagctcagaaacccagaggaaaagatcaagaaaatcaaaaaatgtctcctctcactctgcgaagaagatatctgccaagaggaggaagagggctcggacctccaccagctcatccgcaagcagcagcagcagcagcagctactcaagcacaacatcctaacactattaaaagacatgaaagcaaaacaaaagatgctacagcttcaaacgggagtactagaataaaacttactccctttaaacctggctttgaaagagatactgaagatgaattagctaaagcattttataggcctgctagactatttaaagaagacacccccttctatccatggttacctaaattcacaccccttgtaaacttccacttaaactttagaggctaggcatgcactgttcacttggtggagtttgtttaataaagtttgcaccccaaaaaaattataaaataaaaaaa

SEQ ID NO: 4756 - protein, 671 aa, Gammatorquevirus sp.
LERMPFWWRRRRKPWWGRWRRKRYTTRQKRRRRFNNRRYKRRRTARRRRRRRGKVRKKKAKLTLQQWQPDRIVLCKIKGFGELVLGAEGTQFQCYTNEKYNLPLPLCPGGGGFGVERFTLEWLYKQHIFRNNIWTKSNYWTDLCRYLRVVFYLYRHPTQSFIVQYSRQSPFNIDKTTYPNFHPLLMLLKKHHKIVPSLQRKPRGKPYVKLTIKPPKQMLTKWFFQKEFCEYDLCQLAGSVISLDYPRLGCCTENRVITIWYINPSFYQNSDWAQTKDNAYEPVTGIAETKYTFKGGKNPAAGYTPNFEHPKTSEPGTKYKYYNSINWDKGWFSAQILSSTSYTKNGQQTLPLPLAVARYNPAEDDGKGNEVWLTSVATGQYAKPQDDILLFNNTPLWLVFWGYTNFLQKIKNKSFFSLYMFVIKSPYIKPGNTVQTKNFFPFVDVKFTEGKNSHDSYLTYTDKKLWYPTVWRQLDTINAIVECGPYVPKLGFDRLSTWELAYKYIFSFKWGGPLLTEQEVADPKSKDKYPTPDTMQETIQICNPKHQDTNTIFHEWDYRRGYITNPAIKRMSENLIIDSDVSTDSETSQKKRKRVTTELRNPEEKIKKIKKCLLSLCEEDICQEEEEGSDLHQLIRKQQQQQQLLKHNILTLLKDMKAKQKMLQLQTGVLE

SEQ ID NO: 4757 - protein, 117 aa, Gammatorquevirus sp.; identical to SEQ ID NO: 3351

SEQ ID NO: 4758 - protein, 114 aa, Gammatorquevirus sp.
MSPLTLRRRYLPRGGRGLGPPPAHPQAAAAAAATQAQHPNTIKRHESKTKDATASNGSTRIKLTPFKPGFERDTEDELAKAFYRPARLFKEDTPFYPWLPKFTPLVNFHLNFRG

SEQ ID NO: 4759 - DNA, 2537 bp, Betatorquevirus sp.
cacccggggggggaaaccccccccgaacccccccaacggcaattcgggctagatcagtctggcggaacgggcaagaaacttaaaatatttttaattacagatgtcaaagtttttacaaccaacttcatacaatggacgccaacaagaaacaaactggataaacttcaacattcactttcatgactccttctgtggatgccctgaacccctaacacacctaagacacctactaaaccaacaatgccaccatatcaaagacgccgctacttctacagaaactggtggaattcaagaagaaaacgatattggaatcgacgatggagacctagaaagactgttcgcaatcgaaaacgaagacaacgacgggtaagaagacgcttttataaaaaaaatagaaaacttaaaagactaagaataaatgaatggcaacctagctcaattaaaaaatgtaaaatagaaggatacctagtactgtttcaagcgggatacggacgctattctaataactatccattatggaaagaagtaatatttccacctcattatccaggtggaggtggatggggaatacaacaattaaacctaggaaatttatatactcaacataaagaacttatgaactactggactaaaagtaatgatagaatgaatatgtgtagatatatgggtgtaacacttacattatttagagagcaacacacagactggatattctcatactatgactcattaccaaaaacagtaacaaaatatttttacacctcacatcaccctatgcttatgcttacacacaaaagaaaaaaaacaataccaagttttgactcccagccacacaaaagaaaaccatacaaaaaaatatttgtaagaccaccaagactaatgagaaaccaatggtactttcaacaacaattagcagattttcctttactaacatttgccgcttcagcatgcagtcttcaaggcatgtttggatctataaactcagtaaacaataatgctacaatgtactgcatagaccacgcagtatttacaaaacctatatttcaatacaaaacacaaacacatccagaatggggctacaggcctagtgacaccatttacctatacggcctacaaaatggagcacacatttttactgaaaaccaatacaaagacagcatttacctaggaaacacaatgaacaatcaaagaggtgctgttattaacagttaccaacagtcacaatttacagaaaaatacccctttggagaatggggaaacccttttttttggggatacatgacaggaaacttaacagttttccaaaacactatagaccccaaaaccatggcaaaaacccctacaacaaaactaacacaaagctggttaagagaaaacccttatgtttttaaagtcagatacaacccttttaaagataaaggacgaggaaaccaagtatactttgtaccaaattatgactccagccataacacatgggaacccaccaaagacccagatattctgttcgaaaattacccactatggttattactatggggcctagaagatatagttaaaagaatgggaaaatgcaaaaacttagacaatgactggactctagtaataaaatctaattggatactgccaccacaagcatactatataccagttagttatgactttgtacatggcagaggcccatatgatacagaaagagaagaaatgtctagagatgactatactaactggtaccctagatttaaataccaaagacaagcaatacaaaatattataatgacagggcctgctgttgctagaggagactatgctaaaaacatacaagctaaattgaaatatacttttcattttaagtggggaggcaactccgaaccgcaagaatcagtatttgacccaaccaaccaaccaattacacctgcaccccctaacatctacagcatccatgaaatcacaaatccgaattcaagcattacgggagaaatctacccatgggatttcagacgagatatgcttacaacaacagctacagaaagaattagacaaagcccaactaatgaaacatatatgttcacagatggagacgaaacttcgacagacctcaaaatctacacaccggagacacaaaaggaaaagaccccgaaaacacaaaagaaaacacttctcgagcagctccagctcatccaatcctacaaccaacagctccaactcagattcagaaaactaaaacaattatcaaaggacccataaaccaagtacaattgtttccaaaatacaaaaacagaagatttaaaccctatgaatttgaattagaattaacaatggctaaaatttttcacagacgccctagatattacttctatgatatgccaacttatgactggttaccccctgaacctaaagtaaactttgaccttgtacatggatttaataaaggccagcattaattcacttgaggtgtccgtttatttattattaaacttaactaaacatccaccgcctccctaatacgcaggcgcaaagggggctccgcccccttaaac

SEQ ID NO: 4760 - protein, 667 aa, Betatorquevirus sp.
MPPYQRRRYFYRNWWNSRRKRYWNRRWRPRKTVRNRKRRQRRVRRRFYKKNRKLKRLRINEWQPSSIKKCKIEGYLVLFQAGYGRYSNNYPLWKEVIFPPHYPGGGGWGIQQLNLGNLYTQHKELMNYWTKSNDRMNMCRYMGVTLTLFREQHTDWIFSYYDSLPKTVTKYFYTSHHPMLMLTHKRKKTIPSFDSQPHKRKPYKKIFVRPPRLMRNQWYFQQQLADFPLLTFAASACSLQGMFGSINSVNNNATMYCIDHAVFTKPIFQYKTQTHPEWGYRPSDTIYLYGLQNGAHIFTENQYKDSIYLGNTMNNQRGAVINSYQQSQFTEKYPFGEWGNPFFWGYMTGNLTVFQNTIDPKTMAKTPTTKLTQSWLRENPYVFKVRYNPFKDKGRGNQVYFVPNYDSSHNTWEPTKDPDILFENYPLWLLLWGLEDIVKRMGKCKNLDNDWTLVIKSNWILPPQAYYIPVSYDFVHGRGPYDTEREEMSRDDYTNWYPRFKYQRQAIQNIIMTGPAVARGDYAKNIQAKLKYTFHFKWGGNSEPQESVFDPTNQPITPAPPNIYSIHEITNPNSSITGEIYPWDFRRDMLTTTATERIRQSPTNETYMFTDGDETSTDLKIYTPETQKEKTPKTQKKTLLEQLQLIQSYNQQLQLRFRKLKQLSKDP

SEQ ID NO: 4761 - protein, 89 aa, Betatorquevirus sp.; identical to SEQ ID NO: 3361

SEQ ID NO: 4762 - protein, 61 aa, Betatorquevirus sp.; identical to SEQ ID NO: 3552

SEQ ID NO: 4763 - DNA, 2537 bp, Gammatorquevirus sp.
aaaaaaaaaaaaaataaaaaattgcaaaaattctaggggcaattcgggctagggcagtctagcggaacgggcaagaaacttaaaacaaattctttttttttagatgtcaaagattcaagctaaagacttttatactcccacacccttcaatcaagagacaaaaaatcaaatatggatgtctcaaattgctgatgctcacgataatatctgccattgtaaccatccctttgctcatctgcttgccaatatctttcctgtgggtcacaaagatcgcgatctcacaattaatcaaattcttttgagagactacaaagaaaaatgccattctggtggaacagaagaagaaagccatggtacggacgctggaggcacaggcggaggtttcaaaggtataaaagaagaaagccacgaagaagatttgccagaagacgaactagaaggcttactcgccgccgcagaagaaagcgcaaggtaagaagaaaaagaaaaaaaattaatatacaacaatggcaaccagaaagcattgttaaatgtaaaattaagggcttctctactttagtactgggggcagaaggcagacagtatatttgttggactaatgaagcccttgactacactcagccaaaagcaccagggggaggaggatttggctgtgaaaatataactttagaatggttatatcatgaacatagagcacacaactgtatatggaccaaaagcaatcaatacaaagatctatgcagatatacaggttgtaaaataactttatttagacacccaaatatagactttatttttcaatacaacctacaaggtccatttaacataacaaaattcacatatacagacatacaaccacagaacatgctactacaaccccataacagactaattcttagccaaaaaacaaaaccccatggcaaacttgctgttaaagttaaaataaaaccaccaaaacaaatgactaccagatggttttttgctaaagaattttcagaagctgtactagtacaactaaaagctgtagcctgttcatttacatttcctagaatagcacctaaggcacaaagtcaaatggtaacagtttactacttaaatgaaagcttttatccatctccaatttggggacaagtacacccaggtggctacatacctattagtacaagaacaggtatatataaattctcaaatacaaaaaccaaacctgcatactcagactttacaattaacacaaacacctttgaaagaggagaagcaggatattatgcctccattaactattccacaggcttttttaatgccaaagtactaaatgcatccaaagttacaataaataatgtagaatttggctcactacctttactaactgcaagatacaatcccaacgatgacacaggagatggaaatgtagtttatgcactttctattctacaaaattcatataacccaccaacagtacaatcagactatgttattagaggtcaaccactatggatggcatttcatggcttttggagctggattaaatatttatcaaaagacaaagcattttacacacactatatgtttgttgttcagagccgtgccataaaacccatctcacaaaacacagcacaaaaaagatttgcatttcttgacttatcttttatatctggcaaactaccttttgatgaatatttatctgacaatgaaaagaagctgtggtatccaaaagcacaataccagactgaaactataaattcttttgttcaatctggaccatttatacctaaactttcaaacataccagaaagcacttgggaattagactacaaatataacttttactttaaatggggtggtccacagattacagacagaccagttgacgaccctcaataccaaccagactaccctgttcccggtaaccgcacagaagcagtacagatatccaatcccaaaacccttgcgacagaaactctgctccatgaatgggacttcagaaggggcattgttacacacacagctcttaaaagaatgtcagaaaactttgaatctgaaacagatatctactctgatgactcaggaacaccaaaaaagaaaagaaagatcaccaaagaactcccataccaaagaccacagcaagaagccctcaaaacatgtctccaggagctctgcgaagaaaatacctgccaagaaacaccacaaacattacaagagctcatccagcagcagcagcagcagcagcagctcaaacacaacatcctccagctcctcacaaagctaaagaaggaccaacgctttttgggacttcaaacaggccttctagaatgacaccctttaaaaaaggctttgaaatggacacagaaagacagttagcacaagcattcaaaagaccccctagactgtttaaagaagacactcccttttacccctggttacccagaccagtgccccttgttaactttcaccttaattttaagttctaggcctccaaatttcacttagtggtggatgtttatataagtttgcaccccaaaaaaattgtaaaataaaaa

SEQ ID NO: 4764 - protein, 664 aa, Gammatorquevirus sp.; identical to SEQ ID NO: 3619

SEQ ID NO: 4765 - protein, 123 aa, Gammatorquevirus sp.; identical to SEQ ID NO: 1016

SEQ ID NO: 4766 - protein, 109 aa, Gammatorquevirus sp.; identical to SEQ ID NO: 1017

SEQ ID NO: 4767 - DNA, 2537 bp, Betatorquevirus sp.
gggggggtgaaggtgagtgaaaccaccgaaatcaaggggcaattcgggctaattcagtctagcggaccgggcaagattcttaaatatatttattttacagatgagtaaattccaaaaaccaactttatacaatggacgaggattagacaaccaatggattaatataatttacaactctcacgatctctgctgtggctgcaacaaagttcaagaccaccttctagatatactaaaaataaaaccatgccaccatactacagaaaaagattctaccgccgcaactactggaactggagaaacagaagaaatgcctttcgacgcaaaagatttagaagctttattcgccgaaaaccaagacgacgaagggtaagaagaaaattttattctaaaaactttaaaagaaaacttaaaagactaaatgtagtacaatggcaaccagcatacataaagaaatgtaatataagaggctggttagaattatttgaagcaggacatggacgttttggtaacaattttatatattacaaagagacatttacaccacataacacacccggaggaggtggatggagtttacaagaactaactttatcaaacctatttgtacaaaaccaacaatttatgaactactggtctaagactaacaatggactaaacttagtaagatacttaggaggaaaaattacattatacagacaaccagaaacagactatatatttatgtactacactgaagaagcaattcatgcaggaaaatattggtttccatcatttcacccaataaaaatgttagtagctaaaaacaaaatcgtagtaccaagctttaaaacacaaccactaaaaagaaaagcatacaaaactttaaaaattagaccaccaaaactcttaaaatcaaactggtactttcaacaacatgtttgtacatatccactactcagatttgcagtaacagcagtagacttaaattacatgtttctatcaccacgctcaaataacagcaacatcacattacacatgctaaacactggtttatttaaaagacataatttccaatacgcagaccctacaaaaggatactttccaaaacaaaacacatacctctacggtacatttaacggtacaccaacactatcacaagtaaagagaaaagaaaccacatacttaggtggtcaagaaaactttgaaggcacacctattacagaaacatcaaaagctacacaaaaaaaatactggggaaacgtattttttcacaaatatttcaactttatacaaagatcctttttatcaagcgaggacccacaaacattttatagtttagcaaacataaatacaacagtgggaagcgcagcacaagcaaaggaagaaccatactttttagacgttagatataacccttacaaagacacaggcacaggaaatatagcatactggctacaagtttcagatgccacacgaggagacagttgggaaccatacccagaccctgactaccaaatatcaggttacccattttggcttatgttatggggatgggcagattacacaaaaaaactaggaaaggctaaaaatttagacaacgattgggttttatgcctaaaatcaaacaaattcagttcaccattattcccatatgtaccactctcagacagctttgtacatggtcaagcaccatgggacaatgatgcagatgagattttaccaaacgacacaaaccactggtttccaaaatggaaatttcaagaagaagcaataaacaatatactaacatcaggaccaggggtatgcaaagcacctaatacagtttccatacaagctgtactaaaatacaatctttcttttaagtggggcggaaacagctcaaaactggaaaccatcacagatccattggcacaacccattacccccagtcccaataaccagcacctatcagatgaaattactaacccagaacaaagcatccaaaatctcctctacaaatgggacattagacgagacacacttacacaagcagctgaaaaacgaattaaagaaatcgaaactgatgacagaaatttgttcacagatggaatacaaactcaagaagaaacaacatcacaaaagaaagagacccagaaagaagagaagcaagcactactcctccagctccagcaactccagcaattcaaccaagagctgcagcagcgattcctcagactcaaacaactaacaatggaactataaactttacattaattaaaaaggcttatctgtttacgccaccaaaaaccaaactcacacccataagggggagggactgggaagatgaaaaatttttatgtaaatggatgcatagacctatgcgcaaatatttagaagacaccccatactatccttggtgtgtacctgaaccaaaggtaaactttaatcttgtaaaaggatttaataaaggccagcattaattcacttaacaagtctgtttattaaagaaaacttatataaaccaacaccgcctcccaaatacgcaggcgcagaagggggctccgcccccttaaaccccc

SEQ ID NO: 4768 - protein, 677 aa, Betatorquevirus sp.
LLWLQQSSRPPSRYTKNKTMPPYYRKRFYRRNYWNWRNRRNAFRRKRFRSFIRRKPRRRRVRRKFYSKNFKRKLKRLNVVQWQPAYIKKCNIRGWLELFEAGHGRFGNNFIYYKETFTPHNTPGGGGWSLQELTLSNLFVQNQQFMNYWSKTNNGLNLVRYLGGKITLYRQPETDYIFMYYTEEAIHAGKYWFPSFHPIKMLVAKNKIVVPSFKTQPLKRKAYKTLKIRPPKLLKSNWYFQQHVCTYPLLRFAVTAVDLNYMFLSPRSNNSNITLHMLNTGLFKRHNFQYADPTKGYFPKQNTYLYGTFNGTPTLSQVKRKETTYLGGQENFEGTPITETSKATQKKYWGNVFFHKYFNFIQRSFLSSEDPQTFYSLANINTTVGSAAQAKEEPYFLDVRYNPYKDTGTGNIAYWLQVSDATRGDSWEPYPDPDYQISGYPFWLMLWGWADYTKKLGKAKNLDNDWVLCLKSNKFSSPLFPYVPLSDSFVHGQAPWDNDADEILPNDTNHWFPKWKFQEEAINNILTSGPGVCKAPNTVSIQAVLKYNLSFKWGGNSSKLETITDPLAQPITPSPNNQHLSDEITNPEQSIQNLLYKWDIRRDTLTQAAEKRIKEIETDDRNLFTDGIQTQEETTSQKKETQKEEKQALLLQLQQLQQFNQELQQRFLRLKQLTMEL

SEQ ID NO: 4769 - protein, 89 aa, Betatorquevirus sp.
MSKFQKPTLYNGRGLDNQWINIIYNSHDLCCGCNKVQDHLLDILKIKPCHHTTEKDSTAATTGTGETEEMPFDAKDLEALFAENQDDEG

SEQ ID NO: 4770 - protein, 63 aa, Betatorquevirus sp.
LFTPPKTKLTPIRGRDWEDEKFLCKWMHRPMRKYLEDTPYYPWCVPEPKVNFNLVKGFNKGQH

SEQ ID NO: 4771 - DNA, 2537 bp, Gammatorquevirus sp.
aaaaattgcaaaaattcggcgctcgcgcgcgctgaggggcaattcgggctagggcagtctagcggaacgggcaagaaacttaaaactatttgtttttagatgtacagattctacaaacaaactacctacaatggagacaccttaaaccaaatgtggatgtccctcattgctgattctcatgatattcactgcaaatgtgaagccccctttgctcaccttcttcaaagcatctttccacctggacacagagacagacaactaacaattgaacaaataactacaagagactttttacaatgccattctggtggaacagaagaagaaagccatggtttacaacttggagaaagcgccgctactttaaaacaagaagaaaaagaaaaccaagacccagaagaagatatagacgaccttatcctcgccgccgccgccgccgcagaagaaggtacaaggtaagaaaaaaactacaaaaaataactgttaaacagtggcagccagactctatagttaaatgtaaaattaagggacttggatgtttagtagcaggagcacaaggcagacaaccctactactacaccaccagtaaataccaataccctcaaccaaaagctccaggcggcggtggttttggagctgaactttttactttacaatacttatatgaagaatgggtggctagaagaaacatatggactagatctaatgactacaaagatttagttagatttactggatgtacattttacctatttagacacagaactacagactttatttttaactataacagacagccaccatttatattagaaaaagactattttaatgacttgcaacccatgtcaatgttactcagcagacatcatagaacaatacccagcctagccagaaaaccactaggaaaaccatatgtaaaagttagaattaaaccacccaaacaaatgctaacaaaatggttttttcaagaagactttgctacacaaggtctatttacaatatcagcctcagcagcaaacttatcatgggcatactataatcctgacacacaaagcagatgcttaacattacactctttaaacaccacattctatgctaatgcagactatggagctgcagcaacactaccatggtatccatacaactcatggccacatacaactggacttaaattttgtagaaaagtaaacaatagatgggtgtccacactagtaaatcctaacacctataaacactcagtatcatacaatactggcttctttcagccaggtgtgctacaagcaactaaaatagtagctgcaaccacaaaagatacagaaatagataatgcaccggtagcaatgtcatctttacccatagctacatttagatacaacccagaagaagacacaggacaaggaaatgtagtatggctaacaagcacacttactaactcacactgggagcaaccacacctaacagaccttattatagtgggcaaaccactatggcaagcattctatggctttcaaagctacatagaaaaaacaaaaaaatacaaagactggctaatttcaggaatctttgtatgcaaatgcccttcactaaaaaggctatcaacaacaactcaaacaacatttgtatttgtagaccttgattttatacaaggtaaactaccctatgaagagaccataacagataacaggaaaaaattttggtacccagttactgaaaaccaacaaaccagtatagctgccctagtacaatgtggaccatatgtcccaaaatatgcttaccaagatgaaagtacctgggaactaacatacaaatatatttttcattttaagtggggaggcccatatgtctcagaagaacttgtacaaaacccaaaaaaccaagggaaataccccgttcccgatactatctcacaagcaatacaagttgctaacccactcaaacaaaccattaaaacaatgcttagagactgggactacagaagggggattgttacaacaacagctcttaaaagaatgtcaaaacacctcgaaactgattcatctctccaatctgatgactcagaaactccaaagaaaaagaaaaaaatcacagcagaaataccatgccacgaagagaaaacacaagagatccaacaatgtctcctctctctcttcgaagaaagtacctgccaagaaacggaggacctcaagcagctcatccagcaccagcagcagcagcaacaaaagctcaagctcaacctcatcaagctcctaatggacttaaaacatcaacaaagaattctacaacatcaaacaggcatagattaactacttttaaacctggctttgaacaagacacagaaactcagttagcacaagcatttaaaagacctgttagaaaatttaaagaagacccccctttttatccctggttaccaacaacacctattgtaaactttcaccttagatttaaagactaggccgacactgttcacttagcggtgtttgtttaataaagtttgcaccccaaaaaaattgtaaaataaaaaaaaaaaaaaaaaaata

SEQ ID NO: 4772 - protein, 667 aa, Gammatorquevirus sp.
MPFWWNRRRKPWFTTWRKRRYFKTRRKRKPRPRRRYRRPYPRRRRRRRRRYKVRKKLQKITVKQWQPDSIVKCKIKGLGCLVAGAQGRQPYYYTTSKYQYPQPKAPGGGGFGAELFTLQYLYEEWVARRNIWTRSNDYKDLVRFTGCTFYLFRHRTTDFIFNYNRQPPFILEKDYFNDLQPMSMLLSRHHRTIPSLARKPLGKPYVKVRIKPPKQMLTKWFFQEDFATQGLFTISASAANLSWAYYNPDTQSRCLTLHSLNTTFYANADYGAAATLPWYPYNSWPHTTGLKFCRKVNNRWVSTLVNPNTYKHSVSYNTGFFQPGVLQATKIVAATTKDTEIDNAPVAMSSLPIATFRYNPEEDTGQGNVVWLTSTLTNSHWEQPHLTDLIIVGKPLWQAFYGFQSYIEKTKKYKDWLISGIFVCKCPSLKRLSTTTQTTFVFVDLDFIQGKLPYEETITDNRKKFWYPVTENQQTSIAALVQCGPYVPKYAYQDESTWELTYKYIFHFKWGGPYVSEELVQNPKNQGKYPVPDTISQAIQVANPLKQTIKTMLRDWDYRRGIVTTTALKRMSKHLETDSSLQSDDSETPKKKKKITAEIPCHEEKTQEIQQCLLSLFEESTCQETEDLKQLIQHQQQQQQKLKLNLIKLLMDLKHQQRILQHQTGID

SEQ ID NO: 4773 - protein, 118 aa, Gammatorquevirus sp.; identical to SEQ ID NO: 4224

SEQ ID NO: 4774 - protein, 118 aa, Gammatorquevirus sp.; identical to SEQ ID NO: 4225

SEQ ID NO: 4775 - DNA, 2536 bp, Gammatorquevirus sp.
ggcaattcgggctagggcagtctagcggaacgggcaagaaacttaaaactatattctttttacagatgtccttcatgtttaaaccatctaaatacaacaatgacaccaaacaacaactttggatgagtatttttgcagattctcatgatagtatctgttgctgtgaaacaccctttgcacatgctttacagtgcatgtttcctgagggtcacaaagacagacaccttacagtagaccaaataatcaccagagaccttacactatggcattctggtggtacagacgaagaaaaccatggtttggcagatacagaacaacctacaagcgccgctatacaacaaagagaagaagaagaagaagatatcctaaaagacgaagaaatagaagaacttatcgccgccgcagacgacgccgttacaaggtaagaagaaaacaaaaaaaaattaatatagcacaatggcaaccagaaagcataaaaaaatgcaaaataaaaggctcaggacagcttgtactgggggcagaaggaacacaattcagatgctttacagtatacaaaaatgagtggactaaccctaaagtagccacaggaggaggatttggagtagaactctttactttaaaatacttatacaaagaatacttagctaaaaacaacatatggacatcctcaaatgcttatagagacttttgcagatacacaggatgtactatcaaagcttttagacatccaacaacagactttattatgtgctatgatatacagcctccattcacaatttccaaatacacatacatgatgtgtcacccacattttttactgcaaagaaaaaacaaaaagataatactaagcacacaaacaaaacccaatggaaaactaactaaaaaattcaaaattaaacctccaaaaatgctacaaacaaaatggtactttcaagaagaactagcaaactttggcttagtaactttaatagcatcagcatgcaattttagatacccatggcttgcctgctgtaatgaaaatttaataattactttatactacttacaaccttctttttgggtacacacagaatgggcacaatattcaacaaaggcatacaacccattaggacatttaacccctatgtatgaccaactaacattcaagggagaattaaataaaacaccctatgaatggaaaatgcctcccactacttctgaaaactatcaaagttctttaaacaaagacagtggatggttctgtcccaaagttttaaatgcacacacagtcctaaaagacaaacagagacagtcactagcaccctgtggagtgctaagatacaatccatacattgacacaggagaaaaaaacaaactatatgtttgctcaatactagttgggtcctggacagaaccaaaagacacagacctagtattagaaaattttccactttgggctatgttttttggatatacatcctacttaaaacaaataaaaaacaaaactacaccactaagtggatccatgatagtaattaagtctccagctttatacagagtttttggagaagatacaaaagatttttacccactaatagacaaatccttcatgaatggaaaaggcacaggcaatacagatccaatacctccaaaaaaagacctatggtacccagctgtatttgctcaaagagacagcatagcacaaatagttaactgtggaccatacattccaaaatataatgaagtaaaagaaagtacatggcaactgaactacttttacaactttttttttaagtggggtggatcatatccaccacaacaagaagcagaaaatccagaaaacaaaaacacctatcctatacccaatacagaacaagagacagtaccaattgaaaaccctcttaaacaaaagtaccaaacagtctttaaaccctgggactacagaagagggtctcttacaaaaacagctattaaaagaatgtatgaaaacctcacagatgatgactctgtatcaacagattcaacaggctcaacatcacccaaaaagaaaaagctactccccacactccaagacccgaaaaaagaaaacaaagagatccaagcatgtctcctctcactctgcgaagacagtacctaccaagaaccgaaagaagaccaaaacctcttccagctcatcaaaaaccagcacttccagcagcagcagctcaagctcaacttactaaccttgatctcagatttaaaagtaaaacaaaggaatttacttcatcaatcaggctatctagcctaaccagatttcaaccaggatttgaagcagacacagaaagagaattagccattgcctttcacagaccacccagaacatacaaagaagatactccattttatccttggctaccccctgcacccaaaatatgctttcagcttaactttaaaggctaggccaacactgttcacttagtagtgtttgtttaataaagtttgcaccccaaaaaaattgtaaaataataaaaaaaaaaaaaaaataaaaaattgcaaaaattcggcgctcgcgcgcgct

SEQ ID NO: 4776 - protein, 667 aa, Gammatorquevirus sp.
MAFWWYRRRKPWFGRYRTTYKRRYTTKRRRRRRYPKRRRNRRTYRRRRRRRYKVRRKQKKINIAQWQPESIKKCKIKGSGQLVLGAEGTQFRCFTVYKNEWTNPKVATGGGFGVELFTLKYLYKEYLAKNNIWTSSNAYRDFCRYTGCTIKAFRHPTTDFIMCYDIQPPFTISKYTYMMCHPHFLLQRKNKKIILSTQTKPNGKLTKKFKIKPPKMLQTKWYFQEELANFGLVTLIASACNFRYPWLACCNENLIITLYYLQPSFWVHTEWAQYSTKAYNPLGHLTPMYDQLTFKGELNKTPYEWKMPPTTSENYQSSLNKDSGWFCPKVLNAHTVLKDKQRQSLAPCGVLRYNPYIDTGEKNKLYVCSILVGSWTEPKDTDLVLENFPLWAMFFGYTSYLKQIKNKTTPLSGSMIVIKSPALYRVFGEDTKDFYPLIDKSFMNGKGTGNTDPIPPKKDLWYPAVFAQRDSIAQIVNCGPYIPKYNEVKESTWQLNYFYNFFFKWGGSYPPQQEAENPENKNTYPIPNTEQETVPIENPLKQKYQTVFKPWDYRRGSLTKTAIKRMYENLTDDDSVSTDSTGSTSPKKKKLLPTLQDPKKENKEIQACLLSLCEDSTYQEPKEDQNLFQLIKNQHFQQQQLKLNLLTLISDLKVKQRNLLHQSGYLA

SEQ ID NO: 4777 - protein, 119 aa, Gammatorquevirus sp.
MSFMFKPSKYNNDTKQQLWMSIFADSHDSICCCETPFAHALQCMFPEGHKDRHLTVDQIITRDLTLWHSGGTDEENHGLADTEQPTSAAIQQREEEEEDILKDEEIEELIAAADDAVTR

SEQ ID NO: 4778 - protein, 111 aa, Gammatorquevirus sp.
MSPLTLRRQYLPRTERRPKPLPAHQKPALPAAAAQAQLTNLDLRFKSKTKEFTSSIRLSSLTRFQPGFEADTERELAIAFHRPPRTYKEDTPFYPWLPPAPKICFQLNFKG

SEQ ID NO: 4779 - DNA, 2536 bp, Gammatorquevirus sp.; identical to SEQ ID NO: 4775

SEQ ID NO: 4780 - protein, 667 aa, Gammatorquevirus sp.; identical to SEQ ID NO: 4776

SEQ ID NO: 4781 - protein, 119 aa, Gammatorquevirus sp.; identical to SEQ ID NO: 4777

SEQ ID NO: 4782 - protein, 111 aa, Gammatorquevirus sp.; identical to SEQ ID NO: 4778

SEQ ID NO: 4783 - DNA, 2535 bp, Gammatorquevirus sp.
accaccaaaacaaatgctaagcaagtggttttttaggggcaactcgggctagggcagtctagcggaacgggcaagaaacttaaaactacatttgttttacagatgacaaccatttataaaccaacaaaatacaatggagatactaaacaacaactatggatgagtattctatctgacagtcatgatctacactgtggatgtgatactccatttgcccacatactagattctatatttccagtaggccacactgacagaaacaaaactattgaagaaataatagcaagagatacaccatgccattctggtggagacgccgcagacgaccttggtttggccgttggcgccagcgccgctacagaaaatataaacccaagagaagaagaagatggcccagaagaagatatagaagaactactcgccgccgcagacgccgcagaaagagggtaagaagaaagaaacaatctatagtagtaagacaatggcagcctgatagaatagtaaaatgtaaaattaagggttttggtagcatggttttaggagcagaaggcagtcaatacctatgctttactaatgaacaatacaaatggactctgccaaaagcaccagggggagggttatttggtgcagaaaaatttactttgtacaatttatatgaacaatacttatttagaagaaatgtatggacaaaatcaaatatattatttgacttagttagatatctaagatgccaattcactttttatagacaccaaaaagttgactttatagttaactacagcagacaagctccatttacaatacaaaaatacacatacacacttatgcaccctacacaactactactaggtaaacacaaaagaataattcctagtaaattaacaaatccaaaaggtaaattaaaacacaaactaattataaaaccaccaaaacaaatgctaagcaagtggttttttcaacaaccattttcaactgcagacttactacaaataacagccagtggctgcagcctatcataccctaccttaggctgctgcaatgaaaaccccatcattagtatgtactacctaaatgtacaattttttcaagaaagcaactgggcacaaacacaccaaacagcatttttaccatactccacaatcagtacacaaaacgtatactactataaaataggcaacacatctggaaactacaaagttactgaatttaactttcatactagcgacccatcaaactactacaaaagcattaacagagaaacaggctggtttaatccaagaatattaaacacctataaaataatgaatggagaacaaacatatggatatatacctgtatctgcagccagatacaacccacttttagatgatggaaaaggcaatgaagtatacctagtatctgtcatgtctggaaaatatgacaaaccaacagatagtaacctaatatttcaaaatatgccactatggcttgcattttttggaatatggaactggatagaaaaatataaagccataagctttttaacacaacatttatttgttattaaatcatcctatatacaactacaacctaccactgcaacaaataaattttttgcatttatagactacagctttatgcaaggcaaaaatgctcatgatacctacttaacatccacagacaagcaaaattggtatcccacatgctggcaccaaattgaaactgtaaatgccatagtaaaatgtggcccaatgatacctaaactagacaatgacagagacagtacatgggaattaccttacacatattcatttttatttaagtggggaggaccagaaacttccgatgaacaaattaaagatcccaaaacacaaccagtctacaatgtacccgatcacttccacacctcaatacaagttagaaacccgctcaaacaaacgcctgaatcccttttacacccatgggactacagacgcggaattgttacacactcagcttttaaaagaatgtgcgaaaacatcgaaactgatacagatttccaatatgattcagagacagaaacaccacaaaaaagaaaaagagttggtggagagctgccctacccagaagaaaagacaaaaaaaatcaaaacatgtctcctctcactctgcgaaagcagtacctcccaagaaacgcaggaggaggcaccagacctcctccagctcatcagaaagcagcagcacaaacagcagcaactcaagtacaacctcttaaaaattctacacgaaatgaaagccaaacaacgagatcttcaacttcaaactggaatattagactaacaagatttaaacctgggtttgaagaaactacagaaaaagaattagcaatagctttttgcagaccaccaagaacatacaaagaagacccccctttttacccctggttacccccaagtccccgtgtaaactttcaccttaattttactggctaggccaacaactttcacttggcaaagcatgtttatataagcagcacacaaaaaaaaaataaaaaaaaaaaacacaaactaattataaa

SEQ ID NO: 4784 - protein, 666 aa, Gammatorquevirus sp.
MPFWWRRRRRPWFGRWRQRRYRKYKPKRRRRWPRRRYRRTTRRRRRRRKRVRRKKQSIVVRQWQPDRIVKCKIKGFGSMVLGAEGSQYLCFTNEQYKWTLPKAPGGGLFGAEKFTLYNLYEQYLFRRNVWTKSNILFDLVRYLRCQFTFYRHQKVDFIVNYSRQAPFTIQKYTYTLMHPTQLLLGKHKRIIPSKLTNPKGKLKHKLIIKPPKQMLSKWFFQQPFSTADLLQITASGCSLSYPTLGCCNENPIISMYYLNVQFFQESNWAQTHQTAFLPYSTISTQNVYYYKIGNTSGNYKVTEFNFHTSDPSNYYKSINRETGWFNPRILNTYKIMNGEQTYGYIPVSAARYNPLLDDGKGNEVYLVSVMSGKYDKPTDSNLIFQNMPLWLAFFGIWNWIEKYKAISFLTQHLFVIKSSYIQLQPTTATNKFFAFIDYSFMQGKNAHDTYLTSTDKQNWYPTCWHQIETVNAIVKCGPMIPKLDNDRDSTWELPYTYSFLFKWGGPETSDEQIKDPKTQPVYNVPDHFHTSIQVRNPLKQTPESLLHPWDYRRGIVTHSAFKRMCENIETDTDFQYDSETETPQKRKRVGGELPYPEEKTKKIKTCLLSLCESSTSQETQEEAPDLLQLIRKQQHKQQQLKYNLLKILHEMKAKQRDLQLQTGILD

SEQ ID NO: 4785 - protein, 115 aa, Gammatorquevirus sp.
MTTIYKPTKYNGDTKQQLWMSILSDSHDLHCGCDTPFAHILDSIFPVGHTDRNKTIEEIIARDTPCHSGGDAADDLGLAVGASAATENINPREEEDGPEEDIEELLAAADAAERG

SEQ ID NO: 4786 - protein, 112 aa, Gammatorquevirus sp.
MSPLTLRKQYLPRNAGGGTRPPPAHQKAAAQTAATQVQPLKNSTRNESQTTRSSTSNWNIRLTRFKPGFEETTEKELAIAFCRPPRTYKEDPPFYPWLPPSPRVNFHLNFTG

SEQ ID NO: 4787 - DNA, 2535 bp, Gammatorquevirus sp.
aattgcaaaaattcggcgctcgcgcgcgaggtctaggggcaattcgggctagggcagtctagcggaacgggcaagaaacttaatatataactctttttacagatgcaaagacttactttttttcaaccaccactatacaatcatattggcagaaatcaactttggatagatgcctgtatctttgcacacgattgctggtgtggctgcaatcatcctattgctcattttattgattctgtattgccttctggtcacaaggatagagaccttactattaacgagatcctgtccagggacctaaaagaaacatgcccttctggtggaaccgtcgcaaaaagtggtggggacgcggccgctttcgctaccgaagaagaaaatcaaatttcaaacgcagaactagaagaaatctttacagaagacgccataaacgagctcctagacgccgccgcaaaagacgaacaaccaaggtaagaagaaaaaagaaataccttaaattactacaatggcagccagaatctattagaaaatgtaaaattaaaggctatgaaacccttatactaggagctaatggaaaacaatttagagactatacatctaccatgaatgactgggttccacccacagtaccaggtggaggtggattttcaatatcaagatatactttagaatacctgtatgaacaatttcaactacacaacaacatatggacacattccaatgaaaactatgatctctgtagatacctaggaactaaaattgtattctacagacatccacacacagactttgtagtacaataccaaagagaatatcccatgacagaaacagccctaacaccactacatacacatccactaattttactacaacaaaaaaacaaaataataattccaagcagaataacaaaaccacatggcaagattaaaattaaaaaatttattaaaccacctgcacaacaaacaaataaatggtttttcattagagactttgcaaaaaccccactactattaattaaagcaacagcctgtgatttaaactatgttagactagccaaaggcagtgaaaacaaccaaacaaacatatggagtctcaacactgtattttacttaaatggagcctttggacaaaaagcaagcagtcataatacctatgaacctgcacacacaatgacttttcaacaaggacaaatacaaggtaccctacccaacaacaaatcatttcaaacacacatgaaaaacacatatgattcttcagtaaattattctgaaggctggtttaactctaatgtattactcagctctacacttacagtacctcaattacaaactaagcctgttttcatcacaagatacaatccaatgctagacacaggcaaaggtaataaaatatggctaaaatcaatatttgcagaatcctgggctccaccatccattgaaacatatttaatcatgcaagatgaacctctatggctacttttttatggctggctagattatatcaacgaattaaagccagcatatgacatattcaacaaatacaccatagtcatacaaagcccttactttcaaactcctacacccaaaccaacttacttagtaccactagatgactcatttatacaaggaaacggaccatacaacagcactcctacaactacagataaaaacagatggatacctgtactaaaacaccaacaacaatctataaacaacttagttaaatgtggcccgttcatcactaaaccagatggaaaatattcaaactgggaattacatctaaactacacttttctttttaagtggggaggagcacaacctccagaaaacaccatatatgatcccaccaaaggaagtatctaccctgtgcccgataaattctacaaaacagtacaaatccaagatccaacaaaacaaatcccacaaaacatactccacacatgggacttcagaagagggattgttacaacaaaagctcttaagagaatgtatgactacttatcagatgaatcaaatatatcaacagattcagagtgcccagaaccccagaaaaaagccaaaaaatcagccagacaagtcctcggccaagaaaacaaaaaagaaagcctcaactatctccagcaactcttcgaagaagatacatcacaaaaagaagaaacccaaaagaaaacaatcgagcagctcatcgagcagcagcagcagcagcagcagaatatcaagcacaacctcatcaagctaatcacagatgtgaagaaaacacaactgcagatgcaagtacacactggaattttaaactaaacagaaagtttaaaccaggttttgaagaagaaacagaaaaacaactagcagcagcatttaaaagacccccaagaacctatgtaaatgacacaccattttacccatggttacccccagcccccaaagtctgctttaagcttaacttcaaaaactaggccaacactgttcacttagtggtgtatgtttaataaagtttacaccccaaaaaaatatgtaaaaaaaaaaaaaaaaaaaaataaaa

SEQ ID NO: 4788 - protein, 661 aa, Gammatorquevirus sp.; identical to SEQ ID NO: 4514

SEQ ID NO: 4789 - protein, 122 aa, Gammatorquevirus sp.; identical to SEQ ID NO: 4515

SEQ ID NO: 4790 - DNA, 2533 bp, Betatorquevirus sp.
gcgcacaagggggctccgcccccttaaaaaatcaaggggcaattcgggctaggtcagtctggcggaacgggcaagaaacttaatatatttattttacagaatgtccaagtatcttcgtgaaccatgctacagaaatagacaactagaaaacaaatggataaatgtaatctttgaatctcacgacctaatttgtggctgtaacacaccaatcgaccaccttaaccacatcattgacgaacaaagatgcccgccttctaccgccaaagatggagaaaaaactactggaaaggcagaagaagagccttttacagacggagacctcgaaagactcttcgcagaagatggagaagacgccaccgggtaagaagaaaacgtttttttcgtaaaaactttagaaaactaaaaagactaaacattaacgaatggcaaccatcatgcataaaaaaatgtagaatagaaggatatttatgtctattccagtcaggacaaggaagattttcaaataattactgtgccagcaaagaaagttttactccagaacaccaacccggtggcggaggatggagttttcaacaacttactttagcaaacttatatactcaaaactgtgaatttatgaactactggactcgtagtaacaacagacttcctatggttagattttatggaactaaaataactctgtttagacaacctgaagtagactacatatttacttacctaaaagaaacaccaaaaacagtagaaaaatacttttttgcttcctaccatcctttacacttactaacacacaaaagaaaagtaatagtacctagctttgcctcacaaccacacaaaaaaaaaccatacaaaaaaatattcattccaccgccaccactactaaaaaaccaatggtatatgcaagcctcagtcgctcaatttccattaacatcattctttacaacagcatgcagtctccacgaaatgtttggttcagacagagcagaaaacaacaactgtactgtctggatgctagacacaaccttcatttcacacccctgcttccaatttaaacacacagaacaacccaaatttggctacataccaaatgcacaatcatatttatggggactaatacatgggcaagaaccaataactaaaaataaaatatcagattgcatatacttaggaaattctatgttaaatgaacaaggccaaatatgcaaaacacctggatcgacctttgacataagtaaatatcccataggagaatggggaaatccatttcactttaattacctatacctagaacatgcacaacttataataacaacagcaacacaagatccagaaacctgtttaaaatctcccttttacttaaaaagctcaaacgtaaaatccaacccttacgtctacacagtcagatataacccttttaaagacaaaggccaaggaaatgaagtatattttataccaaattgtgtaaaatcccacaccacatgggaacccacatcagaccctagcatacactttgcaaaccttccactatggctcatattttggggtattgaagacacactaaaaaaaatgggtaaatgtcaacacttagacgatgactggatatgtgtaattaaaacaaacgctttttatccacctgcaacacattatgtcccattatcatacagttttgtacacggaagagctccttatgacaatgacccagtagatatatcaggacaagatcatgctagttggtatccaaaatacaagtttcaaagagaagcaatagctaatataattcaaactggcccagcagtatgtcaagctaaaaatctaaaaaatatacaagctaaaatgaaatatcaatttcttttaaagtggggaggaaacccttcaccaatggaacaagcaaaagacccactggcacaacccatcattcccacccccagtggactctacctacaaaatgaaattaatgacccaaacactccctaccaaagcttcctctaccagtgggacactagacgggactatattacaccagcagctgcagaaagaattaaagaatgcgaaactcatgaccaacttatgttcacagatggaatacaaacttcaacagacgtcccaacgaccaaaacaacaccacaaacgaaagagacccaggaaacacaaacggagacactactccagcagctccaacagctccaactctacaaccaacagcttcaactcagattcagaaagttaaagcaaactttcttggaaatgtaaaaaaagcttacttattcccccctaagtctcccaagaaacctaagcgcttcaccccttatgactggcaagatgaaaaatttctcgcttcctggctaaaaagaccaatgcgctactatgcctctgacactcccttttacccttggcttcccccaaccccaatagtaccacatgttaactttgaccttgtaaaaaactttaataaaggccagcattaattcacttaacgagtctgtttatttaagttaaaactaatacaaacatccaccgcctccctaatacgcag

SEQ ID NO: 4791 - protein, 668 aa, Betatorquevirus sp.
MPAFYRQRWRKNYWKGRRRAFYRRRPRKTLRRRWRRRHRVRRKRFFRKNFRKLKRLNINEWQPSCIKKCRIEGYLCLFQSGQGRFSNNYCASKESFTPEHQPGGGGWSFQQLTLANLYTQNCEFMNYWTRSNNRLPMVRFYGTKITLFRQPEVDYIFTYLKETPKTVEKYFFASYHPLHLLTHKRKVIVPSFASQPHKKKPYKKIFIPPPPLLKNQWYMQASVAQFPLTSFFTTACSLHEMFGSDRAENNNCTVWMLDTTFISHPCFQFKHTEQPKFGYIPNAQSYLWGLIHGQEPITKNKISDCIYLGNSMLNEQGQICKTPGSTFDISKYPIGEWGNPFHFNYLYLEHAQLIITTATQDPETCLKSPFYLKSSNVKSNPYVYTVRYNPFKDKGQGNEVYFIPNCVKSHTTWEPTSDPSIHFANLPLWLIFWGIEDTLKKMGKCQHLDDDWICVIKTNAFYPPATHYVPLSYSFVHGRAPYDNDPVDISGQDHASWYPKYKFQREAIANIIQTGPAVCQAKNLKNIQAKMKYQFLLKWGGNPSPMEQAKDPLAQPIIPTPSGLYLQNEINDPNTPYQSFLYQWDTRRDYITPAAAERIKECETHDQLMFTDGIQTSTDVPTTKTTPQTKETQETQTETLLQQLQQLQLYNQQLQLRFRKLKQTFLEM

SEQ ID NO: 4792 - protein, 101 aa, Betatorquevirus sp.
LAERARNLIYLFYRMSKYLREPCYRNRQLENKWINVIFESHDLICGCNTPIDHLNHIIDEQRCPPSTAKDGEKTTGKAEEEPFTDGDLERLFAEDGEDATG

SEQ ID NO: 4793 - DNA, 2532 bp, Gammatorquevirus sp.
ctaggtggtcttttaaatgcatctgctaaggtctaggggcaattcgggctagggcagtctagcggaacgggcaagaaacttaatatgtttgttttacagatgccaatattttttaaaccaactgaatacaatggagatacaaaacaacaactatggctgtcacttataggagattcccatgacatgtactgtggctgtaaccttccatttgctcacctacttaactgcatattcccacctggacatactgatagacatttaacaatacagcagattattaccagagataaacaacaatgccctggtggtggggaagaagaagaagatggtgggctcccactaggcgcaagcgccgcaaacctcgctaccataaaacaagaagaaggagatggacaagaagatataggagtagaagagctcctcgccgccgccgccgccgcagagtcaaggtaagaagaaagaaaaaacaaataactgttaaacaatggcagccagatacaattagaaaatgtaaaattaaagggatatcaatacatgttttaggcagtcaaggaaaacaatttgcctgttatacagactctgcaaaagactggacaccaccattacaacctagtggtggtggatttggagttgaaaaatataccttgcagtacctgtatgaacaaaacagagctggcaacaatatatggacagctagtaataaacttctagaccttgttagatatactggaggatacattaagttttttaggcacccacatgctgattttatagtcaaatatagcagaaccctaccaatgaatttagaaaaatatacatactcagaagcatatccacaaaatatgatgttagcaagacacaaaagatatataccaagcttactaacaaaaccacacggtaaaagatgggttaaaattaaatttaaaccacctaaacaactaacaaacaagtggtactttcaagaaacatttgctaacacaggcctgatacaaataactagcactgtagcagacttaagataccctcacttaggttgctgtaatgaaaacttacttgtaagttttatagcactaaacctagaattttataaaaactttggctggggtaaccctaacaatcctgttacacctacagaactaaaaaaatggtatattccatacaattcagcaaaaataataagtgaagttaaaataggcactcaaacaaaacgtgtaacaacagctgtaacaccatatgaaacaactattacatatgacaatggctggtttcagccatcacttatgcaggccactgcaataacacaaccacctgaaacacacatacctactacagtaggtagatacaacccaactagagacacaggagttggaaatgccatatggttactatcaatactaaacagttcataccaacctccaaaaacagacaaagacttaatactacaaggactacctctatatgaactactactaggatttacaaactacatacaaaaaattaagaaagaatctacatttttaagaacatactgcctttttatcaggagtcctgcaatagaaccacaacatacacaatacaacatatactgcccaatagattcctcatttgtacaaggcaaaggcccctttgactcctatgttactcagtggcaaaaacaacactggtttccaacagtagaacaccagatgaaaactattaattcaatagttacatctggaccattcatgccaaaactagacaatttaaaacaaggtacttgggaactctggtccaactattgctttttttttaagtttggaggtgcacaattaccagatgcagacacagcaaacccagcagaacaaggttcatttcccataccctctaaccagcagcagacagtacaaatcagtaatccggagcacagcagtgcccttgcaaccatccactcctgggaccttagaagaggcatcattacaagcaaagcttttaaaagaatgtgcgaaaaccaactcactgatacagatttccaaacagatacagagccagtcccaaagaagagaaaaaaagagaaaggcaatgcactccacatccaggaagaagaaacacaagagatacaaagctgtctccgctctctctgcgaagaaagttcatgccaagaattccaagaccagacaaacctccagcagctcatccagcagcaaaagcagcagcagcagcacatcaagcagaacctcctcagactcatagtggacttgaaaaacaaacagaaagttctccaactacaaacaggaattctagaatgactccattcaaaaaaggctttgaagaagacacagaaaaagaattagcagatgcatttaaaagaccacctagatactttaaagaagatcccccattttacccctggcttccttgtgtacccaaagtacaatttaagcttaattttaaaggctaggccgtcaattttcacttagtaaagcatgtttatataagcacaacccttttaaataaataaataaaaaaaaaaatgggggatcttctttaaagtat

SEQ ID NO: 4794 - protein, 662 aa, Gammatorquevirus sp.
MPWWWGRRRRWWAPTRRKRRKPRYHKTRRRRWTRRYRSRRAPRRRRRRRVKVRRKKKQITVKQWQPDTIRKCKIKGISIHVLGSQGKQFACYTDSAKDWTPPLQPSGGGFGVEKYTLQYLYEQNRAGNNIWTASNKLLDLVRYTGGYIKFFRHPHADFIVKYSRTLPMNLEKYTYSEAYPQNMMLARHKRYIPSLLTKPHGKRWVKIKFKPPKQLTNKWYFQETFANTGLIQITSTVADLRYPHLGCCNENLLVSFIALNLEFYKNFGWGNPNNPVTPTELKKWYIPYNSAKIISEVKIGTQTKRVTTAVTPYETTITYDNGWFQPSLMQATAITQPPETHIPTTVGRYNPTRDTGVGNAIWLLSILNSSYQPPKTDKDLILQGLPLYELLLGFTNYIQKIKKESTFLRTYCLFIRSPAIEPQHTQYNIYCPIDSSFVQGKGPFDSYVTQWQKQHWFPTVEHQMKTINSIVTSGPFMPKLDNLKQGTWELWSNYCFFFKFGGAQLPDADTANPAEQGSFPIPSNQQQTVQISNPEHSSALATIHSWDLRRGIITSKAFKRMCENQLTDTDFQTDTEPVPKKRKKEKGNALHIQEEETQEIQSCLRSLCEESSCQEFQDQTNLQQLIQQQKQQQQHIKQNLLRLIVDLKNKQKVLQLQTGILE

SEQ ID NO: 4795 - protein, 122 aa, Gammatorquevirus sp.
MFVLQMPIFFKPTEYNGDTKQQLWLSLIGDSHDMYCGCNLPFAHLLNCIFPPGHTDRHLTIQQIITRDKQQCPGGGEEEEDGGLPLGASAANLATIKQEEGDGQEDIGVEELLAAAAAAESR

SEQ ID NO: 4796 - protein, 111 aa, Gammatorquevirus sp.
LSPLSLRRKFMPRIPRPDKPPAAHPAAKAAAAAHQAEPPQTHSGLEKQTESSPTTNRNSRMTPFKKGFEEDTEKELADAFKRPPRYFKEDPPFYPWLPCVPKVQFKLNFKG

SEQ ID NO: 4797 - DNA, 2532 bp, Gammatorquevirus sp.
tgtaaaataaaaaaaaaaaaaaaaaccgaggtctaggggcaattcgggctagggcagtctagcggaacgggcaagaaactaaaatttatttttaatttacagatgctcagcaccaaagatttttacaaaaaaactaaatacaatgcagaaaccaaaaaccaactatggtgctcaataatagctgattctcatgatggatactgtggctgtgaaacaccatttgctcatttactagcctgcatttttccacctggacacaaggacagagatcttactataaaccaaatacttgagagagactacaagcaaatatgcctttctggtggaggagaagaagaaagccatggtatggcaggtggtttaccaggagaaggagacgcccctggggtaaaagaagaagaagaagaatatataaaagacgaagaactagaaaacttaatcgccgcaggagaagacgccggtacaaggtaagaagaaaaaaacaaaccattactgtaaaacaatggcaacctgactccattagaaaatgttttataaaaggacatggaactctagtagttggagctgaaggcactcaaatgttttgttatactaaagacaagtttaaatatgtgcctccgaaaactccttatgggggtggttttggagctgagagatacaccctaagatttttatatgaagaatatcagttccacaacaatatctggactgcatcaaacttatacaaagacttatgcagatttctatgggttaaatttatattttacagacacccagaaacagattttgttatatcatacagtaggcaaccaccatgggacttaaataaatttacataccctagctgtcacccacaacaaatgctactacaaaaacataaaaaaattgtattaagtcaagctagcaaaccaaatggtaaatacaaagtaaaagtgctaattaaacctagtaaacaactaattagcaagtggttctttacaaaaccattttcagaatatggcctactatttcttaaaggatctgcacttaatttaagatatagctttttaagtgcaagcaatgaaaacatgttagttaacatcagtagtcttaatccttcctggtacataaacacagactgggccagagcaagagcaaacacacaaggttacctaccacaaacttcaatgaatacacatctttggtatgacaataaaacagcaggtggtggcactaaacaaacagaagtaccttcagaagtatttaatacatatcaagacagtataaactatactaaaggctggtttaatgccaattttttaagagctattgcactatactcacccacaaaagcaacaaaactagcacaactaccattaaactatggaagatataatcctacaagagataaaggtactggaaataaaatatatatcataagtactatagcagatagctggggacctccaacaacagacaaaaatgtactaatcacagacatgcccctatggctaggcctatatggttatgttagctacctagaaacaataaaaccacctgactggttaaaaagctcccttatagtacttgaatctgattatatataccactcagccacacctgtaccgtctactaaatgggcaccaattgacagtgactacatagatggcaaaaaaccatatggccaaattataacagaacaagaaaaaaaactatggtaccccaactataaatggcaattaaaaactctaaatgcaatagtagaatgtgggccttttatacaacagtacattgaagaaaaaaacagtacatgggaacttaaatacttttacaacttttattttaagtggggaggaccccaaattccaggacaagacattaaaaatccacaggaacttaacacctatgatgtacccgataaactgtttggcaaaatacaaattaccaacccagccaaacaagctccagaaactattctccagccctgggactacaggagaggacttattaaagaaacagctcttaaaagaatgtgcacacacctcgaaactgattcagaatttgaatattctccagaacaaagtccaaagaaaaagaagcagagaattggagcagccctcagagacccacaggaagaaatcaaggaagcacagaactgtctcctctcgctctgcgaagaaagtacatgccaagacccgcaaaaccaaacactcgagcagctcatccagcaccagcaacacaaacagcagcagctcaaatacaacattgtcaagctcctcatagacctaaaggaaaaacagaaaatgatacaactacaaacagggttactagagtaaccctaacaagatttaaagatggatttgaaagagaaactgaaaaccagttagcacaagcatttaacagaccccctagaatgtttaaagaagacacacccttttatccttggctacctagacctgaacccattgtaaactttcaccttaactttaaattctaggcctacactgttcacttagtggtgtatgtttatataagtttgcaccccaaaaaaat

SEQ ID NO: 4798 - protein, 667 aa, Gammatorquevirus sp.
MPFWWRRRRKPWYGRWFTRRRRRPWGKRRRRRIYKRRRTRKLNRRRRRRRYKVRRKKQTITVKQWQPDSIRKCFIKGHGTLVVGAEGTQMFCYTKDKFKYVPPKTPYGGGFGAERYTLRFLYEEYQFHNNIWTASNLYKDLCRFLWVKFIFYRHPETDFVISYSRQPPWDLNKFTYPSCHPQQMLLQKHKKIVLSQASKPNGKYKVKVLIKPSKQLISKWFFTKPFSEYGLLFLKGSALNLRYSFLSASNENMLVNISSLNPSWYINTDWARARANTQGYLPQTSMNTHLWYDNKTAGGGTKQTEVPSEVFNTYQDSINYTKGWFNANFLRAIALYSPTKATKLAQLPLNYGRYNPTRDKGTGNKIYIISTIADSWGPPTTDKNVLITDMPLWLGLYGYVSYLETIKPPDWLKSSLIVLESDYIYHSATPVPSTKWAPIDSDYIDGKKPYGQIITEQEKKLWYPNYKWQLKTLNAIVECGPFIQQYIEEKNSTWELKYFYNFYFKWGGPQIPGQDIKNPQELNTYDVPDKLFGKIQITNPAKQAPETILQPWDYRRGLIKETALKRMCTHLETDSEFEYSPEQSPKKKKQRIGAALRDPQEEIKEAQNCLLSLCEESTCQDPQNQTLEQLIQHQQHKQQQLKYNIVKLLIDLKEKQKMIQLQTGLLE

SEQ ID NO: 4799 - DNA, 2532 bp, Betatorquevirus sp.
aaacccccaagggtgagtgaaaccaccgtagtcaaggggcaattcgggctagctcagtctggcggaacgggcaagaaacttaaaataatttttatttttacagatgaacagaaaacaaaaactaaacttacttaaccttattaaccatgctcacgacctaatttgtgactgcgaacaaggaattgtacatactcacaaaattattgaagaaattaatccagaccttaaaaaatgccattctactactaccgcccaagatggagacgtactagatggtttcgccccaggagaactagacgctcttttcgcagaaggtggagaagaagaaaaagctactaccgaggggtaagaaaaagaaaagctaaacaaataactttaaaacaatggcaacctataactataaaaaaaactattatacgcggattttatcctgcctttttgacaaacaaacacagactaagcaacaatatgactaaatatatagacactattgctcctactcactttgatggcggcggaggctttgctatatcacaatttactttaagtggattatatgaactttttattaaagcacaaaactggtggactcaaagcaactgctggttgcccttaataagatactttggctgtcaattaactttttatagatccgaaaactatgattatgtagctcatgtacatagatgtttacctttaaaagcaactgatgaattatatatggcatcacaaccttatattatgctaatgtctaaaaaatgtataaaagtacattgtaaacaaaattctaaaagtaaaaaaccttttaaaaaagtatttgtaaaacctccaacacaatatactaacaaatggatgtttcaagcagatatctgtaaccagcccttgctaatagttcaaactgcagcctgtagctttgatagaatgtatttagcagcagattggcaaagtacaacagtaggttttatttcactaaacactcaaagctttgtcatgcataattggaataaacctccaacaacaggctatcatccacaaacaacacaatacctttacggtacacaaaacgggcaagcacaacctatgaaagaaaaagtaaccaacttaatttacttaggaacaacaaaatctatggcaacaggtataccaataacaaataaagaagggttaactgaactacccacaacagaaactatgtggggaaacatttttataccacactacttttcaggagagggagcagtctttgtatcaactaaatctccaaatgacttacaaaaacattacagtggacctgcagcttcaaaactagaaacagacacaatagaaacatcaactatatttacaccaaaatcaacaccaaactacatatactgcagatacaatccactagcagacaaaggcacaggaaacaaaatttatattgtttcaaatacactagaccaaactccttggcaacccccaacatcagcaaaactaattagacaagacctaccactatgggtaataggtttcggatacctagactggcaaaaaactctaaatgaaacaataaaaatagatacagacaaaatcttagtaatacaatctccatacataacaccaagactcacatattatgtaccactagaccaatcttttatagacggccacagtccacacaaagaaaatgatgttacagattatgatgaacaacactggtacccaaaagtagcatttcaaatggaaagcataaatgccatagtcagttcaggaccaggtactattaaattaccaaaagaaagctcagcagaaggtcattattcttataaatttatttttaagcttggaggatgtccaccacccatggacaaaatctgtaaccccattaaccaaccagtataccctgtgcccaataaccagcagccatcaacttcgttgcagagtccaaggactgccattcaaacatacttatacaactttgacgaaaggcgcggggaaatcacacctaaagctgcaaaacgaattaaaaaagactatgaaactgaaacaactctgctcccacttgcaggacaaagctccatggatgtcagagcatccccagaaacatcaccgacacaaacaccggaggactcggaagaagaagaagagagcatacacctccagctcagacagctccgaagaaagcaaaaactcctccgaaagcgaatcctccagctcttagacacacaaagcttagaataataaaatgtaacttttataaccaaatgtttggtgaccctactcctaataggagactaactaccaaggaatttgaatgggaacttgaagctagtaaaatatggggacacaaacctcgcacattcctaaaagatacacccttttatgactttttaccacctacacccattattccccgtgtaaactttgaacttggatttaaaaaataaaggcctgcatacttcaacttgaggtgtccgtttatattagtttaaacttaaaggaacatccaccgcctcccaaatacgcaggcgcacaagggggctccgccccctt

SEQ ID NO: 4800 - protein, 662 aa, Betatorquevirus sp.
MPFYYYRPRWRRTRWFRPRRTRRSFRRRWRRRKSYYRGVRKRKAKQITLKQWQPITIKKTIIRGFYPAFLTNKHRLSNNMTKYIDTIAPTHFDGGGGFAISQFTLSGLYELFIKAQNWWTQSNCWLPLIRYFGCQLTFYRSENYDYVAHVHRCLPLKATDELYMASQPYIMLMSKKCIKVHCKQNSKSKKPFKKVFVKPPTQYTNKWMFQADICNQPLLIVQTAACSFDRMYLAADWQSTTVGFISLNTQSFVMHNWNKPPTTGYHPQTTQYLYGTQNGQAQPMKEKVTNLIYLGTTKSMATGIPITNKEGLTELPTTETMWGNIFIPHYFSGEGAVFVSTKSPNDLQKHYSGPAASKLETDTIETSTIFTPKSTPNYIYCRYNPLADKGTGNKIYIVSNTLDQTPWQPPTSAKLIRQDLPLWVIGFGYLDWQKTLNETIKIDTDKILVIQSPYITPRLTYYVPLDQSFIDGHSPHKENDVTDYDEQHWYPKVAFQMESINAIVSSGPGTIKLPKESSAEGHYSYKFIFKLGGCPPPMDKICNPINQPVYPVPNNQQPSTSLQSPRTAIQTYLYNFDERRGEITPKAAKRIKKDYETETTLLPLAGQSSMDVRASPETSPTQTPEDSEEEEESIHLQLRQLRRKQKLLRKRILQLLDTQSLE

SEQ ID NO: 4801 - protein, 81 aa, Betatorquevirus sp.
MNRKQKLNLLNLINHAHDLICDCEQGIVHTHKIIEEINPDLKKCHSTTTAQDGDVLDGFAPGELDALFAEGGEEEKATTEG

SEQ ID NO: 4802 - protein, 60 aa, Betatorquevirus sp.
MFGDPTPNRRLTTKEFEWELEASKIWGHKPRTFLKDTPFYDFLPPTPIIPRVNFELGFKK

SEQ ID NO: 4803 - DNA, 2531 bp, Gammatorquevirus sp.
cccccaaaaaaaaaaaaaaaaaaaaccgaggtctaggggcaattcgggctagggcagtctagcggaacgggcaagaaagttaaaacaataattgttttacagatgtccaagattcaagcgaaggacttttttaatcccacaccctacaatcaagacacgaagaatcaaatttggatgtctcaaattgctgatgctcacgacaatatctgcaattgtaaccatccctttgctcatttgcttgccaatatctttcctgtgggtcacaaagaccgtgattttacaattaaccaaattcttctaagagactacaaagaaaaatgccgttctggtggagaaggcgaaagaagccatggtggggcagatttaggtatcgcagacgcttctacaaaaacagaaggagacgcagaagaagactacccaggagaagaactcgacgaactactcgccgccgccatagaagaaaacgcaaggtaagaagaaaactacaaaaaatatctataaaacaatggcaacctgatagaattgttaaatgtaaaattaaaggcttttcttgccttgtactgggagctgagggcagacagatgtactgctacacaaatgaagcctcagactacccacaaccaaaagccccaggtggtggaggctttggatgtgaaactataactttaaaatggctattccaagaatatctaaggcataataatatttggactaaatcaaatgactatacagatctttgcagatacactggatgcaaaataactctatacagacatcctacaatagattttgttgtattctatgatacacaacctccttttgacattaacaaatttacataccctgaactacagcctcaaaatgtactacttagaagaaaaaaaagagttatactaagcagacaaactaatcctgctggcagacttaaacatactattaaaataaaaccaccaaaacaactaataactaaatggttttttcaaagagatttttgtacctatggcttactaaaactatgtgcttctgcagcagacttcaactacccaagaatatcacccttatctcagagtactattttaacagttctagctttaaatatgcacttttaccaaaacagtgactgggcactaacaaaaacaaaggagccatataaaaatataacaacacagaaactaccattatactttacatacacagacaaacaaggaaaagacaaggtatatatctacaacccagacactgccagtggacaagaagacacaaaaaaatattactactccattaacagagaaacaggcttattttcaccacaagtcttactagctaaaaaagtatccataactgaaaaaagttctgaccctggactaggatccctaccactaatcacacttagatacaacccacaagaagacacaggccatggcaatgaagtatatcttaccagtattctaaatggtcactacaataagccaagcataaccactgactactcatttaatggtgttccactatatgtagccttttatggcttttggaattacttacaaatctacagccataataaaggcttctacaaatcatatatgtttgtggttaagagtgatgcactaaaaccactttcagtagcaactcctgaaaaatactttccaatactagatactgactttgtctatggtaaactaccatgggacgaatacatgtcagcagacattaaaaaactgtggtatcctacagcagaaagacaacaggttataattaaccaaatagtagaatcaggaccatttatgcctaaactatccaatttaaaaaacagtacatgggaactaaattacaaatatcaatttttttttaagtggggaggcccatacaccacagatcaacccgttgaagatccatgcaccagaaacaaatacaatgtccccgatacactccaacaatcaatacaaattaccgaccctgaaaaaaacaaaacagaaggcatactccatgactgggactttagaaggggcttcattacacaaacagctcttaaaagaatgtcacaaaacctcccaattgattcatctctcgaatctgatgactcagaatcaccacaaaagaaaagaaaaatcaccaaggaactcccattccaacaaaagaaagaagaaaaaatccagaaatgtctcctctcactctgcgaagagccttcctgccaagaaacaccagaaacactccaggagttcatcctccagcagcgacagcagcagcgacagctcaagcacagcatcctccagctcctaactcacctaaagaagggccaaacctgtatggaactccaaacaggccttttagagtagagccattcaaaccaggatttgaatgggaaacagaatgtgaatgtgcaaaagcattttgtagaccacccagacattataaaaatgatcctccattttacccatggttacctctaacaccccttgtaaactttaaccttaactacaaatgctaggccctcaatgtacacttagtggtggatgtttaataaagtttgc

SEQ ID NO: 4804 - protein, 672 aa, Gammatorquevirus sp.
MPFWWRRRKKPWWGRFRYRRRFYKNRRRRRRRLPRRRTRRTTRRRHRRKRKVRRKLQKISIKQWQPDRIVKCKIKGFSCLVLGAEGRQMYCYTNEASDYPQPKAPGGGGFGCETITLKWLFQEYLRHNNIWTKSNDYTDLCRYTGCKITLYRHPTIDFVVFYDTQPPFDINKFTYPELQPQNVLLRRKKRVILSRQTNPAGRLKHTIKIKPPKQLITKWFFQRDFCTYGLLKLCASAADFNYPRISPLSQSTILTVLALNMHFYQNSDWALTKTKEPYKNITTQKLPLYFTYTDKQGKDKVYIYNPDTASGQEDTKKYYYSINRETGLFSPQVLLAKKVSITEKSSDPGLGSLPLITLRYNPQEDTGHGNEVYLTSILNGHYNKPSITTDYSFNGVPLYVAFYGFWNYLQIYSHNKGFYKSYMFVVKSDALKPLSVATPEKYFPILDTDFVYGKLPWDEYMSADIKKLWYPTAERQQVIINQIVESGPFMPKLSNLKNSTWELNYKYQFFFKWGGPYTTDQPVEDPCTRNKYNVPDTLQQSIQITDPEKNKTEGILHDWDFRRGFITQTALKRMSQNLPIDSSLESDDSESPQKKRKITKELPFQQKKEEKIQKCLLSLCEEPSCQETPETLQEFILQQRQQQRQLKHSILQLLTHLKKGQTCMELQTGLLE

SEQ ID NO: 4805 - protein, 123 aa, Gammatorquevirus sp.
MSKIQAKDFFNPTPYNQDTKNQIWMSQIADAHDNICNCNHPFAHLLANIFPVGHKDRDFTINQILLRDYKEKCRSGGEGERSHGGADLGIADASTKTEGDAEEDYPGEELDELLAAAIEENAR

SEQ ID NO: 4806 - protein, 109 aa, Gammatorquevirus sp.
MSPLTLRRAFLPRNTRNTPGVHPPAATAAATAQAQHPPAPNSPKEGPNLYGTPNRPFRVEPFKPGFEWETECECAKAFCRPPRHYKNDPPFYPWLPLTPLVNFNLNYKC

SEQ ID NO: 4807 - DNA, 2531 bp, Gammatorquevirus sp.
aaaaaaaaaaaaaaaaataaaaaattgcaaaaataggggcaattcgggctagggcagtctagcggaacgggcaagaaacttaatatattttttattttagatgtctgtattcttcaacaaaacttcatacaacaaagaaaccttaaaccagctatggatgagtatcattgctgattctcatgatatttgctgtaaatgtgaacaaccctttgctcacctacttgacagcatttttccagacggccacaaagacagacagctaactattcaacaaattattgaaagagattttgcagcatgccattctggtggtacagaagaagaaaaccttggtttggtagatggtctagaaagaagagaaatacctggcggcgcagaaaaccaagaagaagaatatataaaagacgcagaactagaacaactcgtcgccgccgcagaagacgccactacaaggtaagaagaaaacaaaaaaaaataactgttaaacaatggcaaccagaaagtattaaaaaatgcaaaattaaaggactaggacccttagtactaggagctgaaggatgccaatacagatgcttcactgtatacaaatatgaatggacaaatcctaaaactccagggggtggtgggtttggctgtgaactgtttactctacaatacttatataatgaatatttagcaaagcataatatatggactgcatctaatctgtacaaagactttggtagatatacaggctgtcaatttacattctatagacatgaacacacagactttattataaaatatgacattcacccaccctttactgttaacaaatatacatacatgatgctacacccctttaacatgctacaaagcaggcataaaaaaatactactaagcaaagacacaaaacccaatgggagactaacaaaaaaactaaaaataaaaccacctaaacttatgtcaaccaaatggttttttcaagaagaactaagtaaatatggactagttacccttgcagcttctgcatgtaactttagatttccatggatgggatgctgcaatgaaaacctaattataaccctagactacctacagccaggattttataaacattctgaatgggctcaagcttctactctagcctataaccctggaggccatacacaccctacatcaggaaccatgtattactattattatgatgacaggggtgtagaacaaacctggcaaatgaaaaactttactggtacaaatccatacactcaatccgtctcctatgacgaaggatggttcaacaccaaagtactaagagcacacttagtttccacacagccaaacaaacaaaagcctatatctttaacaccatgtggaacactaagatacaatcccatactagacactggtgaaaaaaacaaagtttgggtggtatctacattagtatatgactggcaagttccaaaagatgaagacctaataatacaaggctatcctctttggatggtattctatggctttacttcttatttaaaacaagtaaagtcaaaaaccactccatttaaaggtagcatgatatgtgttcaatctccagctctatacagagttagaggtgaagacccaacagctttctatccacttatagacagatcttttattaaaggcaaaggcactggtaacacagacccaattaaatttgctggaaatgaatggtttccaagcatattcagccaaagagatagtatatcacaaatagtaaattgtggaccctatatacctaaatacaatgaaacaagagaaagtacatggcaactaaattatttttacaaattttattttaagtggggaggcagctttccaccagaccaagcagctgagaatccacaaacaaaaggtacctatgacatacccgataaaaacaaagaaacagttgaaattgctaacccaattagccaacaataccactcagtatttaagccctgggactacaggagaggagaaattacaaaaaaagcttttaaaagaatgctccaacacatcgaagttactgactctatatcaacagattcaagcgactgctcctctcccaagaaaaagagaaggccaccactcctccaagacccaaaaaaagaaaatcagaaaatccaagcatgtctcctctcactctgcgaagagcctacatgcccagaccaaaaagaagagaatctccacctcctcatccagcagcagcacgagcagcagcagcaaatcaagttcaacctcttgcacctcatctcagacctgaaatccaaacaaagaacactgctacacaacacagggctactaaactaacaagatttaaacaaggctttgaatgggaaacagaactacagctttcaagagcctttcaaagacccccaagattgtttaaagaagacacacccttttacccttggttaccaaaattcacaccccttgtaaactttcacttaaattttaaaggctaggcctacactgttcacttagtggtgtatgtttaataaagtttcacccccaaaaaaattataaaataa

SEQ ID NO: 4808 - protein, 670 aa, Gammatorquevirus sp.
MPFWWYRRRKPWFGRWSRKKRNTWRRRKPRRRIYKRRRTRTTRRRRRRRHYKVRRKQKKITVKQWQPESIKKCKIKGLGPLVLGAEGCQYRCFTVYKYEWTNPKTPGGGGFGCELFTLQYLYNEYLAKHNIWTASNLYKDFGRYTGCQFTFYRHEHTDFIIKYDIHPPFTVNKYTYMMLHPFNMLQSRHKKILLSKDTKPNGRLTKKLKIKPPKLMSTKWFFQEELSKYGLVTLAASACNFRFPWMGCCNENLIITLDYLQPGFYKHSEWAQASTLAYNPGGHTHPTSGTMYYYYYDDRGVEQTWQMKNFTGTNPYTQSVSYDEGWFNTKVLRAHLVSTQPNKQKPISLTPCGTLRYNPILDTGEKNKVWVVSTLVYDWQVPKDEDLIIQGYPLWMVFYGFTSYLKQVKSKTTPFKGSMICVQSPALYRVRGEDPTAFYPLIDRSFIKGKGTGNTDPIKFAGNEWFPSIFSQRDSISQIVNCGPYIPKYNETRESTWQLNYFYKFYFKWGGSFPPDQAAENPQTKGTYDIPDKNKETVEIANPISQQYHSVFKPWDYRRGEITKKAFKRMLQHIEVTDSISTDSSDCSSPKKKRRPPLLQDPKKENQKIQACLLSLCEEPTCPDQKEENLHLLIQQQHEQQQQIKFNLLHLISDLKSKQRTLLHNTGLLN

SEQ ID NO: 4809 - protein, 118 aa, Gammatorquevirus sp.
MSVFFNKTSYNKETLNQLWMSIIADSHDICCKCEQPFAHLLDSIFPDGHKDRQLTIQQIIERDFAACHSGGTEEENLGLVDGLERREIPGGAENQEEEYIKDAELEQLVAAAEDATTR

SEQ ID NO: 4810 - protein, 136 aa, Gammatorquevirus sp.; identical to SEQ ID NO: 1351

SEQ ID NO: 4811 - DNA, 2531 bp, Gammatorquevirus sp.
aaaaaaaaaaaaaaaaataaaaaattgcaagtctaggggcaattcgggctagggcagtctagcggaatgggcaagaaacttaaaatatattcttttttatagatgtcagctttcttcaaaaaaactacttacaacaaagaaacccttaaccaactatggatgtctataattgctgattctcatgacatatgctgtaaatgctttactccttttgctcatctactggatagcatatttcctgagggtcaccaagacagaaacaaatccatagctgatataattaatagagattatcaacaatgccattctggtggagaaggagaagaaagccatggtttggcagatacaaaagaagaagatttacctacagaaagagaagacctcgaagaaaactatataggagacgaagaactagaagaactcgtggccgtcgcagaaaacgccgctacaaggtaagaagaaaacaacaaaaaattatacttaaacaatggcaacctgaaagcattaaaaaatgtaaaataaaaggactaggacctttagtactaggagctgaaggctgccaatacagatgctttactacatacaaatttgaatggacaaatccaaaaacacctggtggtggtggatttggagctgaactatttacccttcagcacctttacaatgaatacttagctcacaataacatatggacagcatcaaacaattattatgactttggcagatatactggatgcagatttactttttacagacacccagaaactgattttatactaacttatgataatcagccaccatttacaatcaataaatttacttatatgatgcttcatcctgttaatatgttacaaagaagacacaaaaaaatactactaagtactgcaacaaagccaaatggtagactaactaaaagactaaaaataaaaccaccaaaactaatgtcaactaaatggtttttccaagaagaattagctaaatatggccttgttacaattgctgctactgcatgtaactttagatatccatggatgggctgctgtaatgaaaatttaataattactttagattatctacaacctggattttacaaacacagtgaatgggctcaaacacacacacaagcatacaaccccaatggatccataaatccactttcaacttcaatgtactactggtactatgatgatgcaggcagagagcaaaaatggcaaatgcaaccctttgcaggcacaaacccttaccatgagtcagttagctatgataaaggttggtttaatccaaaagtacttagagcacacctagtcaccaccacagacaaaaaaacagatgcaattgccatgacaccatgtggcaccttaagatacaatcctatattagatactggacaaggcaacaaagtctgggtagcttcaacagtagcaggaggctggggtgtaccaaaagatgatgacttagttatagaaaactatccactatggatgatattatttggatacacttcttttataaaacaactaaaatctaaaacaacaccatttcaaggcaacatgctatgtgttcaatctaaggcattatatagaataagaggtgttgacaccactactttctatccaatactagacagaaactttataaaaggaaaaggcacaggaggcacagaccccattaaatttccaggtggtgactggtacccttcaatgtttgctcagagagactcagtatcccaagtagttaactgtggaccatatgtgcccaaatacaatgaaacaaaacaaagcacatggcaactaaattacttttataatttttatttcaagtggggtggctcctaccccccagatgccacagcagctaatccacaaacaaagcctacctatgatgtacccgataaccagcaagaagcagtacaaattgttaacccagttaaacaagactacaacacaatctttaaaccctgggactacagaagggggaccattacaaaaacagcttttaaaagaatgttccaacacctcgaaactgctgactctttatcaacagattcgagcagctgctcctcaccaccaaagaaaaggaaagcaccactcctccaagacccaaaagaagaaaacaagaaaatccaagcatgtctcctctcactctgcgcagagcctacatgcccagaccaaacggaggaaaacctacacctcctcatccaacagcagcaccagcagcagcagcaaatcaagctcaacctcctgcacctcatctcagacctaaaagccaaacagagatcacttctacacagcacaggactactaaactaacaagatttgaagcaggccatgagtgggaaacagagtgtcaagtagcacaagcatttagaagaccccctagactttttaaagaagacaaacccttctatccctggcttccaaaacctgaacctcttgtaaactttcacttaaactataaattctaggccgacactgttcacttagcggtgtttgtttaataaagtttgcaccccaaaaaaattgtaaaataaa

SEQ ID NO: 4812 - protein, 669 aa, Gammatorquevirus sp.
MPFWWRRRRKPWFGRYKRRRFTYRKRRPRRKLYRRRRTRRTRGRRRKRRYKVRRKQQKIILKQWQPESIKKCKIKGLGPLVLGAEGCQYRCFTTYKFEWTNPKTPGGGGFGAELFTLQHLYNEYLAHNNIWTASNNYYDFGRYTGCRFTFYRHPETDFILTYDNQPPFTINKFTYMMLHPVNMLQRRHKKILLSTATKPNGRLTKRLKIKPPKLMSTKWFFQEELAKYGLVTIAATACNFRYPWMGCCNENLIITLDYLQPGFYKHSEWAQTHTQAYNPNGSINPLSTSMYYWYYDDAGREQKWQMQPFAGTNPYHESVSYDKGWFNPKVLRAHLVTTTDKKTDAIAMTPCGTLRYNPILDTGQGNKVWVASTVAGGWGVPKDDDLVIENYPLWMILFGYTSFIKQLKSKTTPFQGNMLCVQSKALYRIRGVDTTTFYPILDRNFIKGKGTGGTDPIKFPGGDWYPSMFAQRDSVSQVVNCGPYVPKYNETKQSTWQLNYFYNFYFKWGGSYPPDATAANPQTKPTYDVPDNQQEAVQIVNPVKQDYNTIFKPWDYRRGTITKTAFKRMFQHLETADSLSTDSSSCSSPPKKRKAPLLQDPKEENKKIQACLLSLCAEPTCPDQTEENLHLLIQQQHQQQQQIKLNLLHLISDLKAKQRSLLHSTGLLN

SEQ ID NO: 4813 - protein, 117 aa, Gammatorquevirus sp.
MSAFFKKTTYNKETLNQLWMSIIADSHDICCKCFTPFAHLLDSIFPEGHQDRNKSIADIINRDYQQCHSGGEGEESHGLADTKEEDLPTEREDLEENYIGDEELEELVAVAENAATR

SEQ ID NO: 4814 - protein, 136 aa, Gammatorquevirus sp.
LLLTTKEKESTTPPRPKRRKQENPSMSPLTLRRAYMPRPNGGKPTPPHPTAAPAAAANQAQPPAPHLRPKSQTEITSTQHRTTKLTRFEAGHEWETECQVAQAFRRPPRLFKEDKPFYPWLPKPEPLVNFHLNYKF

SEQ ID NO: 4815 - DNA, 2531 bp, Gammatorquevirus sp.
caattcgggctagggcagtctagcggaacgggcaagaaacttaaaacaatactttgttttacagatgagcaattattctgcatctcacttttttaaaccaacaccttacaacaatgacaccaaaaatcaaatgtggatgtccatgatagctgatggacacgactgtatctgcaactgcaatagtccttttggccatctgcttgcttctatttttcctcctggtcatcaagaccgcctacttaccattgaagaaattattaacagagatattaaagaatgcctttctggtggagacgcaggagaaggccatggttcggccgctggagaaaatataaaaagagatacccaagaagaagaaggcgcccactttataaaagacgaagaactagacgccttaatcgccgcaggagaagacgccggtggaaggtaagaagaaaaaagaagagaattaatgtaacacaatggcagcctgagtctattagaaaatgtaaaataataggaatagaacctttgtgtgttggagctgaaggctcacaaatagactgctatactgtaactaaaacagactatgtaccaccaaaagtaccttggggagggggctttggattagaaaactttaccttaaaatacttgtactctgaatatcagtatcacaacaacatatggacaagtagcaacagtcaaaaagatttgtgtagatatacaggaggtaaatttatagtatttagacaccctacacaagactttgttataagctatgatatacaaccaccacataccttaaacaaattcacatttccaagctgtcacccacatcaacaactactatctaaacaccataaaattatacttagtcaagctagcaacccacatggaaaatattataaaaaaattaaatttaaaccacctaaacaaatgctaactaaatggttctttacaaaaacattttcaccagccagtttaatagtagtaaaagctgctgctgcaaactttcaacatgttaaccttagtggaaaaaataccaatatgctagtaacactgtattcacttaatttaggattttataaaaatcctgcatgggcattaaaacctgcaactggagggtattggcctcaaccatcagcaaaatctaactttccctatgttattaaaaacaaacaaggacaagaagtaaacaaaacaatgaaccttaccccctcatctgattattcagcaaccattaactactcaacaggctggtttaagtctgaatttttacaagctgtaaaattaggtacaattgaacaacccactgcattacaccagatagtagctggcagatataacccaaatatagatgatggctcaggcaatgaaatttactgtgccacaattgtaggcacaagttggcaaccacccgcaacagacaaacaactactaattacagatatgcctttatggctaggcctctatggttactactcctatattagagaaaccaaaaccgaagacttttggaaactacatgttatagtagttaaatcaaaagcaattcattgttacccagaaataggtagctgtgacagatatgtatttatagattgggattatatacaaggcaaaaaaccatatgaccaaactataacagacagagaaaaaacatactggtatccagacatgtcatggcaaaaaaaatcaatgaatgctatagttgaatcaggaccattcatacctaaattatcagaagaaacttacagtacctgggaacttaacatgagatattatttttattttaagtggggaggtgctaacacaggagaagcccaagttgaaaatccagaattgctacccacctatgatgttcccgattcaatgccaaaaacaatacaaattgttaacccagaaaaacaagctccagaaaccatcttacacccctgggactaccgcaggggatttattaaagaaacagctcttaaaagaatgtgctcaaacatcgaaactgatacagaatttcaataccctacagaacaagcaccaaagaaaagaaaaagagtacaagcaactcttccaaatccccaagaagaaaaccaagaaatcaagagctgtctcctctcactctgcgaaaaaagttcatcgcaagaggaggaagaaccagacctccacaagctcatcctcaagcaacagcacaagcaggaaaagctcaagtacaacatgttcaagctcctcctcgacttgaaagaaaaacagagaataatacaacaccacacaggactcctagaatgacaccctttaaaaaagggtttgaaatagaaacagaaaaagagttagcacaagcatttagtaggccacctagaatgtttaaagaagacactcctttttatccatggttaccaagacctgtaccccttgtaaactttcaccttaatttcaaattctaggcctacaacttacacttagtggagtatgtttatataagtcacacccccaaaaaaattgtaaaataaaaaaaaaaaaaaaaaataaaaaattgcaaaaattcggcgctcgcgcgc

SEQ ID NO: 4816 - protein, 661 aa, Gammatorquevirus sp.; identical to SEQ ID NO: 3686

SEQ ID NO: 4817 - protein, 121 aa, Gammatorquevirus sp.; identical to SEQ ID NO: 3687

SEQ ID NO: 4818 - protein, 111 aa, Gammatorquevirus sp.; identical to SEQ ID NO: 3688

SEQ ID NO: 4819 - DNA, 2530 bp, Gammatorquevirus sp.
ggcgctcgcgcgcgctgcgaaaccaccgaggtctaggggcaattcgggctagggcagtctagcggaacgggcaacaaacttaaaacaatatttcttttacagatgtcccgcttctacactggcactaaatacaatggagccacactaaatcaaatgtggatgtctatgatagcagattcacatgatattcactgtgattgtaaaaaaccttttgctcacctacttgacagcatatttccagaaggtcacacagatagaaacaaaacaatagcacatattattcaaagagattatcaagaatgcctttctggtggagaagaagaagaaaaacctggtataccccttggaggcagcgccgctaccgccgccgcagatacaggcgtaaacgtagaagaccatttagcagaagacgcagacgaaatagaaaagctactcgccgccgcagaagaaaactacctaaggtaagaagaaagaaaaaatttttaaaacttgtacaatggcaaccagacagaataagaaaatgtactattaaagggagaggaactctagtaatgggagctcatggcagacaaatgatctgttttaccaatgttaaagacagactaacacctagcagagcacccgcgggaggtggatttggcatagaaagattttccttagggtacttatatgaagaatggaaagctagaaacaatatatggactgcaacaaatgaaaacacagacctagcaagatacctaggctgtgaatttaccttttacagacatcaagatacagactttataattaaatatgaaagacaaggtccttttaatttacaaaaatactcatacatgtatatgcagccacaagaactactactaggaaaacataaaaaaatactactaagtaaacaaacaaatccaaatggaaagttaaaacttagactaaaaatagggccaccaaaactactaacaaataaatggttattacaatcagaactagcaaaacaagacttagtacaaatatcaggagcagcagctagctttagataccccacaataggatgctgcaatgaaaacagaattttaaacctatactcaataaacattgaattttacaaagatgcacactggatgcaagcatactctgccgaggcatactataaaccatacgctacaattccttcagacttaaattttcactataaaacacaagcaggaggagaaggcactgttaaaggaccacaatctaaagacaaagcattgaccttagaatcaggatggtttcaatcaaaaatattaggagcttataaagtaactaaggcagagtcatccacacaatatggcgaactcccaatggtcctacttagatacaatccagcagctgaccaaggaccaggtaacttagtaactatagtagatttagtagcagggcaatggcaaggaccataccctcctgaatatacaatacaagatgtaccactatggctagcactaaatggatatgttaactacataatacaaaaatctggagacaaaggcatcatgaaacataaaattgtttgtattaaaagcccagcactatacagactaccaacagttagtgctcaaaaaatatttccaataataggatccaaatttgtaaatgcaaagccaccatatgaccaaccactaacacccgacatgtctagaaattggtaccctacatatgaacaccaacaagaacccttaaatgacattgtttgctgtggacctttagtaccaaaattttataatcaaactaacagtacatgggaattacaatacttttatcgtttttactttaagtggggaggccctgaaattggagacccaacagttgatgatccaaaaaccaaaggagaaaaaaccactgactatacaatgccccgcacaatacaaatatttaacccactcaaaaataaaacagaatccattctacacccctgggacttcagaaggggcattgttacaaaaagagctcttgaaagaatgtgccaaaacctcgaaactgattcaaatttctacccagatggagaaacaccaaagaaaaagaaaaagacaacctgcgagctcagaaacccagaggaagaaatcaaagaagtgcagaactgtgtcctctcactctgccaaacagaaacatcggaggaagaggaccccaacaacctccagcagctcatcctcaagcaaaagctcaagcagcagcagctcaagcacaacatcctagtactactaacagacctgaaaaccaagcaaaactctttgagactacaaacaggaaatttacagtagaagcatttaaacctggctttgaacttcaaacagaaaaagagcttgctattgctttttgcagaccaccaagacattataaaaatgaccccccattttatccatggctaccacctgcaccccttgttaactttaaccttaactacaaatgctaggccaacaatgtacacttagtaaagcatgtttaataaagtttacacccaaaaaaaaaaaaaaaaaaaaataaaaaattgcaaaaattc

SEQ ID NO: 4820 - protein, 663 aa, Gammatorquevirus sp.; identical to SEQ ID NO: 3561

SEQ ID NO: 4821 - protein, 120 aa, Gammatorquevirus sp.; identical to SEQ ID NO: 3562

SEQ ID NO: 4822 - protein, 125 aa, Gammatorquevirus sp.; identical to SEQ ID NO: 3563

SEQ ID NO: 4823 - DNA, 2530 bp, Betatorquevirus sp.
atacgcaggcgcacaagggggctccgccccctctaggggcaattcgggctagatcagtctggcagaacgggcaagaaacttaaaataatattcttttttacagaaatgagcaccttcttaacaccatcaatctacagcaaaaatggcttagaaaaccaatggctaaactcaatttgaaacatacatgaccttatgtgtggatgcaacgactgcttcaaacacttatttgatatacttaaaagaaaaggaaacctaccatgcctcccttcaattactaccgaagacgatactacaaaagaccccaatggagatggcgccgcagacgctggactagaagatggagaactagaccgcttattcgcagaggatacacaagaagacgaagggtaagaagacgaaaatttttaaaatacaaacataaaaaactaaaaactataactgtaagacaatggcaaccagataatataagaaaatgtaaaattaaaggacaactatgcctattaacatgtggacaaaacagaattaacaataactttatattaactgctgaaagtataatacctgttggagaaccgggagggggaggcttttcaataatgcaattaacattaagagctttgtatgacgaatatacacattttagaaactggtggacaacaagcaactgtggactgccattagtaagatactctggttgcagtattaaattttattgtagcaatgacactgactatatagtaacagcacaacacacaggaccgtttgaagtgactgtagactcatatttaaacacacaacctagcagacacataatgaacagaaaatcatttgttataccaaaactaaacccaaacaaaaaaaaaagaccatacataaaaaaaaaatttccacctccagcactattttataacaaatggtactttcaacaagacatactaaacactccactaattctactatacatatcagctacaagctttgaccaaatgtatgctccaaacgaccaaattagcacaaacataacatttttttcactaaacacagacttatttcaaaatccacactgggaaaaagacaataatgaaccatactatccaaaagtagtaggcacacaaaacacaggactatacagctcagaccaacattttagtaacgacagacaaataacatttaatcacttatatccactattaaacacaacacaatacaaacaaataccacacgacaacgcaaactttaccagcatagaacagtataacaacccaaagaactggtacaatccatttacaattacagcacatgaacaacatttagaaacaccaatttattatggaattcaccctacaacagaagatcaactaaaaggaacagggacaccacaaccatcaattttaccaataacaggtttataccaagaatgtagatacaacccctttagagacaaaggaataggaaatattttttatataaaatgcactaaaaaacaagaaggctcatttacaacacttccaacagacagcagattaatactaagagactttccaatatggctagcaacatggggatggactagctggttagaaaaatctaaacctgtatatcacctacatgaagactaccaattagtaatacaatcaaactacatagaaccaaaactaagatgctacgtaccactagacatgtactttacacacaacgacggaaaaaacctaacacaaacagataaagcacactggcacccaaaatttgcttttcaaacagaaacactaagcaaactagcagaaacaggaccagcaactcctaaaattaacaaacaaaaacaaatacaaatacatgcactatacaacttttactttaaatggggaggatgcccagcaccaatggaaactatatgtgatccatccacacaggaaaaattccccacgccctataacatcatacaagaacttaatgtcgaggatccagaaacaccaaaagaaacatacatatacaaatttgacgaacgagacggataccttacaaagacagctacaaaaagacttaaacaagacattgaaactacaaaatattttacagaatatggaagcaaagacccgcaactacaagtctacccaccaacgaatcaaacgcacgaagaaacagaagaaacaacaccgaaaaagaaagaactactccaacagctcgacctcctcagagaccaccagcaacagctccagcgaagaatcaacagattaacaaaaagacaaaaattattccctatagtgtagacatgtttggacaaagaaaagtaaaaaatcgtagatttacacctaaagaatttaaagaggaattagaagaagcaggaatatggcgtagacgacctagatcatacatttttgatccccctgattataaacttgatgttattgaacctattgtaaactttggtgtaaattttgaattaaactttaaattctaggccagcaaatattcacttgtcggtgtccatttatataagtataactttaataaacatccaccacactcccta

SEQ ID NO: 4824 - protein, 669 aa, Betatorquevirus sp.
MPPFNYYRRRYYKRPQWRWRRRRWTRRWRTRPLIRRGYTRRRRVRRRKFLKYKHKKLKTITVRQWQPDNIRKCKIKGQLCLLTCGQNRINNNFILTAESIIPVGEPGGGGFSIMQLTLRALYDEYTHFRNWWTTSNCGLPLVRYSGCSIKFYCSNDTDYIVTAQHTGPFEVTVDSYLNTQPSRHIMNRKSFVIPKLNPNKKKRPYIKKKFPPPALFYNKWYFQQDILNTPLILLYISATSFDQMYAPNDQISTNITFFSLNTDLFQNPHWEKDNNEPYYPKVVGTQNTGLYSSDQHFSNDRQITFNHLYPLLNTTQYKQIPHDNANFTSIEQYNNPKNWYNPFTITAHEQHLETPIYYGIHPTTEDQLKGTGTPQPSILPITGLYQECRYNPFRDKGIGNIFYIKCTKKQEGSFTTLPTDSRLILRDFPIWLATWGWTSWLEKSKPVYHLHEDYQLVIQSNYIEPKLRCYVPLDMYFTHNDGKNLTQTDKAHWHPKFAFQTETLSKLAETGPATPKINKQKQIQIHALYNFYFKWGGCPAPMETICDPSTQEKFPTPYNIIQELNVEDPETPKETYIYKFDERDGYLTKTATKRLKQDIETTKYFTEYGSKDPQLQVYPPTNQTHEETEETTPKKKELLQQLDLLRDHQQQLQRRINRLTKRQKLFPIV

SEQ ID NO: 4825 - DNA, 2530 bp, Gammatorquevirus sp.
tttgtattttagttcccagttactttcattttggtttgacaattcgggctagggcagtctagcggaacgggcaagaaacttaaaactatgcttactttccagatgcaaaacatttcctttaaagacttctacaaaccaacaccctacaacgaagaaactaaaaaccaaatatggatgtcacaaattgctgattctcatgacaatatttgtgactgcgagtgtccttttgctcatttgcttgcttccatttttcctcctggtcatcacgatcgtaatctctcaattaatcaaatattgtgccgagactacacacaaaaatgcctttctggtggaaaagaagacaaaaaaggtggtatggcagacaatttagatggcgaagaagaagaacaaaattctacagaccaaaaagaaaatataaaagaagaagacacagacgccctgttcgccgccgccgtagaaagctacgaaaggtaagaagaaaaagaaaatctcttgttgttaaacaatggcaacctgaatctataactaaatgtaaaataattggcaactctgctattgttgttggagcagaaggcaaacaaatgtggtgttatacagtcaacaaaatgattggtgtacctccaaaaaccccctatggagggggattcggagttgagcaatatactcttaaatacctatatgaagaatacacattccacaataacatttggacaaaatccaatgttctaaaagacctatgcagatttttatactgcaaagttgttttttacagagacaacaaaacagactttatagtagcatatgactctcaaccaccatttcaactaactaaattcacatacccaggaactcatccacaccagatgctactacaaaaaaggcataagctaatattatctcaaatgacaaaacctactggtaaactaacaaagaaatttaacataaaaccacctaaacaaatgctatctaaatggtttttttcaaaacaatttagcaaataccccttacttcaattaaaagctgcagcacttgatttaagacattccttcttaggctgttgtaatgaaaatccacaagtattttttcattacattaaccatggcttttacagaaacacaaactggggacaaacatcatccactgcttacattccctatgaaggcacagaatttaccattcccacaaccatatattacaaatataaaaacactgttcaaccattaaacaaaccacacaattatgatgaaagtgtatcaattacaaaaggatatttcaaaccagaatttttgcaaacacaatgctggagtaatagcaactcatcatcaatggtatgcatggctaataaccctattgcctatgctatttataatcctactaaagacagtggatatggcaattccctatacttagtaagtgttctttctaattcctgggaccaaccaccaaaagacaatgccattttaatacaaggcatgcctatttggcttgcaatttttggatacctagactatgcaagacaaataaaagcagacaaaacatggctagaatcccatgtagttgttatgaaaagtccagctatttttacctatcctaatgtaggagcagacaaatggtattgtcctatatcaagatcatttatagatggactaggtccttttggacagccacctacatcaacagaaaaaataaaatggtatccacaaataagacaccaatatgaaatcttaaatgcctttgctgaatcaggaccctttgtcccaaaatattcaaaccaaaatgaaagtaactgggaactaaaatacaaatatattttttattttaagtggggaggcccttacctcaatgaaccagaaattgcaaatccaaccacacaagagcaatatgatgtgcccgatactttcaaagaaacagtacaaattgaaaatccagaaagacttgaccccagatctatcatccatgattgggactggagaaggggatttattaaagaaagatctcttaaaagaatgtcaacttacctctcaactccttcagatatccaagactctcaagaaccaccaaaaaagaaagagagacttggaccccaactcacagtcccacaaaagaaagaagaagaaacactcagctgtctcctcagtctctgcaaagaaaatatctaccaagaagcggagacagaagaggacctcaagcagctcatcatgcagcagcagcagcagcagctccagctcaagcgagacatcctccaactaatattcaaaatgaaacaagaccaacaaatgctacaactacacacaggcctgttaccctaacaagatttaaagaaggctttgaaagacaaacagaaaatgaattagctatggcatttagaagaccacctagactgtttaaagaagacaaaccattttatccatggcttcctagtcctgtaccccgtgtaaactttcaccttaattacaaattctaggcctacaatgttcacttagtggtgtatgtttaataaagtttgccccccaaaaaaataaaaaatata

SEQ ID NO: 4826 - protein, 663 aa, Gammatorquevirus sp.
MPFWWKRRQKRWYGRQFRWRRRRTKFYRPKRKYKRRRHRRPVRRRRRKLRKVRRKRKSLVVKQWQPESITKCKIIGNSAIVVGAEGKQMWCYTVNKMIGVPPKTPYGGGFGVEQYTLKYLYEEYTFHNNIWTKSNVLKDLCRFLYCKVVFYRDNKTDFIVAYDSQPPFQLTKFTYPGTHPHQMLLQKRHKLILSQMTKPTGKLTKKFNIKPPKQMLSKWFFSKQFSKYPLLQLKAAALDLRHSFLGCCNENPQVFFHYINHGFYRNTNWGQTSSTAYIPYEGTEFTIPTTIYYKYKNTVQPLNKPHNYDESVSITKGYFKPEFLQTQCWSNSNSSSMVCMANNPIAYAIYNPTKDSGYGNSLYLVSVLSNSWDQPPKDNAILIQGMPIWLAIFGYLDYARQIKADKTWLESHVVVMKSPAIFTYPNVGADKWYCPISRSFIDGLGPFGQPPTSTEKIKWYPQIRHQYEILNAFAESGPFVPKYSNQNESNWELKYKYIFYFKWGGPYLNEPEIANPTTQEQYDVPDTFKETVQIENPERLDPRSIIHDWDWRRGFIKERSLKRMSTYLSTPSDIQDSQEPPKKKERLGPQLTVPQKKEEETLSCLLSLCKENIYQEAETEEDLKQLIMQQQQQQLQLKRDILQLIFKMKQDQQMLQLHTGLLP

SEQ ID NO: 4827 - protein, 128 aa, Gammatorquevirus sp.
MLTFQMQNISFKDFYKPTPYNEETKNQIWMSQIADSHDNICDCECPFAHLLASIFPPGHHDRNLSINQILCRDYTQKCLSGGKEDKKGGMADNLDGEEEEQNSTDQKENIKEEDTDALFAAAVESYER

SEQ ID NO: 4828 - protein, 112 aa, Gammatorquevirus sp.
LSPQSLQRKYLPRSGDRRGPQAAHHAAAAAAAPAQARHPPTNIQNETRPTNATTTHRPVTLTRFKEGFERQTENELAMAFRRPPRLFKEDKPFYPWLPSPVPRVNFHLNYKF

SEQ ID NO: 4829 - DNA, 2528 bp, Gammatorquevirus sp.
ttgcaaaaattcggcgctcgcgcgcgctgcgtctaggggcaattcgggctagggcagtctagcggaacgggcaagaaacttaaaatactttttgttttacagatgttcaacagttctgactttattaagaaaactaaatataactctgacaccaaaaatcaactttggtgctctgttatagctgattcacatgactcctggtgtggatgcgaaacaccctttgcacatctactagcatccatatttccaccaggacacaaagatagaaaacttacagttgatgatatattaaaaagagattatctagaatgccattctattggaaaagaagacgcagaccctggtatggtgcctggtaccgccgccgccgccgcagaccctggagatggccacaaaaaagaaggagaatacgtagaagacgcagagctagaagaacttataaaggcaggagaagacatcaaagaaaggtaagaagaaagagaaggaaactaaccttacatcaatggcaaccagaatctattagaaaatgtaaaataaaaggcctaggccttttagttttaggtgcagaaggcactcaaatgaactgttatactactaacaaatatgactatgttccccctaaagttccatatgggggaggatttggtactgaactatactcattagaatatttatatgaagaatatacactgcacaacaatatctggacaacaagtaatattggcttagacctatgtagatacacaggaggcagctttatattttttagacatccagagatagacttcatagtaacctatacattaagcctacctataacaatagacaagtatacatttgcagccatccatccacatcaaatgcttctagaaaaaagacatagagtaatatttagccaaaaaagcaaaccaaatggaaaatactatgttaaaattaaatttaaacctccaaaacaaatgtcaaacaaatggttttttacacagcaattttcaaaataccaacttatatttttaaaagctacagcagttaactttagatactcatttttaactgaaacatcacaaaacttactagtaaacattgtttcactcaatcccagcttttaccaaaacaaacactgggatcaagcacaagcacatgaccatccatacagaccatacaataatgtaaaaaccaacatgacatttaaatatagagtaaaaggagaggaaaaaacaaaacaatatccaccacaagacctatcctacgcacaaagcataaacagaaataccgggtggtttcaacctataatattacaggcatatgaagtactaaatggaacaatacctcaagcaataacaccaactttagctggcagatataatcccacaaaagactcaggaacaggcaacatactatttgtatcatctactttaacagaagactggcaaccacctaatgataaagcacttaaaatagaaaatgtaccactatggttggctgcatttggatttctttcttatataaaaacaattaaaaaagaagagttctttgcatcacatttagtagttattaaatccactgcaattcactgttccacacaagtaggagcctgtagttactatgctcccttagacattgaatatatacaaggtaaaaaaccttatgatcaaccaattttacctagtgaacaggccaaatggactccaaatataagatggcagctaaaagccttaaactctatagttgaaagtggtccttttataccacaactaaatgaacaaaagaatagcacatgggaactaaaatatttatacaaattttactttaagtggggaggacccagaggcactgatgcacagattacagacccatcacagctaccaaccgccgatgtgcccgataaaatcttcaaaacagtacagattgtcaacccaacaaaacaaatacctgaaacaattatccacccctgggactacaggagaggtatcattacaaaaacagctattaaaagaatgtgcgagcacctccaaactgatacagactttgaaatctctgaaacagaaactcccaaaaagaaaaagaagatcaaaggagcagctctccaaaacccagaagaggaattccaagagctccaagcctgtctccaggatctctgcaaagaaaatatctaccaaacaccagagacagacctccagcagctcatcctccaacagcagcagcagcagagagagctcaagtacaacctcgtccagctcctagtagatctaaaacaacaccagaaccaactacagttacaaacaggactattcagctaactagatttaaacctggatttgaacaagaaacagaaagacaactagctattattttctgcagaccccctagaacatacaaagaagatctcccattttacccctggttacccccagaacccaaagtgaactttgaacttaattttaaatactaggccaacaatgtacacttagtaaagcatgtttaataaagttacaccccaaaaaaaaaaaaaaaaaaaaaaaaataaaaaa

SEQ ID NO: 4830 - protein, 662 aa, Gammatorquevirus sp.
MPFYWKRRRRPWYGAWYRRRRRRPWRWPQKRRRIRRRRRARRTYKGRRRHQRKVRRKRRKLTLHQWQPESIRKCKIKGLGLLVLGAEGTQMNCYTTNKYDYVPPKVPYGGGFGTELYSLEYLYEEYTLHNNIWTTSNIGLDLCRYTGGSFIFFRHPEIDFIVTYTLSLPITIDKYTFAAIHPHQMLLEKRHRVIFSQKSKPNGKYYVKIKFKPPKQMSNKWFFTQQFSKYQLIFLKATAVNFRYSFLTETSQNLLVNIVSLNPSFYQNKHWDQAQAHDHPYRPYNNVKTNMTFKYRVKGEEKTKQYPPQDLSYAQSINRNTGWFQPIILQAYEVLNGTIPQAITPTLAGRYNPTKDSGTGNILFVSSTLTEDWQPPNDKALKIENVPLWLAAFGFLSYIKTIKKEEFFASHLVVIKSTAIHCSTQVGACSYYAPLDIEYIQGKKPYDQPILPSEQAKWTPNIRWQLKALNSIVESGPFIPQLNEQKNSTWELKYLYKFYFKWGGPRGTDAQITDPSQLPTADVPDKIFKTVQIVNPTKQIPETIIHPWDYRRGIITKTAIKRMCEHLQTDTDFEISETETPKKKKKIKGAALQNPEEEFQELQACLQDLCKENIYQTPETDLQQLILQQQQQQRELKYNLVQLLVDLKQHQNQLQLQTGLFS

SEQ ID NO: 4831 - DNA, 2528 bp, Gammatorquevirus sp.
aaaaaaaaaaaataaaaaattgcaaaaattctctaggggcaattcgggctagggcagtctagcggaatgggcaagaaacttaaaacaatactttgttttacagatgagcaactactctgcctctcattttttcaaaccaacaccttacaacaatgacaccaaaaatcaaatgtggatgtccatgatagcggatgggcacgactgtatctgtaactgccatagtccttttggccatttgcttgcttctatttttcctcctggtcatcaagacaggtttcttacaattgaagaaattattaacagagatattaaagaatgcctttctggtggaggcgcagacggaggccatggttcggcagatggaggagatataaaaagagatatcccagaagaagaaggcgcccactttataaaagacgaagaactagacgaactaatcgccgcaggagaagacgccggtggaaggtaagaagaaaaaagaagagaataaatgttactcagtggcagcctgaatctattagaaaatgtaaaattataggcattgagccgctttgtgtaggagctgaaggatctcaaatagactgttacactgtaacaaaaacagactatgtgccacctaaagtaccttggggtggagggtttgggttagaaaactttaccttaaaatacttatactcagaatatcaatatcacaacaacatatggacaagtagcaatacacaaaaagacttatgtagatatactggaggaaaatttattgtatttagacatccaactcaagactttgttctcagctatgacatacaaccaccacacacacttaacaaatttacatttccaagttgtcatccacatcaacagctactatcaaaacaccacaaaattatacttagtcaggctagcaaaccaaatggaaagtactataaaaaaataaaatttaaaccaccaaaacaaatgctcacaaaatggttttttacaaagacattctcaccagctagtcttatagttgttaaagctgcagcagctaactttcagcatgtcaacttaagtggtaaaaatacaaacatgctagttacattatactctcttaacctttcattttataaaaatccagcctggggtcttaaacctgctacagggggctactggccccaagtaaaagcacagtctaactatccatatgttataaaaaacaaacaaggtgtggaagaaaacaaaacaatgagcattacaactacaagtgactatgcagacacaataaactatactactgggtggtttaaagctgaatttttgcaagcagtaaaactgggtacaaaagatcatcctactgccctacaccaagttgtagcaggtagatacaaccctaacatagatgatggcacaggtaatgaaatttactgtgccaccattgtaggtacctcctggctaccacctacacaagacaaacaacttttaattacagacatgccactatggctaggtctatatggctattactcatatataagagaaacaaaatctaaagacttttggaaattacatgtcattgtacttaaatccagagccatacactgttatccagaaataggaagctgtgatagatatgtttttatagactgggattacatacaaggcaaaaaaccatatgatcaatcaataacagaaagagaaaaagcatactggtatcctgacatgtcctggcaaagaaaatctatgaatgccatagttgaatcaggtccctttatacctaaactgtctgaagaaacttacagtacatgggaactaaacatgagatattatttttattttaagtggggaggtgcaaacacaggagaagcacaagttgaaaatccagaaatgctgcccacctatgatgtacccgattcaatgccaaaaacaatacaaattgttaacccagaaaaacaagctccagaaaccatcttacacccctgggactaccgcaggggatttattaaagaaacagctcttaaaagaatgtgctcaaacatcgaaactgatacagaatttcaataccctacagaacaaacaccaaagaaaaaaagaagagtacaagcaactcttccaaatccccaagaagaaaaccaggaaatcaagacatgtctcctctcgctctgcgaacaaagtacatcgcaagaggaggaagagcaagacctccacaagctcatcctcaagcagcagcacaagcaagaaaagctcaagtacaacatgttcaagctcctcttagatctcaaagaaaaacagagaataatccaacaccacacaggactcctagaatgactccctttaaaaaagggtttgaaatggacactgaaagagaactagcacacgcattctgtagaccccctagaatgtttaaagaagacccccccttttatccatggttacccaaactaacacccattgttaactttcaccttaattacaaattctaggcctacaactttcacttagtggtgtatgtttatataagtcacacccccaaaaaaaattgtaaaataaaaaaa

SEQ ID NO: 4832 - protein, 661 aa, Gammatorquevirus sp.
MPFWWRRRRRPWFGRWRRYKKRYPRRRRRPLYKRRRTRRTNRRRRRRRWKVRRKKKRINVTQWQPESIRKCKIIGIEPLCVGAEGSQIDCYTVTKTDYVPPKVPWGGGFGLENFTLKYLYSEYQYHNNIWTSSNTQKDLCRYTGGKFIVFRHPTQDFVLSYDIQPPHTLNKFTFPSCHPHQQLLSKHHKIILSQASKPNGKYYKKIKFKPPKQMLTKWFFTKTFSPASLIVVKAAAANFQHVNLSGKNTNMLVTLYSLNLSFYKNPAWGLKPATGGYWPQVKAQSNYPYVIKNKQGVEENKTMSITTTSDYADTINYTTGWFKAEFLQAVKLGTKDHPTALHQVVAGRYNPNIDDGTGNEIYCATIVGTSWLPPTQDKQLLITDMPLWLGLYGYYSYIRETKSKDFWKLHVIVLKSRAIHCYPEIGSCDRYVFIDWDYIQGKKPYDQSITEREKAYWYPDMSWQRKSMNAIVESGPFIPKLSEETYSTWELNMRYYFYFKWGGANTGEAQVENPEMLPTYDVPDSMPKTIQIVNPEKQAPETILHPWDYRRGFIKETALKRMCSNIETDTEFQYPTEQTPKKKRRVQATLPNPQEENQEIKTCLLSLCEQSTSQEEEEQDLHKLILKQQHKQEKLKYNMFKLLLDLKEKQRIIQHHTGLLE

SEQ ID NO: 4833 - protein, 121 aa, Gammatorquevirus sp.; identical to SEQ ID NO: 4194

SEQ ID NO: 4834 - protein, 111 aa, Gammatorquevirus sp.
MSPLALRTKYIARGGRARPPQAHPQAAAQARKAQVQHVQAPLRSQRKTENNPTPHRTPRMTPFKKGFEMDTERELAHAFCRPPRMFKEDPPFYPWLPKLTPIVNFHLNYKF

SEQ ID NO: 4835 - DNA, 2527 bp, Gammatorquevirus sp.
tttcttgcccgttccgctagactgccctagcccgaggggcaattcgggctagggcagtctagcggaacgggcaagaaacttaatatatacttttttttatagatgcaaaatatttctgctgaagacttttttaaaccaacaaactttaacaatacaactaaaaatcaactatggatgtccataattgctgattcccatgacagtctctgcaactgctggcatccttttgctcatatgcttgctagtctttttcctcctggccatcaagataggaataaaaccattgaacaaatactgcaaagagactttgctgaaacatgccattctggtggagaagaaggagaaagttctggggcggcaggtggaggaaacccagatacaacaaatataaaagaagaagaaaaccaagaagaagatatagacgcacttatggccgccgccgccgccgccacagaaaaagaagatacaaggtaagaagaaaaagaaaagctattgttttaaaacaatggcaacctgacagcattagaaaatgtaaaattaaagtaattgactcttttataataggagcacacggcacacaatttaaatgctatacaaatgaagctaaaaaatatccacagcctaaacaaccagcagggggtggttttgggatggaagtcttttctttagaagacttatatcttagatataaagctcataaaagtatatggacagcaacaaatgactataaagacctagtaagatacacaggctgtacatttactttttatagacatgcaacaacagactttatattaagctttaacacacagcccccatttacattagataaattctcatatacatcaatacatccactaaacatgctacttcagaaacataaaaaaattttatatagcttaaaaacaaaaccatggggtccctccaaagttaaatttaaaattaaacctccaaagcaaatgtctactaaatggtttttccaaaaattttttgctactgcaggcctagttgaaataaaagccactgctgctgactttaacttttcatacatacaaaacacaagtgtaaacaccaacttatccatagtgtatttaaacactgcattttaccaactaagcaactggggtaaattccttggtgcaagtcattacaaaccttatgccacaataaatgaaaaattatactactggttcaaatcaggaaaccaaacaaaacacatacaagttaaacatgaaaactactatgagtcagttaactacgcaacaggctactttcaaacaggagttttaaatgcaataaaaattacagtaacacctgaaattactgctcaatctgcacaagcacacttaccagtagcagttgcaagatacaatccacaacttgacacaggagaaaaaaatgaactatgggtagtctcaattttaactgatcactatgacaaacccagagaaccccaactagtatactctggttatcctttatggatgatgttctttggctattataactttattttacaatataaaaatgatcaaacattcttagattcacatatgtttgtaataagatctccagccatattaaaactttcaacaaccactgatcaagactattttccctttatagacttttcctttttaaatggaaaaatgccatttcaagaatacttagacgaaaacagtaaaaaattttggtacccttctgttaaaaaacaagtagaaacaataaataatattgttacttgtggcccatacataccaaaatattctgacaatagggacagttcatgggatttaaaatataaatctactttttactttaagtttggaggtccacagatttcagaaacaccagttgttgacccacaaaaacaagaagactatgatgtgcccgataagttcaaaagcacaatacaaatatctgatccaatcacacaagcctgtgaaacaatgttccacaactgggactacagaagggggcttattacaccagcagctattaaaagagtgtcaaaacacctcgaaactgattcagatgtctcgtcaacttctacagaaccaccccacaaaaagatcaaaatcacaggagaagtcccctatctcccacaagaaacagaagaagtccaagcgtgtctcctctcactctgcgaagaagataccttccaagaagaagaagaggatctccacaagctcatcaagcagcagcacaaaaagcagcagcagctcaagcagcagctcctcaagctcctagcagaaatgaacaaaaaacaaactatgctacaacttcaaacaggaatcttaggctaactagatttaagcctggctttgaagaagacacagaaaaacaactagcaaaaatattcaaaagacctccaagaacttataaagaagaccctcccttttatccatggctacctataacacccaaagtaatttttgcgcttaattttaaaggctaggccaacaatgtacacttagtaaagcatgtttaataaagttttaccccccaaaaaaaagtatatattaag

SEQ ID NO: 4836 - protein, 662 aa, Gammatorquevirus sp.; identical to SEQ ID NO: 3950

SEQ ID NO: 4837 - protein, 123 aa, Gammatorquevirus sp.; identical to SEQ ID NO: 3736

SEQ ID NO: 4838 - protein, 104 aa, Gammatorquevirus sp.; identical to SEQ ID NO: 3737

SEQ ID NO: 4839 - DNA, 2527 bp, Gammatorquevirus sp.
attaaaaaaaaaatgagtgaaaccagcgaggtctaggggcaattcgggctagggcagtctagcggaatgggcaagaaacttaaaatatattattttacagatgtcactgttcttcaacaagacatcatacaacaatgaaaccttaaatcaactatggatgtctattatagctgattctcatgatatatgctgtaaatgccaatgcccttttgcacacctgctagacagcatatttccagaaggtcaccaagacagatctaaaaccatacaacaaataataaccagagatttacaacaatgccattctggtggcggcgcagaagaaagccatggtttggcaggtacagaagaaagagatttacctacagaaagagaaaaccaagaagaaggttatataggagacgaagaactagaacaactcgtcgccgtcgccgaagacgccgctacaaggtaagaagaaaaaaacaaaaaattgtattaaaacaatggcagccagaaagcataaagaaatgtaaaattaaaggtattggacctctagtactaggggcagaaggatgccaatacagatgctttactacatataaatttgaatggacaaatcccaaaactccaggaggaggtggctttggagttgaactatttacactccaacacctatacaatgaatacttagctaaaaacaacatatggactaactctaacaattactatgactttgccagatatacaggatgtgaatttactttatacagacaccctgaaacagactttatctttacatatgacaatcaaccaccatttaccattaacaaatatacatacatgatggttcatcctgtaaacatgctacaaagaagacacaaaaaagtactattaagtacagccacaaaacctaatggcagactaactaaaagaattaaaattaaaccacctaaactaatgtcaacaaaatggtttttccaagaagagatagctaagtatggtttggttaccatagcagctacagcctgtaattttagatatccttggatggcctgctgcaatgagaacttaattataactctagactacctacaaccaggattttacaaacattctgaatgggcacaagcacacacagcagcttataatccaaatggcttttcagggacaaaaatagctactaatttatattattggtactatgatgacagaggcgtagagcaaaaatggcaaatgactgactttactggcacaagtccatacaatgactctgtcagctataagagaggatggttttcaccttatgtacttagagcacatttagtaacacaaactgcagataaaacaaagccaataggtatgacaccctgtggcacactaagatataacccagcactagatacaggacaaggaaacaaagtatgggtagcatccactgtagcaggtacatggggtgttccaaaagatgacgatttaataatggaaaattacccactatggatgattttctatggatatacatcttatataaaacaaataaaatctaaaacaactccatttcaaggaaacatgctttgtgtacaatcaaaagcattatacagagttagaggaataggtactacaccattttaccctatcttagacagatcttttataaaaggtaaaggaacaggaggcacagaccccattaaatttccaggagacacttggtacccctctatgttctcacaaagagacagtgtatcacaaattgtaaactgtggaccctatgtacctaaatacaatgaaacaaaacaaagcacatggcaactaaactatttctacaaattttattttaagtggggtggcacatacccaccagatgccacagcagcaaatccacaaacaaagcctacctatgatgtgcccgatcaccagcaagaaacagtacaaattgttaacccaattaaacaagactacaacaccatctttaaaccatgggactacaggaggggctccattacaaaaacagcttttaaaagaatgttcgaccacctccaatctgatgaatctttatcaacagattcgagcagctgctcctcgccaccgaaaaagagaaaagcgccactcctccaagacccaaaagaagaaaacaagaaaatccaagcatgtctcctctcactctgcgaagagcctacatgcccagaacaaacggaggaaaacctacacctcctcatccagcagcaacacaagcaacagcagcaaatcaagctcaacctcctgcacctcatctcagacctaaaagccaaacagagaactctactacacagcactggactcctaaactaaccagattcaatcctggtcatgactgggacacagaagtacaagtagctgcagcttttaaaagaccccctagactgtttaaagaagataaacctttttacccatggttacccaaatttgaaccccttgttaactttcacttaaattacaaattctaggccgacactgttcacttagcggtgtttgtttaataaagtttgcaccccaaaaaaattgtaaa

SEQ ID NO: 4840 - protein, 670 aa, Gammatorquevirus sp.
MPFWWRRRRKPWFGRYRRKRFTYRKRKPRRRLYRRRRTRTTRRRRRRRRYKVRRKKQKIVLKQWQPESIKKCKIKGIGPLVLGAEGCQYRCFTTYKFEWTNPKTPGGGGFGVELFTLQHLYNEYLAKNNIWTNSNNYYDFARYTGCEFTLYRHPETDFIFTYDNQPPFTINKYTYMMVHPVNMLQRRHKKVLLSTATKPNGRLTKRIKIKPPKLMSTKWFFQEEIAKYGLVTIAATACNFRYPWMACCNENLIITLDYLQPGFYKHSEWAQAHTAAYNPNGFSGTKIATNLYYWYYDDRGVEQKWQMTDFTGTSPYNDSVSYKRGWFSPYVLRAHLVTQTADKTKPIGMTPCGTLRYNPALDTGQGNKVWVASTVAGTWGVPKDDDLIMENYPLWMIFYGYTSYIKQIKSKTTPFQGNMLCVQSKALYRVRGIGTTPFYPILDRSFIKGKGTGGTDPIKFPGDTWYPSMFSQRDSVSQIVNCGPYVPKYNETKQSTWQLNYFYKFYFKWGGTYPPDATAANPQTKPTYDVPDHQQETVQIVNPIKQDYNTIFKPWDYRRGSITKTAFKRMFDHLQSDESLSTDSSSCSSPPKKRKAPLLQDPKEENKKIQACLLSLCEEPTCPEQTEENLHLLIQQQHKQQQQIKLNLLHLISDLKAKQRTLLHSTGLLN

SEQ ID NO: 4841 - protein, 117 aa, Gammatorquevirus sp.
MSLFFNKTSYNNETLNQLWMSIIADSHDICCKCQCPFAHLLDSIFPEGHQDRSKTIQQIITRDLQQCHSGGGAEESHGLAGTEERDLPTERENQEEGYIGDEELEQLVAVAEDAATR

SEQ ID NO: 4842 - protein, 136 aa, Gammatorquevirus sp.
LLLATEKEKSATPPRPKRRKQENPSMSPLTLRRAYMPRTNGGKPTPPHPAATQATAANQAQPPAPHLRPKSQTENSTTQHWTPKLTRFNPGHDWDTEVQVAAAFKRPPRLFKEDKPFYPWLPKFEPLVNFHLNYKF

SEQ ID NO: 4843 - DNA, 2527 bp, Betatorquevirus sp.
ccccttaaaccccccgggggggaaacccccccgaaccggcaattcgggctagatcagtctggcggaacgggcaagaaacttaaaatatttttaattacagatgtcaaagtttttaaaaccaacttcatacaatggacgccaacaagaaaccaactggataaacttcaacattcactttcatgactccttctgtggatgccctgaacccctaacacacctaagacacctactaaaccaacaatgccaccatatcaaagacgccgctacttctacagaaactggtggaattcaagaagaaaacgatattggaatcgacgatggagacctagaaagactgttcgcaatcgaaaacgaagacaacgacgggtaagaagacgcttttataaaaaaaatagaaaacttaaaagactaagaataaatgaatggcaacctagctcaattaaaaaatgtaaaatagaaggatacctagtactgtttcaagcgggatacggacgctattctaataactacccattatggaaagaagtaatatttccacctcattatccaggtggaggtggatggggaatacaacaattaaacctaggaaatttatatactcaacataaagaacttatgaactactggactaaaagtaatgatagaatgaatatgtgtagatatatgggtgtaacacttacattatttagagagcaacacacagactggatattctcatactatgactcattaccaaaaacagtaacaaaatatttttacacctcacatcaccctatgcttatgcttacacacaaaagaaaaaaaacaataccaagttttgactcccagccacacaaaagaaaaccatacaaaaaaatatttgtaagaccaccaagactaatgagaaaccaatggtactttcaacaacaattagcagattttcctttactaacatttgccgcttcagcatgcagtcttcaaggcatgtttggatctataaactcagtaaacaataatgctacaatgtactgcatagaccacgcagtatttacaaaacctatatttcaatacaaaacacaaacacatccagaatggggctacaggcctagtgacaccatttacctatacggcctacaaaatggagcacacatttttactgaaaaccaatacaaagacagcatttacctaggaaacacaatgaacaatcaaagaggtgctgttattaacagttaccaagagtcacaatttacagaaaaatacccctttggagaatggggaaacccttttttttggggatacatgacaggaaacttaacagttttccaaaacactacagaccccaaaaccatggcaaaaaaccctacaaaaaaactacaacaaacctggttaagagagaacccttatgtttttaaagtcagatacaacccttttaaagataaaggacgaggaaaccaagtatactttgtaccaaattatgactccagccataacacatgggaacccaccaaagacccagatattctgttcgaaaattacccactatggttattactatggggcctagaagatatagttaaaagaatgggaaaatgcaaaaacttagacaatgactggactctagtaataaaatctaattggatactgccaccacaagcatactatataccagttagttatgactttgtacatggcagaggcccatatgatacagaaagagaagaaatgtctagagatgactatactaactggtaccctagatttaaataccaaagacaagcaatacaaaatattataatgacagggcctgctgttgctagaggagactatgctaaaaacatacaagctaaattgaaatatacttttcattttaagtggggaggcaactccgaaccgcaagaatcagtatttgacccaaccaaccaaccaattacacctgcaccccctaacatctacagcatccatgaaatcacaaatccgaattcaagcattacgggagaaatctacccatgggatttcagacgagatatgcttacaacaacagctacagaaagaattagacaaagcccaactaatgaaacatatatgttcacagatggagacgaaacttcgacagacctcaaaatctacacaccggagacacaaaaggaaaagaccccgaaaacacaaaagaaaacacttctcgagcagctccagctcatccaatcctacaaccaacagctccaactcagattcagaaaactaaaacaattatcaaaggacccataaaccaagtacaattgtttccaaaatacaaaaacagaagatttaaaccctatgaatttgaattagaattaacaatggctaaaatttttcgcagacgccctagaagttacttctatgatatgccaacttatgactggttaccccctgaacctaaagtaaactttgaccttgtacatggatttaataaaggccagcattaattcacttgaggtgtccgtttatttattattaaacttaactaaacatccaccgcctccccaatacgcaggcgcaaagggggctccgc

SEQ ID NO: 4844 - protein, 667 aa, Betatorquevirus sp.
MPPYQRRRYFYRNWWNSRRKRYWNRRWRPRKTVRNRKRRQRRVRRRFYKKNRKLKRLRINEWQPSSIKKCKIEGYLVLFQAGYGRYSNNYPLWKEVIFPPHYPGGGGWGIQQLNLGNLYTQHKELMNYWTKSNDRMNMCRYMGVTLTLFREQHTDWIFSYYDSLPKTVTKYFYTSHHPMLMLTHKRKKTIPSFDSQPHKRKPYKKIFVRPPRLMRNQWYFQQQLADFPLLTFAASACSLQGMFGSINSVNNNATMYCIDHAVFTKPIFQYKTQTHPEWGYRPSDTIYLYGLQNGAHIFTENQYKDSIYLGNTMNNQRGAVINSYQESQFTEKYPFGEWGNPFFWGYMTGNLTVFQNTTDPKTMAKNPTKKLQQTWLRENPYVFKVRYNPFKDKGRGNQVYFVPNYDSSHNTWEPTKDPDILFENYPLWLLLWGLEDIVKRMGKCKNLDNDWTLVIKSNWILPPQAYYIPVSYDFVHGRGPYDTEREEMSRDDYTNWYPRFKYQRQAIQNIIMTGPAVARGDYAKNIQAKLKYTFHFKWGGNSEPQESVFDPTNQPITPAPPNIYSIHEITNPNSSITGEIYPWDFRRDMLTTTATERIRQSPTNETYMFTDGDETSTDLKIYTPETQKEKTPKTQKKTLLEQLQLIQSYNQQLQLRFRKLKQLSKDP

SEQ ID NO: 4845 - protein, 89 aa, Betatorquevirus sp.
MSKFLKPTSYNGRQQETNWINFNIHFHDSFCGCPEPLTHLRHLLNQQCHHIKDAATSTETGGIQEENDIGIDDGDLERLFAIENEDNDG

SEQ ID NO: 4846 - protein, 61 aa, Betatorquevirus sp.
LFPKYKNRRFKPYEFELELTMAKIFRRRPRSYFYDMPTYDWLPPEPKVNFDLVHGFNKGQH

SEQ ID NO: 4847 - DNA, 2527 bp, Gammatorquevirus sp.
aaaaaaaaaaaaataaaaaattgcaaaaaggtctaggggcaattcgggctagggcagtctagcggaacgggcaagaaacttaaattaaacttttttttcagatgagtaaattttttactccaacaccttacaacaatgaaactaaaaaccaaatgtggatgtccatgatagcagatggccatgatatttgctgtggatgccctcaaccttttgctcacctactagacagcatatttccagacggccacacagacaggtacaagaccattcactacattataaacagagactataaactatgccattctggtggagaaggagaagaaagccatggtatggccgctggagaagaaaaagatttaccaaccgtcaaaagagaagaagaagatactataccagaagatggaaacgtagaagaactactcgccgccgtagaaaacgccgaggcaaggtaagaaaaaagaaacaaactataactgttaaacaatggcagccagatagaattgtactatgcaaaattaaaggatttggagaacttgtattgggagcagaaggaacacaatttcaatgctatacaaatgaaaagtatactacaccaagaccattaaaccctgggggaggaggctttggaatggaaagatttaccttagaatacctatataagcaacacatatttagaaacaacatctggaccaaaagcaataactggacagacctctgcagatacctaagagctactttttacttttatagacacccacatcaagactttattgtaagatatagcagacaacctccatttaacattgataaaacaacatatccagcacaacacccactacttatgctattaacaaaacatcataaagtagtacctagtttaaaaagaaaaccaagaggcaaaccatatgttaaagtaactattaaacctcctaaacaaatgctaacaaaatggttttttcaaaaacaatttgcagagtatgacctgctacaaatagctggaactgtatgctcttttgattaccctagaataggctgctgtagtgaaaacagagtcattacaatatattatttacacccaggatttttcaacgactcctcctggggacagaatacaggtgccacaccatacagaccttatccaacattagaaccaaaaaaatacaaattttactcaaaatatgccccaactgcaggttacacaccagattttagccaaggtactggagaacacgacccctactataaaagtattaactgggacggtgggtggttttcacccaaaatattacaagccactagatatacatacgatggagaagaaaaagctcctttaccattaaatgcagctagatacaatccagctgaagatgatggaataggcaatgaaatatggctaagtagcataacctcccacacttatcaaaaacccagagatccagtattaatttttgacaacacaccactgtggctagctttttttggctttactaactatatagaaagattaaaagacaagagtttattccaactcagcttgtttgttattaaaagccgctacataaaaccaggacctacagcacaaacacaagcctactttccttttgtagattataactttacaataggaaaaaatccaaaagaaagctacctaacatacacagacaaaaaactatggtaccccacagtttttagacaactacaaaccataaattcaattgtagaaacaggcccatatgtgcctaagttacaagcagacagagacagtacctgggaactaccttacaaatacattttttcctttaagtggggtggaccacttatcacagaccaagaaatatcagatcccaagaacaaagacgagtatcctgtacccgatacaatgcaaaaggcaatacagatatgcaacccaaaacatcaagacacatccacaatcttccatgagtgggattacagacgaggctacattacaaacccagctattaaaagaatgtcagaaaacctcatcattgattcagatgtctcatcagatgcagaaactccatcgaaaaagagaaagagagttacagcagagctcagaaacccggaggagaaagtcaagaaaatcaaaaaatgtctcctctcactctgcgaagagcatacatgccaagaagaggaggaagagacagacctccaccagctcatcctcaagcagcagcaacagcagcagcaactcaagcacaacatcttaattctactgaaagatatgaaagcaaaacaaaagatgcttcaactacaaacaggagtcctagagtaaaactaacaccttttaaaaaagggtttgaaatggacacagaaaaagaactagcacaagcatttaacaggccccctagaatgtttaaagaagacacccctttttatccctggttaccaaaacctgtaccccttgtaaactttcaccttaattttaagttctaggcctacaacactcacttagtggtgtatgtttatataagtttgcaccccaaaaaaattgtaaaaataaaaa

SEQ ID NO: 4848 - protein, 665 aa, Gammatorquevirus sp.
MPFWWRRRRKPWYGRWRRKRFTNRQKRRRRYYTRRWKRRRTTRRRRKRRGKVRKKKQTITVKQWQPDRIVLCKIKGFGELVLGAEGTQFQCYTNEKYTTPRPLNPGGGGFGMERFTLEYLYKQHIFRNNIWTKSNNWTDLCRYLRATFYFYRHPHQDFIVRYSRQPPFNIDKTTYPAQHPLLMLLTKHHKVVPSLKRKPRGKPYVKVTIKPPKQMLTKWFFQKQFAEYDLLQIAGTVCSFDYPRIGCCSENRVITIYYLHPGFFNDSSWGQNTGATPYRPYPTLEPKKYKFYSKYAPTAGYTPDFSQGTGEHDPYYKSINWDGGWFSPKILQATRYTYDGEEKAPLPLNAARYNPAEDDGIGNEIWLSSITSHTYQKPRDPVLIFDNTPLWLAFFGFTNYIERLKDKSLFQLSLFVIKSRYIKPGPTAQTQAYFPFVDYNFTIGKNPKESYLTYTDKKLWYPTVFRQLQTINSIVETGPYVPKLQADRDSTWELPYKYIFSFKWGGPLITDQEISDPKNKDEYPVPDTMQKAIQICNPKHQDTSTIFHEWDYRRGYITNPAIKRMSENLIIDSDVSSDAETPSKKRKRVTAELRNPEEKVKKIKKCLLSLCEEHTCQEEEEETDLHQLILKQQQQQQQLKHNILILLKDMKAKQKMLQLQTGVLE

SEQ ID NO: 4849 - protein, 117 aa, Gammatorquevirus sp.
MSKFFTPTPYNNETKNQMWMSMIADGHDICCGCPQPFAHLLDSIFPDGHTDRYKTIHYIINRDYKLCHSGGEGEESHGMAAGEEKDLPTVKREEEDTIPEDGNVEELLAAVENAEAR

SEQ ID NO: 4850 - protein, 114 aa, Gammatorquevirus sp.
MSPLTLRRAYMPRRGGRDRPPPAHPQAAATAAATQAQHLNSTERYESKTKDASTTNRSPRVKLTPFKKGFEMDTEKELAQAFNRPPRMFKEDTPFYPWLPKPVPLVNFHLNFKF

SEQ ID NO: 4851 - DNA, 2526 bp, Gammatorquevirus sp.
aaaaaaaaaaaaatgagtgaaaccaccgaggtctaggggcaactcgggctagggcagtctagcggaatgggcaagaaacttaaaaaagtttattattttaaatacagatgcagaatatcagctcacaagacttctaccaggaaactcattttaatcccgagactaagactcaaatatggatgtctcaaattgctgattctcatgataatatctgcaactgctttcatccatttgctcaccttcttgcttccatatttcctcctggtcacagagaccgtgatcttaccattaatcaaatacttagtagggattacagagagaaatgcctttctggtggggtagaagaaaaaagccatggtttggcaaatggagataccgcaggcgccgctggaacatcaggagaaaaaagaaaagaagaagaagactacccagaagaagaactagacgctatgctcgccgccgctatggaagaaaacgcaaggtaagaagaaaacttaaaaaaattaaaatacaacaatggcaacctgactctattagaaaatgtaaaataaaaggctactcatgcatgatactaggaggtgaaggaactcaaatgttttgctatacaaatacagccagtgactatccacaaccaaaagccccaggtggcggaggctttggctatgaggttataaccttaaaatggctgtaccaagaatttttaagacacaataatatttggactcgctctaatgaatacacagacttggttagatatactggaggtaggataactttttttgcacatccatacattgactttattatatcatatgacctacaacctccatttgacataaacaagttttcatacccagaaattcagccacaaaacttactactaagaaagcataaaagaatattacttagcagacaaagcaatccaaaaggaagacacaaagtaacaataaaatttcatcctccaaaacaaatgacaactaaatggtttttccaaaaagacttttgcccctatggattaataaaactaacagcggctgcagcagacttttcatacccagtcataggacctaaatctcaaagtactatactaacactatatgcattaaatacaaacttttatcaaaatagtgattgggcacatgtaaaaaccgatcaaccttacatgaacatttcaacccaagcattacccctttactttacatacaaagaaaaaggtgcagacaaagtatttacatatgatccaactaaacaagaaaacaaatactattattctatttcatgggaaaatggattatttaatcccaaagtactgctagcatataaaatatcaactgataaaggaggcactagaccaatagcaggtacaccaataataccattaagatataatccacaagaagatgatggttttggaaatgaagtatatctttccagcatactaaatggcagatataacaaaccatcatacacaactgattatcaatttaacaatgtaccattgtacatagcattctacggctactataactatttaaaaatatacagtcaagataaaaacataatgaaatcttacatatttgtagttaaaagtaaagcaattaaacctatttctcaaacaacagcacaaacatattatcctatactagacagtgactttgtttttggcaaactaccctgggatgaatacatgtctgcagaggcaaaaaaactatggtatcctactgcagaaaaacaagaaggtataataaatagcatagtagaatctggcccatttgtgccaaagcttaacaacatgacatacagtacatggtctctaatgtacaattataaatttttttttaagtggggtggaccacatgtcacagatcccaaagttgaagacccttgcaccagaaacaaataccctgtgcccgatacaatgcaacagggattacagattgtcaacccagaaaaaaataaagttgaatccttactacatgactgggactttagaagggggttcgttacaaacacagctcttaaaagaatgtcagaaaacctcccatctgaaacatctctctcatctgatgattcagaatcacctgcaaagaagagaaagatcacaaaagaagtcccatgccagcaagaaagcaaagagaaaatccaagcttgtctcctctcactctgcgaagaaaatacctgccaagaaacaccccaaaacctccagcagctcatccagcagcagcagcagcaacagcaccagctcaagagaaacatactcaagctcctcacacacctgaaaaaaggccaaagatgtgtggaactacaaacaggccttttagagtagaaccatttaaaccaggatttgaagaacaaacagaaaaagaacttgcagcagctttttgcagacctccaagaaaatataaaaatgacccccctttttacccctggttaccaattaccccaaaagtagtgtttaacctaaacttcaaaggctaggccaacactgtacacttagtagaggttgtttaataaagtttgccccta

SEQ ID NO: 4852 - protein, 667 aa, Gammatorquevirus sp.
MPFWWGRRKKPWFGKWRYRRRRWNIRRKKKRRRRLPRRRTRRYARRRYGRKRKVRRKLKKIKIQQWQPDSIRKCKIKGYSCMILGGEGTQMFCYTNTASDYPQPKAPGGGGFGYEVITLKWLYQEFLRHNNIWTRSNEYTDLVRYTGGRITFFAHPYIDFIISYDLQPPFDINKFSYPEIQPQNLLLRKHKRILLSRQSNPKGRHKVTIKFHPPKQMTTKWFFQKDFCPYGLIKLTAAAADFSYPVIGPKSQSTILTLYALNTNFYQNSDWAHVKTDQPYMNISTQALPLYFTYKEKGADKVFTYDPTKQENKYYYSISWENGLFNPKVLLAYKISTDKGGTRPIAGTPIIPLRYNPQEDDGFGNEVYLSSILNGRYNKPSYTTDYQFNNVPLYIAFYGYYNYLKIYSQDKNIMKSYIFVVKSKAIKPISQTTAQTYYPILDSDFVFGKLPWDEYMSAEAKKLWYPTAEKQEGIINSIVESGPFVPKLNNMTYSTWSLMYNYKFFFKWGGPHVTDPKVEDPCTRNKYPVPDTMQQGLQIVNPEKNKVESLLHDWDFRRGFVTNTALKRMSENLPSETSLSSDDSESPAKKRKITKEVPCQQESKEKIQACLLSLCEENTCQETPQNLQQLIQQQQQQQHQLKRNILKLLTHLKKGQRCVELQTGLLE

SEQ ID NO: 4853 - protein, 125 aa, Gammatorquevirus sp.
MQNISSQDFYQETHFNPETKTQIWMSQIADSHDNICNCFHPFAHLLASIFPPGHRDRDLTINQILSRDYREKCLSGGVEEKSHGLANGDTAGAAGTSGEKRKEEEDYPEEELDAMLAAAMEENAR

SEQ ID NO: 4854 - protein, 120 aa, Gammatorquevirus sp.
MPARKQRENPSLSPLTLRRKYLPRNTPKPPAAHPAAAAATAPAQEKHTQAPHTPEKRPKMCGTTNRPFRVEPFKPGFEEQTEKELAAAFCRPPRKYKNDPPFYPWLPITPKVVFNLNFKG

SEQ ID NO: 4855 - DNA, 2526 bp, Gammatorquevirus sp.
ctaggggcaattcgggctagggcagtctagcggaacgggcaagaaacttaaaataattatttattttacagatgcaaaacctgtctgccactgatttttttaaaccaacacactttaacaaagatactaaaaaccagatatggatgtccataattgctgattctcatgactgtatctgcaactgcaacagtccttttgggcacctgctcgcttctatttttcctcctggtcataaagaccgtgactttaccattaatcaaattattaaaagagattatttgcaacaatgccattctggtggagacgcagacgaaagccatggttcaccagccgctggagaccatacagaaagagaagaccattcaaaaataaaagaagaagaacaagatataataaaagacgaagaactacaagaactaatcgccgcaggagaagacgcaggcacaaggtaagaagaaaaaaaagaactataccagtaagacaatggcagccagactctattagaaactgtaaaataagaggctttggcatactagtactaggagctgaaggaactcagatgttttgctatacaacagataaaaaaaaatatgtacctccaaaagtaccatacggaggaggactaggagttgaactgtatactttaagatacctatatgaagaacataaactgttaaataacttttggacagcatctaacattttaaaagacctatgcagatacttatggtgtaaaataactgtttttagacatgtagaaacagactttattgttagctttgatactcaaccaccatttcacattaataaattcacatacccaggtactcatccacatcagcaactactaaacaaaagaaaaaaaataatactcagtttagctagtaaaccaaatggcaaatactataaaaaattttatataaaaccaactaaacaaatgatatctaaatggtttttcactaaagaattttccaagcaaccattatttttactaagaggagctgcatgtgattttagacattcctaccttacagctacaaacacaaacttactagtcaatttagtatccctaaacacctccttttacagacactcaaactgggctcaacacacaggtgacaacccatatgtaccttacacccatgtagcagaccgcctacagtacaaagtaaaaactaaatcaggtacagaagagacaagaaccatggaagttaattctaagtctccatatgcacaatcagtagactataccaaaggctggtttaacaatgaatttttaagagccacacaaatattagcatcaggttcactaacagctactacacccactatagctggaagatacaacccaacaacagatgatggcataggtaacaaaatatacttagtatccacattaacagatggctgggacacacccagagtagacaaacaacttattatagaagaaatgccactatggctaggattatatggctttattagctatataaaaacagttaaaccaccagaatacctaaaaacttcagttgtagccttagtatcaaaatctatatatgcatttccacaaataggagctggcttatatgttcctatagatatagactacttacaaggtaaaagaccttatgaacaagttatttctacagcagacaaatcaaaatggtttccagaagtaacatggcaactaaaaaccttaaatgcattagtagaaagtgggccatttatgcctaaactaagtgaagaaagaaacagtacatgggaactaaaatatgaatatctttttaaatttaagtggggaggaccccatgtcacagatcaagaaattaaggatccccaagaccttgacacctatgatgtacccgatactatgccaaaaaagatacaaattagagacccagaaaaacaaacaacagaaagcattatccatgcctgggacattagaaggggaattattaaagaagcagctctcaaaagaatgtgcgacaacatctcaactgatacagaatttcaaccttttacagaggaacctcctcaaaagaaaaagaaataccttggagcagccctcagagacccccaagaagaagtcaaaaagatccaggaatgtctccaggatctctgcaaagaaaatatctgccaagagcaagaaacacaaacactccaagacctcatccagcagcagcagcagcagcaagagcagctcaagtacaacatcctcatgctcctcacagacctgaaatgcaaacagagagaaattcaactacaaacagggatgttagaataactttaacaaggtttcaacctgggtttgaatggcaaacagagtgtgaattagcacaagcatttagaagaccccctagactttttaaggaagacacccccttttacccctggctgcctaagccagaaccccttgtaaactttcaccttaattacaagttctaggccgacactgttcacttagcggagtctgtttatataagtttgcaccccaaaaaaactataaaataaaaaaaaaaaaaaaaa

SEQ ID NO: 4856 - protein, 665 aa, Gammatorquevirus sp.
MPFWWRRRRKPWFTSRWRPYRKRRPFKNKRRRTRYNKRRRTTRTNRRRRRRRHKVRRKKRTIPVRQWQPDSIRNCKIRGFGILVLGAEGTQMFCYTTDKKKYVPPKVPYGGGLGVELYTLRYLYEEHKLLNNFWTASNILKDLCRYLWCKITVFRHVETDFIVSFDTQPPFHINKFTYPGTHPHQQLLNKRKKIILSLASKPNGKYYKKFYIKPTKQMISKWFFTKEFSKQPLFLLRGAACDFRHSYLTATNTNLLVNLVSLNTSFYRHSNWAQHTGDNPYVPYTHVADRLQYKVKTKSGTEETRTMEVNSKSPYAQSVDYTKGWFNNEFLRATQILASGSLTATTPTIAGRYNPTTDDGIGNKIYLVSTLTDGWDTPRVDKQLIIEEMPLWLGLYGFISYIKTVKPPEYLKTSVVALVSKSIYAFPQIGAGLYVPIDIDYLQGKRPYEQVISTADKSKWFPEVTWQLKTLNALVESGPFMPKLSEERNSTWELKYEYLFKFKWGGPHVTDQEIKDPQDLDTYDVPDTMPKKIQIRDPEKQTTESIIHAWDIRRGIIKEAALKRMCDNISTDTEFQPFTEEPPQKKKKYLGAALRDPQEEVKKIQECLQDLCKENICQEQETQTLQDLIQQQQQQQEQLKYNILMLLTDLKCKQREIQLQTGMLE

SEQ ID NO: 4857 - protein, 126 aa, Gammatorquevirus sp.; identical to SEQ ID NO: 3917

SEQ ID NO: 4858 - protein, 113 aa, Gammatorquevirus sp.
MSPGSLQRKYLPRARNTNTPRPHPAAAAAARAAQVQHPHAPHRPEMQTERNSTTNRDVRITLTRFQPGFEWQTECELAQAFRRPPRLFKEDTPFYPWLPKPEPLVNFHLNYKF

SEQ ID NO: 4859 - DNA, 2526 bp, Gammatorquevirus sp.
gggcagtctagcggaacgggcaagaaacttaaaacaatactttgttttacagatgagcaattattctgcatctcacttttttaaaccaacaccttacaacaatgacaccaaaaatcaaatgtggatgtccatgatagctgatggacacgactgtatctgcaactgcaatagtccttttggccatctgcttgcttctatttttcctcctggtcatcaagaccgcctacttaccattgaagaaattattaacagagatattaaagaatgcctttctggtggagacgcaggagaaggccatggttcggccgctggagaaaatataaaaagagatacccaagaagaagaaggcgcccactttataaaagacgaagaactagacgccttaatcgccgcaggagaagacgccggtggaaggtaagaagaaaaaagaagagaattaatgtaacacaatggcagcctgagtctattagaaaatgtaaaataataggaatagaacctttgtgtgttggagctgaaggctcacaaatagactgctatactgtaactaaaacagactatgtaccaccaaaagtaccttggggagggggctttggattagaaaactttaccttaaaatacttgtactctgaatatcagtatcacaacaacatatggacaagtagcaacagtcaaaaagatttgtgtagatatacaggaggtaaatttatagtatttagacaccctacacaagactttgttataagctatgatatacaaccaccacataccttaaacaaattcacatttccaagctgtcacccacatcaacaactactatctaaacaccataaaattatacttagtcaagctagcaacccacatggaaaatattataaaaaaattaaatttaaaccacctaaacaaatgctaactaaatggttctttacaaaaacattttcaccagccagtttaatagtagtaaaagctgctgctgcaaactttcaacatgttaaccttagtggaaaaaataccaatatgctagtaacactgtattcacttaatttaggattttataaaaatcctgcatgggcattaaaacctgcacatggagggtattggcctcaaacatcagcaaaatctaactatccctatgttattaaaaacaaacaaggacaagaagtaaacaaaacaatgagccttaccaccacatctgattattcagcaaccattaactactcaacaggctggtttaagtctgaatttttacaagctgtaaaattaggtacaattgaacaacccactgcattacaccagatagtagctggcagatataacccaaatatagatgatggctcaggcaatgaaatttactgtgccacaattgtaggcacaagttggcaaccacccgcaacagacaaacaactactaattacagatatgcctttatggctaggcctctatggttactactcctatattagagaaaccaaaaccgaagacttttggaaactacatgttatagtagttaaatcaaaagcaattcattgttacccagaaataggtagctgtgacagatatgtatttatagattgggattatatacaaggcaaaaaaccatatgaccaaactataacagacagagaaaaaacatactggtatccagacatgtcatggcaaaaaaaatcaatgaatgctatagttgaatcaggaccattcatacctaaattatcagaagaaacttacagtacctgggaacttaacatgagatattatttttattttaagtggggaggtgctaacacagcagaagcccaagttgaaaatccagaattgctacccacctatgatgttcccgattcaatgccaaaaacaatacaaattgttaacccagaaaaacaagctccagaaaccatcttacacccctgggactaccgcaggggatttattaaagaaacagctcttaaaagaatgtgctcaaacatcgaaactgatacagaatttcaataccctacagaacaagcaccaaagaaaagaaaaagagtacaagcaactcttccaaatccccaagaagaaaaccaagaaatcaagagctgtctcctctcactctgcgaaaaaagttcatcgcaagaggaggaagaaccagacctccacaagctcatcctcaagcaacagcacaagcaggaaaagctcaagtacaacatgttcaagctcctcctcgacttgaaagaaaaacagagaataatacaacaccacacaggactcctagaatgacaccctttaaaaaagggtttgaaatagaaacagaaaaagagttagcacaagcatttagtaggccacctagaatgtttaaagaagacactcctttttatccatggttaccaagacctgtaccccttgtaaactttcaccttaatttcaaattctaggcctacaacttacacttagtggagtatgtttatataagtcacacccccaaaaaaattgtaaaataaaaaaaaaaaaaaaaaataaaaaattgcaaaaattcggcgctcgcgcgcgctgcgc

SEQ ID NO: 4860 - protein, 661 aa, Gammatorquevirus sp.
MPFWWRRRRRPWFGRWRKYKKRYPRRRRRPLYKRRRTRRLNRRRRRRRWKVRRKKKRINVTQWQPESIRKCKIIGIEPLCVGAEGSQIDCYTVTKTDYVPPKVPWGGGFGLENFTLKYLYSEYQYHNNIWTSSNSQKDLCRYTGGKFIVFRHPTQDFVISYDIQPPHTLNKFTFPSCHPHQQLLSKHHKIILSQASNPHGKYYKKIKFKPPKQMLTKWFFTKTFSPASLIVVKAAAANFQHVNLSGKNTNMLVTLYSLNLGFYKNPAWALKPAHGGYWPQTSAKSNYPYVIKNKQGQEVNKTMSLTTTSDYSATINYSTGWFKSEFLQAVKLGTIEQPTALHQIVAGRYNPNIDDGSGNEIYCATIVGTSWQPPATDKQLLITDMPLWLGLYGYYSYIRETKTEDFWKLHVIVVKSKAIHCYPEIGSCDRYVFIDWDYIQGKKPYDQTITDREKTYWYPDMSWQKKSMNAIVESGPFIPKLSEETYSTWELNMRYYFYFKWGGANTAEAQVENPELLPTYDVPDSMPKTIQIVNPEKQAPETILHPWDYRRGFIKETALKRMCSNIETDTEFQYPTEQAPKKRKRVQATLPNPQEENQEIKSCLLSLCEKSSSQEEEEPDLHKLILKQQHKQEKLKYNMFKLLLDLKEKQRIIQHHTGLLE

SEQ ID NO: 4861 - protein, 121 aa, Gammatorquevirus sp.; identical to SEQ ID NO: 3687

SEQ ID NO: 4862 - protein, 111 aa, Gammatorquevirus sp.; identical to SEQ ID NO: 3688

SEQ ID NO: 4863 - DNA, 2525 bp, Gammatorquevirus sp.
cgggagcccgaggtgagtgaaaccaccgaggtctaggggcaactcgggctagggcagtctagcggaacgggcaagaaacttaaaatatactttctgttttagatgtctattttctacaaaccaaccccctacaatggatgtactaaaaaccaaatgtggatgtcctgcgtagctgattgtcatgacattcactgtggctgtgaacaaccttttgctcacctactagacagtatttttccaaaggaccacaaagacaggcacctcaccatagaccaaataattgaaagagacaaaaaactatgcctttctggtggaacagaagacgaagaccatggtatggccgctggtaccagcgccgcaacagaaaatataaaaagagaaaattcagaaggcgtagaagaagatggcctagacgcactgctcgccgccgccgcagaacaagaagaaaaaaggtaagaagaaagaaacaaaaactgtttttacaacaatggcaaccagacaccataagaaaatgtaaaattaaaggaactggtattcacataataggtggtaatggagcacaatttaactgttttactccaaatagatttaactggacacctccactcatgcctggtggtggaggttttggggttgaaacttacagtctccaacacttatacaatgaacataaactacaaaataatatatggactcaatcaaacaaaaaccttgaacttgttagatacacaggctgctggttcaagttctacagacatgaaacaatagattttatagtacaatacagcagacaactgcccatgaccttagaaaagtatacatatccagactcacatcctaactcactactacatgctaaacataaaaaacttgttcctagtttaaaaacaaagaaacatggtaaaagatatgttaaaattaaaattaaaccaactaaacaactttcaaacaaatggttatttcaagaaacatatgctaatgctccattattaaaattaactacttccataattgacttaaggtacccacacattagtcagataggccaaaatgaacttgtttctatattttgtctgaatacagatttctatgccaatgcaggctggggtaacagctctccaccaggaacacaacacactaaatggtaccaaccatatgcaaaggtagccaacataacaaaagttaaaataaagggtaaagacacaactataaacattgacagaagttgctataaaacatctataaactatcaaacaggatggtttcaaactaaactactacaagctgaagccatagtagaagaagctagtgctaatattccaatagcagcagctagatataacccaacaaaagatgatggagcaggcaacaaagtttggctagtaagtgtagttaattattcctatgcaccacctaaaacagacttagatttatatattgaaggactacccctgtggcaattatactggggatttttagactttgttaagcaaactaaaaaagacacaacctttttaaatacttactacacagtgtttgaaagtaaatatttagaacctgctgttagcacttctaaactatacattcctatagacataagttttataaatggcaaaggtccatatgatagctatgtaaccacctatagaaaagacaactggtaccctactttaaatgctcaattaaaaacaataaatgctatagtccaatcaggaccattcgtgccaaaactggacaatatattccttagttcttgggaactatattccaactatcaatttttttttaagtttggaggttcagaactaccagaaccagacacagttgacccagaaaaacaaggcacttatgaagtacccagtaaaatcaaatcagcaatacaaattattaatccgcaaaaacaaaatgcctgtgcagccttgcatagctgggactacagaaggggactcattacaagcacagcttataaaagaatgcttgaaaaccaagaaactgatacagagtttgaatatcctacagaacaacccccacaaaagaaaaagaaaacacagtatggaaatgccctccagagagcagaccaagaaacagaagaaatccaagactgtctcctcagcttatgcgaagaagctacattccaagacttccaagaagagaacatcctcaacctcatccagcagcagcagcagcagcagcacctcaagcaacagttcctcacactcctctcagacctaaagaaaaaacagagagctctgcaactacaaacaggtcttctagattaactacatttaaaccaggctttgaatatgaaactgaaaaacagttatccattattttccatagacctatgagaacctacaaagaagaccttcctttttatccctgggtacctcctacacccaaagtttgctttaaccttaattacaaatgctaggccaacaatgtacacttagtaactgatgtttaataaagcttacacccaaaaaaaaaataaaaaaaaaaaaaaaaaaaaaaaggctgcccatggg

SEQ ID NO: 4864 - protein, 659 aa, Gammatorquevirus sp.
MPFWWNRRRRPWYGRWYQRRNRKYKKRKFRRRRRRWPRRTARRRRRTRRKKVRRKKQKLFLQQWQPDTIRKCKIKGTGIHIIGGNGAQFNCFTPNRFNWTPPLMPGGGGFGVETYSLQHLYNEHKLQNNIWTQSNKNLELVRYTGCWFKFYRHETIDFIVQYSRQLPMTLEKYTYPDSHPNSLLHAKHKKLVPSLKTKKHGKRYVKIKIKPTKQLSNKWLFQETYANAPLLKLTTSIIDLRYPHISQIGQNELVSIFCLNTDFYANAGWGNSSPPGTQHTKWYQPYAKVANITKVKIKGKDTTINIDRSCYKTSINYQTGWFQTKLLQAEAIVEEASANIPIAAARYNPTKDDGAGNKVWLVSVVNYSYAPPKTDLDLYIEGLPLWQLYWGFLDFVKQTKKDTTFLNTYYTVFESKYLEPAVSTSKLYIPIDISFINGKGPYDSYVTTYRKDNWYPTLNAQLKTINAIVQSGPFVPKLDNIFLSSWELYSNYQFFFKFGGSELPEPDTVDPEKQGTYEVPSKIKSAIQIINPQKQNACAALHSWDYRRGLITSTAYKRMLENQETDTEFEYPTEQPPQKKKKTQYGNALQRADQETEEIQDCLLSLCEEATFQDFQEENILNLIQQQQQQQHLKQQFLTLLSDLKKKQRALQLQTGLLD

SEQ ID NO: 4865 - protein, 117 aa, Gammatorquevirus sp.
MSIFYKPTPYNGCTKNQMWMSCVADCHDIHCGCEQPFAHLLDSIFPKDHKDRHLTIDQIIERDKKLCLSGGTEDEDHGMAAGTSAATENIKRENSEGVEEDGLDALLAAAAEQEEKR

SEQ ID NO: 4866 - protein, 109 aa, Gammatorquevirus sp.
LSPQLMRRSYIPRLPRREHPQPHPAAAAAAAPQATVPHTPLRPKEKTESSATTNRSSRLTTFKPGFEYETEKQLSIIFHRPMRTYKEDLPFYPWVPPTPKVCFNLNYKC

SEQ ID NO: 4867 - DNA, 2524 bp, Gammatorquevirus sp.
aaaataaaaaaaaaaaaaaaaaaataaaaaatttaggggcaattcgggctagggcagtctagcggaacgggcaagaaacttaatatattttttattttagatgtctgtattcttcaacaaaacttcatacaacaaagaaaccttaaaccagctatggatgagtatcattgctgattctcatgatatttgctgtaaatgtgaacaaccctttgctcacctacttgacagcatttttccagacggccacaaagacagacagctaactattcaacaaattattgaaagagattttgcagcatgccattctggtggtacagaagaagaaaaccttggtttggtagatggtctagaaagaagagaaatacctggcggcgcagaaaaccaagaagaagaatatataaaagacgcagaactagaacaactcgtcgccgccgcagaagacgccactacaaggtaagaagaaaacaaaaaaaaataactgttaaacaatggcaaccagaaagtgttaaaaaatgcaaaattaaaggactaggacccttagtactaggagctgaaggatgccaatacagatgcttcactgtatacaaatatgaatggacaaatcctaaaactccagggggtggtgggtttggctgtgaactgtttactctacaatacttatataatgaatatttagcaaagcataatatatggactgcatctaatctctacaaagactttggtagatatacaggctgtcaatttacattctatagacatgaacacacagactttattataaaatatgacattcacccaccctttactgttaacaaatatacatacatgatgctacacccctttaacatgctacaaagcaggcataaaaaaatactactaagcaaagacacaaaacccaatgggagactaacaaaaaaacttaaaataaaaccacctaaacttatgtcaaccaaatggttttttcaagaagaactaagtaaatatggactagttacccttgcagcttctgcatgtaactttagatttccatggatgggatgctgcaatgaaaacctaattataaccctagactacctacagccaggattttataaacattctgaatgggctcaaacttctactcaagcctataaccctggaggccatacaaaccctacatcaacaaccatgtattactattattatgatgacaggggtgtagaacaaacctggcaaatgagaacctttactggtacaaatccatacactcactccatcgcctatgacgatggatggttcaacaccaaagtactaagagcacacttagtttccacaagcccaagcaaaagaaaccctatatctttaacaccatgtggaacactaagatacaatcccatactagacactggtgaaaaaaacaaagtttgggtggtatctacattagtatatgactggcaagttccaaaagatgaagacctaataatacaaggctatcctctttggatggtattctatggctttacttcttatttaaaacaagtaaagtcaaaaaccactccatttaaaggtagcatgatatgtgttcaatctccagctctatacagagttagaggtgaagacccaacagctttctatccacttatagacagatcttttattaaaggcaaaggcactggtaacacagacccaattaaattttctggaaatgaatggtttccaagcatattcagccaaagagatagtatatcacaaatagtaaattgtggaccctatatacctaaatacaatgaaacaagagaaagtacatggcaactaaattatttttacaaattttattttaagtggggaggcagctttccaccagaccaagcagctgagaatccacaaacaaaaggtacctatgacatacccgataaaaacaaagaaacacttgaaattgctaacccaattagccaacaataccactcagtatttaagccctgggactacaggagaggagaaattacaaaaaaagcttttaaaagaatgctccaacacatcgaagttactgactctatatcaacagattcaagcgactgctcctctcccaagaaaaagagaaggccaccactcctccaagacccaaaaaaagaaaatcagaaaatccaagcatgtctcctctcactctgcgaagagcctacatgcccagaccaaaaagaagagaatctccacctcctcatccagcagcagcacgagcagcagcagcaaatcaagttcaacctcttgcacctcatctcagacctgaaatccaaacaaagaacactgctacacaacacagggctactaaactaacaagatttaaacaaggctttgaatgggaaacagagctacagctttcaagagcctttcaaagacccccaagattgtttaaagaagacacacccttttacccttggttaccaaaattcacaccccttgtaaactttcacttaaattttaaaggctaggcctacactgttcacttagtggtgtatgtttaataaagtttcacccccaaaaaaattat

SEQ ID NO: 4868 - protein, 670 aa, Gammatorquevirus sp.
MPFWWYRRRKPWFGRWSRKKRNTWRRRKPRRRIYKRRRTRTTRRRRRRRHYKVRRKQKKITVKQWQPESVKKCKIKGLGPLVLGAEGCQYRCFTVYKYEWTNPKTPGGGGFGCELFTLQYLYNEYLAKHNIWTASNLYKDFGRYTGCQFTFYRHEHTDFIIKYDIHPPFTVNKYTYMMLHPFNMLQSRHKKILLSKDTKPNGRLTKKLKIKPPKLMSTKWFFQEELSKYGLVTLAASACNFRFPWMGCCNENLIITLDYLQPGFYKHSEWAQTSTQAYNPGGHTNPTSTTMYYYYYDDRGVEQTWQMRTFTGTNPYTHSIAYDDGWFNTKVLRAHLVSTSPSKRNPISLTPCGTLRYNPILDTGEKNKVWVVSTLVYDWQVPKDEDLIIQGYPLWMVFYGFTSYLKQVKSKTTPFKGSMICVQSPALYRVRGEDPTAFYPLIDRSFIKGKGTGNTDPIKFSGNEWFPSIFSQRDSISQIVNCGPYIPKYNETRESTWQLNYFYKFYFKWGGSFPPDQAAENPQTKGTYDIPDKNKETLEIANPISQQYHSVFKPWDYRRGEITKKAFKRMLQHIEVTDSISTDSSDCSSPKKKRRPPLLQDPKKENQKIQACLLSLCEEPTCPDQKEENLHLLIQQQHEQQQQIKFNLLHLISDLKSKQRTLLHNTGLLN

SEQ ID NO: 4869 - protein, 118 aa, Gammatorquevirus sp.; identical to SEQ ID NO: 4809

SEQ ID NO: 4870 - protein, 136 aa, Gammatorquevirus sp.; identical to SEQ ID NO: 1351

SEQ ID NO: 4871 - DNA, 2524 bp, Gammatorquevirus sp.
aggggcaattcgggctagggcagtctagcggaacgggcaagaaacttaaaactatatttgttttacagatgagcaagttttttaaaccaacaaaatacaacaatgaaactaaaaaccaactatggatgtccatgattgctgacagtcatgacatttgctgtgactgtcccacaccatttgctcacctactagattcaatatttccagaaggacacagagacagacacaaaccaattgactatattattaaaagagattggaaagaatgccattctggtggagaaggcgaagaaagccatggtggggacgctggagaagaaagagatataccacccgtcaaaaacgaagaagaagatttaacaacagaagatacaaacgtagaagaactgctcgccgccgtcgccgccgcagaggcaaggtaagaaaaaagaaagctaaacttaccttgcaacaatggcaaccagacagaattgttttatgcaaaattaaaggctttggtgaacttgtcctaggagcagaaggaactcaatttcaatgctataccaatgaaaagtacaatctacctttaccactgtgtccagggggaggtggttttggggttgaaagatttacattagaatggctatacaaacagcatattttcagaaataacatttggacaaaaagtaactactggacagacctatgtagataccttagagtagtgttttacctatacagacaccctacacaaagctttatagtacaatacagcagacaatcaccatttaacatagacaaaactacataccccaactttcatcctctactaatgcttttaaaaaaacaccataaaatagtaccaagcctacaaagaaaaccaagaggtaaaccctatgttaaacttactataaaaccaccaaaacaaatgttaacaaagtggttttttcaaaaagaattttgtgaatatgatttatgccaactagcaggatcagtaatatcattagactatcccagactaggatgctgcacagaaaacagagttataaccatatggtacataaatcctagcttttaccaaaactctgactgggcacaaactaaagacaacgcatatgaaccagttacaggaattgctgaaactaaatatacatttaaaggaggcaaaaatccagcagcaggttatactcctaactttgaaaaccctaaaaccaaggaaccaggcactaaatacaaatactacaacagtataaactgggacaaaggctggttttcagctcagatattatcttccactagctacacaaaaaatggtcagcagactttaccattgccattagctgtagctagatacaaccctgctgaagatgatggtaaaggcaatgaagtatggttaacatcagtagcaacaggacagtatgctaaaccacaggacgatatcctactttttaacaatacaccactatggctagtgttctggggatatacaaactttttacagaaaattaaaaacaagtcttttttttcactatacatgtttgtaattaaaagcccctacattaaacctggaaacacagtacaaacaaaaaacttttttccatttgtagatgttaaatttacagaaggcaaaaactcacatgacagctatcttacatacacagataaaaaactctggtacccaacagtgtggagacaattagacaccataaatgcaatagtagaatgtggaccatatgttcctaaattaggctttgatagacttagcacatgggaacttgcttacaaatacattttttcctttaagtggggtggaccactcctcacagaacaagaagttgcagatccaaaatctaaagacaagtatcctacacccgatacaatgcaagaaacaatacaaatctgcaacccaaaacaccaagatacaaataccattttccatgagtgggactacagaaggggatacattaccaacccagctattaaaagaatgtcagaaaacctcatcattgattcagatgtctcaacagattcagaaacttcacagaaaaagagaaagagagttactacggagctcagaaacccagaggaaaagatcaagaaaatcaaaaaatgtctcctctcactctgcgaagaagatatctgccaagaggaggaagagggctcggacctccaccagctcatccgcaagcagcagcagcagcagcagctcctcaagcacaacatcctaacactattaaaagacatgaaagcaaaacaaaagatgctacagcttcaaacgggagtactagaataaaacttactccctttaaacctggctttgaaagagatactgaagatgaattagctaaagcattttataggcctgctagactatttaaagaagacacccccttctatccatggttacctaaattcacaccccttgtaaacttccacttaaactttagaggctaggcatgcactgttcacttggtggagtttgtttaataaagtttgcaccccaaaaaaattataaaataaaaaaaaaaaaaaaaaaaaataaaaa

SEQ ID NO: 4872 - protein, 671 aa, Gammatorquevirus sp.
LERMPFWWRRRRKPWWGRWRRKRYTTRQKRRRRFNNRRYKRRRTARRRRRRRGKVRKKKAKLTLQQWQPDRIVLCKIKGFGELVLGAEGTQFQCYTNEKYNLPLPLCPGGGGFGVERFTLEWLYKQHIFRNNIWTKSNYWTDLCRYLRVVFYLYRHPTQSFIVQYSRQSPFNIDKTTYPNFHPLLMLLKKHHKIVPSLQRKPRGKPYVKLTIKPPKQMLTKWFFQKEFCEYDLCQLAGSVISLDYPRLGCCTENRVITIWYINPSFYQNSDWAQTKDNAYEPVTGIAETKYTFKGGKNPAAGYTPNFENPKTKEPGTKYKYYNSINWDKGWFSAQILSSTSYTKNGQQTLPLPLAVARYNPAEDDGKGNEVWLTSVATGQYAKPQDDILLFNNTPLWLVFWGYTNFLQKIKNKSFFSLYMFVIKSPYIKPGNTVQTKNFFPFVDVKFTEGKNSHDSYLTYTDKKLWYPTVWRQLDTINAIVECGPYVPKLGFDRLSTWELAYKYIFSFKWGGPLLTEQEVADPKSKDKYPTPDTMQETIQICNPKHQDTNTIFHEWDYRRGYITNPAIKRMSENLIIDSDVSTDSETSQKKRKRVTTELRNPEEKIKKIKKCLLSLCEEDICQEEEEGSDLHQLIRKQQQQQQLLKHNILTLLKDMKAKQKMLQLQTGVLE

SEQ ID NO: 4873 - protein, 117 aa, Gammatorquevirus sp.; identical to SEQ ID NO: 3351

SEQ ID NO: 4874 - protein, 114 aa, Gammatorquevirus sp.; identical to SEQ ID NO: 3352

SEQ ID NO: 4875 - DNA, 2524 bp, Gammatorquevirus sp.
cgggagcccgaggtgagtgaaaccaccgaggtctaggggcaactcgggctagggcagtctagcggaacgggcaagaaacttaaaatatactttctgttttagatgtctattttctacaaaccaaccccctacaatggatgtactaaaaaccaaatgtggatgtcctgcgtagctgattgtcatgacattcactgtggctgtgaacaaccttttgctcacctactagacagtatttttccaaaggaccacaaagacaggcacctcaccatagaccaaataattgaaagagacaaaaaactatgcctttctggtggaacagaagacgaagaccatggtatggccgctggtaccagcgccgcaacagaaaatataaaaagagaaaattcagaaggcgtagaagaagatggcctagacgcactgctcgccgccgccgcagaacaagaagaaaaaaggtaagaagaaagaaacaaaaactgtttttacaacaatggcaaccagacaccataagaaaatgtaaaattaaaggaactggtattcacataataggtggtaatggagcacaatttaactgttttactccaaatagatttaactggacacctccactcatgcctggtggtggaggttttggggttgaaacttacagtctccaacacttatacaatgaacataaactacaaaataatatatggactcaatcaaacaaaaaccttgaacttgttagatacacaggctgctggttcaagttctacagacatgaaacaatagattttatagtacaatacagcagacaactgcccatgaccttagaaaagtatacatatccagactcacatcctaactcactactacatgctaaacataaaaaacttgttcctagtttaaaaacaaagaaacatggtaaaagatatgttaaaattaaaattaaaccaactaaacaactgtcaaacaaatggttatttcaagaaacatatgctaatgctccattattaaaattaactacttccataattgacttaaggtacccacacattagtcagataggccaaaatgaacttgtttctatattttgtctgaatacagatttctatgccaatgcaggctggggtaacagctctccaccaggaacacaacacactaaatggtaccaaccatatgcaaaggtagccaacataacaaaagttaaaataaagggtaaagacacaactataaacattgacagaagttgctataaaacatctataaactatcaaacaggatggtttcaaactaaactactacaagctgaagccatagtagaagaagctagtgctaatattccaatagcagcagctagatataacccaacaaaagatgatggagcaggcaacaaagtttggctagtaagtgtagttaattattcctatgcaccacctaaaacagacttagatttatatattgaaggactacccctgtggcaattatactggggatttttagactttgttaagcaaactaaaaaagacacaacctttttaaatacttactacacagtgtttgaaagtaaatatttagaacctgctgttagcacttctaaactatacattcctatagacataagttttataaatggcaaaggtccatatgatagctatgtaaccacctatagaaaagacaactggtaccctactttaaatgctcaattaaaaacaataaatgctatagtccaatcaggaccattcgtgccaaaactggacaatatattccttagttcttgggaactatattccaactatcaatttttttttaagtttggaggttcagaactaccagaaccagacacagttgacccagaaaaacaaggcacttatgaagtacccagtaaaatcaaatcagcaatacaaattattaatccgcaaaaacaaaatgcctgtgcagccttgcatagctgggactacagaaggggactcattacaagcacagcttataaaagaatgcttgaaaaccaagaaactgatacagagtttgaatatcctacagaacaacccccacaaaagaaaaagaaaacacagtatggaaatgccctccagagagcagaccaagaaacagaagaaatccaagactgtctcctcagcttatgcgaagaagctacattccaagacttccaagaagagaacatcctcaacctcatccagcagcagcagcagcagcagcagcacctcaagcaacagttcctcacactcctctcagacctaaagaaaaaacagagagctctgcaactacaaacaggtcttctagattaactacatttaaaccaggctttgaatatgaaactgaaaaacagttatccattattttccatagacctatgagaacctacaaagaagaccttcctttttatccctgggtacctcctacacccaaagtttgctttaaccttaattacaaatgctaggccaacaatgtacacttagtaactgatgtttaataaagcttacacccaaaaaaaaaataaaaaaaaaaaaaaaaaaaggctgcccatggg

SEQ ID NO: 4876 - protein, 660 aa, Gammatorquevirus sp.
MPFWWNRRRRPWYGRWYQRRNRKYKKRKFRRRRRRWPRRTARRRRRTRRKKVRRKKQKLFLQQWQPDTIRKCKIKGTGIHIIGGNGAQFNCFTPNRFNWTPPLMPGGGGFGVETYSLQHLYNEHKLQNNIWTQSNKNLELVRYTGCWFKFYRHETIDFIVQYSRQLPMTLEKYTYPDSHPNSLLHAKHKKLVPSLKTKKHGKRYVKIKIKPTKQLSNKWLFQETYANAPLLKLTTSIIDLRYPHISQIGQNELVSIFCLNTDFYANAGWGNSSPPGTQHTKWYQPYAKVANITKVKIKGKDTTINIDRSCYKTSINYQTGWFQTKLLQAEAIVEEASANIPIAAARYNPTKDDGAGNKVWLVSVVNYSYAPPKTDLDLYIEGLPLWQLYWGFLDFVKQTKKDTTFLNTYYTVFESKYLEPAVSTSKLYIPIDISFINGKGPYDSYVTTYRKDNWYPTLNAQLKTINAIVQSGPFVPKLDNIFLSSWELYSNYQFFFKFGGSELPEPDTVDPEKQGTYEVPSKIKSAIQIINPQKQNACAALHSWDYRRGLITSTAYKRMLENQETDTEFEYPTEQPPQKKKKTQYGNALQRADQETEEIQDCLLSLCEEATFQDFQEENILNLIQQQQQQQQHLKQQFLTLLSDLKKKQRALQLQTGLLD

SEQ ID NO: 4877 - protein, 117 aa, Gammatorquevirus sp.; identical to SEQ ID NO: 4865

SEQ ID NO: 4878 - protein, 110 aa, Gammatorquevirus sp.
LSPQLMRRSYIPRLPRREHPQPHPAAAAAAAAPQATVPHTPLRPKEKTESSATTNRSSRLTTFKPGFEYETEKQLSIIFHRPMRTYKEDLPFYPWVPPTPKVCFNLNYKC

SEQ ID NO: 4879 - DNA, 2523 bp, Gammatorquevirus sp.
ataaaaaattgcaaaaattcggcgctcgcgcgctaggggcaattcgggctagggcagtctagcggaatgggcaagaaacttaaaataatatttcttttacagatgagcaaattctacaaaccagctacatacaatggagacaccagacaacaaatgtggatgtctaccatttctgattttcatgattgtttttgcaaatgctggcatcctttaactcatgcactagattgtatttttcctgaaggccacaaagacagatatcaaacaattgacagcattatacaaagagacctacaatgccattctggtggagacggagaagaaagccatggtatggcagatggaggtaccgctacaatagaagatataaaaagagaagaagaccatatagaagacgcagacctagaaaacctactcgccgccgtcgaagaagaagacgcaaggtaagaagaaaaaaaatacaaaaaattactcttaaacaatggcaaccagaaagcattcataaatgtaaaataactggcttttctactttagtacttggtgctgaaggcacccaatacttatgctggacaaatgaacttaaagaatatacccagcctaaagcacctggaggaggggggtttggtagtgaactaatatccttagaatggctatatgatcaatggagagcacataactgcatatggacaaaatctaacaaaaacaaagacttagttagatatacaggaggcagcataacactgtttagacaccctaccacagactttgttttttcctacagtttgtcaccaccctttgaactcactaaatttacatacccagatatgcaagtacaaaacatgttacttagacctcacaaaagagtagtacttagtttactctctaagccatttggtaaaagaaaaataaaaattaaatttaaaccaccaaaacttatgtcaactaaatggttttttcaatctgaatttgctgacaaaggccttgttttatttcaagctactgcagcaaacttcagatatccttctataggaccaaaagctcaaaaccaaatggttacactgtactatatagacccaggtttatataatcatccaagctgggcagcagcttccacacaagcatggaaaccattaggtacaacaactacttggaaattttacacaaagtcaaaagcaggagggaaagacattattacaactatgccaccaagcaatcctattgaaccttatactaatttatatcaaatgagtataagcagagaatatggctggtggtccaaacaagttttaaatgcatacaaatttgaaagagggtcagaagtagtagcaaacagaccaatatatttagccagatacaacccaaatgaagactcaggagatggtaacctagtatatgcagtttctttactacaaagcaaatggacaccaccagcataccaaactgacttagctatagctggtcaaccactttggatggccttacatggactatatagcttttttaaatacacacttaaagacaaagcttttgatgaacactatgctatagtgttaaaaagcccagcaattcatcctgttacagtagcaaagcaagacttttactgtattgtagattttgattttattaatggacaattgccatgggaagaatatatatctcctcaaattgcagccacttggtaccccaaagctagattccaaacaacaactattaactcaatagtagaaacaggcccctttgtacccaaatactcacaaatagcagacagcacatggcaattaatatataaatataacttttattttaaatggggtggtccacaggcaccagatgagccagttgatgatcccaaaggcaaacatcactggcctgaacccgatacaatgcatgaaacaatacaaattggagaccctaaaaaacaaacagcccaaagtatcctacaccagtgggactttagaagggatatcattacaccaagagctcttaaaagaatgcaagaaaacctccaaactgatacatctttccaatctgatgaatcagaaccaccaaaaaagaaaaagaaaacaaccaaagaaatgccatacaagccactgcaagaaagcaaaatacacaaatgtctcctctcactctgcgaagaaagtacctgccaagaaacaccactcaacttccagcagctcatcgagcaccagcaccagcagcaaagacacctcaagcaaaacctcatccagctcctcactcacctgaaaaaacagcaaagatatttgagcctacaaacaggtcacctagagtaaaaagatttaaacctggttttgaaactgaaacagaatatcagcttgctattgcttttaaaagaccccctagaacctatgctacagaccctcctttttacccctggctacctataacccccaaagtacaatttaaccttaattactcctgctaggccaacaatgtacacttagtaaagcatgtttaataaagtttacacccaaaacaaatgtataaaaaaaaaaaaaaaaaaaa

SEQ ID NO: 4880 - protein, 664 aa, Gammatorquevirus sp.
MPFWWRRRRKPWYGRWRYRYNRRYKKRRRPYRRRRPRKPTRRRRRRRRKVRRKKIQKITLKQWQPESIHKCKITGFSTLVLGAEGTQYLCWTNELKEYTQPKAPGGGGFGSELISLEWLYDQWRAHNCIWTKSNKNKDLVRYTGGSITLFRHPTTDFVFSYSLSPPFELTKFTYPDMQVQNMLLRPHKRVVLSLLSKPFGKRKIKIKFKPPKLMSTKWFFQSEFADKGLVLFQATAANFRYPSIGPKAQNQMVTLYYIDPGLYNHPSWAAASTQAWKPLGTTTTWKFYTKSKAGGKDIITTMPPSNPIEPYTNLYQMSISREYGWWSKQVLNAYKFERGSEVVANRPIYLARYNPNEDSGDGNLVYAVSLLQSKWTPPAYQTDLAIAGQPLWMALHGLYSFFKYTLKDKAFDEHYAIVLKSPAIHPVTVAKQDFYCIVDFDFINGQLPWEEYISPQIAATWYPKARFQTTTINSIVETGPFVPKYSQIADSTWQLIYKYNFYFKWGGPQAPDEPVDDPKGKHHWPEPDTMHETIQIGDPKKQTAQSILHQWDFRRDIITPRALKRMQENLQTDTSFQSDESEPPKKKKKTTKEMPYKPLQESKIHKCLLSLCEESTCQETPLNFQQLIEHQHQQQRHLKQNLIQLLTHLKKQQRYLSLQTGHLE

SEQ ID NO: 4881 - protein, 126 aa, Gammatorquevirus sp.; identical to SEQ ID NO: 4688

SEQ ID NO: 4882 - protein, 109 aa, Gammatorquevirus sp.; identical to SEQ ID NO: 4689

SEQ ID NO: 4883 - DNA, 2523 bp, Gammatorquevirus sp.
aacccccaaaaaaaaaaaaaaaaaaaaaaaatctaggggcaattcgggctagggcagtctagcggaacgggcaagaaacttaaaatatactttatgttacagatgtccaagattcaagcaaaagacttctttactccaacaccctacaatcaggacacgaaaaatcaaatttggatgtctcaaattgctgattctcacgacaatatctgcagttgtaaccatccctttgctcatctcattgccaatatctttcctgtgggtcacaaagatcgtgatctcacaattaataaaattcttttaagagattacagagaaaaatgcctttctggtggaaccgcagacgcaagccatggtatggcagatggaggtaccgccgcaacaagtactacaggcgcagaaaaaggcccagaagaagaagaatacccaggagaagaaatagacgcattactcgccgccgccatagaagaaggggcaaggtaagaagaaaacttagaaaaattcatatacaacaatggcaaccagatagaattagaaaatgtaaaattaaaggattttcttgccttgtactcggtagtgaaggcagacaaatgtactgttatacaaatgaagctagtgaatacctacaacctaaagcaccaggaggtggagggtttggaactgaagtatttaccttaaaatggctatacacacaatggctagcacataacaatatttggactgccagtaatgaaaacacagacttatgcagatacacaggaacaaaaatagtactgtacagacaccctactgtagactttattgttagttatgatagaatgcctccttatagcataaacaaatttacctatgctgaactacaaccacaaaacatgttactgcatagacacaaaaaaattattttaagtagaagaactaaccccagaggtaaaataaaacatataataaaaataggacctcccaaacaaatgataactaaatggttttttcaaagagactttgctgcagcacatttgtttagaatatctgccactgcatgctcatttgaatatcctagatatggaaaaggtaatgcaagcaatatattaacagtaccagcacttagcacattcttttttgcaaacagcgactgggcccaaacaagagatggaccctacttaaacatacacacagcaccaactcattactactataaatacaaagatgctagaggcaatatacaaaatggcgtatacacaaaaagtacaaaactaaataaacagggttactatgaatccatagactatacctctggcatatttacttccaatttactacaagccttttcaattagcagtgttagtgcaacagaaccttcacaagcagaacttccaattatttatttaagatataatccacatgaagacgatggccatggaaatgaagtttatttaacttcagtatttaatggaaattacaacaaaccaggaagcacagccccagatcttcaatttaacaatgtaccactatggatggcattctggggttactacaattacttactaattagtactgctaacaaaggcatatacttaacacacatgtttgtagtgaaaagtcctgcactacgccctctatcacaagctacttctcaaagccactacccaatattagacatggactttgttctaggtaaactcccatggggagaatacctagataaaaaccaaaagaaactatggtatccaacagcagaaaaacaaacacaaataataaaccaaattgttagtactggcccatatgtacctaaactaaataaccaaccagacagcacatgggaactaccttataaatatatttcttatttcaagtggggaggaccacaagtacaagaccccaatgttgaagacccaacaagcagaaacaaatacaatgttcccgatacagtccaacaatcagtacaaatctctgacccgtcaaagcttcacccagaaaccatattccatgactgggactacagaaggggtattattacacaaacagctattaaaagaatgtcagaaaacctcgaaattgattcaattgtctcatctgatgactcagactcgccaccaaagaaaagaaaagtcaccaaagagctaccctgtatcaaccaaaaggagaaaaaaatcaaagaatgtctcctctcgctctgcgaagagcctacctgccaagaaaccccacaaacacttcagcagcacatcgagcagcagcagcagcagcagcacaagctcagaaaaaacctcctctacctcttaaccagcctgaagaaaactcagagacacatggagctacaaacaggcatattagactaacaagatttaaacctggcttcgaagaacaaacagaaaaagaactagcagcaattttcaaaagaccacctagaacatacaaagaagaccctcccttctacccctggctacccatagaacccaaagttaactttaacctcaattacaatttctaggccaacaatgtacacttagtaaaacatgtttaataaagttt

SEQ ID NO: 4884 - protein, 670 aa, Gammatorquevirus sp.; identical to SEQ ID NO: 4621

SEQ ID NO: 4885 - protein, 128 aa, Gammatorquevirus sp.; identical to SEQ ID NO: 4622

SEQ ID NO: 4886 - protein, 120 aa, Gammatorquevirus sp.; identical to SEQ ID NO: 4623

SEQ ID NO: 4887 - DNA, 2523 bp, Gammatorquevirus sp.
aaattgtaaaaataaaaaaaaaaaaaaaaagtctaggggcaattcgggctagggcagtctagcggaacgggcaagaaacttaaaacaatactttattttacagatgggagatcacttttacagaagaactccctataacaaagaaactcaagaacaaatttggtccactatttttactgattctcatgatgccttctgtggctgctgtcaaccattagctcacctgctaacccaccttattccacctgatcacaaatttagacattggactgttgaccaaattattcaaagagaactactacaaaacaaatgcctttttggtggggcagaagaagccgctggtggtatggcagacgccgccgcaggcccttcagaaaatataaaagaagaagaccaaaaagaagagtttacagacgtacaaatagaagagcttatcgccgccgcagacgccgtggaagaaaggtaagaagaaaaagaaaaaagatacatatacaacaatggcaacctgctactattagaaaatgtaaaattaagggatggacagttaactgcttgggagggcatggtagacaatttgcttgctactcagacaatagatttaattggacaccaccaacaacacctggagggggaggctttggctgtgaaaaatacacacttggctacttatttgatgaatacttaagaggcaacaacatatggacaactagtaacctatacttagatttagctagatacactggctgtaaatttatattttacagacatccaactttagactttatagtatactacaaaagatcttatcccatgaatttagacaaagccacatatgctaactgttatccatatattttattaaaaaaaaaacacaaaagaattatacattcacttaaaagacatccaaaaggcaaaccatatgtaaaaattaaaattaaaccaccacaacaaatgtccactaaatggttttttcaagaatcaatagcagacacaggactagtagaaatacatacatctgtagcagatctttcatactcatatattggctgctgcaacacaaaccaattagtaagctttcctatattaaacagacaattttataccctaacaggttggggaaatgcatcaaatataactacatttggctggtatatgcctagagccactatgccaaaacagtttgaatggaaaggcacagatgtatttttaaaaccacaacaaggacagttaacagtaccatctgaaacaggaggaaaacaatacatgtacaccattaactataaaactggatggtttcaaccaaacttaatttcctgctttaaatttactgaaccctcctcacaacaagtagccccagtaaaaatttgcagatacaaccctacaagagacactggagaaggtaacaaagtatggcttttgtcaactcttaacacaagctatgaaccaccaaaaacagacaaagaactaataatagaaggtgagcccttatacatattattaaatggctttactgactatgtacaaaaacacaaaaaagatccaacttttttacagtcatactacattgtaatacaaagtaactttatagaaccacacacaggtcttgacaactaccatgtacccattgactggaactttttaaaaggtaaagggccatatggagaaactccaacacaaagaatgctagaaaaatggttccccagattagaatttcaacaagaagttataaacagtatagttaccagtggtccatttgtacctaaattagacaatcaaaaaaacagtacttgggaacttcacagtcaatatacattttactttaagtggggtggagccgagctgccagaccaagaaactgcaaatcctagaacccaaggacagtatgaagtacccgataaaatccagcaggcaatacaaatcgctgatccgcaactacaaaaagcagccaaaaacctccacagctgggactttagaagatcaatccttacaaagtcagctcataaaagaattctcgaagactcagaaactgattcaattgtctcaacagattcacaagaagaaattgccaagaaaaagcaaaagctacaaggaaacagcctacaaattgccagtcaccaagaagaagaagtccagagctctctcctctcactcttcgaagaagattcatcgcaagagccacaagaatcaaacatcaagcagctcatcaagcagcaaaagtacaagcagcagcagctcaagcacaacctcctcacaatcatagcagacttgaaaagaaaacagaaaatgatacaactacaaacaggatttctagactaactccatttaaagatggatttgaaaaagaaactgaataccagttagcacaagcatttaaaagaccccctagactttttaaagaagacacacccttctacccttggctacccagacctgtaccccttgttcaatttaaacttaactttaaaggctaggcctacaactttcacttagtggagtatgtttatataagtcacacccccaaaa

SEQ ID NO: 4888 - protein, 668 aa, Gammatorquevirus sp.
MPFWWGRRSRWWYGRRRRRPFRKYKRRRPKRRVYRRTNRRAYRRRRRRGRKVRRKRKKIHIQQWQPATIRKCKIKGWTVNCLGGHGRQFACYSDNRFNWTPPTTPGGGGFGCEKYTLGYLFDEYLRGNNIWTTSNLYLDLARYTGCKFIFYRHPTLDFIVYYKRSYPMNLDKATYANCYPYILLKKKHKRIIHSLKRHPKGKPYVKIKIKPPQQMSTKWFFQESIADTGLVEIHTSVADLSYSYIGCCNTNQLVSFPILNRQFYTLTGWGNASNITTFGWYMPRATMPKQFEWKGTDVFLKPQQGQLTVPSETGGKQYMYTINYKTGWFQPNLISCFKFTEPSSQQVAPVKICRYNPTRDTGEGNKVWLLSTLNTSYEPPKTDKELIIEGEPLYILLNGFTDYVQKHKKDPTFLQSYYIVIQSNFIEPHTGLDNYHVPIDWNFLKGKGPYGETPTQRMLEKWFPRLEFQQEVINSIVTSGPFVPKLDNQKNSTWELHSQYTFYFKWGGAELPDQETANPRTQGQYEVPDKIQQAIQIADPQLQKAAKNLHSWDFRRSILTKSAHKRILEDSETDSIVSTDSQEEIAKKKQKLQGNSLQIASHQEEEVQSSLLSLFEEDSSQEPQESNIKQLIKQQKYKQQQLKHNLLTIIADLKRKQKMIQLQTGFLD

SEQ ID NO: 4889 - protein, 120 aa, Gammatorquevirus sp.; identical to SEQ ID NO: 2922

SEQ ID NO: 4890 - DNA, 2522 bp, Betatorquevirus sp.
ccccctttgaaggtgagtgaaaccaccgaaatcaaggggcaattcgggctaattcagtctagcggaccgggcaagattcttaaatatatttattttacagatgagtaaattccaaaaaccaactttatacaatggacgaggattagacaaccaatggattaatataatttacaactctcacgatctctgctgtggctgcaacaaagttcaagaccaccttctagatatactaaaaataaaaccatgccaccatactacagaaaaagattctaccgccgcaactactggaactggagaaacagaagaaatgcctttcgacgcaaaagatttagaagctttattcgccgaaaaccaagacgacgaagggtaagaagaaaattttattctaaaaactttaaaagaaaacttaaaagactaaatgtagtacaatggcaaccagcatacataaagaaatgtaatataagaggctggttagaattatttgaagcaggacatggacgttttggtaacaattttatatattacaaagagacatttacaccacataacacacccggaggaggtggatggagtttacaagaactaactttatcaaacctatttgtacaaaaccaacaatttatgaactactggtctaagactaacaatggactaaacttagtaagatacttaggaggaaaaattacattatacagacaaccagaaacagactatatatttatgtactacactgaagaagcaattcatgcaggaaaatattggtttccatcatttcacccaataaaaatgttagtagctaaaaacaaaatcgtagtaccaagctttaaaacacaaccactaaaaagaaaagcatacaaaactttaaaaattagaccaccaaaactcttaaaatcaaactggtactttcaacaacatgtttgtacatatccactactcagatttgcagtaacagcagtagacttaaattacatgtttctatcaccacgctcaaataacagcaacatcacattacacatgctaaacactggtttatttaaaagacataatttccaatacgcagaccctacaaaaggatactttccaaaacaaaacacatacctctacggtacatttaacggtacaccaacactatcacaagtaaagagaaaagaaaccacatacttaggtggtcaagaaaactttgaaggcacacctattacagaaacatcaaaagctacacaaaaaaaatactggggaaacgtattttttcacaaatatttcaactttatacaaagatcctttttatcaagcgaggacccacaaacattttatagtttagcaaacataaatacaacagtgggaagcgcagcacaagcaaaggaagaaccatactttttagacgttagatataacccttacaaagacacaggcacaggaaatatagcatactggctacaagtttcagatgccacacgaggagacagttgggaaccatacccagaccctgactaccaaatatcaggttacccattttggcttatgttatggggatgggcagattacacaaaaaaactaggaaaggctaaaaatttagacaacgattgggttttatgcctaaaatcaaacaaattcagttcaccattattcccatatgtaccactctcagacagctttgtacatggtcaagcaccatgggacaatgatgcagatgagattttaccaaacgacacaaaccactggtttccaaaatggaaatttcaagaagaagcaataaacaatatactaacatcaggaccaggggtatgcaaagcacctaatacagtttccatacaagctgtactaaaatacaatctttcttttaagtggggcggaaacagctcaaaactggaaaccatcacagatccattggcacaacccattacccccagtcccaataaccagcacctatcagatgaaattactaacccagaacaaagcatccaaaatctcctctacaaatgggacattagacgagacacacttacacaagcagctgaaaaacgaattaaagaaatcgaaactgatgacagaaatttgttcacagatggaatacaaactcaagaagaaacaacatcacaaaagaaagagacccagaaagaagagaagcaagcactactcctccagctccagcaactccagcaattcaaccaagagctgcagcagcgattcctcagactcaaacaactaacaatggaactataaactttacattaattaaaaaggcttatctgtttacgccaccaaaaaccaaactcacacccataagggggagggactgggaagatgaaaaatttttatgtaaatggatgcatagacctatgcgcaaatatttagaagacaccccatactatccttggtgtgtacctgaaccaaaggtaaactttaatcttgtaaaaggatttaataaaggccagcattaattcacttaacaagtctgtttattaaagaaaacttatataaaccaacaccgcctcccaaatacgcaggcgcagaagggggctccg

SEQ ID NO: 4891 - protein, 677 aa, Betatorquevirus sp.; identical to SEQ ID NO: 4768

SEQ ID NO: 4892 - protein, 89 aa, Betatorquevirus sp.; identical to SEQ ID NO: 4769

SEQ ID NO: 4893 - protein, 63 aa, Betatorquevirus sp.; identical to SEQ ID NO: 4770

SEQ ID NO: 4894 - DNA, 2522 bp, Gammatorquevirus sp.
cctaaacaaaataaaaaaaaaaaaaaaaaagtctaggggcaactcgggctagggcagtctagcggaatgggcaagaaacttaaaaaagtttattattttaaaaacagatgcagaatatcagctcacaagacttctaccaagaaactcattttaatcccgagactaagactcaaatatggatgtctcaacttgctgattctcatgataatatctgcaactgctatcatccatttgctcaccttcttgctaccatatttcctcctggtcacacagaccgtgatcttaccattaatcaaatacttagtagagattacacagaaaaatgcctttctggtggagtagaagaaaaaagccatggttcgggagatggagataccgcaggcgccgctggaacctcaggagaaaaaagaaaagaagaagaagactacccagaagaagaactagacgctatactcgccgccgctatgcaagaaaacgcaaggtaagaagaaagcttaaaaaaattaagatacagcaatggcaacctgactctattagaaaatgtaaaattaaaggctactcatgcctaatactaggaggtgaaggaactcaaatgttttgctatacaaatacagccagtgactatccacaaccaaaagccccaggtggcggaggctttggctatgaagttataaccttaaaatggctgtaccaagagtttttaaaacataataatatctggactcgctctaatgaatacacagacttggttagatatactggaggtagaataactttctttgctcatccatacattgactttattatagcatatgacctacaacctccatttaacataaacaagtggtcatacccagaaattcagccacaaaacttactgctaagaaaacataaaagaatattacttagcagacaaagcaatccaagaggaagacacaaagtaacaattaaatttcatcctccaaaacaaatgacaactaaatggtttttccaaaaagacttttgcccctatggattaataaaactaacagcagctgcagcagacttttcatacccaattatagcacctaaagctcaaagtactatactaacaatatatgcattaaacacaaacttttatcaaaatagtgactgggcacatgtaaaaacaacagaaccttacatgaacatttcaacccaaaaactacccctttactttacatacaaagaaaaaggtgcagacaaagtctttaagtaccttccaacagacaacccaaccaaatactattattctgtttcatgggagaatggattatttaatcccaaagtactgctagcatataaaatatcaactgatgaacgaggcactgagataatagcaggtacacctataataccattaagatataacccacaagaagatgatggttttggaaatgaagtatatctttccagcatactaaatggcagatataacaaaccatcatacacaactgattatcaatttaacaatgtaccattgtacatagcattctatggctactataactatttaaaaatatacagtaaagataaaaacataatgaagtcttacatatttgtagttaaaagtaaagcaattaaacctatatctcagacaacagcacaaacatattatcccatactagacagtgactttgtttttggcaaactaccatgggatgaatacatgtctacagaggcaaaaaaactatggtatcctactgcagaaaaacaagaaggtataataaatagcatagtagaatctggcccatttgtaccaaagctaagcaacatgacatatagtacatggtctctaatgtacaattataaatttttttttaagtggggtggaccacatgtcacagatccaaaagttgaagacccttgcaccagaaacaaataccctgtacccgatacaatgcaacagggagtacagattgtcaacccagaaaaaaataaagttgaatccttactacatgactgggactttagaagggggttcgttacaaacacagctcttaaaagaatgtcagaaaacctcccatctgaaacatctctctcatctgatgattcagaatcacctgcaaagaagagaaagatctcaaaagaagtcccatgccagcaagaaagcaaagagaaaatccaagcttgtctcctctcactctgcgaaaaagatacctgccaagaaacaccacaaaacctccagcagctcatccagcagcagcagcaacagcagcagcaactcaaaagaaacatactcaagctcctcacacacctgaaaaaaggccaaagatgtgtggaactacaaacaggccttttagagtagaaccatttaaaccaggctttgaacaacaaacagaaatggaacttgcagcagctttttgcagacctccaagaaaatataaaaatgacccccctttttacccctggttaccaattaccccaaaagtagtgtttaacctaaacttcaaaggctaggccaacactgtacacttagtggagtttgtttaataaagtttgct

SEQ ID NO: 4895 - protein, 667 aa, Gammatorquevirus sp.; identical to SEQ ID NO: 4691

SEQ ID NO: 4896 - protein, 125 aa, Gammatorquevirus sp.; identical to SEQ ID NO: 4692

SEQ ID NO: 4897 - protein, 120 aa, Gammatorquevirus sp.; identical to SEQ ID NO: 4693

SEQ ID NO: 4898 - DNA, 2521 bp, Gammatorquevirus sp.
aaaaattgcaaaaattcggcgctcgcgcgcgtctaggggcaactcgggctagggcagtctagcggaacgggcaagaaacttaaaatatacttttgttttagatgtctagattctacaaaagaacatcatacaatggatgcacactcaatcaaatgtggatgtcaatgatagctgatgctcatgatattcactgtgattgtaaagctccatttgctcatctacttgacaacattttcccggaaggtcatacagacagaaaccaacctgtaagctacataatagaaagagatttaaaacaatgccattctggtggagacgaagacgaaagccatggtataaaacttggagaaagcgccgcaacttcaggtacagaaaaaataaaagaagaagaccttacactcgcagaagaagaagagctagaaaaactactcgccgccgtagaagaagaacctacaaggtaagaaagaaaaaaagaactcttaccttgaaacaatggcaaccagacagaattagaaaatgtactattaagggcagaggaactctagtaatgggagctcatggcagacaaatgatttgttatacaaatgttaaagacagactaactcccagtagagcaccgggtggaggtggttttggagtagaaagaattaacctacaatacttatatcaagaatggaaggccagaaataatatatggacctctaccaatcaattaacagacctaggaagatacctaggaggtaaaatcactttttatagacacccagacacagactttatagttaactaccaaagacaaggaccatttaatatagaaaaaacatcctacatgtccatgcaaccacaagaaatgttacttgctaaacacaaaagattagtactatcaaaactaactaatcccacaggaaagttaaaaacaaccattaaatttggccctcctaaactattaaccaataaatggatttttcaaaatgaactagctaaacaagacttaatacaaataagtgctactgcttgtaactttagatatcccactttgggctgctgtaatgaaaacagaatactaaacttatatgcattagacacacaattttatcaagatccacactggatgcaagctcacacagctgcccacccatggaaaccataccctacactgccagagaccacaatgaaattttattataaaacacaatcaggatcagaacaatcatttactataaccacagacacaaccaaatggctaacattagaccaagggtggtttcaaccaaaaatattagcaagctttaaaattaccaacaatggctcaccaacagcattactaccaatggtactgcttaggtataatccagcacaagatacagggcctggtaatatagtaaccattgtagatttagtatctggaagatgggaaggcccatatacagatacatacactattagagatgttcctctatggatggccttaaatggataccctagctatgttacatctaaatcaggtgacaaaggcatactaaaacacagcatagtgtgtgttaaatcagatgctctatacagactacctacagcaagcacacaaaaattatttccattagtaggacaaaagtttgtgctaggcaaaccaccatatgaccagccattaacagttgaaatgcaagacaaatggtatccaacatatgaacaccaacaagaacctttaaatgacattgtctgttgtggaccactagttccaaaattttataatcaaacaaacagtacatgggaattacaatatttctatcgtttttactttaagtggggaggtccagaaattggagacccaccagtggatgatcccaaaaccaaaggccactactccacagaatatacagagcaaagagcaatacaggtatccaacccatcaaaaaataaaactgaatcctttttacacccctgggacatcagaaggggccttattacaaaaagagcttttgaaagaatgtgccaaaacatcgagactgatacagatttctacccagatgcagaatcaccaaaaaagaaaaagaaagtctcctgtgccctcagaaacccagaagaagagatcaaagaagtacaggactgcctcctctcactctgccaaacagaagcatcggaagaagaggaccagacagacctcaagcagctcatcctcaagcaaaagctccagcagcagcagctcaagcacaacatcctagtccttttaacagacctcaaaaccaagcaaaactctttgagactacaaacaggcaatttagagtagaaccttttaaaccaggatttgaaactgaaacagaaacagaattagctattatatttcacagacctccaagaacatacaaaaatgaccccccattttacccctggctaccccctacacctcttgtaaactttaaccttaattacaaatgctaggccaacactgtacacttagtaaagcatgtttaataaagtttgcaccccaaaaaaattgtaaaaataaaaaaaaaaaaaaaaaata

SEQ ID NO: 4899 - protein, 661 aa, Gammatorquevirus sp.
MPFWWRRRRKPWYKTWRKRRNFRYRKNKRRRPYTRRRRRARKTTRRRRRRTYKVRKKKRTLTLKQWQPDRIRKCTIKGRGTLVMGAHGRQMICYTNVKDRLTPSRAPGGGGFGVERINLQYLYQEWKARNNIWTSTNQLTDLGRYLGGKITFYRHPDTDFIVNYQRQGPFNIEKTSYMSMQPQEMLLAKHKRLVLSKLTNPTGKLKTTIKFGPPKLLTNKWIFQNELAKQDLIQISATACNFRYPTLGCCNENRILNLYALDTQFYQDPHWMQAHTAAHPWKPYPTLPETTMKFYYKTQSGSEQSFTITTDTTKWLTLDQGWFQPKILASFKITNNGSPTALLPMVLLRYNPAQDTGPGNIVTIVDLVSGRWEGPYTDTYTIRDVPLWMALNGYPSYVTSKSGDKGILKHSIVCVKSDALYRLPTASTQKLFPLVGQKFVLGKPPYDQPLTVEMQDKWYPTYEHQQEPLNDIVCCGPLVPKFYNQTNSTWELQYFYRFYFKWGGPEIGDPPVDDPKTKGHYSTEYTEQRAIQVSNPSKNKTESFLHPWDIRRGLITKRAFERMCQNIETDTDFYPDAESPKKKKKVSCALRNPEEEIKEVQDCLLSLCQTEASEEEDQTDLKQLILKQKLQQQQLKHNILVLLTDLKTKQNSLRLQTGNLE

SEQ ID NO: 4900 - protein, 119 aa, Gammatorquevirus sp.
MSRFYKRTSYNGCTLNQMWMSMIADAHDIHCDCKAPFAHLLDNIFPEGHTDRNQPVSYIIERDLKQCHSGGDEDESHGIKLGESAATSGTEKIKEEDLTLAEEEELEKLLAAVEEEPTR

SEQ ID NO: 4901 - protein, 125 aa, Gammatorquevirus sp.
LCPQKPRRRDQRSTGLPPLTLPNRSIGRRGPDRPQAAHPQAKAPAAAAQAQHPSPFNRPQNQAKLFETTNRQFRVEPFKPGFETETETELAIIFHRPPRTYKNDPPFYPWLPPTPLVNFNLNYKC

SEQ ID NO: 4902 - DNA, 2521 bp, Betatorquevirus sp.
caggcgctgaaggtgagtgaaaccaccgaaatcaaggggcaattcgggctaattcagtctggagtaacgggcaagattcttaaaataattctcttttacagatgagcaaatttcttgtaccaccaatttacaatggaagaggccttgaaaatcaatggctaaacaacactgttcaggcccacgactgcatttgtggctgcaacaaaccttttgaacatcttcaatacctaattaaccaacaaaaatgcgaccattctaccgccgacgatacttctacaaaagaaattactggaattacccctacaaacgaagatattttagacgacgtagacctagaaaaactcttcgcacaagaaacagaagaaaaaactgggtaagaaaaaaattctattttaaaaacttgaaaaagaaactgaaaaaaattaaactaactgaatggcaaccatcttacataaaaaaatgtagaataaaaggatacttgcttctctttgaagctggacatggaatgtttgcaaacaacttttgtagctataaagaaagttatactcctgaaaaaactccaggaggaggaggatggagcattcaacaactatctttaggcaatttatttgttcagaactcatatttaatgaacaaatggactagatctaatatttccttaaatatgtgtagatattttggtgttagtataacattgtacagacaaccaactgttgactatatatttatgtactatagagaagagccaaaaaaggcgggaaaatattggtacccctcatttcacccaatacaactaattttagaaaaaaacaggataatagtacctagtatgcaaactaaaccacttaaaagaaaaaactacaaaaaaatttggatacatccaccaaaattatttaaatcagaatggtattttcaacaacatatatcaaactatccactagtatactttgtagcaactgcttgtagcctacaacatatgtttttaagctccaaatctgccaacagtaatgtaacagtgccaactttaaatacaaacttttggaaaaaaccagcatttcaatacactgctggagacgaaggatattttccaaaagaaggtgtatatatatacggacttagaaatggcacaataggtgatctaaaagacgaatataaaaaaaatgtaatatacctgggtgacacccactataatttcccaggaaatccaataggaataaaaaaatttacagattacaaaaaagaacaatggggaaacccattttactttgaatatttaaatttaatcagaacagtatttttaactaactccccaaaaacatttttagaaaatgtacaaacaactgaaaaaattggggacactgctataaaaaagcaagaacccatgctatactatgccagatataacccttacaaagataaaggagacggcaacatggcatactggctatctgtttcagatgtaacaaaaaataactgggatcccccatcagatgaggacctaataatttctggataccctttttggctcatgctctggggatgggaagactacactaaaaaactaggaaaaatatcacaaatagatgacaactatatattagtacttagatctaaatatttatctgaaggcttaccagcttatgtaccactcaatgaatcctttataaatggtagagcaacatgggacagagagacagaatatataagcacatatgatcaaagaaactggtttccaaaatggaaatttcaaaaagaagccataaacaatatacttatgtcaggacctggtgtatgtaaagctgaaaacacgcaatcaatacaggctttcttacaatataacttttattttaagtggggaggagacccagcaaccatggaaaaaattgcagaccccaacagccagcctaccacagccatacccagtgaattcaacctacaaaatgaaattattgacccacaaaccagccttgaaaactacatctacaagtgggatgttagaagggacattcttacacaagcagctcaacaaagaatatcagaaagcccaactaatgactactctatgttcacagatggaatccaaactacaacagacgtcccactccaaaaggcaccacaaaagaaaaagaccaaggaaacacaagaagaaacattactcctcaacatcgagcagctccagcaatacaaccaacaactccaacagcgactcaagcgactaaagaatttaatggaacaataacttttaatctaataaaacgagcatatttgtttgaacccccaaaaacaaaactaacaccaatcagagggcgggattgggaagatgagttatatctcgctcgccactttaaaagaccaatgagaaaatacttagaagacaaaccatattacccatggtgtgtacctgaacccattgtcaattttgaccttgtaaaaaacttcaataaaggccagcattaattcacttaacaagcctgtttattataattaaactttaataaaccaacaccgtctccctaatacg

SEQ ID NO: 4903 - protein, 664 aa, Betatorquevirus sp.
MRPFYRRRYFYKRNYWNYPYKRRYFRRRRPRKTLRTRNRRKNWVRKKFYFKNLKKKLKKIKLTEWQPSYIKKCRIKGYLLLFEAGHGMFANNFCSYKESYTPEKTPGGGGWSIQQLSLGNLFVQNSYLMNKWTRSNISLNMCRYFGVSITLYRQPTVDYIFMYYREEPKKAGKYWYPSFHPIQLILEKNRIIVPSMQTKPLKRKNYKKIWIHPPKLFKSEWYFQQHISNYPLVYFVATACSLQHMFLSSKSANSNVTVPTLNTNFWKKPAFQYTAGDEGYFPKEGVYIYGLRNGTIGDLKDEYKKNVIYLGDTHYNFPGNPIGIKKFTDYKKEQWGNPFYFEYLNLIRTVFLTNSPKTFLENVQTTEKIGDTAIKKQEPMLYYARYNPYKDKGDGNMAYWLSVSDVTKNNWDPPSDEDLIISGYPFWLMLWGWEDYTKKLGKISQIDDNYILVLRSKYLSEGLPAYVPLNESFINGRATWDRETEYISTYDQRNWFPKWKFQKEAINNILMSGPGVCKAENTQSIQAFLQYNFYFKWGGDPATMEKIADPNSQPTTAIPSEFNLQNEIIDPQTSLENYIYKWDVRRDILTQAAQQRISESPTNDYSMFTDGIQTTTDVPLQKAPQKKKTKETQEETLLLNIEQLQQYNQQLQQRLKRLKNLMEQ

SEQ ID NO: 4904 - protein, 91 aa, Betatorquevirus sp.; identical to SEQ ID NO: 4606

SEQ ID NO: 4905 - protein, 63 aa, Betatorquevirus sp.; identical to SEQ ID NO: 4607

SEQ ID NO: 4906 - DNA, 2521 bp, Betatorquevirus sp.
cgggagccgaaggtgagtgaaaccaccgtagtctaggggcaattcgggctagatcagtctggcggaacgggcaagaaacttaaaatattgttttttacagatgagcagttactacaaaccaacaatatacaacaaaaattccattaaccatgcatggattggtgtaatttacggatctcacgacctgttctgctcctgtgaaaacccaattaagcacttaaacgatataattgaaaaccaaaaatgccacccttctaccgcaaaagattctaccgcagaaactactggaactggaaaagaagacgaaattggtatcgacgaaggagatttacaaaagcttttcgaagaaagcgacgacatagaagggtaagaaagactcattttcctaaattctttaaaaagaaactaaaaacattaactgtaagacaatggcaacctagctacataagaaagtcaactataaagggatttttacttttatttgaagcgggacatggacgctttggaaataactttgtaccttataaagaaagcttttttcagcataatgaacccggagggggaggatggggattacaagaactgtcattatcaaacttatttacacaaaaccaatactttatgaatatatggactactagcaattcaggactaaaccttgtaagatatcaaggctgtagaattacactatatagacagccagaaacagactatatatttacatattttacagaagaggctataaatgcaggaaaatactggtacccttcatttcatcctattaaaatgataacatacaaaaacaaagtagcagtacccagctaccaaacacagcctaacaaaagaaaaccatacaaaagaatacgcataaccccaccaaaactcataagaaacaactggtattttcaacaacatatatccacctttccattaattagatttgcagcaacagcagtaagcttcaaccacatgtttcttagctccaaatccaacaacagcaacataacattacacgtcttaaacacaagattttttcaacacagtgcattccaatatgcagaccctaaatttggatatgttcctaaacaaggaacatacatttatgcacttgaaaacggaaacccagacatttctaaaatacccagaaaatctgtaatagtattaggctcacaatactacgatgaaggtgaaccacttgcagaagcttgggataaagaaaaatctaaaaaaaaatggggtaacatttttatgtataaatacctacaacatatacaaacaacatttataacatccgagtcccctgaagtatttctaagtacattaaaaataaatcaagtaataggacaagttacaacaaaacaagaaccatattaccaagacatcagatataacccatatagagacaaaggagacggcaacttagcatattggaaatccatatcagatgccacaaaaaataactgggacccaccagatgacccagatagcaaaatatcaggatacccattttggctaatgttatggggatgggaagactacacaaaaaaattaggaaaactaaaaaacctcgaagaaaactacatactagtattaagatctacttactttaatgaaatattcccagcatacgtaccattaggagacagttttataaatggtcaagccccctatagaaacgatacagaagacataataccctatgatagatcacattggttcccaaaatggaaatttcaaaaggaagctatagataatatactaatgacaggaccaggcacatgtaaagctgagaatgttcaaagcatacaggcatttatgaaatatgaatttttctttaagtggggaggcaactcttcaaagctggaaaccatcgcagaccctaacagccaaccaattgggcccgatcccaataaccagctcatatcaaatgaaattattgacccaaaaacgagcatcgaaaacctcctctacaaatgggacattagacgctctcaacttacacaggcagctacagaaagaattaaacaatgcgaaacttatgactcaaatctgttcacagatggaatcgaaacttcaaaagaaacctcacaaacaacacaaacggaaacgaccccgaaagaagaaatccaaacactactccagcagctcaaccaactccaacagttcaaccgagaactacaactccgattccaacgactcagacaactaacaacggacatataaactttacattaattaaaaaagcatatctgtttgatcccccaaaaacaaaacttactccaataagagggagggattgggaagatgaattatatttatgtaaatggatgaaaagaccaatgagaaagtatttagaagataaacctatatatccatggtgtgtacctgaaccaattgttaactttgaccttgtaaaaaactttaataaaggccagcattaattcacttaacttccgaatggctgagtttatgccgccagacggagacggaatcacttcagtgacttcaggctgatctcggg

SEQ ID NO: 4907 - protein, 659 aa, Betatorquevirus sp.
MPPFYRKRFYRRNYWNWKRRRNWYRRRRFTKAFRRKRRHRRVRKTHFPKFFKKKLKTLTVRQWQPSYIRKSTIKGFLLLFEAGHGRFGNNFVPYKESFFQHNEPGGGGWGLQELSLSNLFTQNQYFMNIWTTSNSGLNLVRYQGCRITLYRQPETDYIFTYFTEEAINAGKYWYPSFHPIKMITYKNKVAVPSYQTQPNKRKPYKRIRITPPKLIRNNWYFQQHISTFPLIRFAATAVSFNHMFLSSKSNNSNITLHVLNTRFFQHSAFQYADPKFGYVPKQGTYIYALENGNPDISKIPRKSVIVLGSQYYDEGEPLAEAWDKEKSKKKWGNIFMYKYLQHIQTTFITSESPEVFLSTLKINQVIGQVTTKQEPYYQDIRYNPYRDKGDGNLAYWKSISDATKNNWDPPDDPDSKISGYPFWLMLWGWEDYTKKLGKLKNLEENYILVLRSTYFNEIFPAYVPLGDSFINGQAPYRNDTEDIIPYDRSHWFPKWKFQKEAIDNILMTGPGTCKAENVQSIQAFMKYEFFFKWGGNSSKLETIADPNSQPIGPDPNNQLISNEIIDPKTSIENLLYKWDIRRSQLTQAATERIKQCETYDSNLFTDGIETSKETSQTTQTETTPKEEIQTLLQQLNQLQQFNRELQLRFQRLRQLTTDI

SEQ ID NO: 4908 - protein, 103 aa, Betatorquevirus sp.
LAERARNLKYCFLQMSSYYKPTIYNKNSINHAWIGVIYGSHDLFCSCENPIKHLNDIIENQKCHPSTAKDSTAETTGTGKEDEIGIDEGDLQKLFEESDDIEG

SEQ ID NO: 4909 - protein, 63 aa, Betatorquevirus sp.
LFDPPKTKLTPIRGRDWEDELYLCKWMKRPMRKYLEDKPIYPWCVPEPIVNFDLVKNFNKGQH

SEQ ID NO: 4910 - DNA, 2520 bp, Gammatorquevirus sp.
cgggagcccgaggtgagtgaaaccaccgaggtctaggggcaattcgggccagggcagtctagcggaacgggcaagaaacttaaatatatttgttttacagatgtcaagcttctacaagccaacacattacaatggagacacaaaacaacaaatgtggatgtccatgatagcagatggccatgatatgcactgtaactgcaatggtccatttgcacatttactagattgcatttttccagaaggtcacaaagatagaaaacttactattgaagcaataattaacagagacaaacaacaatgcctttctggtggaatagaagacgaaagccatggtttggtcgttggagataccgccgctacaatcgctacaaaagaaaaaggtatccaagaagaagaagacgacctagatatgctactcgccgccgccgccgtcgcagaagaagatacaaggtaagaagaaaaaaacaaaaaattactcttaaacaatggcaaccagacagtattgttaaatgtaaaataataggacttggaactctagtagctggagcagaaggaaaccaatacagatgctatacaaaccaaagagacacttacacacaaccaaaggcaccaggagggggaggatttggagtagaaaaattttctttacaatacctttacaatgaatggctagcacataaaaatgtatggacaaaaacaaatgactataaacaactgtgcagatttacaggagcaaaaataacattttttagacaccctacaacagactttgttatatcatatgacagaacaccaccttttaactttgacaaatttacatacccacaaatacacccacaaaacatgctactatctaaaagacataaagtactgttaagtgcaacatccaatcctagaggcaaacatagcaaaacatttaaaataaagccacctagacaaatgtccacaaaatggttttttcaagaagattttacaatgtatgacttacttaaaattcaagcctctgctttaaatgttaattacagcctatatggtcccaacacacagtcacctaatataacattatactgcctaaatacccaattttaccaaatacaaaactggcaacaagaccatggaaacaacccatatttaccatacacaggctacccaacaagtggtatagtaaaatatttatactataaaaataaaatatccacagaagccatagtacagactaccaattataaagccagtgtaaatatgaatacaggcttttttcaacctggagttttacaagcctataaagttgtaaaatcagatggctcagaatacttttataaacctataactgtttgtagatacaatccagaggaagacacaggtgttggtaacaaagtctggctaacatccacactatcagatcacaaatggcaaccccccagtgacaatgacttaataatggcacaagaacccctatacatatctttttttggcttttgggactacattgtaaaagctaaaaaaacaaaagaatacatgcaaactcacatgtttgttgtacaatgctcagccattaaactacttacccctacatcaacacaaactatttttccatttgtagactattcctttatacaaggcaaaatgccctttgatgaaacacttacacttcaacaacaaaacaactggtaccccacagcagaaaaacaagtacaaacaataaatgctatagtagaatgtggcccctttgtgccaaaatatgccaacttgccaattagtacatggcaactaacctacagatatgttttttattttaagtggggcggatcacaaattaccaacgaccttgtacacaaccccaaagaccaaggcaaataccccgtacccgatacagtccttgaaacagctcaaattgctgacccgctcaaacaatcatacaaagcaatgcttagtgcctgggactacagaaggggctttattacaaactcagctcttaaaagagtttcagaaaacatcccaattgatgaaaatttctcatatgatgaaggagaaacgccaaaaaagaaaaagagagtcacagcagaactccagatacaaagagaagagagcgaagatctccagagctgtctccaggaactctgcaaagaaaataccttccaagaaacagaggacctccaacagctcatctaccagcagcagcagcagcagcttcacctcaaaagaaacctcttcaagctcctcatagatctaaagaagaaacaaaaatactatctactacagacaggccaactctaacaaaatttaaaccaggatttgaattggaaactgagtatcaactagctgaagcctttaaaaggccagtaagactttttaaagaagataaacctttttacccctggttacccaaatacacacccctagttaactttcaccttaactttaaaggctaggccgacactgttcacttagcggtgtttgtttattaaagtttgcaccccaaaaaaattgtaaaataaaaaaaaaaaagctgcccttggg

SEQ ID NO: 4911 - protein, 659 aa, Gammatorquevirus sp.
MPFWWNRRRKPWFGRWRYRRYNRYKRKRYPRRRRRPRYATRRRRRRRRRYKVRRKKQKITLKQWQPDSIVKCKIIGLGTLVAGAEGNQYRCYTNQRDTYTQPKAPGGGGFGVEKFSLQYLYNEWLAHKNVWTKTNDYKQLCRFTGAKITFFRHPTTDFVISYDRTPPFNFDKFTYPQIHPQNMLLSKRHKVLLSATSNPRGKHSKTFKIKPPRQMSTKWFFQEDFTMYDLLKIQASALNVNYSLYGPNTQSPNITLYCLNTQFYQIQNWQQDHGNNPYLPYTGYPTSGIVKYLYYKNKISTEAIVQTTNYKASVNMNTGFFQPGVLQAYKVVKSDGSEYFYKPITVCRYNPEEDTGVGNKVWLTSTLSDHKWQPPSDNDLIMAQEPLYISFFGFWDYIVKAKKTKEYMQTHMFVVQCSAIKLLTPTSTQTIFPFVDYSFIQGKMPFDETLTLQQQNNWYPTAEKQVQTINAIVECGPFVPKYANLPISTWQLTYRYVFYFKWGGSQITNDLVHNPKDQGKYPVPDTVLETAQIADPLKQSYKAMLSAWDYRRGFITNSALKRVSENIPIDENFSYDEGETPKKKKRVTAELQIQREESEDLQSCLQELCKENTFQETEDLQQLIYQQQQQQLHLKRNLFKLLIDLKKKQKYYLLQTGQL

SEQ ID NO: 4912 - protein, 117 aa, Gammatorquevirus sp.; identical to SEQ ID NO: 1209

SEQ ID NO: 4913 - protein, 108 aa, Gammatorquevirus sp.; identical to SEQ ID NO: 1210

SEQ ID NO: 4914 - DNA, 2520 bp, Gammatorquevirus sp.
gtctagcggaacgggcaagaaacttaaaacaatactttattttacagatgcaaaacctgtcagcagcagacttttttaaacctacaccatacaacaaagataccaaaaaccaaatatggatgtccatgattgctgatggtcatgacattatctgcaactgctttaatccttttgctcatttgcttgcttctatttttcctcctggtcatcaagaccgtgaccttaccattaatcaaattattgaaagagactacaaagcacaatgccattctggtggaacagaagacagaagtggtggagaggccgccgcaggcccttctacaaaagaagattccaatataaaagaagaaaaccaagaagacgagtttacagaaagaaacatagaagaacttatcgccgcggcagaaaacgcttcaaaaaggtaagaagaaagaaaaaacaactaacacttaaacaatggcagccagaaagtatcaaaaaatgtaaaattaaaggaactgctataaacgtactaggagtacaaggaactcaatacagatgttatactaacaacaaatatgaatatacaattagtaaagcaccaggaggaggtggttttggagtagaaaaatattcactaggttacttatataaagaacacaaagctggtaataacatctggacaactagcaatgttaacttagaccttgtcagatacttaggtgttatatttaaattttacagacacccacacatagattttataggtacttacagcagaaactacccaatggacttacaaaaatatacttatgcagattcacacccctaccaaatactacagagcaaacacaagtttttaataccaagcatgttaactaaaccaaaaggtaaaaggtatgtaaaagtcaaaattagaccaccaagacaaatggttaacaagtggttttttcaagagtcattttcagacacaggtcttgtacaattacacactgcagcagcagactttagatatccacacttaggctgctgtaatacaaaccaactagcaggattcctacacttaaacacagatatttatcacaatggagcttggggaaatccaaacagtccagtacctactaaacaagataaatggtatgtacccacacctaactttgcacccgttactaaagtaaaaaatgcaaagggtgaggaagtttccataaatacatgcttaacaccttatagcaaaacaataaattacactgaaggctggtttcaaccaaaattcttacaggccatagcaattattcaaccacagcaactgaatggtcctataaaaggagccagatataacccatctttagacacaggtcagggtaccgctgtttggcttacatctgtactaaccaatgaatatggaccaccaaaaactgacctagacttataccttgaaggcttaccattatggcaactactgctaggttttttagactgggtaaaacaaaaaaagaaagatccaacattcttacaaagttactacttatgttttcactgcaatgctgtagaaccaaaaccaggtataaaacaagtttatataccagtagactactcttttataaatggcaaaggtccatatgactctatactaagtgtttgggaccaagaacattggtaccccctacttaaacatcaaattcaaacaataaatgcactagtaagcacaggaccattcatacccaaactagacacacttaaaaactctacatgggaactgtactcagaatacatattttattttaagtttggaggtgcagcattaccagatccagaaaccaaagatccagccacacaaggttcacatgatgtccccgatagactcacaaaaaaaatacaaatccttaacccgcaaaaaaatgttgcagcagcagccttacatagctgggacttcagaagaggggtcattacaagcgcagcttataagagaatgtgcgaaaacgcagaaactgattcagatttcacagcagatgttccaaaaaagaaaaagaaaacatcactcccaggaaacagcctcccaatcatcagcaaggaagcacaagaagtccagagctgtctccactcactctacgaagaaagtacctaccaagaaaccccacaagaaaaaacaatcgagcagctcctcagagaccagcagcagcagcagcagaacatcaagaacaacctccttctcctcatcaacaacctaaagaaaaaacaaaaactactacaactgcaaacgggtgtcctagactaactagatttaaacctggttttgaatgggaaacagaaatgcaactagcaaatgcttttaatagaccacctagactgtttaaagaagacactcctttttacccatggttaccacaaccaacaccccgtgttaactttcaccttaattttaaattctaggcctacaatgtacacttagtagagtatgtttatataagtcacacccccaaaaaaactgtataataaaaaaaaaaaaaaaaaataaaaaattgcaaaaattcggcgctcgcg

SEQ ID NO: 4915 - protein, 663 aa, Gammatorquevirus sp.; identical to SEQ ID NO: 3833

SEQ ID NO: 4916 - protein, 125 aa, Gammatorquevirus sp.; identical to SEQ ID NO: 3834

SEQ ID NO: 4917 - protein, 112 aa, Gammatorquevirus sp.; identical to SEQ ID NO: 3835

SEQ ID NO: 4918 - DNA, 2519 bp, Gammatorquevirus sp.
ggggcaattcgggctagggcagtctagcggaacgggcaagaaacttaaaacaaaactctgttttacagatgatctgcacaaaagacttctacaaaaaaactacatacaaccaagagaccttagaacaactgtggtgttctcaagttggtgattcccatgacagcttctgtggctgtcacaaaccttatgctcaccttttagcctctatttttccaataggtcacgcagacagaaacaagtctataaaccaaatactagctagagactaccaacaagcatgcctttctggtggaagcgccgcagaaagccatggtttggcagatggagatggcgccgccgctacaacaacaaatataaaagaagaaggcgcaggagaagaatacccaggcgcagaaatagaagagctactcgccgccgccgccgaagaagaaaggtaagaagaaaaagacaacagttaccacttaaacaatggcaaccagactctatagtaaaatgtaaaattaaaggacaaggacttatggtattaggtgcagaatgcagacaaatgagatgctatacagatgtaaaaactgaaactgtcagaccaaagactccaagtggtggaggttttggatatgaagtatacacccttaattacctatacagtgaatacaaatatcattataatatttggactaaatctaacttatacaaagaactttgcagatactgtggagttagaattagattttacagacatcaagacatagactttattatacagtatgatacaatgccaccttataacattactaaattttcctacattagctgtcaccccctacaaatgctacaacacagacaacacaaagtattacttagtaaaagatctaaacccaatggaaaactatacaaatctatttttattaaaccaccaaaactaatggacaacaagtggtttattatggacagtttcagtaaacacccactatgtgccattaaagctgtagctgcagactttgcatacagctatcttcaatgctgtaatgaaaatcaacaactaggcatttatacactagacccactattttacatgaatggtaactggggagatgcaagtaaaatatactatccttatgccacaatacctaagccttcaacatttttcataaaatacattaatggaaccacaaaaaaattagtaataaaacctaacaattactattcctctataagctggaacgaaggctattttcaatcagatcttcttaaaacctttaaaatgtacactgatgaaacatatgccactgaatctcaagcagctataccaattaatatggccatttacaaccctaatttagacaagggagaaggtaatcaaatatggttatcttctatacacaatgcatcatactctccaccttcctcagacccccaaacacttattcaaaacatacccctgtggttaggtctgcatggctactttgattacattttaaaagttaaaggtacacatgactttcttgaaactcacatagtatgcttaaaaagcccagctataaaactttacccacaagtaggcagtggaaacataataattccaatagacaaagactttatagatggtctagctttttactcacaaccacctacatacacagacaaaaaaaaatggtaccccacctgcttaacacaacagagaatactaaatgctatagtagaaacaggtccttttgtgcctaaattagcaaataccacaaaaagtacctgggaactaaaatatgactattgcttttactttaaatggggaggacagcaggttacagacccagatgtgcttgacccaagcaaacaaaacttgccagattcagccaatactatccagcaaacagttgaaatcaacaatccagaaaagaacaaggctgaatcctttatataccagtgggactacagaagagggattattaaagaaacagctcttaaaagaatgtatgacaacctctcgactcaaacatctgtccaagcagctacagaaaaagaagagccgccacacaaaaagagaaaattaccaacactcaaaacacaagaaaaaaagaacaaaaagatccacaactgtctccagcaactcttcaaagaaaatacctcccaagaatcagaagtacagaccatacacgagctcatccagcagcagcagcacaagcagcagcaactcaaagaaaacctcctccagctcatcttagaaatgagaaagaaacaacaaatgctacaattgcaaacaggcctgttttactaacaagatttaaaccaggctttgaaacagaaacagaacaacaactagcatgtgcctttaaaaggcctcctagactgtttaaagaagacaccccattttacccctggctaccccaacttgtacccaaagttaactttcaccttaattttaaattctaggcctacactgttcacttagcggtgtatgtttatataagtttgcaccccaaaaaaagtgtaaaacaaaaaaaaaaaaaaaaaaataaaaaatt
